United States Patent Application Publication US 2015/0052636 A1 - sequence listing, part 2

SEQ ID NO: 4027 - DNA, 361 bp, Arabidopsis thaliana
  Intron number 1 from transcript AT3G03670.1 (locus AT3G036 70) derived from phytozome v7.0 (chr-ID Chr3; pos 902809 t o 903169 reverse strand)
cattttcacgactgttttgtccaggtatgaatctcatcaaacatcctcttcaggtttagtatcgttaattagtttttttttttggttaagggggccttaagaatatatcgttacgtttattagaaaagagatgcaatcaaagagaattatgtaagaaattattcaatcgagttaaaaacataataaatacgagcaaaaaaataaataatttctgaaaattgaatattgtcttctttgatttttctcgtcttaacttgaatattattcatttgatatatgtatgtgtaatttttctgaaaacaacaagtcgttgacatttcgtatagggctgcgacgcttctctcctcatagacccaacgac

SEQ ID NO: 4028 - DNA, 1018 bp, Arabidopsis thaliana
  Intron number 2 from transcript AT3G07568.1 (locus AT3G075 68) derived from phytozome v7.0 (chr-ID Chr3; pos 2416471 to 2417488 reverse strand)
agaacccgaatccagctcaggtcagctctttctctacctctctccctccattcgtaactatgatttgattgctagtgagataatctcgttactcttttagataaattaagctattcatatgatctgagttttacagaaagcttttttgtttggttggttacattgatattgttcattgatatttaatcaacttagaattcaagaatttctagagaggtcaagcaagcgtagtaatttcaccactgcctgtataagccacagaatgttgccaatttacttaacaagttttctaaagtttggttggacaaattgcttgagaatttcaataacaaaagcagtttcacaccttctgcttacatgaagttacattggtagtagtagctcatagtgttatgcatcttgaaacgattgtttgttagtgagatgatctcataactctggttgatcaatcaagctatccacgtgatctgaatgtcatagcaagctcttatgtttggtgggttacttctcattgttcattgatttcttcacaattgtttagtctacggagaattcaagaatttctagaggtgttatagtttgctggtactgcttctcatgaaagaacaattagtttcagacattgagatttcaccactgcctatataagccacaaaatgttgcccattaacttgagttttctagagtttggttggacaaattgcttgagactttagagtctctctagtttggtgaatttcaataacaaaagcagtttcacaccttcttaagttacattactagtggtagctcatagtgttgtgtacctagaaacgattcattcacattttgatcaacttgttcaatcatatattaattccactctgttgtaggatgaaaggatttcataaaagaaagcatctcacaatagtttcatactctcacactatgtatcctttttcttactaggtcaacttcttgctcaccattgcttcttcttgtaggttgagagttgaagactcctgcaagtggtaccagc

SEQ ID NO: 4029 - DNA, 785 bp, Arabidopsis thaliana
  Intron number 2 from transcript AT3G07570.1 (locus AT3G075 70) derived from phytozome v7.0 (chr-ID Chr3; pos 2418793 to 2419577 reverse strand)
cttcgtgaccaccacgaccatcaattataatacaggtaagcaaaacccagcttgactaattatttaaagtcaatcttgaattaatccattatttgactgcttaatcattttatatctccactagtttggtaagccttccaacaacataatatttttctaagttaattcaaaacaaattaaacacatgcgatgatgacgattaggaactggttcaagattgtaccattattctttgttggagtcattttcacattataccgaccctgcccaactactgctactactactcatatagtttccaaaacactaatttccaattttcttattgtattttttttggtcaaaaaacacgattgaatttatttagccacattatgagattatgggactctctagaagtctagatgctgtagcttggagtagtaattaagttttagttgatttttgtaccaaatggcaattcaacaatatttcgggtaataaagacaaaacaaaatgatgtacaggtcttttgtttttaatatctcatcattgtctattttggtttgtttgatttgatgattgtgagatgcagtgaaaaaacagattaactttttcatgagtaaaacttagtgttaaaaattttcaagatatggagggtacaaaacttaataaaagaacatgagtttgtattagaatctagaaattcttcttgtttcgtagttgcttggactaatttatgttttggttttccattgatgaatgtaaaaggttcgcaaagtgtggttaaagtttcaccacactct

SEQ ID NO: 4030 - DNA, 512 bp, Arabidopsis thaliana
  Intron number 1 from transcript AT3G12600.1 (locus AT3G126 00) derived from phytozome v7.0 (chr-ID Chr3; pos 4004861 to 4005372)
gctctcgtctcgtcgccgggtaccgtttttttatccatccttgttcctttttctttttattatgtctgcgtttgtatcgcctctttgaagctgacgttttggtttatgtaatgtgaatctttctcctttattcgaaaattgtggatgcgattgattataatgggtgtaactgttgggaatttgttttcatggatctctacgtatccctgtattgaagtgattgctttgatttattttgttatctgcttcgtgattaattgggcatttttttgtgttgaggtgttatgtctgtaattgcaaaacaagagtcacgtcaccttatcgaatcatgtttgaagatttttttgttttagagtcatgttttgaaaagaggattttgacatgtttagacttgttttgattgtatctgatcttggttgatgaccatgtctctttaattttgttttttggagatgatggaccttgcttaacaagttcaatgtcgggcatttataggtgtattccgtttaggt

SEQ ID NO: 4031 - DNA, 928 bp, Arabidopsis thaliana
  Intron number 1 from transcript AT3G13662.1 (locus AT3G136 62) derived from phytozome v7.0 (chr-ID Chr3; pos 4467571 to 4468498)
aggctcgcaccaagtcgtttgatctcaaggccggtgttgccaatctacatatacatttttgcagccattttaacaaataaatcttagagttgaacttatttacaacccaatgccattagcattaaatttttttttcaaaataattaattttacattaaattcttaatttaaattgtcaatcacattatcaatcaaatttaatccaaacaaactgcacatcaatcctttaaaattagcataaaagtattttgttaacaatattttaaaacaaagttttttgtttaaataaatattgttcttactaaacgttttttgtttaaataaacaaatcatgtatttgaacttatttacaatgtcatgctactgacattaattattcaggcatgaaaatatttaattaaagatttaaatcttctaaattcttgcttttagaattattatatcattacctaaaaggcaaaaaatattaattttttaattattattatttatatatttaaaattcataaaacactattaatatttaaatttataaaaagtttaatatatcaaaaaaattaacatcattatataatatatagagtttaaaaaatctcaaaaaaaaaatcgtcatattttgtgattcaaaattttaagaatgaacatatattaactaattggcgaaaaatgtatggattcaacgtcccgcaacgaataaaatattttgacaatgattcataaatatattataaataagatcaacattaataaaataaataaattttttttgtggacgggtttggcgggacgagtttgacaggatgttacttagtaacaattgtaaactataaaataatttacaaatttttacatatattaattttaaaaaatgaattgtctccgcggtgaatctagtgttgaatataattgttatattctgcattactga

SEQ ID NO: 4032 - DNA, 800 bp, Arabidopsis thaliana
  Intron number 2 from transcript AT3G19450.1 (locus AT3G194 50) derived from phytozome v7.0 (chr-ID Chr3; pos 6745172 to 6745971)
gttcctgggtaatttcttctctcttttcttatctgccttatttttcagctttattcttgactggtgtccatgaatggcgattttctttcatctgttaaaaatggatgttatcgctagacttcaatttagatcccaatcatatataaataagatggtttcagattttaaatggaattacatctttttaatttatttgaagttatgcatagattgttggtaaacttaagtatattagcacttgtgactagcttaataatttctaagcgtgctagagataactccaaacagtacattttcaaatgtaagtaaattgtttagacatatattttaattttagataacctaagggcaaaaacaaatattagataatcttagattgtaaatacatgaaattcttatttttaatggttcagatgagttgattagtaagtagttaaccatatgatatgtaatattttgtacaaatgttattgatatattcttctcggaatttagatacccattatatgatgcatgttgttaaatgacttttgtggtatgacagaagattttggtataaagttgacttgacattattgttaatttgaagataattgaacgtgctactgttacacatctgacattcgtttataaccacacctgtcactgtttagtcttctaaattaatatgcaaacaaaaaactctgtcaatgtgggacttgtaggggtaactgaaatatacgagtaagattccgtaataactaaaagtgtaattttgatttacaggcacgaggtagtaggtgaggtgttggaagtgggat

SEQ ID NO: 4033 - DNA, 388 bp, Arabidopsis thaliana
  Intron number 1 from transcript AT3G21100.2 (locus AT3G211 00) derived from phytozome v7.0 (chr-ID Chr3; pos 7400000 to 7400387)
cgcataggtaattatgaaatgaagctccttttttttgccttagaatgtgtttttggttggtaaagttttcagattttacaaaagaaatgtgttggttgcagtgaatcatggaaaagtttgtatctttgagatttgttttggtctgagatgtcaattattgcttctcgaagtcgttttcgtatggttttactacttttggtattcatttacataccaatgattgttttttgtttttttttattgcttacggctctttagtcaatcttatgtttgaagtatgattgaagatatcttcgtgtctatgatatgtgaattcatagttttctgtttccggtggtgttttgtttttgcagatcaggagcaggacaatttggggaagagggttact

SEQ ID NO: 4034 - DNA, 639 bp, Arabidopsis thaliana
  Intron number 1 from transcript AT3G21950.1 (locus AT3G219 50) derived from phytozome v7.0 (chr-ID Chr3; pos 7734442 to 7735080)
caaataattccgaggcgcaggtatgtacttctctataacatatctatgaaccataattaagcttcggcaattatatattgcatatcaataattcactatactattagatgatctgaatgataatttctctgatctatatttagtagataatgtcccacgctactttaaattatatttttacattttctggttgaaaacgataatatattcaatctatatgttggttagatcaagagtcgagtttttggtttacaaataataatttttaatttaaagtatatatagttgtataatagaattctcaaaatttattaaatatgatagtgctcatttcattagtggaattcttacacataatattaaaattgaattgtcaaatgatattatttaccaaaatgttgtttgatattaaaaataatgaaaatttgtttttgtttaattttattgataaactagtatgttttggttataaagatggaggagaaattaatctagatttttttttttttcttctggtatcaaatgtgtgtgtgtgttttttgtttctttcttttgttgattcaaaaagcttgaatcaacaaatgttaaaaagtgtgataaaatttcgctttttaacttcttagaaaagtattacttctg

SEQ ID NO: 4035 - DNA, 790 bp, Arabidopsis thaliana
  Intron number 1 from transcript AT3G22104.1 (locus AT3G221 04) derived from phytozome v7.0 (chr-ID Chr3; pos 7789854 to 7790643)
gagaacaaactatctttctcaataaggtaaagtctaaattaggctcaaaaaatccaaactttaaccatttctcaatgttaatttcagtttttcttatctgggtttagttaaattcttgttcttgcgttaaatcttgatttacaagttctaatttatgcatcaaaactgtgttcatgtgattttaaaaatacatcttttgtgtatctttatatgataatactacggctcacgtactgtgtgtgactctcctacatttagcatttaatgtcctctcaacaaattaccttaaaatgagggcacacaaatttcttctttttttttgttttcttcctgtgaaaccaatcactaatttggaatctgcaactaattctctgagtatcaatggactcaagagttttagttaagtgagtaatgaagtaaaatgtctccatcatcatttattgcctttttttgttcttatacttgttctctgactttctcccatatttctctgtaaatcaaacaaaattttgccctctctaggaagataagaggcttaatttggatttttgttggatactattcacttcccttttgttcttacttgttatgtgacttatgaagatgatcttaaatgattggagacacagagacctttgtgtagttgatatttaatttccttcctgtcttgtaataactgttgcctttattctttcactaacagtaacaagccttaaagttttttgctttttttttttttcttgtagtaacttatgtttgtgttgtttgtattttgactgcagcaaatcat

SEQ ID NO: 4036 - DNA, 820 bp, Arabidopsis thaliana
  Intron number 2 from transcript AT3G22400.1 (locus AT3G224 00) derived from phytozome v7.0 (chr-ID Chr3; pos 7927740 to 7928559)
gataccgctccgaccgcgttttcttctctaacaaggtaacgatttgagacaaagtgggtaatagtaatataataatactactaattttatggtttttatattggacttggaatttcatatattattttctaactaatcttagattgctcataattctccatgtgcaaacgttatcataaatattcttaaaccataggtctttcttaatctttgtgtatccatgtatttatttattatctagataggtagagccgtagagggaatgaactaatacatttaagaggatactgattagtttgttacataggaattatctcctaatccgtatgacctaaatctttagaattatttatttgatttaatagatagttttggaatattcgtgtacgtgtgtaaaacatataattgtaccaaagaatgaaaccggagtctatctttacaagtcaccctcttcctttattccaataattttctaatctaatagaatctttttataacttgataacgacaaccattttaagttattgatattatattgttctgtttcatctttctttctctctttttttttttttagttattgttgatacaaccttgatttcctaacacaataaagtagatggggctggctctggctccactattgagtcaaaagttaaaaaagcatatattggttggacatttaattttatatttctttagtagttaacctaaatttaacccatggattaatgtatacacacggtgaagttatagttttactgattttattatttttccttaaggcatatcttccaagtgaaacaccggagctaatcaa

SEQ ID NO: 4037 - DNA, 877 bp, Arabidopsis thaliana
  Intron number 1 from transcript AT3G22740.1 (locus AT3G227 40) derived from phytozome v7.0 (chr-ID Chr3; pos 8034689 to 8035565 reverse strand)
agtgccttattacttctcctcaccttgttacaaaggtcacacatatgtagaaatttatagcttttattctaagatggttttagtcgtacgttgataaatatttatttcttctatgaaattaattctcatgttaagcaaaatttagaatgatctagttattggatgatggactcgattaaatagcatcaaaataacgtatttgtccaaacatattttagttggattcttgattccattaactttataaacatggttttatttctttgcaacgagttcatttttcatttttttagttttcttaagttctatgtattggatgaaactcatatgcatacaagagtaagtagaaaaagagctactcgacccgtttatattagtgcataaatgtagataaaaacagtaatatgccacgtagtaaactagtaaagctgagccgctaacgtgtacgtcataccacgacgtttactacattatcactccatttttctagtaccacttttaattgattcacgatgggtcttacgtgtagactgtagagtacaaaagaagaattcaaagaaaacaaaggaaacaaaaaataacaacaaattacaggctacaccatttacgacacttttaaggaaatttaacctatatatatatatatgtatttttcttgaatttagtttgactagttaatttctatagaaatcaaagtaattattttccacttttcttttccattgttcccagagatttttattacctttttctgctaataagtaacaactacaatcagaaatatataataacatatcagaaatatgtttgtaacagacaattatattattttcttctaataggtgcacttggattaccttgaatctggagcaaatat

SEQ ID NO: 4038 - DNA, 715 bp, Arabidopsis thaliana
  Intron number 2 from transcript AT3G27320.2 (locus AT3G273 20) derived from phytozome v7.0 (chr-ID Chr3; pos 10091139 to 10091853)
ctgatccctcgaggtaaaaacaatgtcttgtttaggtagtgaaactagtgaaagagccaagaatttgttagaaacgaatgtgtttgtgtgtgttcatgcctgcctgaaaatctaagctttagtgtcaactctatatgttatacgatgtcctttacgatctttgatttgtgatctactgatgctaagttcagcttactccttaacctcaatagtcttgataggtccttatcatgtcttgaaattattcaaaccacacttgctttctttcaggacttctcatgctaattctcctcttacggtcttacccattggtatgagatgtggaattgtttcgtcgtcattaatttctgggtcttagtacatgctagatatgtaaattcaatcctttggattccaggaatcttcttggattggattatcaagcttgttttttgatgagaaaaccttctgcttaggattcagtttcctgaaaatgtgcttggtatgttgtcaactgtggttcatatgcatgtcacaccagaagtcttttttttttctttctcattttttaaatgatcactgctttcacgtagttcaaggagtttgcattccataaatgttctgcttttggttcttaacaacacttgctgagtatagataaattttgtagatcgttgctttcatatgaccaaaaatcttactgagttctgtgacttctcgaaatttgaaacttcag

SEQ ID NO: 4039 - DNA, 738 bp, Arabidopsis thaliana
  Intron number 1 from transcript AT3G27400.1 (locus AT3G274 00) derived from phytozome v7.0 (chr-ID Chr3; pos 10140422 to 10141159)
caagatccaaatctagtcgttgacgacgttaacaggtacgtgaaagagaaaattttgaatatgataatttgaagtttgatatatataacaatgttgcttttgtaaatataagtgatatatcatacatacgaagtagaaacaaaatgcagcattttattccataaaaaatgtcttacaatattcttttgattcaattatcactatggctcacatttacagattcagttccccattagtgggtttttgtaaactaaactttaaatttaggaaaaccctttacggttttaccaaaaaaccaaagttaactatggttcatatagtctctggaggtttctatgtacccgtcagttttgtctccgattttttttgttttttttcgcctctaaataactcaaacgcattttatcaatgaaattcttcagacgaaaaaaaaaactatgtctcacatgatagtttcccatgaaaggactttatgtaaactactgtatttgtaatttcattaaagttaaactagctagtgaatatatgtattttacccgtcaactagctagtggaatatatatgccaattgtgtccaatattgtttctccaactaacataatatgttcacatttaattctttttctttttcaaccgtacactttttatcctcacatttaatgttcaaatttataacagaatcagttttttcattatttataagaattttgttctctctcatttgtagaagtgtattca

SEQ ID NO: 4040 - DNA, 800 bp, Arabidopsis thaliana
  Intron number 1 from transcript AT3G29770.1 (locus AT3G297 70) derived from phytozome v7.0 (chr-ID Chr3; pos 11648817 to 11649616)
atcctctgttacaacctcatcagtttcttaatcaggttcttttcttcttcttgattcttactttttttttttgtacttcattaaagatatgtcttaattagttttcttacttggcattaaatgaatatttatagtatagtttcttgaatgcttgttggctcaacgtattaagtggttacaaatcaatgtgagtcttgaaacttgctgactctatttttgtttcattggttattgttaatggtgtgaatgttgtgacaatgagattatattatagaggatgataagcacataaccagagtaaaccggtgtcatagaaaagagatgtggtcttgttatggctcctaaactaatgggattgtattctccacgatcttagtagtagatttagtggttagtttctttcttatttttgtgtatttaaagacttcaatgttaagttaaggaattagacttgaaaattgacaaaacagagtttatctctttggtactttgtgtgttcttgtgttaagacaaaacacatctctttggctttgaggagggaccacctatcagaggaagacggttttgatgttgaaagtattatcttaatcaagattcaaacttgaaacctgttttagttacttaacattttagccaaacatgcccaaatatagtgttttgagaatttgctcacctaatcttatagatgatccattttgggataggaaaaaaattggattatacattttattggagttcatattttttctcgaacttaaattctttttttttactgatatttgagtagggtataaagctag

SEQ ID NO: 4041 - DNA, 489 bp, Arabidopsis thaliana
  Intron number 1 from transcript AT3G42130.1 (locus AT3G421 30) derived from phytozome v7.0 (chr-ID Chr3; pos 14298392 to 14298880 reverse strand)
tccataataacaggagatttgattaaccgtggtttgtaaagagaccaaagtttcatgtccgtaaggtcttgaaggtggaggtctctgcaaactgaaaaaaaaatcaacaaacaattttttggtattcagaataacgtgtccatttaaatatttccattcggaaacctttttactgatctatgtccataataacatgagatttgattaaccgaaatctcgatgctacgtaggtgaaacgagttttacccatgagagagagcaaaaatcaaatcaaaccgccattgttgaagaagaagaagtttcttagagaactggatctcaaatttatgtcaaaacttagatttaatttgcaaaataaatcacaatctaaaagaaatcaagggctcttactctccaattaagataatttattctttgacttgagattgaaattaaaaaacaaaaatcaaattaccagagccacccatttgctcaaggcggtggagaagc

SEQ ID NO: 4042 - DNA, 889 bp, Arabidopsis thaliana
  Intron number 1 from transcript AT3G44290.1 (locus AT3G442 90) derived from phytozome v7.0 (chr-ID Chr3; pos 15973985 to 15974873 reverse strand)
tgagatttacaacttcgagccttgggatttacctggttcgttttctatacttaccctttttttcttcttcttacaaagttaatcttcttgttctgtaattttttttcctcaagtttgttatgttaggactaggttattcttgtcggaagaaaaagacaaagagtagaccgtactattttggaatcatgggaattttgttattttcttaaaaaaaaaaatcgggtcacaaatttggaactaattgtagcattttcgtgtgtgaatttcattgattcttgagtcccctatgtcaacaacttagggtatgtcataatttttttgaaatttagctgatttggtatatgattgtagcaatttactggactgtgaagcttactcattacacatgtgaatcgaatccctagtcatgcggttaattagtttttaccattttcttcacgttgatggtacagtgtttatttttggaggctgatttgttgaaaacctaatcaactaagtagcaaaaccatggattggtttgaagttgtggttacttggcttgtgttggtagcttctaatatgcaactagttaaatgcatcaaagtaatcaaaatacgcgttttttgtttcaacgtttgcttgatatgcctgtcctgatttgctcatacttgtagttattgtgcgttgaaccgctacaaactgctcttgcatttgtaagtattcacgtggaaattaatttatatttgcatgaaaaaaagttgaggactatgacaattgaggtactgttggctttgttcaacaaaatcttcttgtccattgtctgagaaaaatttatgtgtctcccttttattcttaacaagttcttctacatgtttctcgcagataagtctatcgttaaatcggatagcga

SEQ ID NO: 4043 - DNA, 923 bp, Arabidopsis thaliana
  Intron number 2 from transcript AT3G51760.2 (locus AT3G517 60) derived from phytozome v7.0 (chr-ID Chr3; pos 19197615 to 19198537 reverse strand)
aattcaggtacttgttattacagtatttagactatatatatgatatattgttgtgtgacaccccttttttggtttcttgtaaaatgcggtggttaataataacacactaaaaaaaaagcatgtacaaagacaaggcttatagccaaaattgatgcagctagctctaaaacaattatgtagtatgtattttactatatatcatccacaatttatgttttgaaatttttttgacctaagaattgtttttccagatttcatgttttcttataatagattaggcttgcagattggttcaatttgattgatggatttttttttttttttttttctttgtattttgttaaagttgaatgatttgataagatgtgcaagtgtaactatctgaagatctttttctatatttgtaatgtaaaataaaattaaacaaaaaaaaaaaccttaacaaatgactttgccttttgtctgaatttcttgaaagagaaaactaagcaaatttttgcaaaaattaggaaagaaatctgagattgcaaagagatgaaacttgacaatacagagtggcccattgtgatgggctttagctttgggtaccaaatctgctgagcaacatgacaatttttttaaagattaaatcctaattcttcttttcatttctttttcctaagaaatcctacctctctaaaaaagtaaaaagtaaaacacatactaatgctagtttttttttgttaaataatagtggctagctgcaatatataaataaaataatgactttttttttccttggggcaaaaaacattatgactagttgctatatacataaaaaaaatatattggaaaatggttgcgacaaaagaagtacacttgaaaattggtaaaattgcacaaattcagatctattcgaataaagggacgcgtggatccgtgag

SEQ ID NO: 4044 - DNA, 568 bp, Arabidopsis thaliana
  Intron number 1 from transcript AT3G51910.1 (locus AT3G519 10) derived from phytozome v7.0 (chr-ID Chr3; pos 19265523 to 19266090)
atttctcaagtttcatcagacaactcaatacttatgtgagtcttctctgctctgtattctctgaccaaacacaaaacagagcattcaaagcagaggaatgctctgtttttttcttttatttttttaactttcatttcccttgttgctggaaaattaccgcgaagtattctgaatgttactatataattaacttggtaatggaaaaaagtcattttttacagcagaatctgttgttaatttagcattctagaaacatcgaaaatgtagattccgtaatggctagtggagtagaagaaggtttagtaagttccagaagcaagtttcgtgtcaacttgcttactaaaataatcaaaagaaacagtcagcgatcttatcccaatttccattgtttattcactaatcagctttaacgttgcccacttgttccattctttaacatataaaaacatagaaagagttctcactccaattattgatgtttgtgagaatatgtagactttcaaaagattagtttttgaatacttatgttaaaaaaattacagggtttcagaaagatagaagcagagag

SEQ ID NO: 4045 - DNA, 575 bp, Arabidopsis thaliana
  Intron number 2 from transcript AT3G53530.1 (locus AT3G535 30) derived from phytozome v7.0 (chr-ID Chr3; pos 19845886 to 19846460)
caaggtgaatcctctgttctcactgttcttaccctctattgttacagtatttacttttcttttacttgcttttcttatcaaaaacagcaatacatattttacttaggttagtataagagatcaaattatctaactatgagcaagttttagtgcaaacacattttttggttttaagttgggtacgggacctatagccttaatgggtaataatgcattgtcactatacgtgcaagtgtgtaaccgatctgatcatgtttctacaattatctctttcatattcaaaaaaggtgaaaaatgatatttctgatataatacttttgttaaagtttctataaaatatcaaaaatataatattatttacaatatcttgaagatattatatatgataatttaaggtaaagtaaaaaagatattttgggtttggtgatacccaaatgacttgggccaaatccatagattttatctatgaaatagtttgtaaatggatttagttaaagttcatgctaatggttttttttttttttttttggcaataagtaggtgtgacatccttcaacatagattttgcatcaaag

SEQ ID NO: 4046 - DNA, 572 bp, Arabidopsis thaliana
  Intron number 2 from transcript AT3G53530.2 (locus AT3G535 30) derived from phytozome v7.0 (chr-ID Chr3; pos 19845886 to 19846457)
caaggtgaatcctctgttctcactgttcttaccctctattgttacagtatttacttttcttttacttgcttttcttatcaaaaacagcaatacatattttacttaggttagtataagagatcaaattatctaactatgagcaagttttagtgcaaacacattttttggttttaagttgggtacgggacctatagccttaatgggtaataatgcattgtcactatacgtgcaagtgtgtaaccgatctgatcatgtttctacaattatctctttcatattcaaaaaaggtgaaaaatgatatttctgatataatacttttgttaaagtttctataaaatatcaaaaatataatattatttacaatatcttgaagatattatatatgataatttaaggtaaagtaaaaaagatattttgggtttggtgatacccaaatgacttgggccaaatccatagattttatctatgaaatagtttgtaaatggatttagttaaagttcatgctaatggttttttttttttttttttggcaataagtaggtgtgacatccttcaacatagattttgcatca

SEQ ID NO: 4047 - DNA, 727 bp, Arabidopsis thaliana
  Intron number 1 from transcript AT3G55060.1 (locus AT3G550 60) derived from phytozome v7.0 (chr-ID Chr3; pos 20406225 to 20406951 reverse strand)
ttcgaattttcgatttgcaaaatcgctgttttgtatgttcataaattctaaagatcttcccttttgaaattttaaaatttttctctgtgtttctttggttttctttaaagccaattgtgtcgtcataaaaagctgtcgcctctcagtgtttttttttcctttttctttcaattttccaactattagaagagagtagagagagtagagttggattttctggcgacgaaatcgattgagatcgtttaaagagagagcctttctagattttgttagtgttcgagtaatctcgccgaacataatcttcatcaacttctccgcaagtaggatttaggttcgatttgtgatttgattagtctctagggtttatcgtagctttgaagatgcttagggtagtctggtcttttattttaggccttggctcgatgtttactatgataagtcttgagtttctgaatctctgagtagagttatagttgattatctcgagtctaagatcatttatgctgttttttctcatttcttttgttgaactggtttatctttcatcgagcaaattgtttgtaagattcacttggagcactttttttggagattgacatgaactaatttgctgcaaaatgtgaacttttcctagtttagtgcaggagatatcttacaatctattgatttgcttctatatgttttgattgcagctgcagttgttatagcaccttttgattggagaaaa

SEQ ID NO: 4048 - DNA, 731 bp, Arabidopsis thaliana
  Intron number 2 from transcript AT3G56820.1 (locus AT3G568 20) derived from phytozome v7.0 (chr-ID Chr3; pos 21040227 to 21040957 reverse strand)
gggagccaagacaaaattcagggtaagtctcatcatccatctcattgattgaaacataatggaagagttatagtctgttgaacacctctaacagaaaggaatttctgtttttgcttatctaagtatccaatgcttcattgaatggtatgtgataactcttggtaaagaaggtggaaaggagagttcagagtttttcctaatgctatgccaacttaactaaacctgtgtgacatgatgtgtgtaagtagaggtttgaacagctgcaggagcaggcttatctttggttggtttgagggtttgggagtgtttaaggtgtctagacaaactctagatttcagttcctttgatgtggttttctgattttttgtcttagattctgcgttgggactctttttattgagataaaggtgaaaatcacttctgaatctatcataaagatgttcttgactattggactaatatcatcagtcatttactcacggatcactgaaccactaatcactgtctaagaatgaaaaatcgagtttcttccattaagatgtttagtaatgtgactaagtgggcttatcttacttgtttgaacctttttcctgtgatgattgtgccctggttttccatttctttactgctctcgggtcaagatgaaccaaaatcatcaatcaaacattgtttatggacaaacctatatgaatgcagctggaaaaccacgaagtcgataaaggttacgccga

SEQ ID NO: 4049 - DNA, 876 bp, Arabidopsis thaliana
  Intron number 1 from transcript AT3G60140.1 (locus AT3G601 40) derived from phytozome v7.0 (chr-ID Chr3; pos 22216853 to 22217728)
atttcatctttgggacagctgcctcggcgtttcaggtaatttctttgatttgtaatatgtaaaatagcaaaatagctttgtgattctacaatttttattagtcacagagttaaaatcattatttaaattcaattattctgttgttttcttttgattatgttactttgaatgttgaaacaatcatgaaactctgcaatatcactcttttttttgggatcaaattcacaattaaattaaaaaaataatttgcttaataatcttatcttcattatgcattcatattttttttttctaaaatacaattttaccattttgcagtattatggtcatattatataagtcatagtagaataaaataactagttcagaaattaactgttgaaaagttatttaatttacgtttaaaaatgttgcaaaagaattttcatgtggatcctcttgtctaatatccacttctttttttgcttgcgggttctcacttaggtgtttttaaacagttttaattacaaaacatgctctctttttttttcttgaaaacaaaaaaagtgagccgtaaacttaaacacatctgggcagctggacttcaaagtggaaaaggctgctcgactttcaatttaattaactaggagaaaatatcaaatactatattatttgctgacgtctacagatgctaacgttccttttttcatttccccctcaaatgttctcttcttgtcatataaagttgcttgcatcatcataataaaactgtaatgttttgatttggggacaaaaagaatatctgctttacaaattagctctgcgatcaaaatatgtttttaaaaagtatatatttatgcagtacgaaggtgcaacaagtgaaggtggcaagtctcc

SEQ ID NO: 4050 - DNA, 847 bp, Arabidopsis thaliana
  Intron number 1 from transcript AT3G61680.1 (locus AT3G616 80) derived from phytozome v7.0 (chr-ID Chr3; pos 22823783 to 22824629)
ttgttgtttgccatcgatcaacactcagaaataaggtaattaacgcatctcgagactcattgttttaacaatctttgttttgtttcttccaaattattctcgtgaatatccgtaatctctccgtcttttaatgaacaacacatatcatatgcttttgtttgttttgttttgttttttcaacatttcaataattttgtctttttttcttcgatttaatttgtttatttcctgctataataaacgaaaactataattccatgtaatgttcgttgttgttcatagtgatttatcataacgagcaacaacataaaaatcaagagaataagaaattagagttatgctgcttatttgaattagacaaaacctacttttacttgttaaggaaatgaaaagatgttaataaagatgagcacatcgtacgtggcgcacgtggaagcacttctgtacgacggacccagtccaactcgaaccccacacacatagcaaaggttgttaagttggctcgtaggtgaatttaatacctgttatttcctttatagctggctaattacctaaattcgatccataataacacattcctactatgccaacatttaaccctagtcaaactaattaaaacgtttcttactttttggcctattaaaacgtttcattatgttccgcaaatagtatgaaatatataaagattttctaacaaaaaattactaagaacagttagactgattgagattgtttttatttccttttatttaattttcttttattatactctgtttatttgtgtttaataattaggattctatttgtcttgtcttgtttgctatagttggagttttgttcataaaga

SEQ ID NO: 4051 - DNA, 958 bp, Arabidopsis thaliana
  Intron number 1 from transcript AT4G00750.1 (locus AT4G007 50) derived from phytozome v7.0 (chr-ID Chr4; pos 315082 t o 316039)
tggggtaagttaagacttcagatcactctgttttgttccttgttgattttgtttctttgtactattcatgtgatgtctgtgtttttttttggctctcttgttaatgttaccatgcttgtgtgatgtcatacattttgattttttttctctgattctttgacatttacgcctcatatttatttttgcaagtatgtgattatttgttttgggttatggagtgtgtttagtggaactagttgtatacattttgatgattgtgcaattacattgaaatcatctattgatgtttcctttgttcatagatttatgcaaatatgtataaactattctatttatcaattgatctaggtcaaagcagagaaatttatttccaatttcgcctgtgataccctattaattagatgtatactatttaatttttgtaaggatgagaattttggtcagttgtgtaatttatgactagaagaatattctgacacagcagagtgagagtgatggataggattgtcttgatacgaaatttatagaatggaaagtcacaagtagataaaaatcaataggatcaaaactagaaacgttttcctaattttctgtttctcttattggcaacgaataacaaattttgattttctatttttattgtataatcaggctgtaatgttttttatcagtaccttttaatcccaacaagtaattaaattgcattacagctaagtaaatgctggtttagactttagagtcatcagatagaaaatgtggatttcttagcatcgatagtttcaatcttcatatggaagtaaagtggtcaaaagacttttaaactgttttttttgtcttattgatgtaaatgggtaaatttaattctagcgtttacgatcataggttatgtaaatttatcgactgtctctaaagtctaaactaatgatgctaataggtagcgagctttggggcgtatcta

SEQ ID NO: 4052 - DNA, 640 bp, Arabidopsis thaliana
  Intron number 1 from transcript AT4G02260.2 (locus AT4G022 60) derived from phytozome v7.0 (chr-ID Chr4; pos 985472 t o 986111)
tccggtgcgttttcttcgttcgtctctctgatttttttttttttttcatgttcgtttcaaaggcagagtttaggggaagctttgtgacgattcttctgttcttctctctgtttgtttgaattcagtagcaattgtgtattgcgtcttaacgtcttaagctaatatacccttaagactgtgtgatttttcttagttatgagtcgtattaagaatccaattgcttcgttttctgaattggattccgagagagagagagagagagagagagagagagagagttcacgtcccattgaatttgaaagctactttagttattgttcttgttttgtgtatgtgtgcgacggaaaatgaaaatccacttggttgataatttctattactttctggtgtttgttggatcagtgagtaaatgcagcaaagttagaattctgagctgattaggttattcactagttcttctttaagcaagttcatgtgccaactaaacacttcctaccattcttgttgtggaccacagttttctattactggttaacaattaatttcttttgaattcatgcatatacgtttaccctttttggttggttctgttttggttttattgaaattgattatgtgtgtacaatgcagtgtctgtgga

SEQ ID NO: 4053 - DNA, 914 bp, Arabidopsis thaliana
  Intron number 2 from transcript AT4G02670.1 (locus AT4G026 70) derived from phytozome v7.0 (chr-ID Chr4; pos 1176777 to 1177690 reverse strand)
tgactgcggcactcttttctcgaggtaacccttttttaatttttcatttttttgttctttatgtcaagttctttctttgttccttgtctttcttgaaaattttactgatgtttctgtgacaaatctaaattattgtctatctctatagagataggagtcaatagtttttcttggagtagtttgatatatatagatgaatttaatgctttcgtgtgactgatttcaattgtcttcttttggttatgttctttgacaaatctgcttgtgactgtccatggaatatagtttgagtgcaattaaatgcagtggcaaaattcatggattaagacattatatttacatgttggccattattgcgtgtatatataattttttttttttttacataaatcacttcacacttttttagagctaatatgtatgtatttgtgtaatataaattaattcttgtccaacaaaaaatgattttttaataacattatatgtaaaatttgtgttgatttaatgaggagataaaaagaagcctgcaggtgaatcttctccttcatcatcataatagtgaaaaagaatcttgatttgattttgtaatttttttttttgtaaaaagattttgataatctatgatttgatttgctgtgtgtaaaattgcattggtccatcatgacataataggcttcaaaagcttttctttgaattttgaaacttctttattatctctgtatggtccactccaaactatttcactacttgcaattgcatcattttatttttggtttaatgttacaattgcatcattattgatcatacatacatatattgtttatgtttctatctaatatttgtttttgtttgtttgtgatatatatattttataaacaggaaagacactttcataacgcatagagcgttttgtg

SEQ ID NO: 4054 - DNA, 957 bp, Arabidopsis thaliana
  Intron number 1 from transcript AT4G10465.1 (locus AT4G104 65) derived from phytozome v7.0 (chr-ID Chr4; pos 6473708 to 6474664)
tctaggaaacgtccactctctttgcaggttattttttctttctctagatatccttgctcattctcctcaccgcaacggaaatcataggcatgaacatttggttttcgggtcggtcggtttcgtttgaatcctttgatttggtttcgactagacatgagtgttgccgaattggggccaaaatataaatttgagttgagtactcattgtagaatggtttataaatattttgggtatggttatgatatggtttagatcttcatccctatattcaaataattgtggttacatagatgcattttagaaaacatatttaattgaaagtataagaagatgcattttagacatctctcacttttctaaattttgcttaaacacaagccgcacttgatgtaaaacagtttttttccgaataattttacataatattcaaaaaacaaaagaataagaagattagcaaaacaaacgaaattcttttgataaacgaatcattgatggactataccattaatagtcaagctttccaattaatgacatttgaaaagctgatatttgcagaaccgattggtttatattttattttttttgaatttagtgttaagttatattcaaagaaaaaataaacgtttatacatgtgaatgcaaaattttcttagcatatagaataaagttttatatccttggtgttatatcgatgcgaaccacacttggaatccttccacatatttctctaccttcccttttacactagccatgattaaattatctcgatttaaatgtcaattcctacacaatcatctagttttcaaagtgctaataatttactaatgatcattttgataatagtatataccatactactttttttatttatatccaaagttctcataagaaaactaaagtttttgagtttgacattcgtggctcgtggactactagacggttgagctgaaggtaaga

SEQ ID NO: 4055 - DNA, 787 bp, Arabidopsis thaliana
  Intron number 1 from transcript AT4G10710.1 (locus AT4G107 10) derived from phytozome v7.0 (chr-ID Chr4; pos 6605451 to 6606237 reverse strand)
agctaccttgttattttcctccgttaaccatctgggtaaactcttcgcttgatttttctgttcttccccctttttcgatttctcactgtttttaatctacgattcaacttgtttaaatctcgttttcgtgttcttcgatttgattcttcgtttaaaatcatgttcttaactcgatccattttgatttcgctgcgttagacaagtaattgatttttgttttttcttgttcttccatttctagggtttcgccgtgcgaagcttccgttcgcgtctttgctttaattttgagattttattgattctatttcgaagtggttttttttttccttaccctaatttttctttctgggtctgaaatttggtgtaatttactgcaaattttgacctattttgaaggctatgaaaccctagatttcaatttggattcgttaagtttatatctctcgacattgtttcacgtttttgatatatatagagtctaatgttttgcgatattagttctcattttcacgtttttgttgccaatacctatatgtatatgattatgtcctgcgcatttggagattgacgttgtttaaaaactgttgaactttatttggcattcacgagataaggttttgttggtcttttcaatttttgataaaaagattagtcttttgtttttttcctgattagtgaaagctttaggcttgtgaatctctctctgtctcgtttatgtaaaactttcttgtttctgagtattattttactttttcttcgcagtataggttgctgctggactctttag

SEQ ID NO: 4056 - DNA, 513 bp, Arabidopsis thaliana
  Intron number 1 from transcript AT4G13968.1 (locus AT4G139 68) derived from phytozome v7.0 (chr-ID Chr4; pos 8069200 to 8069712)
atttctggtaatacatatttttcattttcaaggataaactattttgcttatttatttggggttaaattttcttaaatgcaaaaaaaattatctttatttttctataatatcatggtgagaattcaaactgagattttattctaacaaaatttgatgaaatttgggtaacatgttaaaatattatgtttacattataaattatttgactttatttaatatagtttgcttattgtttggatttgtttggtttcgtttgtaaacatttctcccctgtcttcggtttccatttagagtgtttagtttaaatttatggttggcaaaaatatgtttaattgattggtctaaaatttgaatagttgtattagtgacattttagttataaaaaacaaagaaattgtatctttaatatagaaaaatattaataaaattaattgaactggaatagaagcataaatggtgcacaagtgatactaatttataaacaaataacaattgaaccaaacaggacaaacc

SEQ ID NO: 4057 - DNA, 709 bp, Arabidopsis thaliana
  Intron number 1 from transcript AT4G14660.1 (locus AT4G146 60) derived from phytozome v7.0 (chr-ID Chr4; pos 8407037 to 8407745 reverse strand)
gtttcgtttgatatcttaggaatctataaacaaaggcatgggttcagtattctgttgattttctcaatcaatttctcagctattttcagtcttaaggtcttggtccatgggttgctcgagaaaatgtggaaaaagtgatggtctgagtacttaatcgtaaaatgcaaatacaaagcttttgtgggtttattaaagttggtaacttttgatagaattttgaggactcttacttgtttacttacatgcctgcgtagtgtttgtttaaatgcctgtgagaaatactttttagtgaaaagctctttttttttttttgtttagtgttcgttttagtagatatgtaatgtgaaactaatttctgaatctctgttttgagtactgtagagttatgaaattggtattttgctaatgcatgtctacattgtgtccagattcttataaaaacagaaactttgatcttatcttatggatgaattactttaggttactgatgatgatttgtataacctagatgttcgtttcagagaaaaacctggaaattactgtctacttccttttcctttctctgtgatctttcagttttgattttttccagagtctttctcatatctttcctttgagaagaatgtgatgatagtaaagtatttctattctctggatcaatgatgatagctatgtgacattgctttgatttggttttgaaggttgaaca

SEQ ID NO: 4058 - DNA, 953 bp, Arabidopsis thaliana
  Intron number 1 from transcript AT4G16600.1 (locus AT4G166 00) derived from phytozome v7.0 (chr-ID Chr4; pos 9350336 to 9351288)
tccctcgacgttcctatcaactggattcacgctctgtaagcgtctcatcatcttctttttcttcttctctctttacatcgtcaaaacgccaccgtttaattggttagaaaattctgaagtcttttttttttcttttcttctttgaatcaaggaaataacattattttgtagaatagtttttctaacctcatttggattatacaaattaatatatactatgttttttaatttagagtaaagagaacatggaagagcagtaatgcgggaacgagcatgaaattaatttttaaatttttcaaaattttattatttggctctttagttaaagaaaaaaagacttattaaaattgagaatgtccagaacaagacagtctttggtcgcagacgtgtttccacgacctttttttggagtgtgcttgtcttttttttcgtctattgttgatataaaatatctcagccataaataaaaaaatcacaataggattttctttcgaacatagaagcttacttataaaatgatttatttcttcttttgtcagtattatttcatattcatgttacctttttcattttcatattcaaacttacatgagttaggtggaaatttggtgtttctcttttgtgtagtggaaagtgagaatttaagagattggatgtgtaaaaataaataaatatattagtgggattgcttgttgattttattataaagagaaagaaaatataatgttgttagaaagagtaatttggctgtcagataccttattatagtaactaaaaagtctcagaccttttctttgttttggtaaaaggaatgaattataattaaattttaaaaaatattttgaaagtttcagtatacataatattttattgctgcattttatacataatgcaaaaaaaatctgttttgatcttattataattcattaatgaggtatgtagggaagaagaag

SEQ ID NO: 4059 - DNA, 699 bp, Arabidopsis thaliana
  Intron number 1 from transcript AT4G18650.1 (locus AT4G186 50) derived from phytozome v7.0 (chr-ID Chr4; pos 10264313 to 10265011 reverse strand)
gagcggtatcaggtgggtccaacatttagattcattagaattttaaaactatttttcaaacattgatttatttataaacggaatttttttaactgaataatggattgctattttcagtgattgctctattttctttgaaaattatgtttttttaaaaaaatctttaaagttatagcaattttgatgaattttctattgaatccttaacatttaaaccgaaaagcaaattatattgaaaatagtgtcaaatcaaaaatattctatatatttttttttgtttattcaaacaagggataccgaattttaatatatatatatatatacacaaaatatttttttgttagacctaattattactcatctgtgtggtgctagttggatacaattttaaattttatttgatataaaagacaacatatatgatcttgatattttacggaatggtggaatgattcaatatgtttttgtctattacattttcttcgaatcacgtttttattcatctatttttagttttttactgtttgcataatttgtgaaagaaaaaaaagtcgccatttccgtaaattttggacttaaatcaaatattttccgtttacctttatcagtaattactatacctatactgaaatgtaggaatacaaattttgtaaatcattttattttagttatttaacttgaaactgtctttaggtggct

SEQ ID NO: 4060 - DNA, 763 bp, Arabidopsis thaliana
  Intron number 1 from transcript AT4G30160.1 (locus AT4G301 60) derived from phytozome v7.0 (chr-ID Chr4; pos 14753732 to 14754494)
tctgggcttggagctgaatagcggatttgtataaggtaattgcttgaaacgtaccgaattgattcgtttttttgtttctctgagatttttcaatatctgggtcttagagtttggctgatctgattggttctctgagattttcatgtagataagtttgttttaaaagccaaagccttagtttttaattagtgagatagatttatgtagagagcatcaatgatcaatccttgagctttatcttgggttttgttatgttgtttattgaaaaatggtttgttcggtgagtatgatgattatgttcaatggaaatgttcttccttttctctcgaatttctgagttttgctttggtttcatataactttgtttgtttgtctggggaattgtgaaatttacataaccactacttccgatgtaatataaatatcagagcttttctttattgacagagattttttgacttgagatgaatgatgttgacccttgtggattctgagttgatttttgattctttctaattggtttctggtttctatttctattgatcagctgaatccaatcatggtcttttcagtagtgtatgctattggtgaaaatcaatattggtttcttcgccttgcttgtgatgccttgtctgctatcaaaatgtgtcatttgattggtttttgatagaattgatttgcatttgttgattcttgagattttaatcttagttgatgttgtctcataggttattattagtcttctctatcgttgcggcgttca

SEQ ID NO: 4061 - DNA, 826 bp, Arabidopsis thaliana
  Intron number 1 from transcript AT4G30540.1 (locus AT4G305 40) derived from phytozome v7.0 (chr-ID Chr4; pos 14923629 to 14924454)
ctttggtcaccaggtttgatattattatcatccaacgttttcttcttcttctatcatttaaaatatatcatacttgtataattttttaattacttaccactaggtaaaatctttacataaaagtgcatgttttttctttcgtaatttctctttttaaaattcgatgtacataactgttttgcctaacttcataagctatgttgtagactagcgttagactagatgaatctagttctattcaaagtaataaattttaaattataaaagcatactgcataattgaattagaatcatcatgccatattcataacatatcgcatgctatatcattttcaagttttttttttcaagttataatgcagtattgcatgctatatcattttcaaattaaattttgcgtggaatatatatatatatatatatatattgaggataataatcatcaaacatcatgttttataacttgaaaatgagatagcatgcaatatgtaatgaatatggaaaagatttaggctgtgtaatgaacatgtaaattttaattttctagtcagatattattattatagacagaaagtaattaaagaagaaaaacataattttttgttgttgttgtaaaatgatatatttgggtaaaagatattagattaagtacactgttatatactttataaattctttatatgagtacgaataaatgtacttatcaaagaaataactaatgtatgtgtgtatggattagtttcatctacacatggtggttaataatcctgaaaacaatatatatacctagcttacgtttttttttcttgttttggatttagatcat

SEQ ID NO: 4062 - DNA, 450 bp, Arabidopsis thaliana
  Intron number 1 from transcript AT4G31360.1 (locus AT4G313 60) derived from phytozome v7.0 (chr-ID Chr4; pos 15222233 to 15222682)
gaccctacgagaaccaagattgttatagaacactggtaatttttgcgtaaatgttttcgatttctttagagataatgtttggaatcataagagcaaaaatttaggtttttttctttgaaattgaatctaaaagcctacaactttggggtatgtgttgagacttgtgtgtccgtgtgtagcagctaaggtttatttgctagggtggaacaatgtgttaggttttcatcttgattctgcataagtttttggtttgagtgattagtggtttatgttttgctcgcatttgtgaagaggacttgactatctgctttctgtttgtgttcttgtcttgctttagctgaattgcaatgcgtaatggacgtgttcattctataaatggaatttgcttctatacttatgtctcacaagagttcttttttgttttgttttgtgatgttattgaagtaaaca

SEQ ID NO: 4063 - DNA, 1007 bp, Arabidopsis thaliana
  Intron number 2 from transcript AT4G33330.2 (locus AT4G333 30) derived from phytozome v7.0 (chr-ID Chr4; pos 16061162 to 16062168 reverse strand)
ttgcaatcttgctcttcctttgtgggcaccacaaggtaaaattactttcatgcaaattaatcttcttgctaaatatttttagttttagcaaaagtaactaaattaattatgatgaaaccaaaaatcttttttttttgtttttaatatacttagagtaccattagcaaattattttgaccactcttttgtttttgaatttggttactttttccaagtaattaaactaaacaaacagaaaatatatgttgaactgaacttgaaatcgaaaccgtgttttgtggcgcaaacgtaaaaaggtgtatagtcggaaatgtgtcagatgaactatgaagtgactaagacattgtaacataaaaggacctgcttaagtgaaattgatgtgaaagataccaactgtatggtgtaatataaaacaactcgatatgtttctatactttgcttataattgattgatgtgtgttaattagttagatatgttagtggttgtgttttaggtatgtcgttttgctaaccaccaaatatgaattgtcatacaagctaccttacactttttaaggagatattaaacccttaatttctttccaaaatagcattcgtattggtagatcgagttagttagctaaatagcttgtggtttaagaaaacgaatgatcatcgaataaggttaataatgatagcttttttttttacggcaggttaataatgatagcttatatgctaatatattagaaaaacattcaactctctatgtatttgtttgtcaattaattaagattactaaatatgaatattataaatacgataattcaaattctaatcacaaaaatgcaatttttgctggtttaagaaaatgcaatggatgaagtagtttttgataacctatccatgcatatatagcaataactaaaatttgataataatcgttgaagaagttttttcaatggccttactaaatgaattaatgagtttttttatccaaaaacaaaaagcaggtgtagacaaagtgt

SEQ ID NO: 4064 - DNA, 474 bp, Arabidopsis thaliana
  Intron number 1 from transcript AT4G37760.1 (locus AT4G377 60) derived from phytozome v7.0 (chr-ID Chr4; pos 17744275 to 17744748)
tcgccggcgctgcccttgctcataccctcggcaaggtaagatcttttcttcttaattcaaagttttaactttttacataattttgactttttttgcttttgtcgttattcaatttcacttctatttctggtaatcatatcattaatcaacgaaatggtttatctttattgaattttgtggtttgaattgtttattagtttatttatcgtctagctcaatcacattcttgtaacacaagttatgttttaggtttctctatggacaatggttttcttaaagataaagttgcgaactttcgccttaatatttcaaaatcttgaaaattctcgtgattcttaattcacgggtaaacgtgttttgcttgttgcgttttttttgccgtcacggaatcaaatttagtgactttagcttttgtgtgtatgtgtgtgtgtggttgtaggaaggaagaagagttcacgttatagaaagagactt

SEQ ID NO: 4065 - DNA, 891 bp, Arabidopsis thaliana
  Intron number 2 from transcript AT5G03150.1 (locus AT5G031 50) derived from phytozome v7.0 (chr-ID Chr5; pos 746786 t o 747676)
tgactgtggcacgttgttctccaggtaatatttactaacgagattaacagttggtattggttaatgtataagttgagtttttttctacatgaagtattagaactcggtattctattcatatatagcaatatcggatgaaagcaatgcaaaacaattcatgtgacagtgttagaacctaaaagaattgtgtaaaaaactcaaacagatataggtgtatatatcaagtgtcggcatgcatgaatgtgtgtgcaatgtcttgtgatttgttatatctgttgcgaaagttggaatagagcagagcattaattgaagacattctgacttatgggagcaatttctatttatttttgtttaagattttgaaataatagctgcatactttatgagtatatgatattcgatgagattttgatggcatgagcatctattcattttgtgtggttgtatgtgtacatgtctatttggcttcattcttttcttctattcacaccatatggcaagaaactagatatcatgcatatattttgtcaacaaacacatacacacacatgcatatatattatatatatatatatatatataagttctatgtttttgtatatagtaacaattaaggtttttgtgctttttttttttctttttttttctagttttatgtttatttctgtcttcatgtcgcgagtttgcataggagaaataaatgcttactccggccaagaatgtttttgttttgcaaatgatttcaaattcaatgctctattgaataataatcaatgcagttgtctcactcttaaaataattatgtctttatttttattatttattatctaataaataatcgatctctgttttataggaaagatagtttcatcacacatagagcgttctgcg

SEQ ID NO: 4066 - DNA, 849 bp, Arabidopsis thaliana
  Intron number 3 from transcript AT5G03270.1 (locus AT5G032 70) derived from phytozome v7.0 (chr-ID Chr5; pos 782696 t o 783544)
ctttcattactttgcctggtaatttttactctctatctctctctccatcttctatcttcattacaaataataaagataaacttatgaaaaattaaattattgatattcacttgtgaaaactttgccactacatttagagttccccaatgtatatgatgctgaaatattataaagctagatgcatatatgtatggtgatgttttagtgtttgttttttcccctacataatgtaatgttagtgcttttttataaaaacctttttattagtcattatagagagctttaaagagtgcgtttaataagtaataacatgtggttaatatgatatgtgggagattccaggagtcaaagaatttaaaagaatcacgacaaatagttttgaaataattaaagtgaataatcagaaaaagtccttgatccatcaacatccaaaagcagtgaaaatagatgtcgacaaaggacatctgtttcttatccaatttaagaaaaaatttatgttcgcaatttatatctgtaagatttatatttctgagcagacattaaaagatcgtaatatgagttgcaaaatgttgtttttcttttttgggtagtgctggtatattataaagttgaatattctgagagaaacataatggtaactattgtgatgagtgcactaacctttgacctttgacttaaaaagtaccaaagagaagagaaggactacttttcataaatcagatgttgacttttcttaagaggtcaaaaatgaaagtgaaaaaaaaaaaaaatcttcttgagttttactatacgtgccacttgactaagtcaacgagtcctcactgtcgaagtgtcaatcctcaggtggct

SEQ ID NO: 4067 - DNA, 538 bp, Arabidopsis thaliana
  Intron number 1 from transcript AT5G04840.1 (locus AT5G048 40) derived from phytozome v7.0 (chr-ID Chr5; pos 1405467 to 1406004)
tcgccggcgaaaatttgttttctttttccctggaggtaaacaagcaactgacgattgacaagttgaatgctttggtctgtttgatgtttatgtatctcattattcgagtcaaaagcactgtagatttcagggttctcttctctttaatgtctctgctgaaatttccagttttttcattgccgtttcttaaaatcttgtaatgggttttagggtaactgttccattgattcaatgttgttcttcttcttgtgatttttgtttttctttcactcttttgtcttgtggggttagtacaagaatggttgtcggaatttcacaaatttgttttactaaaaaaatacttttttctttctttctgggattgaggtttgtgtttgctagctgagaataaaaatcaatctttaagagctgtagaattgaatatctggaagctttcattgcgtagaagctatagcttcttaaggttgatgataagtgaagtttacttttagctaagaaagcttttttggattgttgatttattaggtaaattcgaatc

SEQ ID NO: 4068 - DNA, 845 bp, Arabidopsis thaliana
  Intron number 1 from transcript AT5G07210.1 (locus AT5G072 10) derived from phytozome v7.0 (chr-ID Chr5; pos 2252339 to 2253183)
cttcaacactccaaatacagaggtaattaaatattattatcatattatatataatatgttattgattttttgtttgtgatttcatttagatttttatttctatgatttcttagcatgaaatacaatttttggagaaacaactagcagttttaaaaacaaaacttgaattttgagaaattcaaagatgttatatatatatgtcaaaatttaacaattattcttctaaatcatccggattccgtttacatgtacacatctacaattttcaattgaggtattcttgttttgatgcctttgagacgaatagtttgattgataaaaaaaattctaaccaatatgatatataaagtttattttctttttgtcaaaccatactttatactatgtaacttttttaagagattattgaaaatagtttatttataaaatagtaacctattgttgaattaaaaaaaaaaaaaaaattgtaaatcgtgtttgcaaacgacatgtgatttatcttagtttaaaactagctgatattcttcaaatcgactgttcttataagtaatcaaccaattagcatcaatcacaataaattgtaaacacttcaatgaaaatggtgattttaaagaatatgttttacttatgttatgaactatctcaaatttgtgaaatatttcataactaatgtggaaaactatataacccctccatacaaaacgtaagtaaaatttatgaaatcctatcatttttaaaggttaaaccaatcaaaaagtaataattcttggtacttgcaatatttttgtcattatattttagtttattaattttattttgattaaatggttttagatccatcagtt

SEQ ID NO: 4069 - DNA, 899 bp, Arabidopsis thaliana
  Intron number 2 from transcript AT5G08180.1 (locus AT5G081 80) derived from phytozome v7.0 (chr-ID Chr5; pos 2632200 to 2633098 reverse strand)
gaagtggttaagagcataagacgaggccagaaagggttagttttttcattctttgtctttttattgagtgtgatttatgattgttttgtgttgcagatggcttagctgatgtatatgtgttgatgttttgtgttattaattgattagttgatgttattgtcctgcaaattgcttagttagttttgaaatccgtgtacaaataagccgatgctctggattaaagtaatgaatgtagcatggtactgtacacggaaactgaactatggatcgacatgtctgccatctctgattttttccctgattagacggcctggtttagatccacattctctgtttgtgttgtgattatgtttgtgaaaacggtaacatgttcttctatgatcattcatgatgttatctactagtgtaagctctttatttagctgattttgaaagccgtctacaattaagccgatgctctggattaaaatagaatgaaggaagcatggtactgtgcacggaaactaaactatagatcgacatgtctgccatctctgatttttcgtgatgagacggcctggtttagatctacattctctgctttttgttacttattatgtttgttttcattgatgttatgatagttgtttgcatagttgatgttatatccgtgtacaattaagccgatgctctggattaaacagaatgattgtagcatggtactgtgcacggaaactgaatcatgggtttcaaatgtctgtgcctgctctgagttccttattggttctttgatttgcgggcctgatttgaacccacatttttacatttctaattgttttttccttcttctacgcaaacagtaaattcttttatgttttgaatgttgtatctgatgtgatacgtttgtgtttgtgcagatt

SEQ ID NO: 4070 - DNA, 813 bp, Arabidopsis thaliana
  Intron number 1 from transcript AT5G17260.1 (locus AT5G172 60) derived from phytozome v7.0 (chr-ID Chr5; pos 5676954 to 5677766 reverse strand)
ggacttgccaggtaagaattatttagttaaccataaatcaatctatcagtatatatatatatttggaatgagacccttttatggtctaagcgctgaataggttttgaacgtataggttcgaaagatagagtgaagaaaagaaaaagaatatatatcacaataacaggacaactataatatagaacacttttaccaaaattatatgtatacatttatattggtttgcatattttgattgatttgaaaatcgaagcaaaattttgaaatatttctagaattcactaatcatgaggattttaactaatatttagaaatccctttaaataacaaagagttttgtgataccatgtgttttttttttggtactagctttgactttttcgtatatatcaagaaatcaaaattttaacaattaaaatgaatcaattcaacgtttggattagtttttgtcaattcaacttggattggaagtatatgatttttctgaatatattatataacaatatagccataatactatagtagtattgattagagcatacgcaattgtaggattccctctggtcaaatcctcaaatacttttcgttaacctctcatggaccaccacacttttatgatagtctacactttgtaccttagggtttaatcttgagagataacatattttacaggggacagaataaaacaaataaaaaccatatatagagaaactcaatttgaatcgatattttgtattcaaatgttattgtttactaatatactcaaccatgtcaattggcagggaagtcactgattcctagcaaagaccaaga

SEQ ID NO: 4071 - DNA, 967 bp, Arabidopsis thaliana
  Intron number 1 from transcript AT5G24950.1 (locus AT5G249 50) derived from phytozome v7.0 (chr-ID Chr5; pos 8596446 to 8597412 reverse strand)
tttccccttacggagactattggaggcagattaaggtgtttttgctaagtcattaatttatatatacagttaacaattagttgtggttagctctctggatttgctatctgtggcctattatataatttccaaagtctatatttgattaagttttaccagttagattgatagttacatgttgtagtgaatacatgcaccgtgcgtttgattaattttgatcccccttccgttttattttaatttgagtatcgtcttgtaaacaaaaaatgtcgtttaaaaaaaaattcaattttattttatagttttaatttcttgaccaataaaaaatttacataacatattaataaaaggtaaaaatagtattgtttcgttaatttgtgagtaaaaaactaaaagacatataatacgaaatgaattgtatactatttacttcttgaagtacgtttgttttaaaagtcagaaggtatttacttgttgaaatacatatacagttctataatgtttaatcttccaattgaaaaatacaatacatttaaataaaaccattaaatatttttatacaaactttcttattagatatttgattttcgtaagtttagttaataagaataacttgtatatgaaattaacattgtttggcaagaataatagcagaaataaataaataaataaaaaatgagaagaattgtggacttcatacataagaattagtgtttcttttctaatatatagaggatgtaataaaggcatgagttgagctttaaaagaaaaaaaaacatttgctttgtgcgtagagaaagaacagaacacatttttttgcaaaagataaacaacggaagtttgagagaaagtagtatttttgtttgttaaaaactttgatatattaatgctcttgatacttagatatattaattttctcattaagaaactgatgaaagtattacgtctgttttgtgaggaagactgt

SEQ ID NO: 4072 - DNA, 254 bp, Arabidopsis thaliana
  Intron number 2 from transcript AT5G42630.1 (locus AT5G426 30) derived from phytozome v7.0 (chr-ID Chr5; pos 17074907 to 17075160 reverse strand)
tcaagagtcacttgcaggttcattattttttcttcattttttatatataaattaatggaatctcatacgaattcaaacacataaatgtagatagatatataggtatatgtaaatatgtatgaaatgtatataattgggccactatctaacgcatgattgcatagttgaaatgaacttagccaaacatttcttttattttttttcgtcctttaatttgtttttgatttttcaagaatgtgtgattgttaatgcag

SEQ ID NO: 4073 - DNA, 921 bp, Arabidopsis thaliana
  Intron number 1 from transcript AT5G42790.1 (locus AT5G427 90) derived from phytozome v7.0 (chr-ID Chr5; pos 17159739 to 17160659 reverse strand)
gtcgtctcgttgttcatcttgctgataaagctcaggttaggcttttgtagtttgttgattgagatttggtggaatttggaatcgattacgcttggttttgtgtgattcggtgataagtgtgttgtaattgttaattgaaatttgaggaatttggaattcgattacactgtgaatcactgagctcaaatttagccattagcttcttgactttgtgcttagggtttgatctgagctgattaggattctaaattgcattaaataagagttttcttaatttatcatagcagaaacttgaatcttgtttagtgaaattgtttgcatgtttgttgttactgctgcataatcttgtatttaaaagtttaaccataactaagagcttaacaataggattctaaaagaaagagatttgtgtttcttctggtgcttttgcttgtttctgcagtttttatttggagttattgattttcagtacctctaagaagtgaattccgctctttgttttgcatcgttctcaccactatgcacttatcttaccagtcaattactcctgctaggtgcttgttcgacatcttttctgtaattatgtgctacttctcactttgtttttccacctatctaatggtttcttaagttagctgttttatccacatctgcataaatacttttcaaagccattgggaagagctcccatatattatatgtgtttataaaaggaagggtcttgtatttcctcattgtcaaactttattagttggtttactcttttgtaggagagattttacttgacaggtccaacttaagttacattattgtcatatttcttgtctttaccaagggttttttttgttatatttcttgatctggaaaaggaaatatttatgtgtatgtttgcctttatgaacaggtctgtacccaacgatc

SEQ ID NO: 4074 - DNA, 836 bp, Arabidopsis thaliana
  Intron number 2 from transcript AT5G43130.2 (locus AT5G431 30) derived from phytozome v7.0 (chr-ID Chr5; pos 17320095 to 17320930 reverse strand)
acaacttcaataccccacgtgacaaacccaggtttggtttctctacaaattcgctcttaaattttatgtctgagattttaatttttgtggtactattagttaatataaagatagtatcttttggttttatcttggattggctgctttgggaagctttgacatgttagcaaagttgtgcttgtttttaatatatacagttttctcagataggttattactcttggaacatggataacttaagaagatgccttggttaggctatattgtaaaccttgctaatctagtgacatgtttggaagtttcagtcctgtattaaagcaatagttaaggtcatgaaatattagtttgttagggtttctgtatgttaatatcgggataagctttgtcattgccaatatagcctgtactagttgattgttgagtcattaaaattgatcagtgtgatgggatttattagccagggtagacataggttggtgatgctgatactattttagtgttaggctttgttcttggttcactgcaatcttgacgatgattacgtgtctccttaaatcattattttctgtctctggtgctggaagtgatctctttcctctgactacaccattaaatattgaaatacaaataggttgtgatttgtggataggtgtatgagagctactgagtatgcattttgtgtgcataatctgctacaacaaaatcctgtcttttgtccttttttgggtattatatgatttttcctccagtttaacttgtgatttgagtatcatcaaccaattgcttctattatttttataggaaacaaccattcttccaggcagcagttttcgaca

SEQ ID NO: 4075 - DNA, 792 bp, Arabidopsis thaliana
  Intron number 1 from transcript AT5G43980.1 (locus AT5G439 80) derived from phytozome v7.0 (chr-ID Chr5; pos 17694922 to 17695713 reverse strand)
gtgttcccaacatagagccattatcaggtatacactaattaaatcactgttatatttttccttttgatataatactttcagatgattagaaaattagttctcttattaaagagttttaatcgtataggtcgaattggtaacataaaacggtaaataaaaactttagcgcgaaacagagtaatagaaaaatggtggaatttagtagtattggtatataattagttggtatcactgtttatgtttgaggtatgaattagtacggtaatatacttgatatgaatcgaacacatatatgtatctttagttgaagtatgaaaaaacttttttccattttagcgacatattttatctctacggtaaggagttatttaatcgaataatagtgagtgttagattttgtatacaaatattaatagttcggtgatagttacacacacatgaatctcgtataagaatgtgtatatctttatgtagtttcgttgtcaagtagactaaacaaaaactaatggagacaagacgaaaacaaagaactagtagtggaagaagatattaaaaccgaaaaactagtggggaaatagattacttcgttatagaaaagaagagatttttccaaatgttagaatattgacacatcattcaggttacatgtgagtgaggctagctaatatttttaatttaattttctttgataattaaaatttgaaataagtaattataatgggaatggccattaatgggtgtttgtgtgtgtgtgtaggtggagagaagagacaacacacagaaaggacgata

SEQ ID NO: 4076 - DNA, 591 bp, Arabidopsis thaliana
  Intron number 2 from transcript AT5G44020.1 (locus AT5G440 20) derived from phytozome v7.0 (chr-ID Chr5; pos 17713286 to 17713876)
gccggttaccacagctggtctaacctccttctgaggttcgaatcatatttaataaccgcattaaaccgaaatttaaattctaatttcaccaaatcaaaaagtaaaactagaacacttcagataaattttgtcgttctgttgacttcatttattctctaaacacaaagaactatagaccataatcgaaataaaaaccctaaaaaccaaatttatctatttaaaacaaacattagctatttgagtttcttttaggtaagttatttaaggttttggagactttaagatgttttcagcatttatggttgtgtcattaatttgtttagtttagtaaagaaagaaaagatagtaattaaagagttggttgtgaaatcatatttaaaacattaataggtatttatgtctaatttggggacaaaatagtggaattctttatcatatctagctagttcttatcgagtttgaactcgggttatgattatgttacatgcattggtccatataaatctatgagcaatcaatataattcgagcattttggtataacataatgagccaagtataacaaaagtatcaaacctatgcaggggagaag

SEQ ID NO: 4077 - DNA, 559 bp, Arabidopsis thaliana
  Intron number 4 from transcript AT5G48100.1 (locus AT5G481 00) derived from phytozome v7.0 (chr-ID Chr5; pos 19491168 to 19491726 reverse strand)
acatcctggtttcttgtatccttgctctaaatcaggttttgttataattttcatttttttttttatcatttctccttgattagtatgtttttgatccgtatatttatcacaatttgtgggataaaaactttatacaagtgtaactgtgaattaaaatcattatatgtgaagtgatagactaggaaaacagagtaaaatgattagaatgagcatttgttaaaatcttttttgaacacaaaaaaaaacaaaagtaaaagcatcttcatttgttgaaatcttctttaaaagttttttttttgtttttaaattgtttaaaatttattgggattttataagataattatttgtatttcattctattggttgttagttgtgattactcattaggaacttatgtgtgtgttagtatttattatataaaacatttttgtttatatttttgaaagtattacattatctttttgtattatgcatgcgtatacgtttaaaacttacctagtaattttgttattttacatgaacagatacatttcatctcacggtagagaaggggaaaacc

SEQ ID NO: 4078 - DNA, 494 bp, Arabidopsis thaliana
  Intron number 1 from transcript AT5G54400.1 (locus AT5G544 00) derived from phytozome v7.0 (chr-ID Chr5; pos 22091141 to 22091634)
tactctctctactctacgtacagctcacatcgaaggttcgttagttctttttttttacgttgacttttttgacttatttcaaagtcgtttctcgttgaccaacatattattttgtagatttccgactatattgcgtgattaacgggttttaaaagtaattatttcagatatatataattattatcagcagatttatctagtggaaatttggcttagaggtaattttattatagttgagcattctaagaaatcaagaaaaactggaataaaaatataatcaaaactgatattgttaagttttttaaaactgtcgatttagtgtttatacatgtcattatttttatatggagaaccgaattttgtaggatttttgtattagattcacgacatgtatcttttgttttctttttttctttttcttgtcattattattcattgattttttttagttgagatgtgtttaatttgtctataggagtacaagagtacgtgac

SEQ ID NO: 4079 - DNA, 664 bp, Arabidopsis thaliana
  Intron number 1 from transcript AT5G58787.2 (locus AT5G587 87) derived from phytozome v7.0 (chr-ID Chr5; pos 23742766 to 23743429)
gctcttgaagccgatattcaacacgctaatacactgtaaattcctccattctccacttttattgaaatttatcgacttttattgtaaagtctcgatttttagtttatctcagcgttcaagttagtttttttttttattctagttgttgcttaattttgtttccctttgattggtttgcatgtaagagaattgaattgaaggttccttcttgtttgcagtgaaaatagatgtgatttttctttttttaggttctgtagtttgattctctgaggtccactagttgagaaagtgatcactgagttaggcatttatgtagattggaactgtattttagtacaagcaatgaaagtttaagctcgtaattgattcttgtgattcttgttcttatctagttgacttgaagaagctgctttagctgaactagtattggtctctacacagatcaatgtataggctgctactgctagtgttgaagatgcaactttcttggaatctgagaatgtttctgtgattgtgtgttatggatcttttatattagtgttaaagttgtggcagtatatttgctgtttgaatattttaatggttggaggctgcttatgatgatcttgttgtgttttcgttttggaaatgaataacagagctttagattatcctcgggagaagg

SEQ ID NO: 4080 - DNA, 857 bp, Arabidopsis thaliana
  Intron number 1 from transcript AT5G58960.1 (locus AT5G589 60) derived from phytozome v7.0 (chr-ID Chr5; pos 23805822 to 23806678)
ctcacttaatcccaggaatcacaggtaaatattccttttcaccccagttggaatatcacttgtgactaatataatttgttcttttgtttaaagtattgatgtgtttaaagtgttttcttaacatggggtttaatgataaattttggatttataaaaaggggacaagaattttctatatgatttggtttggattaggcaagatccatgactttatgggatcactttctcgtccaatcaaaagagagattcctaaaaaatagatacttgaataattaccacttaataatggctatttttttagaagagagaatacaaaggataaattatagtcttaaacatatttaaaactacataatccatttttgtttctcattttttttctttctaaattgtttctcattaaacgcatgtaaaaacaatatacctattgtaaaactaacctatgggctaattaaaaaaagaaaaagatattggtatttaaataaaaataaaaataaaagaggacgaccatgtgtgcaataagaaagttgtagaaagacccaaaaactttccccgagggcccaaaatcgaggttaagcttttttacacgtcacatcgattacaatttttttaaaagtcaggggtcaaaacataaaactaaaaagggttaattcggtaattatgattcagttcttattgctcttcttctccccacactgagtcactgactctatcactctcagagattaggatagaaataatcagaaatctccgtctattgtcgtcgtcggccggagattaattattccggtgacgtttagttggtttttcttcattgtgcagcaaaaagaaaaagagtgagcgagagagcttagaaa

SEQ ID NO: 4081 - DNA, 698 bp, Arabidopsis thaliana
  Intron number 1 from transcript AT5G62440.1 (locus AT5G624 40) derived from phytozome v7.0 (chr-ID Chr5; pos 25072931 to 25073628 reverse strand)
ttaataaggtaatacatatttgggtttactcttcgtctttgtcttttggctttgtttattgtaaagtttcaaattttttggaaatattcattcctttgctcgagacttatataggttaatctaagagctctgattgtgattattaagttctgtgatgtgtttaggaagatgttttatcaatgaatctgatgatgatcgtgctttgtatttaaactaaaagaaattgagaattgggttcgcctttgtattggtcatatgatttgattttggattcagtgtttggtgttagaattttgtttttgtctcaaattagtggttgtttacaatgattgtggatattgtattatgtttagggagatgattgtggatattgtattatgtttagggagaggattagtgaagtggagatagcttgtaaattggactcctttgcagcttttttactagttgaaaagttcaaatgtatcgtgttcttactgattatatgattgtggattgtgtgtgaattagaaagtttttttgggtcttgatgtcatataatggttagaagaatgaagttaatgtcaaattttgagggcacaaataaaagataaaacattgcatagtcatgtaatatattacagttgttgcagtttcttttgagcttccaactaactaactcgttgtactgaactttgttctggattgtacatttcagt

SEQ ID NO: 4082 - DNA, 589 bp, Arabidopsis thaliana
  Intron number 1 from transcript AT5G63580.1 (locus AT5G635 80) derived from phytozome v7.0 (chr-ID Chr5; pos 25455084 to 25455672)
tttgattactggcccaagaatcctcctcaatacaggtactactaatctttggctacaaatggttgtcttctgtctagttaattaggggaaaaataccaaagaatgaatcgtttatttatctaactatttacgttgaatatgaaaggaacaaacgtaccgaaaataagcaaatttagtggaaataaaatgagtcggataaatttcggtttgagtggtttgtcaatgattgattataggaatagttgaatgatttagtaatagtaatatttgagctaaataaaattgttaggataagaagttaagaactctaacaccttaattatattaagaggctgctttaagcagatttgtgtttttttgttttgtttcagttataatataaacacgttaaatatgtatagcagaaacttttaatactatgaaaatgtgaaaaaattgatgaatatttttgaataaaaaaagaaaacagatcacattttcaaaacatgaatacctgaaaatgtatacagttcatcatatgtattacttatttttttgtatctaattcattatagggaagtgattgaggagtacacaaaggagactaaga

SEQ ID NO: 4083 - DNA, 252 bp, Arabidopsis thaliana; identical to SEQ ID NO: 12
  Intron number 1 from transcript AT1G01170.2 (locus AT1G011 70) derived from phytozome v7.0 (chr-ID Chr1; pos 74444 to 74695 reverse strand)

SEQ ID NO: 4084 - DNA, 252 bp, Arabidopsis thaliana; identical to SEQ ID NO: 12
  Intron number 1 from transcript AT1G01170.1 (locus AT1G011 70) derived from phytozome v7.0 (chr-ID Chr1; pos 74444 to 74695 reverse strand)

SEQ ID NO: 4085 - DNA, 337 bp, Arabidopsis thaliana
  Intron number 1 from transcript AT5G63190.2 (locus AT5G631 90) derived from phytozome v7.0 (chr-ID Chr5; pos 25345808 to 25346144)
acaggttagattttgttttgtatagttgtatacatacttctttgtgatgttttgtttacttaatcgaatttttggagtgttttaaggtctctcgtttagaaatcgtggaaaatatcactgtgtgtgtgttcttatgattcacagtgtttatgggtttcatgttctttgttttatcattgaatgggaagaaatttcgttgggatacaaatttctcatgttcttactgatcgttattaggagtttggggaaaaaggaagagtttttttggttggttcgagtgattatgaggttatttctgtatttgatttatgagttaatggtcgttttaatgttgtag

SEQ ID NO: 4086 - DNA, 377 bp, Arabidopsis thaliana; identical to SEQ ID NO: 13
  Intron number 1 from transcript AT5G63190.1 (locus AT5G631 90) derived from phytozome v7.0 (chr-ID Chr5; pos 25345768 to 25346144)

SEQ ID NO: 4087 - DNA, 519 bp, Arabidopsis thaliana; identical to SEQ ID NO: 5
  Intron number 1 from transcript AT2G47170.1 (locus AT2G471 70) derived from phytozome v7.0 (chr-ID Chr2; pos 19366745 to 19367263)

SEQ ID NO: 4088 - DNA, 332 bp, Arabidopsis thaliana; identical to SEQ ID NO: 8
  Intron number 1 from transcript AT4G02890.4 (locus AT4G028 90) derived from phytozome v7.0 (chr-ID Chr4; pos 1279665 to 1279996 reverse strand)

SEQ ID NO: 4089 - DNA, 495 bp, Arabidopsis thaliana; identical to SEQ ID NO: 15
  Intron number 1 from transcript AT2G04520.1 (locus AT2G045 20) derived from phytozome v7.0 (chr-ID Chr2; pos 1575240 to 1575734 reverse strand)

SEQ ID NO: 4090 - DNA, 758 bp, Arabidopsis thaliana; identical to SEQ ID NO: 11
  Intron number 1 from transcript AT2G27040.1 (locus AT2G270 40) derived from phytozome v7.0 (chr-ID Chr2; pos 11541504 to 11542261 reverse strand)

SEQ ID NO: 4091 - DNA, 717 bp, Arabidopsis thaliana
  Intron number 1 from transcript AT2G27040.2 (locus AT2G270 40) derived from phytozome v7.0 (chr-ID Chr2; pos 11541504 to 11542220 reverse strand)
attttagggtcttgtgagtgtgcttttttgtttgattctactgtagggtttatgttctttagctcataggttttgtgtatttcttagaaatgtggcttctttaatctctgggtttgtgactttttgtgtggtttctgtgtttttcatatcaaaaacctattttttccgagtttttttttacaaattcttactctcaagcttgaatacttcacatgcagtgttcttttgtagattttagagttaatgtgttaaaaagtttggatttttcttgcttatagagcttcttcactttgattttgtgggtttttttgttttaaaggtgagatttttgatgaggtttttgcttcaaagatgtcacctttctgggtttgtcttttgaataaagctatgaactgtcacatggctgacgcaattttgttactatgtcatgaaagctgacgtttttccgtgttatacatgtttgcttacacttgcatgcgtcaaaaaaattggggctttttagttttagtcaaagattttacttctcttttgggatttatgaaggaaagttgcaaactttctcaaattttaccatttttgctttgatgtttgtttagattgcgacagaacaaactcatatatgttgaaatttttgcttggttttgtataggattgtgtcttttgcttataaatgttgaaatctgaactttttttttgtttggtttctttgagcaggag

SEQ ID NO: 4092 - DNA, 782 bp, Arabidopsis thaliana
  Intron number 3 from transcript AT1G65090.3 (locus AT1G650 90) derived from phytozome v7.0 (chr-ID Chr1; pos 24181175 to 24181956 reverse strand)
aggtttatacttaatcctatctcttgtgagttagtagctgaatgataacataacagaatatcccctgcctctagattaatccatggtgattgattagatacttgccacacatttgtgtttgtgttaatgctatcttttctatggttaacatgagttatcttcttgagtgatccattggtcaaaaaaaataattttcactgtaagtttaagagaagaaaagtgtccacatggttttggtaatttgtgttcaactctgttacagtccctcattaactagtgccaattgttctagataactaaaatcattctctgatatcttgactaatggttcagccaatagaccaagctagtggggcacaaggaaccggggaagagaaacgaaaaaacacaactaagaaaaagaagaaaaccgggcgtgcaggtaaccggtttctaaaatgtcacgttatgggttacttagtgtggagggcagcttatccgtttgttcattgctaatatttctttatgccattagttatagacatggtcatctagtaagctgtgtgggagatgtgacctcttggaatgctgttttgatagagttgattgcgtagttaggcgtgtagtaacatttttttaactcacatctctaaaattgtggtgggggatccaaatgacttttattataacatggcattgatgtagattacctgttctgcattgagtttgatttcagaagctagtgtcaaaatgagccgaatatgtatggttttgaatttgcaggtgtatagtgaggagcaact

SEQ ID NO: 4093 - DNA, 676 bp, Arabidopsis thaliana
  Intron number 1 from transcript AT1G11170.1 (locus AT1G111 70) derived from phytozome v7.0 (chr-ID Chr1; pos 3740864 to 3741539)
cttcaggtctcgtctaattcttgaattctcttcttttctgttccgtaatttactttctagggtctctagatttgtgtctcctctaacaaaagatcctatctttcgacaaatttaatttcatcattgacctttgtcgattccattctctctctatctctctgtttcttcgaaaacctagaggttttgaatttaatgattcctttttatgtcaataaatttgcaatcaatgggagctttttaaaatcatcgttatatctataaacaaaaaaacagtaattactcttcttagatctaaaacaattaataaatctttcccttttttctcatcataattttttcgtatttaactcttgtaaaaatttgcttagccgtttcgctttctcaggccccaggtgattcgtgtcttctaggtcagcttgtgaaacctgagagaagccatcttttgtttgcggttacaaactttgccgcttcaatatttcattgctgttttctgggaaaacctttttctagttttttcggcttattatgccttttaactttttgtgcatttaacatttattgttagtgctttgcttagtgtaaagtagtagttctctttgtaatattaccataaggttcagaagtaaatttttctaaaattgttttcttgtgggaaattcagactgatttcagcaac

SEQ ID NO: 4094 - DNA, 417 bp, Arabidopsis thaliana
  Intron number 1 from transcript AT4G00530.1 (locus AT4G005 30) derived from phytozome v7.0 (chr-ID Chr4; pos 233097 t o 233513 reverse strand)
gcgattacggtcccgaacccaacgttcttgatcccgttagttcccccattttctcctttctgcgaatttgattatttagtttccatgaaaatctggataatgaaactcgtttctgattagtttttgacaaaatttggaatcagaagatcgatttagggtgattcttcttagtatttatcttcctctatgatacttcttctagttgaagttttggtaatacgaatgtggaactaattgcttgatcgatcgattgtttgtgttatgattcaggtttagttattggtgggttatgttacatctgttcatgttagttattgaacattgggtgcgttttctcagccatttaggtcttaatggtatttttttttgggtgtatttgcagatcaaaaggaagatattagcagcacaagattctgt

SEQ ID NO: 4095 - DNA, 438 bp, Arabidopsis thaliana
  Intron number 1 from transcript AT3G14020.1 (locus AT3G140 20) derived from phytozome v7.0 (chr-ID Chr3; pos 4642475 to 4642912)
ttgagaagaaaaataaaaccatttttgggtgataggtgagaaaaaaatctaaatactttttttgtttcttcttttttagttatgttctgttttctcgcttgttgtttggatcaatactgttccaaggttggttttattttcccttctcaagttagtggaattgcatgtttgtgctttctctgttttttttatatctaatttgtaatcaaatccgttaattctcaaagtctgaatctttactttctattttagtatggtaataattggatctgctctatggtttctttctcttagatctgttgtttgttgctttttctttgtggatcaagaatggtttttgattccttccaagtgaataatgcaatatcaatatatcatgactggtttttttacttgattggaattacaggtgactgaataaacatctcttgtctcttg

SEQ ID NO: 4096 - DNA, 419 bp, Arabidopsis thaliana
  Intron number 1 from transcript AT3G57780.1 (locus AT3G577 80) derived from phytozome v7.0 (chr-ID Chr3; pos 21402362 to 21402780 reverse strand)
aagctctgtttcttcatccagattctcagtcactcgtaaattttcatttttttttttccttttttaatatctttcctctatttttcaaatatagaagatcaaaaatcattcttgtgaatgcactaatatctaatagcaactttgggaaattgtgagaatcttactgattgcttatgtggggacttgccgtttttagtattaaaaatgtaaatcattttttttccttttcatgtagattgaaacgaaccataacaagtgtcaataatgttgtcgttttccttatttcatatcctaatttgccttggatttcaggaatatacgcaactgagtttttgtcattttcttctgtttcagactattgatcacagctgttctttttttcaggcttttcttgaaagttgttaagtaactgttgcttt

SEQ ID NO: 4097 - DNA, 492 bp, Arabidopsis thaliana
  Intron number 1 from transcript AT2G46493.1 (locus AT2G464 93) derived from phytozome v7.0 (chr-ID Chr2; pos 19080614 to 19081105 reverse strand)
cttaggggctactaaaaaaactggtacaatatataactcaaacattttctcttgttctttttcttttctttacgattcaagagaacttttcattaatggtaaggatgaagaagagactatctgatttggtggaaatcttcaacctcaagttatattcttaattaggtttaaggtttctgaagtaattattcacgcataaggcaagtatagaaaaatcatagtaggatttaaatttgacactacgatatagctattgattgataactgtcttttaacaaatccaatattttacatcaactacggaagtattctcaatctctcattccacattactagcgtggcatttgatctaagtaaacttgtttttttttaattgataaaccgattccacacatagagcgattacattttgatggtttaattagattttaagctgactttggaaatattttgacaggtaatttaagtagtggagtactagtactagttata

SEQ ID NO: 4098 - DNA, 744 bp, Arabidopsis thaliana
  Intron number 3 from transcript AT1G24880.2 (locus AT1G248 80) derived from phytozome v7.0 (chr-ID Chr1; pos 8776305 to 8777048)
gattatctcagatccagccttttacccaattgaaggcaagttcacatactctgttttttttgtcttggttttaatttctcggttttttacatgtaacagatgttttaagcatgattttttgtttaaacagtttgtttttcctacccttaaaacttctctgaattaatatcccatttatatgaccactctaatgtcttcttatacgactacgcaagtgttgcatattcttgaccttttcacacttcatttgcattttagtctaacaatataaatccgcaaatatcttgtgtttatacttattgaaattagtcttccgacatatataatctaggatctatttggattatttgggccatcagtctcattcgtttcattaacatctgagtctttgaactttgtttatctttcctagcttgatattttaatattagtttttttgcgcctctttgtttttgatcatttattctctcaattggatagtatagtgaagtaaataatgtagctatgactttacctgtagcatttacctgtagcatcttaaaaatatgaattaaaaatgatttagctaatttgggcttatgtttataagcatagaagtttatactacaagttcgtttagatttttccagtatcaactcaaacatagtttttactcaagcatagtttttactcaagcatagtttttactcacactaaaacccacatgtagtgtgcaaaagtaagtacccccccacctctgttcct

SEQ ID NO: 4099 - DNA, 537 bp, Arabidopsis thaliana
  Intron number 3 from transcript AT1G14205.1 (locus AT1G142 05) derived from phytozome v7.0 (chr-ID Chr1; pos 4856108 to 4856644)
tactgtcattgtaagtttagccaccagaaaatcttgaatctgttgtgtctcttgaaaaatcttcaaactttgataagagtgtagcgccgcgtaagcagcatttaatcagagtttgctttgttggttacgcggtttacagtattggtggcattgtctttgcttcactcttgaactttgataagagtttagccggttaagtaacatttagttggagtttgttttgatatctacacggtttattgtataggtggcattgtctttgcttcattggtcatcagttgtttcacaaattttctgtcttgattgagagaatggttggatttcatagaggtgacggcatcgagttccagggttagatagaagagactagtctagttgaagttgttgcttgttatatttgcagttacatttttacaatgtaataagaattcagggtcaaggaaactcgatcttgaacaatggttttccctcttggtctcattacatgtttaatgtatttcaggaagcagctaaacgggttggagaagagctcattaa

SEQ ID NO: 4100 - DNA, 587 bp, Arabidopsis thaliana
  Intron number 1 from transcript AT1G16270.1 (locus AT1G162 70) derived from phytozome v7.0 (chr-ID Chr1; pos 5563166 to 5563752)
attttttgagtaagcaacgaggaaacctagagaaggtgagagaaaatcaacaaaaataaagataaaaataaaaagttagggttttgatgcatattcttagatttgaacaaagagaagaagatagtttttgattgttactagctctcacaatccttcttgaatctattccacctgtcaagctctacattttttctttgtggtattgttctatcagttttggattctttgccattttctgattctttatttttttggtgtctgaagctaattttagcgatttggtatggtgaaatctttcaaatcgagcgaaggttttgtttttcttaaattacttctattgaggtttttggattaattgatttaaggttgttgtagagaaagtttccatttttggaacaaaaagcatgtttttggagttttctggtcggattattcatctacaattgcaaatgggaagaactttgatgagtagtctgtgtttaattgatagtttctggaggattcaacttctgccaaaacttaattatttctcccaattgtttttttttgcagcttaaatatttgggaggggaaatttgtagcctaca

SEQ ID NO: 4101 - DNA, 1025 bp, Arabidopsis thaliana
  Intron number 2 from transcript AT2G30370.2 (locus AT2G303 70) derived from phytozome v7.0 (chr-ID Chr2; pos 12940788 to 12941812 reverse strand)
caaaggttcgtaaactgtttatacctcttactctcttgcgtgatctaacaagtaacaattgtttttgtttttttgctgttgagtcaacaattagttaggaaataggaatcaaaaaccgtgttaacttccttttttttggcataactataaccacataaaatccaaaaaaagcttagtttctattttctcctgattcaagcatctttggaggacaagattgatgttgattcatcattaaacacactttaaaaataatataagcttttttttttttttccataaataatataagcttataatgcggggttctctaaaaggactacacaaacaaaagggttgtggctaaactgcgcttgaacagtcagcgactgtgacggcatgtcgagactgactgggcatgcagagatgccatgtactcctaaagaaattctcagccgtcggattggtttcagcgcacacgaggacaaggacagtactcaacttttggttcgttcaccactcgtgggaccctgccttgcttacgatctcgatcgagtggtaatattagcccccacggtgcacgttaacgtatgacaggctcttggaacttctcaatctctctgccctttttggtaatgtgcgtagcgctttttccggagcggttttcccgcgtcttgtctcacatccccaaccctgtcttaaaaatgttttttacctaaactgcgcattttaacaataatatgcgtatgtcagcatgaaatcgcacgttagtaacgcagtcctctcactatcttatgttgatagcagctgaaattgagttcactagaagatactaattattgaacgttaattagaaaatactaattattcttgattaaccatattgtttggtttgttttactagatgtattatcctaatgaagaaaataataaattaggatatgtatacgtttgaatatatatttagtaatgaaaaatgtgataatatgtacgttttgagtatgtgttcaggaggaaggcaagagtaccgtagtgataaagaagac

SEQ ID NO: 4102 - DNA, 775 bp, Arabidopsis thaliana
  Intron number 3 from transcript AT5G23420.2 (locus AT5G234 20) derived from phytozome v7.0 (chr-ID Chr5; pos 7888870 to 7889644 reverse strand)
acacaagcagaggctaagaagaagcctgcagagaagtaagactcgtcaagacttgattgtatagtttctgtatgtgatattgaattatttgaatgtttgtttttgttccaggaagaagacaacatctgatggacctaagccaaagagacttaagaaaaccaatgatgagaagaagagctcgtctacttcaaacaagcccaagcgacctcttaccgctttctttatcttcatgtaatgttttttgttcatacttgctttttttagattgtgatatagtctctagggttgatgctgatgttaaccttttactttacaggagtgacttccgtaaaacgtttaagtcagagcataatggttcgttagctaaggatgtaagacttgaaccgagctcattactatgatttgagtactatgtttagtgtttatgagatttactaatctgggctatgtatatatatgattgtaggctgcaaagatcggtggtgagaagtggaagtctttgactgaggaagtgagttgttttattttcgtgtttcttcattagtgtcatggtgatttgtttactgtgttcttactctggtttgtgttctttgatcatttaggagaagaaagtttatctggataaagctgctgaacttaaggcagagtataacaagtcactggaaagtaatgatgctgatgaggaagtatgtgtttcataattaatgggcagtgtttcacttactaaatgaaatctttagtgttgagatgattcgatgactttttcaggaggaag

SEQ ID NO: 4103 - DNA, 694 bp, Arabidopsis thaliana
  Intron number 1 from transcript AT2G35050.1 (locus AT2G350 50) derived from phytozome v7.0 (chr-ID Chr2; pos 14768838 to 14769531)
aggacgcttcacagtctctggtgccgcctttcctggtataaacctttttctctacttctctccttctttgcttactcgtcttccttttaggtgtatgctgtttttgaattttgatcattattatcgaaaatctctggatccgatgtgtttccacctgaatttcgggtaatgatactcagatcttgcattttctagagtttcagtggttttgatggcttgatcggcttttgttttttggttgggtagaggtttttagctcagtttttggttcgaaatgacgcttatttgtttcctttttgaggtttggaattgtttcacggacttgattgaattttggatttagttctatgttttgatctgttgatttacactctctcaaagttacgatgggtttgctaatagtttggtgaagttgatcgattttagtttcagcgattcctgttagtttaaacttgaagagactagaaagtagtcattttagctagtttcatgttggaaagtatgcacagtcagatatttgtactggatgatctgtccctgctagagtaaagagttttattggtttgtataccgaaaatgttccttaaatagtatggttttctgagttttagccgtatgctattttggtttttttgttcttgaatatgtttgactacttgagtaaagttactcttctcctatttcaggcacctca

SEQ ID NO: 4104 - DNA, 299 bp, Arabidopsis thaliana
  Intron number 1 from transcript AT3G09910.3 (locus AT3G099 10) derived from phytozome v7.0 (chr-ID Chr3; pos 3038122 to 3038420 reverse strand)
tcggagaaaggagaagaagcagtaaagagttctttaatgtttttgacagtatttgttcaacaattctcattaacgtttttcattatttgttttctgctctgtaaagaataaagtttcttaatttgttgtatgaatcatagatttctctgcagaggcaaagttttctctcttcttttttcgattcattcttttacaagataacataaaaatcacttcttttgtttgtttgtttatctaagttgaatttgatttgatctctttactgtagtattagatagagtgagagattgtagaagaaa

SEQ ID NO: 4105 - DNA, 440 bp, Arabidopsis thaliana
  Intron number 1 from transcript AT1G23149.1 (locus AT1G231 49) derived from phytozome v7.0 (chr-ID Chr1; pos 8206835 to 8207274)
gctggtacttccgttgcattggccttgacccgtgaaccaatcaatcatcatctccgatcatattttcaataataatttctgtgttttgattttttgagaattttgaaaaaaagatgttgctttacaagaaaaagaatcagattgttaaaggaaacagaatcttgatcagcgtaacgtttcttggtagtgctggtccgatccggttcgttgctaatgaaggtgatcttgttgcatctgtgattgatactgctttgaaatgttatgctcgtgaaggtcgtcttcctattcttggatctgatttcaacgattttgttttttattgtccaatggttggacctggaggtaacttgtcaaatacgcaaagtttctcctctgttttgtgattatataaagattgttttttttttaatttttagttttcttggtgtagctttgagtcc

SEQ ID NO: 4106 - DNA, 444 bp, Arabidopsis thaliana
  Intron number 2 from transcript AT5G50012.1 (locus AT5G500 12) derived from phytozome v7.0 (chr-ID Chr5; pos 20348933 to 20349376)
gtacagtagtagtcttctgtcgtgtgattctgtaaactgcgatcttacttcagacatagcttttttatgtaatggggtcgtcttttttcttcacattcccttactttgtccgccaaattatttaagacttcgtttggatactctgttttgggagaaggaatcagttggggagaaagtagttatggtttgtcaatcagcgggacagacaagatttcgtacactcaaacacgaacacggtatcacaggaaacattgtagttagagtcattgcatgctttcaacctctccaagattgccaggttattttcttgtttgatgagtttatgttattgcaatatatttagatttttaaaccaccagaacttttttttattgatttcgttttagctttgatgttgtgtattttgcaggctgaatatttccgtcaattgttgaagcccgtcac

SEQ ID NO: 4107 - DNA, 473 bp, Arabidopsis thaliana
  Intron number 1 from transcript AT1G61560.2 (locus AT1G615 60) derived from phytozome v7.0 (chr-ID Chr1; pos 22711738 to 22712210 reverse strand)
gccggtcgtctcctttaaccttcgtctctgtgtttatataagaacatatacgtatttgatgattacaaaaagacaattctttatccttctttagatttctgtggaaagttcactatttattaggagagacaatttcaaaaaggaaagctttttgcttggaactgttctgtgagttctaatggcggatcaagttaaagaaaagacattggaggaaacttctacatgggccgtcgcggtggtttgcttcgtcttgcttctgatttcgatcgttattgaaaaacttattcataaaattggatccgtaagccactttcttaaccttgttctcctccttcaagattctctgtttctgtatctgtttagttcttcccaaaaatcaaacttgattgttctcacgaacttacatcagtttatgtttgaaactgccaaaacccaaacgggttttagtcttttttttttttttttttttttgt

SEQ ID NO: 4108 - DNA, 745 bp, Arabidopsis thaliana
  Intron number 1 from transcript AT2G37300.2 (locus AT2G373 00) derived from phytozome v7.0 (chr-ID Chr2; pos 15663750 to 15664494 reverse strand)
tgccgcacaacacaagaagcagaacagataaataagtacacatataaatgcaaccgacaaaaagtttcattaaaaggcaaataaatctatttttgaggtaaatatgtttgacaaagagttttgtgacacttgtaaaactagaaacaaaacagtaacgactttaataattattttttctttggaattaacgtcaaagaacgtaatggagattaacaatcaggatgattcttttggtgcacatgcatatttgtcatgtaaagataatatgcagtaaaaattgaagatagtagtgaattgattatagtttttatctttaaaaaggttttgaagtgggagacttaccaactcacgggagctgcagcaggcaacaaaagtccaaagcccacactgtcgttttgcttacaaatcaacttatttattgtccctacacgacagattctgtttttcattttcacaacttcaaattttttttgggggttttaggttcatttccctcctctctcaagtctcaggggatttgaatctggatctgtttttctttatttgaagttggaaatattttgaattttcttagtggtaagttgattttaaagtatgatggtgatatgttccttattgaatgaacattaaatgacatgatctaacaacacattggtcttactattgttattttttagtttcttcttttgcagttagttgtgaagttgaactttaagattttaccaatttagttttggttggttga

SEQ ID NO: 4109 - DNA, 841 bp, Arabidopsis thaliana
  Intron number 1 from transcript AT4G31480.1 (locus AT4G314 80) derived from phytozome v7.0 (chr-ID Chr4; pos 15263304 to 15264144)
cctcctcctctctccctggatctcgtacctttgaggtttgtctctctgtgttaaacttgcgactcagatttcatagagatcgatcccacttttgccttttcctttgtgaaaatctacaatgttcaattattctctggcgctctttgtttgatctcgttgaatattgatctgattccggtaggaaaccgattttcatgtttgtgcagctgagtgagactgcgaattatgtagatttcattgtttgttcatctaatctggggagatagatcgcattttttttttttttgaattttggttgatccgaagctgttttaactgatttttcgtttttatgttattattttggtcgtagttgtagtacagtgatgtgtattgctggatctgaggatttagatttgtcaatgttttgcatctttgggtctctgattggacattaccgaatattcttctgaaattatgatgttttctcataaaccacggattcgagaatagagatcatgtattcaatgtattgaaatccaagcagagaggtatggattatcgccgatgatactgttgaacttcttgtatagaacttactctagcactgatgaggacactagtaaggtgcttatattcagtaattcgaacttgaaatcgccagaaatattaaaagttttgatatcttgtttttacttgtgatctatacttcattatgtctttaatcaattgtaacaattttgctctattcatcttctatttcttatattaacaaaggaacacttgttcgtgaatggtttttccttttcatttgagctcacagatttttttctctttcactttttgtgcagcaccggagaag

SEQ ID NO: 4110 - DNA, 359 bp, Arabidopsis thaliana
  Intron number 1 from transcript AT2G04865.1 (locus AT2G048 65) derived from phytozome v7.0 (chr-ID Chr2; pos 1711790 to 1712148)
aaagttcttcatcctctgttccgcgctgttttctggttagtctatcccttctccggcgtcgtttcgttgtttaacgtctttgcctctctgattctatattgttcttctctgtaacccaacaatgataataaaaatctaacctttttctctgttaatcgaattcgtagtgtcttttacatttgtcttgaaagattggatattttttattagggtttcttcgatttcatggaatttaatctataatttgcttcagggcacaattttttttatcaaaattattgttttttttggtaaagtttgaagctttggagtaattttttgattcaagtttggttttgtgcaggtgagtgttgattctg

SEQ ID NO: 4111 - DNA, 413 bp, Arabidopsis thaliana
  Intron number 1 from transcript AT3G55560.1 (locus AT3G555 60) derived from phytozome v7.0 (chr-ID Chr3; pos 20605837 to 20606249 reverse strand)
ataaaggtaagttttttatattcgaatgggaagatttttgtatctttttttggaggattttatttggttttttttccttatttgatcttagctttttggggaatattgctttaaggaaaatttattttgtgcgttttcttgttcttcttgtagatctgattctttttttttcctctctctcaggtatgatgatagcaaacaaatgatacccccatgtcttgtgtgtctgcttcatgcaacatgttggtttggatttggttaatctaaaagtttaagataaggttttcggattctcttcctgtcttgtaatagtttcttgtcggagagccatcaacaccaacttcaacaaaaaaaacaagaaaaagaaaaagattctctttctcgttttatttccattagagaagaaaaaaaga

SEQ ID NO: 4112 - DNA, 463 bp, Arabidopsis thaliana
  Intron number 1 from transcript AT1G33390.1 (locus AT1G333 90) derived from phytozome v7.0 (chr-ID Chr1; pos 12104139 to 12104601 reverse strand)
aagctcgacaagtagaatcgaattgtcaaaggttttacccagtctctctctcgatcttctttgtaacccacatgatcgtttcttatgacataacttgggtttagagttcgctttaaatttgagtaaatgcatgcttgtttcatcgttattacggatttcggttttgggtttagtgtaatctgtgggaagcaaaaatttgatgtcccttgttgtgatttcggcgagaattacatagcttttgagtgaaaactccattctaattatgaatttgaaagctatatctctttgagggattgtaaagtgtttccagttgttgaatcaattagttttgtttgattttaagacctgagtgtttttttttgtgtgtagaaacaaagtggttgttgttaatcagaatcccctttaagtttatctctcttctgtgtcaggttgtctgaagatccctgagtagacaaacagtttt

SEQ ID NO: 4113 - DNA, 578 bp, Arabidopsis thaliana
  Intron number 1 from transcript AT4G04980.1 (locus AT4G049 80) derived from phytozome v7.0 (chr-ID Chr4; pos 2547285 to 2547862 reverse strand)
cgataaccttctgtcgcaaaatctcaagattgcaggttcttttaaacatcattgttcctttgtgtttatatttacgtgtgtctttacattttatggttttgtcttcttctctaaatgaattaagagcacaaacgctatatgcaaacgagaattatgcttactctatatgtttggtattttttttttactctaatcaccatttatattaagttatcgaaaagagagcggagagtcattcataaaccgatatacttacatgggagaaaatgctattatgagctttagctttcttcgctaaatagtctgctcgggttttaagactccaaagaagaaatctaatactaaaagatgaaaaaaacaaactaacgaacggaaggacatatgtttggcatttgtgtttgtattttacacacttattttatcaaaaagttaaactgaaaaaaaaattttatttttacagaacttaatgtgtttttgactcacatctacatttatgtttgcattaacatgttaaaatattattctttatgatgttgtgtttaggtcgcaagagggcttgctctaaaaaggcttatcaa

SEQ ID NO: 4114 - DNA, 658 bp, Arabidopsis thaliana
  Intron number 1 from transcript AT4G35020.3 (locus AT4G350 20) derived from phytozome v7.0 (chr-ID Chr4; pos 16672209 to 16672866)
ttcatttttccttttcgattttttttttttaatttgtttttgctatttttaaatgttggtttcaccctattcttcgcctattatgttggacataacataacaaattagtgaaattaccattcgttttttttgggtccccataacagattctttaacggtcaataagtgtttttaaaattaacggtcaataactagctagacagattcaaaaggtaagcctttataccgtgattggttataaaaatattaaatattgaccttaagttcacgttttttttagtgtctcaacatttatttcttagagaagttgtatgtacatttttaatgtttacttcaacataccgggacaaaaatattatcatttaacatgtaacagaagaatatgtatccaaaggaggctgatcaataaaaattaacactccaatcatattgcattgtaaaaccagctatattttttattgatatttaaaccatagttgtataatcctaatgacacatcggaaaaatcctctaaaccagtcaaaatttagctaaattttttattgatatttaaagatcaatctaaatatgtatagatttaggcatttagtatatgggctgcatagtattagatgaaaacgaagtttaaaaaaaaaaaaaaaaaaaagtacatagaaat

SEQ ID NO: 4115 - DNA, 637 bp, Arabidopsis thaliana
  Intron number 3 from transcript AT2G26550.3 (locus AT2G265 50) derived from phytozome v7.0 (chr-ID Chr2; pos 11291834 to 11292470 reverse strand)
acacattgctggtggtcaagttatttgtaagacaggttagtttctttgataagtgttcacagagtaacatagaagaaattttcaactgcataatgtcacatctaggatattgaatggtaacagctagtttgatagagttagagattgatatagatatagtggattcaggagagttgggtttatcgggagttttgcggttatggtgggtatgagagagtggcgataagaatgagaatgagaatgtgagaagatttccattcttcttcattgagactcaacttacaaatagaactgtgataaagaaacactcagatcctaaaccaaaaccaaccaacaccaggcttgctcaattagtttaaagcttgccccaaaagaacttgttaaccgactgttagttaggttaatgtggtattaaccaacgggtgaactatgcttttgtctttatttttgagatttatcataactgtacattctttttgttggttctgttgtgttctggttcttacttttatcaatatatcccatgatttggactgtcataattgtttggtaacccttatatgcgaggtgttcaaatgtaactgatcagttgattcattaaggtatctgagaaacttctggaaggaaaggagctgga

SEQ ID NO: 4116 - DNA, 460 bp, Arabidopsis thaliana
  Intron number 1 from transcript AT3G15040.1 (locus AT3G150 40) derived from phytozome v7.0 (chr-ID Chr3; pos 5066177 to 5066636 reverse strand)
agctgctgttatttctttttcttcccagagttcaggtaatttctcgaatcttttttttgattctggatctctctttgagataattgcttaaattcatcttcttggaatccgacctttggtttgctacaattttcattgattcgagatttctggaaaaaaagaacgacctaattatcatgttcacatgaaaggttttcaatttattgcggttatgattgagttccttgagtaaatctcttggaagatttgattgaaaacgacccttcactttcttttttacccagaaaattgaaaaaaaatcgaaactttcaacaatggatcgatctaattccaaactctactctttaattttcaggtcgttaaaaatctaatcttttttggtgggtgaagactcttctttatcaaatcaacctaatttctcagattctcagatctcaagagttttgtttttttagcaaca

SEQ ID NO: 4117 - DNA, 676 bp, Arabidopsis thaliana
  Intron number 1 from transcript AT4G25672.1 (locus AT4G256 72) derived from phytozome v7.0 (chr-ID Chr4; pos 13086228 to 13086903 reverse strand)
ccatattgccgaggtttggatctaaatttcatcatcatctttgtttctccgtttatcttcaatttccctttatcttttcaatataattgacttatttcgttaaaagtctttttgattagcttcctcggatcttatgcttattcatggatcttagacctacataatggattaaatccgattgtttctcttattgttcttgttgaattgaggttaattttgatctgaaaattagtttctgcggcagatctggtgtctgtatttgtgtaatttgtatccattagtcttaattgagttattagctgaggattaagagagatcctgaaatttgccgtggaattaactctttctgtggatggatggataccctttgtattcttcaactttgctcctactctgggaaattagggtttgagtaatcattaggttttactctttggctgttgttgactatcttcaatctaattggtggctgattttgtttgacttctttaggacttttggtgtctttcgaggtcattagaacaattgtgtctgcttggttggtggtctatctacaactgttagcttttacaagtttgaatgctattgttttggctttcagattttgatgttatggatttctgtgttactactcctctgcaacttgaaactaatcaagtaattgtcaatgcagaaa

SEQ ID NO: 4118 - DNA, 409 bp, Arabidopsis thaliana
  Intron number 2 from transcript AT3G53790.1 (locus AT3G537 90) derived from phytozome v7.0 (chr-ID Chr3; pos 19928910 to 19929318)
acaagaagaaaactttgattcacgttccaagatcggtaagatcaagtcatcatatcactcgcgaactttacttatatataaggaaagcttttttacagagaaatgaagaatattattgaccttctttttttttttttttgtatttccttggatttatgtagatagtaaaagaaaggtgagtcacttaaaagagcgaggttcgtgtattagccaagaatcgcagaatatgtatcctttgaagaaacgaaagctgttttaccaaaatcattcatctgaatcacatgatactccatgtaccggtatgtatatctatttgagatcaaatctatatgaaaaattgttatttatataacattctcttgttgcattttcagtgaaattcggtattaagtcgttgaatatctcggag

SEQ ID NO: 4119 - DNA, 444 bp, Arabidopsis thaliana
  Intron number 1 from transcript AT5G42680.2 (locus AT5G426 80) derived from phytozome v7.0 (chr-ID Chr5; pos 17114196 to 17114639)
acatttgcaacaaaaaaaaaaaaaaaaaaaaacgggtcattttgattggtttattcgaaaatcaagttatgttcttaatgtcctcataacttcaatgacatcaaatttttgatgttaacgtacaaacattcgataactagatggtaatgtatggcttggttataaatacttgtcttaatcataaaccagaaaaagaaacaatgaggtatagtggtttctcctttttatcttcacacatgtctccgaaacccaatttggttcctctaattatttttcttcaaagattcccaaaccaaatgacaaaccatcttcctaacttagtactagacccccacctcccctccatatatcttttatatatatgctttctctttatattcatccacaaaacacacaataagaacaacaagaaaaggtgagtagaaggaaaaacaagtaaaaact

SEQ ID NO: 4120 - DNA, 674 bp, Arabidopsis thaliana
  Intron number 1 from transcript AT5G47880.2 (locus AT5G478 80) derived from phytozome v7.0 (chr-ID Chr5; pos 19387866 to 19388539 reverse strand)
tgtcgaaggcttgagcgttgttccttcttcttcaggtactttttgatcttcatcttttttttgggttttaatttgtccttatgaattcgtaattgtttgatttgattattcgatttgatcgattgattctgtgatctgatttgttttgcatgtggttatcgttgttttaggtttcgggaattttagattcttaagtatacttgtttatcggcttttctcgttttgatatcatagcaatcgatttcgtgtgttgaattaattttaatctgaattaagattagttattccgtaatatagaattgaagagattggtttttgtaagacagatccatcagctaaatctattattgtcttgatctttgaaattaatatgtaatattttttgtattattaatttcttttaagatttattagtatcattattcattactgatgaacgcatgttattaagattattgaatttaattcaacttttatggctgatttttttaatggtaaattgcacaatatttattgtatgattaaggttacatgacacactttgtattattacagcttcggttattgtttcttgaggattttatatccgtattccagttttgagttatattactctgttttcggtattaactagcttatgtactgttgttgtaggtttttgttctattgttaag

SEQ ID NO: 4121 - DNA, 532 bp, Arabidopsis thaliana
  Intron number 1 from transcript AT4G31480.2 (locus AT4G314 80) derived from phytozome v7.0 (chr-ID Chr4; pos 15263304 to 15263835)
cctcctcctctctccctggatctcgtacctttgaggtttgtctctctgtgttaaacttgcgactcagatttcatagagatcgatcccacttttgccttttcctttgtgaaaatctacaatgttcaattattctctggcgctctttgtttgatctcgttgaatattgatctgattccggtaggaaaccgattttcatgtttgtgcagctgagtgagactgcgaattatgtagatttcattgtttgttcatctaatctggggagatagatcgcattttttttttttttgaattttggttgatccgaagctgttttaactgatttttcgtttttatgttattattttggtcgtagttgtagtacagtgatgtgtattgctggatctgaggatttagatttgtcaatgttttgcatctttgggtctctgattggacattaccgaatattcttctgaaattatgatgttttctcataaaccacggattcgagaatagagatcatgtattcaatgtattgaaatccaagcagagaggt

SEQ ID NO: 4122 - DNA, 217 bp, Arabidopsis thaliana
  Intron number 1 from transcript AT2G39300.2 (locus AT2G393 00) derived from phytozome v7.0 (chr-ID Chr2; pos 16412870 to 16413086 reverse strand)
attattctcatcgagcaagtgtttaagtaagacttcactttagaacactctctgctctgttaaacctttgtgtttcatgattactgtctctaatcaatgtccctttctatgcgctgttttgccttttgttttttgaacaaagaagaaacctttttcttattttgcttctttataattttgattccagctgcacaactctagtgaacctttgttacca

SEQ ID NO: 4123 - DNA, 528 bp, Arabidopsis thaliana
  Intron number 1 from transcript AT1G06410.1 (locus AT1G064 10) derived from phytozome v7.0 (chr-ID Chr1; pos 1954863 to 1955390)
aagatcagattcttcatttgtcaaggaacaaaaaggtgagtctcgattcgtcactaatccaatcagattttttccggctcaaatttcgtttctttcgttttcgggttcctgtgttttactgaattgagggatcgggtcgctccgatttagattttcgtttatctgaaaggtgaatctttcttccgtttttgattagcttttgggttgtaatttcatggatcttgcttgtagaggataagaatgtatcattcattcgattttgtcgtaaagctcagttttttatttttgttctttactcagtgatagaggatgattagtaaatatcattgatttttggatatctgggtattgctcaagcttttgatttggtttgatgggtattcaaattagtggaaatactgattttgtaaaataatttttggtatcgtagatcttgttgagtttgttcgtggagattgaccttactgcatttttgtggtttcttctgatgcagatttattgaagcagtgtttggttttggattctttt

SEQ ID NO: 4124 - DNA, 478 bp, Arabidopsis thaliana
  Intron number 1 from transcript AT3G02890.1 (locus AT3G028 90) derived from phytozome v7.0 (chr-ID Chr3; pos 640340 t o 640817)
agggtttgtatttgtactgcgaaaatcaattagtaagtttagggttttgtttcttctcgattggctcatgctgatagtgattaagatgatgattgcggaaatccaaatgtcgaggaagatgattttgagacctcaacaatgcaatcttatactctgatttttcggagtttttagagactaatttgcttgattatcgttagattccttgttttctggagttataatcgtgattttattcagagattggtcactgtcctttgacttttctttgtttttaaaaaaatagtaaattatgtgatttccttgagggttcttagttagaaattttgttcagtttgcatgttataccaatgttgttaagcagcatgattgaatcatctgggattgtggttaatgtttttgttgcagttattaattatgctctttgttctttctgttcacagttggattagcggattagaagtcagtgctcatcatt

SEQ ID NO: 4125 - DNA, 996 bp, Arabidopsis thaliana
  Intron number 1 from transcript AT3G47390.2 (locus AT3G473 90) derived from phytozome v7.0 (chr-ID Chr3; pos 17459466 to 17460461)
atctcttctttgattgtgagaagccataagtaaaggttcgatttctctctatatgtctttcatctttctcatttttatattctcatagattgatagattctctatctttggaatctgattcataggattggggtttaatggttttcgaagaaatctgggttaaagtgtgttcgtgtgttctctaaatttgattcactaaacgtgtgttcgtgtgttctctaaattgaattctgtgtagctatgaacttgtgagtcgctgtaaaattggatttgaacttgtgggtcgattcatgttttctttcacatttggggaatcagattcttcttttgggtctgtttttgtatgttgaagtgtcgattttctattagtagttcatacattcagacatgttatgtatgtgaagtatcgagtttcaatttgctgaggattgcttgagaatttggcctctgttgcttccgtttatatcggtgtttttgggtttctatatcattgattctgcaacacattgaacaagaccagagactacatataaatgtctttttggttggatatgtttctgtttgaatttgtatgtttatagttttgactatagactgatctttatagctcaccaagaaaaaacaataaggaagggacgaaatttgtgtcaagataattgcagacgactctcctctgtctctcttttcattaacagctttttagttttgaaatatggctggaactttggtaaattagttgtatatgtctttttggtccagagtagtatgatagtgtgtatatgtttactcattagtgagtctgtgattaaattagttgactgaccaattaaattcaacttatttgatgtcttttataccgtacttcttgaatgaatcagctttgacattctttacaattccttgtgttttgccttaagttttgcacataaattatgcctcatgattttggttgaaaatgcaggtgattgaaatctataataggagctgccattgtgt

SEQ ID NO: 4126 - DNA, 662 bp, Arabidopsis thaliana
  Intron number 1 from transcript AT2G30900.1 (locus AT2G309 00) derived from phytozome v7.0 (chr-ID Chr2; pos 13149709 to 13150370)
agattgttttctaggagacaaaaagagtttcaaaggtatttgaattgatttgtagtggtaatgatttgactaactttcgagtttctttcttcttttgttattttcaagtgtaacatgctcatagtcataggcagtgattaagtcgtaacctaaattttagctacatgtgtatcaagaatgagaagaaatgtcccaaattttccgaggaattgacgaaggaacactacctattttcatgctgtctctgacgtatgagtgtcttgaggattaggtttggccgtttgagcattcagcattctaatcaagttaaagtaatagataaaaaaacaaaaaacaaatcaaaccatatgttacacattaacaataatgatattttaaaccaaccgcgtagaaattaatttaggataagataatatacaaagatataaacttccatatattagtattgaaaaaacttccacacataataagatctctagatctctagaccaaaactgactccaacgtaaaatggaaacttatctctttcctcattaataaagattccaacattcattttacctattaagacagaaagaaaatatctctaatttaagaaacaaatctacatgtattttcttaaaccagagccaatagacatatatatcacacaaacacatcat

SEQ ID NO: 4127 - DNA, 629 bp, Arabidopsis thaliana
  Intron number 1 from transcript AT4G19112.1 (locus AT4G191 12) derived from phytozome v7.0 (chr-ID Chr4; pos 10458494 to 10459122 reverse strand)
cgtcggcgacggtggttttgcccgttggctctgaggtatttctttcgcagatctccatctctccatttcatttctctctttatggtctcgaatttgatcagagtggatctaatttttcgttttgattaatataaattcatttggtatgcttggattcgtctgtttgggatctgtttgagtcggatttgatgtgttcggattatttgattgaaatttagggtttcttaggtagaattattgatttagtattgattgatatatcctcgaattggatatgtttgttttccagctttttccagcttttttcagatctgtgaggtataaagtgggccaatagttaggtgatgatggcaccacggttcagatattgtgctttgttatcttatctgcattttaattattgctgctaggtttttatggtttcgtgaacgatgattacttttgctaatgttgtttatgagactgtaatgtaagttgagtccatttttagagcttgcctggcttttggatggttttcttctagctattgttgtgtccatctttggatttcttataattttttaattgctttttcattgctatcaggttatatcaggctttaatttaagtggattgtcatcttctgagat

SEQ ID NO: 4128 - DNA, 483 bp, Arabidopsis thaliana
  Intron number 1 from transcript AT2G43018.1 (locus AT2G430 18) derived from phytozome v7.0 (chr-ID Chr2; pos 17891900 to 17892382)
ccaataatctcgagagtaatcgtttgatcaattgaaaaaaaaatcatggagtccaggaaaaactctgatcgtcaaatgcgtagaggtactgttttcttcaacctccatcgaaaagtctgttacttttttgtgaaatcgcttacggattgttatcgttgatgtataggaaggatctagggttcttactctagattataatctgggtaatttggtttatcaaacaaaatttgattttttttttaatgggtcctcaattttatccctcgtgctgaattctctgtcggtgatttgattccttcgtggcgtttacttgtttggatgtatctgctgattgccacaagttttgtttttgtggggttgtttaattctgataatcactattgtttctttgttagaagaattgatactttattggactttggacggtcgttaattcgtgtgctttgttttcatatagctaattgcttttcagctggtgagagg

SEQ ID NO: 4129 - DNA, 307 bp, Arabidopsis thaliana
  Intron number 1 from transcript AT5G22270.1 (locus AT5G222 70) derived from phytozome v7.0 (chr-ID Chr5; pos 7372769 to 7373075 reverse strand)
gaacaagaactaaactactactagtcttcaccaaggtaaagctactttggaacccgagaaccaagttaatttgttctcatcgaattttttttgttctcatatgttgaaattttgttattgtcatcttcactttttgattgatcgatagaaaaataagtattcaattgatcaattctttttatatatatacatgttttataaaccatggatctccatctaaagttttgttttactgtgtttcttattctgattcttgtagaataatatatcaacacacatagtatactcttcttggaaggcaaggaac

SEQ ID NO: 4130 - DNA, 658 bp, Arabidopsis thaliana
  Intron number 1 from transcript AT2G31960.1 (locus AT2G319 60) derived from phytozome v7.0 (chr-ID Chr2; pos 13588887 to 13589544)
gtggtcctccgcttctcttttcaggtgattggtcattgatctctggtttttttattttgcaaacttatgggttttgcttttcgtttttttctctgtcttactaatccgaatctgattcaaagtttacaactttaactaggggtttttctcactgaactcttatgagtgagacatagattcgtcttctaggtctgtttccggagggaattaattaataatagtatcaattttcgattatttttctttggttgattctctatcgaagattgtcgatgcttccaaagttgaagcctttgttacttctgaactcaggattgtcttgtgcctcgctgtagattatcgaagatagttgtggttctgggtaattagcttttggtgataaaggtttgtgctttacacatcttctgctactttttgggtatggcctaactaaaaaaagtaacttttagtatctctttccgatgatatcgattttataggagtgaatctctcatcttgcttcggagtgaaacaaatcatgtttttgttttgtcggaatgcttatctgattgcagtgcatatagttgtcaaagtttgttcttgatggtgatgtagaagctcttttatttgacatatttggttctttgtttagtttatttttagtaggatctagaagatc

SEQ ID NO: 4131 - DNA, 308 bp, Arabidopsis thaliana
  Intron number 1 from transcript AT1G62310.1 (locus AT1G623 10) derived from phytozome v7.0 (chr-ID Chr1; pos 23039302 to 23039609 reverse strand)
tttctgtgtttgtgttcatcataaggtaaaattgagttttcgatcttcttctgatttccaattctagactcaattgtctcttttgattgatttggttttaataatgttgtttggttttgattggaatcgattgatcatatactgttttattgcgattaattttgattatgatcgaagaactcgaatttgttgtctctgttttagatattcaaatctgcatgttcgttttgtttcaattttggtgtaagaatctgtttcatagatctgaattaccatcactggcgatttttgtttgcaggagctaaaga

SEQ ID NO: 4132 - DNA, 367 bp, Arabidopsis thaliana
  Intron number 3 from transcript AT1G20065.1 (locus AT1G200 65) derived from phytozome v7.0 (chr-ID Chr1; pos 6957197 to 6957563)
ttgacaagaatttagcttacacagttactactgaggtatgtgttttcctttactcagcattgtggattcttatctttcgctgcatccatatgtgtgtaaatcaatcaaatttggtttctgtttcacggagttgcaaagatctcagctcttgatttattttggtccattattatcacttaataggcagtgaacacacacagagacccgtgcatgctatgtaatcagtttcaaaacttaaaatggagactgcttttgtaatgttctttggtgtttgtggaaggtatccacaatgcagagttagtatacaactcatgatctttggcgttttgcaggatatcagaagagaactaggaatatcagagtgaaa

SEQ ID NO: 4133 - DNA, 859 bp, Arabidopsis thaliana
  Intron number 5 from transcript AT4G00760.1 (locus AT4G007 60) derived from phytozome v7.0 (chr-ID Chr4; pos 329259 t o 330117 reverse strand)
cttttgaggtgaagctgagcaatcactgtgcaaaggtaatgatttttagtccttctttttgccttttggccctgtctgtaactctacttttgcctctttgtttattgtttttgctatagatgtgctataagtgtgaacataaatccttaaacagcatcaacatgtatacactcatatccagcccatttccgcaaagacatatcttcagcataactattcactgggaacacacactgcgctgcaaaatctttgatgtgtcaaaatagctagctttcagaatgaactcacgacactgatgacatgagcccattctgaaagctaataatgcttgactcatcgccatagttatgctctctgcgtattgctactgtcagcaaatgcgagaactaaaaagaaaaaatgtcgcaagcttgaaattgtgttgcacgatctcttcatctttgcattcaatttctggtttcttaagagttctttgcacaatttatactcggagttgtcttcatagctttgtttactaataaatttctgctattttttggttaaacgaactgtgagtgtgaagtgtctcgtttgattaaagttcttactaagcatacataagcaagatatatttgtttgactgatagattttcagtctgtccaatcctgcatgaactgaatatcatatacattggtatattgcatctttgaccaataaaagaactggcgactgctctgcatcgatgggatgaacacatttataagtacttgtcatttcagtggctatctctatgtatggtagttgtttaaatgatttaatgattttgactagaatctgttgcaacgcagcgtgtggtgaaacgtggaggctcgttgttgc

SEQ ID NO: 4134 - DNA, 851 bp, Arabidopsis thaliana
  Intron number 1 from transcript AT3G16470.3 (locus AT3G164 70) derived from phytozome v7.0 (chr-ID Chr3; pos 5598374 to 5599224 reverse strand)
aggtggtgtgggtctatctttttttttttttggtctaatgttaaatgtgggtctatcttaataatgcagaaatagtgcaatacgattcatgagtggaaaaaatcatatttgggtactctcatatatagtctcattaatcattatcaccgagtggggcgtacgatacactttttcttctttatctgttttcatctaatcatcatactgtatgtctatattatcgtagcattcatcatcgagttatgaaacttatgccaaaagaaaagaaaaaaaaatcatttgagattggttaaatttctattttaagatttaaaccaaaatgtttaaagttctataagctctaattaaagtctctgcagtccattaaaatggataattaggatttgccgaacttgaaaggagtaatgcacattttgatgctcacgtgaacaacgagttgtaacggtttcgctataattggaggcagatgagaaatggtcgtgtgtgagttttaataccacgtgattaacggagccacaatcatattcatgggccattctcatgagctataatttgaggtgtagctgagagatggtcaaatgccacgaactttgagtatttctttcttaactttgcatttttttagacgtaagttttttttttcatagcctacatttctttgacaactcataacctacattttgagaatttataaatgtcaatttatcatttaaccttctcacgataatgcaattcctatggtaaatgtcaactcataacagactctacgaagaatctacgacactgtgaaaatctctaatccaatattcaaaagagagttaaaaaaaaaaaaaaaaaacagaagagaacat

SEQ ID NO: 4135 - DNA, 745 bp, Arabidopsis thaliana
  Intron number 1 from transcript AT3G57062.2 (locus AT3G570 62) derived from phytozome v7.0 (chr-ID Chr3; pos 21121589 to 21122333)
attgaattcgagatccttagctctccttctgtgcgtatatgttcttctcttccccaaattttacgtttttttttgttttgctctgttgttttagattagagtcgcttcaaatttccctacaaactctgaaattgataatagtttgagtttatagaggataaagatagatcattttggtcgaaaagggaacaatttttggtggaagtgattgatatatgtctcagtcactcagtgtgtgtatgtgtaactaaagttcggcttcgtatatgaaactatacatatcttatggattcgcatggatgttgttatgttaatgatgcttgttaatggcccatgaacaaaaatcgagatttctcaactccaatttggttgtatttgttctgatcagcaactctgggatgcatataatgctcgtttccttttgctcagctgcttgagtttatctctcatagtagctggtttttgtgtcgatacaagtatcctcaggatcattcacatgctcagataatttatctcctctctacataagtacatcagcattgatgatatgatccatatgcttaagtgattgtctggaaaacagttcataggtgataataccttcttagcttcagtaccaaaacattcctggaagcatgttttataatcctgaagattaccttttgttttagtttttctccttagcttactagtcattgttttgcattcaggcctttctgaattcaggaagggcttttacagcagt

SEQ ID NO: 4136 - DNA, 521 bp, Arabidopsis thaliana
  Intron number 1 from transcript AT5G07740.1 (locus AT5G077 40) derived from phytozome v7.0 (chr-ID Chr5; pos 2466019 to 2466539 reverse strand)
ggatcggcttctcgagatctctgagcgtgtttgtaatcactccttcctttttctctcttttcatgatcaaagtatctataaaaagatgaaattgttgccggatttattcttacaatcggtgatatatgcgcattgggatcaaaactgctacgacgagcttctggatggtatagggtttttggcagtttgattgggatgagaattagtggatgctcatttgagctcaactttgaattaaagaggttttaggaatcagaatctctttgaagacaatttatagctttgtgggatattcttttgtttcctttaatgttggacaatgatagttctttggaaaaggggtttatttgagcttctggattgcacttggggatagtgattaaaatttcagagcttgcagatttgtgtttccattttctagcaacctatattttgctggagtagttcaaggtttcagagctgatccaacttctcttgttttttcttcttctttgcagtttttgactgctgtttctctagcg

SEQ ID NO: 4137 - DNA, 415 bp, Arabidopsis thaliana
  Intron number 2 from transcript AT3G16230.3 (locus AT3G162 30) derived from phytozome v7.0 (chr-ID Chr3; pos 5500566 to 5500980)
ttcgcttacaggactctgtttaggttcgttttctcttcaaaaaaaaattgattctttcttctgaattctatgatcttttatcaatctaacaaaacccaaaattttattttcttccttgcgatggttggattagaaaaatcgtttgattttgtcttatttcttctgtttatgtctcatgttgtttgttttgtaggattgaccgtgtatttgggtttacgagtagatgttttcaatcgaaaccggtaattcaataatttgttgtctccttggcattttgttactctagtttttggcaagtgttagtctttgtaagtgatttgagattttttttcgtggaatttggatttgatgttttgtggctacaccacttcacatttcaggaatcttttagtatcctgagctttaggggaagtga

SEQ ID NO: 4138 - DNA, 837 bp, Arabidopsis thaliana
  Intron number 1 from transcript AT2G20830.3 (locus AT2G208 30) derived from phytozome v7.0 (chr-ID Chr2; pos 8969799 to 8970635 reverse strand)
ccattaattctgctgctgcaaattctatcgaactggtgagttttgttaatctctttcctcgttcgtccttgtctgtatatcagatcgatctctattaccgttttagcttgttcttgatctttgtcaacataaaaacaatcaaacaaagtttcttctatgagttctggtctgaacgaagatttcctcgattgtatcgtgcgtttagaggagacacatgttcaacaaggcttcgatgagggttacgaagaaggtcttgtgtccggtcgtgaagacgctcgtcatctgggtttgaaactcgggttcgagacaggcgagctgattggattctacagaggttgctctgctctttggaattcagctctccgtattgatcctacacgcttctctcctcagctccataagcatctcaatgatttccatgtcttgctcgataaaatcccgcttttggatcccgaggacgaagctaaagacgggatcaaggatgatctcagagtcaaattcagcatcatttgtgcatctctcggcttttccaagaaacaatttgagtataaaggatacccgaatccttcctccaatctcgacttttaagacctccctccatcaaaacactcttgtattgtatgtatggctttcaaagtttctctcgtttcctcaaagtttgtatttttaagagaagtgtgtgtgtagacaatctatgttttattggcttgtccttttttctggacatgtgaatgctgaccacaagtctaaatctggtggataacttcttttttagccttataatgaacaaacaaactcacatctgtagatatatatttgtataggtggtcggaggag

SEQ ID NO: 4139 - DNA, 592 bp, Arabidopsis thaliana
  Intron number 1 from transcript AT1G68910.1 (locus AT1G689 10) derived from phytozome v7.0 (chr-ID Chr1; pos 25910486 to 25911077 reverse strand)
gttttttcatctactcgaactacagattttcatcggtaaagttttgatcttttcagatcctctttgaatcttcaacactctgttttgtctgtttccaagttttagttttgttcttgttgaattttgatatttttgttctggttttatggtaaagtttgaatctcgttgtagtaaattgttaaattagtaagaatttctggtggatctctttgaaaatgctgagtctttacaagtatgtaacattaactgacttggcttattggtctctttcttgacaagtggattcttctcaaatttcacttctctttgcttaggttttgttcaaagtaaggatttgatttagttgcacttactataatgtgtttttgggtacttggattacattttcaattatttgcttggatgttctggtttcagttgatgaatgattggtttcatatagaagaattgagctatgactagtgctaggattggaactgcgatacctcgcattagaaagatagtgtcatttcacctaagtatccatttttttggattagtttttttttcttgttcctagctaagctttgaacttttgatttttaggccaaga

SEQ ID NO: 4140 - DNA, 953 bp, Arabidopsis thaliana
  Intron number 1 from transcript AT5G07840.1 (locus AT5G078 40) derived from phytozome v7.0 (chr-ID Chr5; pos 2507292 to 2508244 reverse strand)
tcttctccctccgcgctaagctacgacgcctacaggtttctatctttccccgattcaattctattacgttgtcgtcgtcttactgtgaaattgatttggtctttatgttgtttggattcatcactaagcttttattatcttagtttctttgctgctttagaattttttagatgaattttgggtggttctgaatttcagcttattttgggaattctcttagtatactgttcatttgccagagttttcgattctaaagattgggacttgttactaaagtttttattgttcgttacctaacctaaaattttgatctctgaaaatatttctggcgatctttgcagagagatttatggcttgttctgtagcacttcgcttttttttttttttttgaatgaacactttgcttatttgtattatctgaatccactaagtttttttttccatccttgtcttgttggcagatctggctggtaaaaatcacgcagatagagactctggcccgatgctctctttacccattgatccaggctttttctgatttctctttgttcctagaaaccattaagctcctacctctttctagttgatgctcgtgttctcttcactgtctatgactccagttgtgatccctcaaaatctccgtgtctttggccctggtttgaatccctctttcccttactgcattgctaatcacttcccttgattgagttgctccattccaactgaatcatctcaatctgcctctcccataagttcttattctgagtgatattggttgatgatttctacccacaagtagtgttcctgctttagacattcttgtataagattgtaaccaaaattatgtaaatctgagtcactcctagaatctccttgtctagtaagtttcccttaggaaatatcctttgagtctttcatctgtgaattctagtcagttctggtttatctgcaag

SEQ ID NO: 4141 - DNA, 496 bp, Arabidopsis thaliana
  Intron number 1 from transcript AT3G52310.1 (locus AT3G523 10) derived from phytozome v7.0 (chr-ID Chr3; pos 19398714 to 19399209)
gttatcaaaggtgggtgaggtctttgattctgaccgttcatagagggttaatataatcgattgctatttttgatttttgccgttaagtctctctgtaaggtccagtgcatgttactgcttgtctaattacacgaaacaaatactggttagctatgtgcttagagcagaatgcttaataacaagtagaaagacaaatctttattggtctaaaagaatcaagatccacgtgctctcctcctaccctcttctttgtaccgaaagtcaggttttggccttttgctaattattgtatcaaataagatagggagataagaccaatttcctcttttaaagttaaaacctgtatctgtaaaatgcatgagccagatattagcctcgtagatcatgctatcatgtctatcacgtgtccaaggtcaaagggtttagcatgtcaatcaatccaattttggagggtatattacagtatattcgtctaaccctactctataaataggtg

SEQ ID NO: 4142 - DNA, 473 bp, Arabidopsis thaliana; identical to SEQ ID NO: 4107
  Intron number 1 from transcript AT1G61560.3 (locus AT1G615 60) derived from phytozome v7.0 (chr-ID Chr1; pos 22711738 to 22712210 reverse strand)

SEQ ID NO: 4143 - DNA, 536 bp, Arabidopsis thaliana
  Intron number 1 from transcript AT3G56640.1 (locus AT3G566 40) derived from phytozome v7.0 (chr-ID Chr3; pos 20981428 to 20981963)
ctctctcagttgaagcgtcttccttctctctatcggttagatcttcagctcgattatcttgttttttttttccttagattgtgaccatttcaatgcgttaaggatcacgcttcatgatcatatcactttctattttaaccctaagagtttccttcttcattttgtatatggaactttgatctgacgaaatgcagaaattctcatttcgagatagtttttttttttttaagattcgttgattttggatcctatttcctgtcattgttgattttgttagattagggttaccaatctgggataattcttcgcattaattttctttacgatattttccattttgttgctcaggtttctgattctatgttcctgtaaaattttcctttaatggcaatcgaaatcttcaattttttacgatacgattgattctatactgcagatgatttttccagttttggctcattccttgtcataaatctcgtcaaaattctttaccttgtcgtcttatttttttccattgataatgcttttctctcaga

SEQ ID NO: 4144 - DNA, 573 bp, Arabidopsis thaliana
  Intron number 1 from transcript AT1G72700.1 (locus AT1G727 00) derived from phytozome v7.0 (chr-ID Chr1; pos 27366255 to 27366827)
ttatccacagaatctctggtttgattcctggtttgtctcctgattctctacttctccgacaaatctccactaaacctgtctgaaattttctcttcgttttggggttttccattgtgcttgacttgttgttgggttctgggatcttgtctcagcttttgtttttttacagctgtcaaattgcgtttgcgtgttcttcatcacctcctgcttaatccttatctatcttaatttaagaatcaattcatgatttcaaatagtcataagaaggcaaatgtgtttgaaataattggtgtttggtaaattcattttcctctctgggtttcgtaaagtcaacatctttgatagatttgcaattttaaaattttattgatttgctatcattcagattcgagtctgttgaccaattttgagtatgttttgtgtttaataatttttgtgtttaaaattatgtgacgagcttccgaaatttatgcttctttgtttcagtcttctctgccattttaattatgtttctgaaagatcaaagctttcgaaatttttactaatgggtttggttcatttttctacaggact

SEQ ID NO: 4145 - DNA, 679 bp, Arabidopsis thaliana
  Intron number 1 from transcript AT1G66240.3 (locus AT1G662 40) derived from phytozome v7.0 (chr-ID Chr1; pos 24686556 to 24687234 reverse strand)
tctcaggtatttttcatcagtgttgattctgttctttgaattctcaatttctcgatctggggtcattataaagattgttctggatctaggtcttatcttattgaattccttcttcttttctattccatcgatctaaatatgatatatcaattgatctgtggttcaaaagcattttcagaaacacagatcttgaatctaaaaagggtttggtgtcttgtgtttggttttcagatgatctttagttagtgtttcaaatggttttggtagatcacttttgttaagttgaatctgattcttagctatatgattgtcttgttcgtttgatctataagttgcacagaagttaagcttatgggttacttatgtttatatatcgtttagaccgttgttctcagagtggccatgacatgtgagggatgtgttggagctgtgaaaagagttcttgggaaaatggaaggttagattatttttcttattttggctattgatgttatgatctgtatcaaaatgctttgaacccacttgtcttacggtaaacatatagattcatcggaaaagattgtcgatatcgcggaatctgcaatgttttctatcttttctaaagcatggaacatcactctcttcactcggttttttggtttcaggcgtggagtcatttgacgttgatataaaggagcag

SEQ ID NO: 4146 - DNA, 302 bp, Arabidopsis thaliana
  Intron number 1 from transcript AT1G52155.1 (locus AT1G521 55) derived from phytozome v7.0 (chr-ID Chr1; pos 19417769 to 19418070)
ggacggttaacactttcaaaaatcgccactttcaggtcaataaatctcctattttttctctatcttatttcgataaattttggatttttcactcttgggtttatgaaacttcttctcaaattccaaatattactcaaaatttaatcaattttttttgcagaatggtacttgggatttattgttttaatcatgaattcagacgattctgtttttgatttgtctcttttatgtttttcattaaggaagaaacacaatttgattttggttctgtgtttttgtttagagcagacaaatagtttaca

SEQ ID NO: 4147 - DNA, 367 bp, Arabidopsis thaliana; identical to SEQ ID NO: 2112
  Intron number 2 from transcript AT1G06149.1 (locus AT1G061 49) derived from phytozome v7.0 (chr-ID Chr1; pos 1872397 to 1872763 reverse strand)

SEQ ID NO: 4148 - DNA, 583 bp, Arabidopsis thaliana
  Intron number 1 from transcript AT1G71770.2 (locus AT1G717 70) derived from phytozome v7.0 (chr-ID Chr1; pos 26993555 to 26994137 reverse strand)
agaaggagaagtagacggaaaaaaaaaaaaaaaaagtagagtaataagatgttaagaaaaaacataaatatctatgtggcactagatctcatctataagacgttagtcgtagttttttgcgagtatatgaagagcagacttaacagattcattcggttgcggcttccgtttagaacgcatgatcccttctacttcttcgtcaaaattgtgttcagttttctttatttgttttaatgattgttgtatttggatggttatatatcatataaatttaaatttttataatataatataattgattatcattaaaaaaaaaacatgtggcattggattattggccaggacagaaaaagcccattggcccacaaaaagatcccagatgtgaattaaaaagctgagtcaaaactcaaaagccacgtcaaatcaaactctgatccgtagggaccggttggttagcgaatgtataaataccaactctcattctttcacaccctttcgagtctctctactcctcttcttattcaccggagtaacccaaaaaaaaaaaggaaaaaatataaaaataaatattctcccctaaaaa

SEQ ID NO: 4149 - DNA, 294 bp, Arabidopsis thaliana
  Intron number 1 from transcript AT3G62330.1 (locus AT3G623 30) derived from phytozome v7.0 (chr-ID Chr3; pos 23065420 to 23065713 reverse strand)
agaatttgggtcgccattgattcgcacctcgcaaggtaggataaaccctaattttaaatttcgtttatctctatgaaagatggcaacttttttgatttaatcgtattgactaatgaagaattttctcataattatgttatttgtcttttgtggaaaaatctggtgtctttcttctaaattcacaatttttctaattcttagtgatagagtcttctacggatgaatgaactctggattgaatcattgtctttgtggaaaattgaaattgaaagtttgtgtttttttttttatcag

SEQ ID NO: 4150 - DNA, 330 bp, Arabidopsis thaliana
  Intron number 1 from transcript AT4G36920.2 (locus AT4G369 20) derived from phytozome v7.0 (chr-ID Chr4; pos 17400668 to 17400997)
taatattattttattaaatttttacaaaaaaaacagtgacaagagaagagagagagagaaagggcagtggaagtaaatataaaggaaaggataaaaatgaaagctttcgtagaagcaatctatcaaatttttattttattttcttctctctctctctttagctcttttttttttgttttcattaaagtttttattttattttctaccaaccaaaagcttttctctttggtttctcttatttagcttctaaccttgaggagaatcataccagaggattgaagtttgaaccttcaaagatcaaaatcaagaaaccaaaaaaaaacaaaaaaa

SEQ ID NO: 4151 - DNA, 209 bp, Arabidopsis thaliana
  Intron number 2 from transcript AT1G76180.2 (locus AT1G761 80) derived from phytozome v7.0 (chr-ID Chr1; pos 28586705 to 28586913 reverse strand)
tgtaagtttgttggcttttttgttgattacaatttcttattttctcttgtatatggtttttaaaaacaaaagatctcaaggtattttaatggtatgaatattttcatttgattaagtgatatggatgatataattttatgtattgataatcttcaactattgctcaaagccgtaaacatgaccccagtttgattagcattcaagttcgt

SEQ ID NO: 4152 - DNA, 388 bp, Arabidopsis thaliana
  Intron number 1 from transcript AT5G24320.1 (locus AT5G243 20) derived from phytozome v7.0 (chr-ID Chr5; pos 8287652 to 8288039 reverse strand)
tctgagctcttcgacatcataaatctccacatgtaagaaaaattaatacttatgaaagaaaaataacctttttattcatcacgaaatctgcatgtgttttttttttttttttttttgattgatggagctttggtttctggttttaatggcttcgattttgcaaaacgaaaaaaaaaactcaattttttcgattcagattttgatcgggatctatgtttgttcgattgattataatttctaggtttatttttgtaaattccatttttcaatgttcttatcttcttcctctgattattttactaattttctcgggaaaattaattttgaaaattttctcggtttggtttttttctccaggcagctttgagaattgaggacgaaaggagaa

SEQ ID NO: 4153 - DNA, 499 bp, Arabidopsis thaliana
  Intron number 1 from transcript AT4G20910.2 (locus AT4G209 10) derived from phytozome v7.0 (chr-ID Chr4; pos 11190576 to 11191074 reverse strand)
aaagtccgctgaactctttaggttcgttgtcgattattcttgctttatgtttgtgtatttattttttgaacttctgggctctttctgaaattcaatttcattgacccatcttctctgttcatgacaattcgtttgtcctaatgttacactcaaaacccttttttgttgtttatacccaaaccctctatctatctgtacttccttggaacgaaatttttttgctttgactcaatttctttcttagaattagaacattgagaatgttggaactcaaatagatgttggttcgattttgaactttttgtttatttattaatgttttctatggctctgatttgaattgtcaagtttaagacattcttcttcttctcttagataccctaatttcaggggtatgcacattttgcataaaagttccaatctttcctgatcgttgacaatatttatgtgtacccttttgtttgtctcagtgtgttaaagaagctacattgtgtttgtg

SEQ ID NO: 4154 - DNA, 1032 bp, Arabidopsis thaliana
  Intron number 1 from transcript AT1G13930.3 (locus AT1G139 30) derived from phytozome v7.0 (chr-ID Chr1; pos 4761538 to 4762569)
gctcaaggtttcttgaagtgatttgatctttaattgttgttcatcattttcgtaataataaattaaataactagtatcgtttgtgactagtttatgttgcttcgtttatgtttatggggagtgacgagtgagtgtaataacttctggtgatcatgaatctaatccatctttgttgtgattatgcttaacttattggtgtttacaaaaccaaatcaaaaaatgatcatcctttggattcgaactcgttagattctatatcattaggtttctatgtaaaactagtgtttcatttcttaattcactcatttaatagtgaggtttctggtattgcaagtatgcaactacactactttaaaaatgtgtcaaaatacttaatcatacaacaacaagaaatggacttacagaaacagagagaatacatatatagaaattagttgcaattacaggacattggtgtatactaatcaagaatctgtcataaaacaaacgcttagagttatgaacaatcctctcagtcccacacaaaatctgattacaccgttcatgtctatattcaggcacaaaaccactcagttccacaagtgtcactcttatatctccccaaaacacagaatgacagaatctctttcaaccctaaacactgagttgtggaacataatatcagggaatcttcttccatagataagcctgtctttaaggaccattcacttcaggcacaccacttgaacacaacctatctttaaccacatgaatgtctccatctggtgaacctcctaaccaatcctcttcttcttactagtgagtgcttcaaactctttgatattgttccctcatgtagctgcattgcctgaaaatggctctgttgctccaattttcccttaccaaacatcaccaaagtttcaaagatgatgacgtgtcgtgacatgagatgattttaagtgttttaggcaaaaataaatataaaaagaggtcaaaggggataaaatatctttcttcatgtattcaccaagctaaaaaaaataaaattagtcg

SEQ ID NO: 4155 - DNA, 545 bp, Arabidopsis thaliana
  Intron number 1 from transcript AT3G14075.2 (locus AT3G140 75) derived from phytozome v7.0 (chr-ID Chr3; pos 4666339 to 4666883 reverse strand)
accttccttctccactgtaaaaccctcaaattaaggtcacgatttcgtcttatttttccaggtttgattcacaaagaacttcgtgttttaacgatgctattcttggggtaggatttagggttttgtttctatagttcaccgatcctgttcaattttaagctaaatcacattcaattttatgatttgcatcggttaaaagacgcgatagttatcaggagtagggtttgttgtggtattcgagaagtttcaggaaagtgagagttttctattaatggcttcttttttttgtatcccgaattctttggggttaattggtgaaaagaatgttctttgtacgaaattatatccaattttccagctttacatgtttttggagatttctggaataagtctgagatacttaagaacgcatctggagattgaaattgtggcatccaatgtagtttcaatcgattttgtctttaaattttgtattcttattagattgagtttcgtcttggattgagcgaatttgtttcattgatgattttagggatagattgatc

SEQ ID NO: 4156 - DNA, 431 bp, Arabidopsis thaliana
  Intron number 1 from transcript AT5G44240.2 (locus AT5G442 40) derived from phytozome v7.0 (chr-ID Chr5; pos 17817128 to 17817558)
cctgagaaaaattcgagctccgtgtgattaattaggtaacgtattgctcgatcttcagatgaatttggagttttgctttcttcaagcttattctattttgcgagattttcggagaaatgataaattaattgatgtttttgagtttcttcctgatctcgatgtgttcgaatgtaattagatttgagttgcgatattgagagatctctgttgtttgaattttgaatttggatcttcctgatgtggttttgcttcttcaacgatggggtttatcgttgctttcccaatattttactgagttcttaagcttactcgtaaagtgattatctgctaggtgttcttctgcaattgcttttgattcaatgtcctctttgatgtgaagtaatgcttaatcaattcatattttgcagtttgtgttggtaaacttcaatcag

SEQ ID NO: 4157 - DNA, 517 bp, Arabidopsis thaliana
  Intron number 1 from transcript AT4G00760.1 (locus AT4G007 60) derived from phytozome v7.0 (chr-ID Chr4; pos 331737 t o 332253 reverse strand)
cactgagacagggctgttgtgctccttttcacactgtaagttctcctgaccatgatcattacatattaggccaaccaaatcatccaactagtaaagtgcatagggtaataatttcagtatgttaaatgttactcttataagactcattcattaagttgttagattcgtagtcataaaggaattaaagggtacatgctattatatgtaccaaggacaaagacagcttctgttttgtcttcatgtgaatttatattaacaaacagctgcacgtgcatttagagacagcatgggcgaccttacggttgaagcaaagtcaacccataagatctctattctcagatcacattgtcactttatttctttcttaattttgatttgattctgttttctctttatttatgcatgtagtagtcaaagtatgtgattaattaatgttataagtacgagtttctatttctcttaatatagtattcttacctcaggtcccacttcagtgtcggctagtattactgctgtg

SEQ ID NO: 4158 - DNA, 918 bp, Arabidopsis thaliana
  Intron number 1 from transcript AT1G03590.1 (locus AT1G035 90) derived from phytozome v7.0 (chr-ID Chr1; pos 896473 t o 897390 reverse strand)
ttgtctctggatcaattgttcttgatcccctaaaggttccttcttttcctctgattttctctgattccttgcacttttgctttgtttctctctttgtctttgtactctgtaatctcatatttggattggctcgttcgagtttcgtaggatctttcttctgatgattttggtttgttcttttctctcttttgtcactctgcacttgttttgggttacagaggaaactttatcagatccatttttcttatctaaatcgggtttctgaaaagtgaatcgcttttccacttaacaataatcccaccttttttcttttcactattagggtttcgttattcttaaggcctgcttgcagcattactatataaaagccttataagatgaatctaatttgctttcagctctcactgttcagatataagctttggggtttagcattatatgttttgttttcactggaaaatgtaaacaatgattcttgaaaaatctggtcacgttttcttaacgtcaagagttgtatggaaacttgtttcagtagttaatcttgcaatttgcctcataacatgtgtttggatacatgatgtgcttattataagacatttgaggaaactctctgttcttgatttgtatgttattttgttttcctgtcttctgattcttaagtgttttgattaatttattagcaaagattaatgaaaagtgaatatattacaaaacatggagctataagagtcttaaggttggtccaatgccaaacaattaggacaggctgtttagtaatatctacatatattctattgctaaagatcacatgctgggttttcttctttatgacttgtttgcgtctgcttttcttttttgtaactttgcaataaattaatcactaattcatttttctgcaatgttttcagctcacggtcc

SEQ ID NO: 4159 - DNA, 862 bp, Arabidopsis thaliana
  Intron number 1 from transcript AT1G55120.3 (locus AT1G551 20) derived from phytozome v7.0 (chr-ID Chr1; pos 20566175 to 20567036)
tttccgtttccggtatgcttgaaacgcgtcgtttgggtcccaattttcaatcgaacaagaccggttatcgatcctctaaactaattgcaaaccaaaccaaggaagccggtaaggaggtaactgagagaagagaacaaaggctataaacatttgtgggcttaaatctttctcccataggcctaaacagagaatggtcctttacttaagtgtttcttaaaaaattaacgatggttgactcactcaattgtcatcaaattaaggttacttaattgattggtctttgattaatggatttatatctgcagttacgtgcccacttgtccattattgatctcttttgaaccatgtgaaaagctaacaccatgagagttttaaagataaaactcatttgtacttaagcatttataccgaacaaagagagaacaaaagaaacagaacaacaatggcgaaattaaatcgttccaacattggtctctcactgttactatctatgttcctcgcaaactttatcaccgatcttgaagcttcttctcatcaagatctcaaccaaccgtaccggaccggttatcactttcaacctctcaaaaattggatgaacggtatgtaacgtaccgatcttgatctggtttctttataatctctaaaatccatcgatgtgtgtattcattcatcctcaaaactaacatcttttattctcttatggattccgttatgttcgatgaaatctaattcgaccaacaaaaataaaaatccagatcctaatggttagttctctttattcatatttctaaaaatattattaaatcaaatgtacaaaaagatacaattatacgtatttgtttttgttgggtacgtaggacca

SEQ ID NO: 4160 - DNA, 779 bp, Arabidopsis thaliana
  Intron number 1 from transcript AT1G70190.2 (locus AT1G701 90) derived from phytozome v7.0 (chr-ID Chr1; pos 26431208 to 26431986)
tgaaagcacttggtgctaaagttgtgttggagtgatcatctaaaggttcgatttttctgcttttgttccgtgtatgagctcaagatacaaagctgattaaggttttataaagggtcatagttgttacacttgctctttctttctcattgctaaattggttttgttgagagatggatctttgttagttcaagaatgtatcgctgaataatagaagtgtagactttgttttagtgtgttgcttttgatcttggcgcagaactttgttcatttctaatcaaagcttgttgctttggctccttcatatcggttttgttgatatcatgatctttgagtagcattgcattaagtagaaacgatttgattcagaattatagacaattggtcagggtcaaatgattctaagttcttaatcttgtaacctctttcaatgggatacttcaatcgtaagatgaatccgcgatattcagctacgttgtttgtagctatttcctagaccttgatgcagtttacaagtctgattggatatggatgcagaaacttcacttcattacaagttttcttaacattgtaacgataacttcataccactcttctgttcttagtttttaatactgctcctgtgtcagctagacctggatttccctttgatgaaccactaaactttataaagcatgtttgctttctggtctagagtcacctatgaatactgttgttatacacccaaaaaaacacttatggatgtaggcttcggattagcgagctctttcagggaagcaact

SEQ ID NO: 4161 - DNA, 442 bp, Arabidopsis thaliana
  Intron number 1 from transcript AT4G35030.3 (locus AT4G350 30) derived from phytozome v7.0 (chr-ID Chr4; pos 16675774 to 16676215)
ttcttgatccggtaggtttttatttgattataaactcatttcatttaacaaattgagtccatctctctatgattcacccataagatgatagaagaagatcaacatttacgtctgagataaatcatgtcctttaatgtatatttgtttattttctggtcaatcatcgatctttcttagtcgtagcagttacacaatgctgatggtacatggcggcagattttcgattcttattatttaaagaccaaatttaataatagatgtatgtacaacgagttttggtatcactatcttgtccggtaatgctcattgtttatcttttaaatctacgtcttcttctgcataattgacacaaatcacttgtttcaatggagtttttgtttgtttgatttcctctgttacttatgcagcaaaagaagaaattgagtttaaaggagaagtgtga

SEQ ID NO: 4162 - DNA, 671 bp, Arabidopsis thaliana
  Intron number 1 from transcript AT1G36160.2 (locus AT1G361 60) derived from phytozome v7.0 (chr-ID Chr1; pos 13533525 to 13534195)
ctttaagccaatttgtatctctgcttccttacaaggtttaaagttttctgcttttgctgattttgttatttgggtgttttaaagttttgatttttatggtttagcaatcggaatttggacttgtttttgtgattttttacttgttgttggagttgggttttgttgagtttttgttatttgggtgttttaaagttttgatttttatggtttagcaatgagaattttgcacttgtttttgtgattttaacttgttgttgaagttgggttttgttgagttttcgacttcaatattgtagaattttagtgggtttggggagtttataatcattagttctgagatctctcagatttctaaaggaactcattattattgggtaatgatgctttcttacttgcaagatctttgcttatgattgcgttttgctttttctatactctttttttcttcatgtgattacgcaaaagcattgctgtcatctttgttaattccaccttgtaatctgaagcatctttgtttgttagattaagcaaccagattaggaattgttttaatattcctgttatgttctttcaagtcattttggtagatagcatcagtttctttgtaaagtgattcagtatgtgtttatggctgttttgtagatatatctgaagcttaaagggcagtgaca

SEQ ID NO: 4163 - DNA, 927 bp, Arabidopsis thaliana
  Intron number 1 from transcript AT3G58030.4 (locus AT3G580 30) derived from phytozome v7.0 (chr-ID Chr3; pos 21484571 to 21485497)
attttacacgacctaatccaaaactccaggtccttgattgattcttctctctctccagctccagattcttctgatttcttttgttatcatttgtttttgtaagatttgtatccgtttttgggttttgcttagctgattcttgctggatcgagagttgaataactctgcttttcttcaatctggttttttttttttgtttcatagaggagaaaggttgtggatttctcaggtggggatttgagaattagggttttctgattgggggttttcttattgatgttaccttcaccaaattgttgtcggagatctagatttggttcagttatggaataatggctcgtctcttgccatctctattcgtaattagcatcttcttcttcatccaaagactcctcctttcttcgttaatccatcgccagctattgaatctgaagcaaatctgagaatctaccgaactcacgcacctgtatattgcttacacggtagatatctcttctttttgtttccgtttttgttgaatcaactcttttttctattggaaagtttgatattttgcttctccatttgttaattcacctgttcattttctttttggtgcacgatctcttggctttcagagtttgtagttagtcgtagttgtgcaatcatagtaagtggtctcatcatatgttgttgcagagagaatatatatactttgtgttcttcttcttaatgtttttgactttgtgtatgctttttctctggtggatataggtactaaactcgtacgaatagtttctttttcacattgggtttcttgtatctctgcaaagaaagctagatatatggattgttttatatgggaactgcatatgtttattggctaattgcttctctttccctgaagatacagagcacacggagacggagtacatattgttcagcgca

SEQ ID NO: 4164 - DNA, 349 bp, Arabidopsis thaliana
  Intron number 1 from transcript AT3G04960.4 (locus AT3G049 60) derived from phytozome v7.0 (chr-ID Chr3; pos 1373906 to 1374254)
gcgctggcgcagagtgaagatcagtctcaaggaaggtttatgtttttctcttcttcttcttactctggaagcttccgtttgcttgttgggtgtttatttgtcttcaaatagatcatttaatttgtacttttcatgacggatttgttcatttctttttgttttttgaagacttagggtttctgcttatgaccttatggtagtagacagtgatttagagggattagatcaaagaaaggaagagatgcgtaacatttttgatgatattcaggataaagcttcattaattcttcagttctcacttaagtgggaagaaatcgacgacaggtttggttttctaaagcaacgagcc

SEQ ID NO: 4165 - DNA, 611 bp, Arabidopsis thaliana
  Intron number 1 from transcript AT5G06450.1 (locus AT5G064 50) derived from phytozome v7.0 (chr-ID Chr5; pos 1968490 to 1969100 reverse strand)
ttactacgatccctaaccggacgcgaaatttcaaggttcgtcctcctcttaacttctcatcagttaatgtctcttttaagttgaatttgactagtatgattccaatttcagatgatagttaggggattttatctctcggatcgatcgttttgggttacaagaactaagatagaatcaaatgtttttgtttctccattagttaattagtctaagagatatagaacaaaaagtttcgcttctttcttgttatcttttgatgcacagaaaggtcatgaaacctagaactagggggagtgatcaatggtatttgtagccaaaactaaaaaaaaagtttgtttacctctactttgatcaattcgatgctagatcattgtttattcaatgtgtggtcctttcttcacccaatttctccaagtttccaactcatgaatacttgtagttttttataaaaaagaggaaaccttattggtgctcaagttatatgagtgatgattggattcactatcttactttccacttctattagtattgagataagtttagctacaactttgtcagttatcgttgaatctaatttgatttgtgaatattctttagtgttttttcatcac

SEQ ID NO: 4166 - DNA, 1035 bp, Arabidopsis thaliana
  Intron number 1 from transcript AT1G11910.1 (locus AT1G119 10) derived from phytozome v7.0 (chr-ID Chr1; pos 4019875 to 4020909 reverse strand)
cctcatttctctgagaatctggtgctttagctttggtgagctctctttcttatgaaacttatcgattctcttctcgttgattgtcttatacttttagttctctgcttaatttattgtccttaatactcgtggatttgttcataaatcgttttctgagcagttaggtaagagttttgttaccgaatttcatgttcttcgattttgaatctggatgattgtatgatgtgattagtagactcgcttagattttgtgatctgtgtatggtttgtggctaattttggtttcatcggtggtatgaatttatttggggttttaggtttgtttgattacgtaatcggactgtttacttgaagatttatcgattatagttgtgatcgtttttagttgattgagaagaagaaaataaatttcatgctcttgttattgtcgcgattgtggcgattttcagtgtcttatgaatcaattatgttgcatgtgagtcttggtgcaattgagattgtttcctttttttactagattgcttgtcttattgaacaaaactttccatttatgttgaaaaggtttataggaacggatgtttagggttttgttgtaatctgggtatttgctttctgatttcggcaagcaaatgtcgatttcaaggtttatatcactttctctagcaaaagaagtctttagtcatttgcaaagtcaagagagtttttactttatttattgcttccacgctattgcttcgtggctgattgagagagaccaattaaactaataatttgtagtttgtacaatatattgcgtgtaacattgtccttcgttatctgtttgaggaggaggaccgagttagcctatttttagtcactttacaaattttcttttatgttgcatcattcaatatgaactctctgatataaatatatgtatacatactggttgacttttatgggtatggttctctgctttttttctctgtgatggtctcttgattctaactttctttgttttatgtttttggtttttgttgtcaatgaataggtaaa

SEQ ID NO: 4167 - DNA, 434 bp, Arabidopsis thaliana
  Intron number 1 from transcript AT2G46494.1 (locus AT2G464 94) derived from phytozome v7.0 (chr-ID Chr2; pos 19082716 to 19083149 reverse strand)
cttcggtgctaaaaaatccggtacgaactcaactttttttttcttatcttgttcttcattccttgtgacccaagataactccaataatgggtaaggatgaagaagatgctgtctgttttcgtggaaagcttcaactccaagaaatctttaggttttacgtgttccaagtactattttacccattaagcaagaatcggaaaatcatagttggaaggaactaaatttgaccattgattatttaattgcgttttaagaaaatatcaaatccaatatttcccctcaactatataaggaagtattctcaatatctcattccacacgctataatcaaaatggcgaattacatactttgtttttaagtggttaaactgactcctcaaacattaattggcttggcaggtcatttaagcagggcagtagtagcagtacttata

SEQ ID NO: 4168 - DNA, 680 bp, Arabidopsis thaliana
  Intron number 1 from transcript AT1G36940.2 (locus AT1G369 40) derived from phytozome v7.0 (chr-ID Chr1; pos 14004675 to 14005354)
gagttcatcagctgaaagttacaactgtttgagtttggatcaatcaaagcaaaaaaagctttaattagcaaaaaaaggcttcttatttgttgttataaatttagttattaatatagtttgtacaaatagaaaattcatactttatgctcttctctcttcttcttctctcttcttcttcgttaaatcataatttttggttgtctttcaatattaccaatcatatattttagagatatttatctagaatgcctaaaaaacttaaaaacttacaagattaggtactttcatgatgacttacaaattcaggtactttttcttatatgaaatgacgcttgtacccttgcttcatcaactcattcattcgacattgaaacatcttatcatatggtcaatacaaatttcatgtttgctctgttattgttggcacctccctgtcgtcagattcagtttctccttcctctcttcaaactcaattcatggttaatacaccaactttcaaaattgcagaaaaaaagaagaagagattttaagcttctcaattggaaactgataagccattagaaagttagcgaaaaggatttcaagcatttgttttgggtttgggtttgtgtaaattagcatatattatatcattttttcgattagatagacaagtttggtttatctacttcacaatttga

SEQ ID NO: 4169 - DNA, 686 bp, Arabidopsis thaliana
  Intron number 1 from transcript AT5G46910.1 (locus AT5G469 10) derived from phytozome v7.0 (chr-ID Chr5; pos 19046889 to 19047574)
atgtgagatgatttcccctctctgattttagtcaattttgttgtttaacgattttggaattctcgtgaatttttgttgttaacgattttgttggatcagatctctaacattgctcgatttttttagagtttctgctattttttttcttgaattggttactcttttttttactctgcttcgttgtttgatccttctctatggagaatctcacgttttgttgctatttttgtgaacttgagatttgagctctgttgaaatggcggcgaatcttcacgtaggtcaaatgattgtgtgtatgagaggaagttgtcgatggtttctaagttgtgactcgcgttcttcgagggtgttgaaattagaaattgtcacattctttgactttgtagggtattggtcaaagagataaggctgtaccaggaagtgaaaatgcttatataccttttgaaacttctaggtgttgactgtttccgttttctgtgttcactttttatgtttcttagctttttgtggagttataatattttggagctatagtgggttaagtgtgaatggttgacctattgtgtatctatgactcctgtatatggtatttgtagtatgaacttttgatatgtatctagaggaatgtttgctgacacttggttttgtcaggcggaaaggaggatctgcttgtctaaagaggctaa

SEQ ID NO: 4170 - DNA, 332 bp, Arabidopsis thaliana
  Intron number 1 from transcript AT1G13360.3 (locus AT1G133 60) derived from phytozome v7.0 (chr-ID Chr1; pos 4577001 to 4577332 reverse strand)
gtggagattacgtggctgttgaggggttgtttgaattttccgacgattgttttgactccggcgatctgttttcgtggcggtcggagtcgttaccggcggaataaataaataacaaactttttttttaattaggtgggaaatgaaaacgatatcgttttgttaaagcgtttggctctccctcgcttttttttttaacccgatggttaatatctattaactaaaattattaggatttaggaaaagttaaatattttgtaagggtaatttgctagattagtattagcgaattcgtttgtttgttcttccagatctttttttcatagcttttgtta

SEQ ID NO: 4171 - DNA, 986 bp, Arabidopsis thaliana
  Intron number 1 from transcript AT5G64552.1 (locus AT5G645 52) derived from phytozome v7.0 (chr-ID Chr5; pos 25803855 to 25804840 reverse strand)
agttacggaatctctctctgtctcagatccatcaggttttttcttattccttctttagtactgtttttttgtatcttgttattactgattgatcgtgttatattaatgaatgcatggtttgtttttgtttcgttttctgaaatttgttcagcttatttctctaattgtctcttgctctttttagggtttatcttttttttttttttaaaaccttcatgatgttaactttttagagtacgcatgatgatttctctaatgattgtttgattaactctgattataactttgattaatttttttgttgtgaatttagatcttcttcctcaaagttagaaacttgtgagatatagagattcagaatctttgttgattccatttttgtttaatagtaacaattagtatttccttagatcttgtttattgagtttggatctttattttacaacctaaaatcgtgagacattgcttcttgttatcacttatcacttatcaaacacaaagttgactttccatgttatataagaagttttcaaagtcttaacattattctgattttgcttgaattattttgagtaacaaaaattatttagtttttttttttttaatactgtgtactaatctgtaaaccaatcttatcttatcctttctttcattctgttgttttgggaaatttctaatttttcgagcatagaaagatgtgtccttcacgtttcacttttacctaaggctaaaatgttgccaccattagtcattttggttggtacttggtccttttcagacacagttgtagccaattattggtctctgtactttgaatctcttaacatcacaagccgcaacttgtaattacactattgactcaaatgcttttcttgattattagtctcgtgtcattgtaatgttattgatcttcttgcttaagctttctactaacaagattttgtaactgctgcagaatagtttcttgcgcaaacccattcttgaag

SEQ ID NO: 4172 - DNA, 796 bp, Arabidopsis thaliana; identical to SEQ ID NO: 2594
  Intron number 1 from transcript AT1G78882.1 (locus AT1G788 82) derived from phytozome v7.0 (chr-ID Chr1; pos 29654869 to 29655664 reverse strand)

SEQ ID NO: 4173 - DNA, 516 bp, Arabidopsis thaliana
  Intron number 1 from transcript AT3G66652.1 (locus AT3G666 52) derived from phytozome v7.0 (chr-ID Chr3; pos 2083468 to 2083983)
gaaacaaaaaaataaaaaaaattgagttgttgttaaaaaaaaatacaaatttgagtaaatgaaaagatacaactctaactctttaagtattaagtaaaaaaatagattgaagattatttctatgttggatatatattaatattaattaaagagatttttttttttttttggcatcaattaaagaaaacagctaatatttcttttaatttttatgtttgctaagtttaccatatattatctaacttcttataatttttgttcatatttctaaattttgattttaaataattttaaattttaaattttatttatattaaaaacatactcatattttgtgtggccacagccacaacacaagcataatttttattttaattatgatataagattttatgtagtagaaaagaataatatatgaattaatcgtgttagggtttaaggcgttttctgtcactcccaaatctcttttgggtttatgcaactgtcaagtgtcaagactctcactttatggaatag

SEQ ID NO: 4174 - DNA, 502 bp, Arabidopsis thaliana
  Intron number 1 from transcript AT2G29140.1 (locus AT2G291 40) derived from phytozome v7.0 (chr-ID Chr2; pos 12530890 to 12531391)
cagaagacagaagaactcgaaacagctccaaacgtgtgagtctgagattcctcagctctctctgaaacacaaaagacaatattaaagttttgctctgtttttttttttttaattaatgctttttataatttttcaattccttatgcaatcactaggtcagatcaacaacaacaaccctaataatgattcacagtaaattttttttttaaaattttttttcacaaaaaccctaagggtttcttacatcgccgtcgatttttttcttctaactctctataaaacccagtttcttcttaaagtttcgatttttctatttctcatcatctgatcattgtgtttagggttttttttttttttaattgaaaacgacagtaatacatggagattggattttgagtactagcttaaagttttgatctttgggtttagttttggggtataaaggtgtcatctttaggatttttagcgtaattgattttgggggtttcttgttgtttaggtg

SEQ ID NO: 4175 - DNA, 974 bp, Arabidopsis thaliana
  Intron number 1 from transcript AT1G12260.1 (locus AT1G122 60) derived from phytozome v7.0 (chr-ID Chr1; pos 4164487 to 4165460 reverse strand)
tggattatcctgtttaatttctagagtttcttcaggtaaaaccctaattttatgtcaattttctatttattaccaatcgtcacaaataatattggctgttttttcttctttaagtaaaacttgatcatcatctttaatcatccttgatcataatcttcattaatcacctaaggtgattcaccttgatgatcatcatcatcatgtccatcccatttcatactcaatgttgctgatgttacaagcaaagcaaaatatcatctaaacctaaaatatcttattataataaaatagacataagtagatcaagctggggtttttttttgttaagttgattaaaagttttcataagatgttatacaataatctaaaaaagaatctcttaagatggatcatcctctctttaaaaaaaaaaactactcctcttcatcttctgatctttacttgtttggttatagtacttagatggaaatataagcagaatcaaatttaataatcgatctagtctatttgaagctgaaattatgcatctcattaaatcaattaactatataccatcatacggtatataattgggtttcactgattttactttcttgaaaattcagttatttaccatgagtccatgactttaaactagtgagtttaattaattatctcgaacctacataactaaccatgtgaatagtcttcacatatttctttagatgtaagcatgtaacacaactaattcttgtaattaataaatgtctgacgataattcctttcgattttgaattcaacctcttatatattcagcatagtacgtctaatcatatgtctgtcgaaataatcaactaattcacaatcacactatgtaagatatgtaactacctagctatatataaccttcttatgttcataatttcatgactttgttttcgatttgtttggtgattttcttataggcagattattaaccgatcaagaagacaaac

SEQ ID NO: 4176 - DNA, 467 bp, Arabidopsis thaliana
  Intron number 1 from transcript AT1G15780.1 (locus AT1G157 80) derived from phytozome v7.0 (chr-ID Chr1; pos 5435922 to 5436388 reverse strand)
aacgccaaatctccttgattggctctgaatttgaggtgaaatgttcgaatctcgtttttttttctgttgttcttaagccttgctttttagagttttctcttttgatcgggattccaaagaagataaagtatctccctttgtagttgggtctggtttattacaattacgagaatagatgaactttgttgatgtaataaagtttgcttattttgagttcctggattctcgttccggtgggattggctatttgatgttttgagtttattgctttttgctaccaacattagaaagaatgaacattttggctgatcaataagaaattctgagtgttaatctaatccatgttgtgtggtcatttgtttcctgttgatttgggataatcagttgttatattgtcatgttttggtttctctgtatacttactattgatactttgctcttcatggcttgtaaacacagaaaacttg

SEQ ID NO: 4177 - DNA, 925 bp, Arabidopsis thaliana
  Intron number 1 from transcript AT3G47680.1 (locus AT3G476 80) derived from phytozome v7.0 (chr-ID Chr3; pos 17578392 to 17579316 reverse strand)
ataagtacaaatctgtgttatttctctttgttttcagttgtagatagtaaattagggtttatatttgtttcagaaattaggggttttcacaattgggaattgatgataggaaaattagttctcataggttgctgtccaattctctgttctcatggagttgtcttttccaacgaatctgtatttttttttgttacaattttattttgtcttgtcttcctttgattgctgctatttcttgggatttgccgtcgtttgccgttcgtagaactaggattttgtcgttggatttgtttgcaattttgtttattagtacactcagatttaattttatcaatttgcttacagatttattttgattgattacagttttatgttggttaagtacatatatgtttgcttgttatcgtaaatttatcttatgtttgattgcagatttgttttgtatttgattacagacttgttttgtatttgattgtagatttattgtgtcttacgttcatgacataacacttgtttttgttatgctgtttttgttgaggttaaatggagaagtggatacagttgctagaatgattgatgtctgttgtgtaagaattggatacaattaccgaatggaaggctcatagaaggtaaaacaatcttaaccttatatctttgaacctctgacttttcatgaattatattagatgactatatatggcttttattgaatgcttgttgtcggtatgtggttgatacttggtagttgattgtcatgtcacacttaaaacagacaccattaacttttaaacaccaaccagatattattaccagacactattaactcttgttcttgttatttaaacacctaaccagaaacacactagaaacacacaccaaaaacaatctttcccgctccttcttacaccaaccagagaactagtct

SEQ ID NO: 4178 - DNA, 456 bp, Arabidopsis thaliana
  Intron number 1 from transcript AT1G53025.1 (locus AT1G530 25) derived from phytozome v7.0 (chr-ID Chr1; pos 19758979 to 19759434 reverse strand)
tcgcttcgggttctagaactcgtaaacccagaaaggttcgatttttatatttctatgcagaattttgctgattcacctggataaaggtggaattttgttcgcttatgatgcgtgaatgatcatctgggtgttttagggtttggttttgatttcagggtttatgtggggtttggttaatctatgcttcaactgtttctctttgccgtttgattgatgggttttgttcttcatgaattgtattgattgtgttcttagagtttcataagtttgaaagtgatcagctttatagcttatgtgaaatcaataagcttacgtttagattttgtgtttggttcgtctcttgtgaatgtttgtgaaatttcaattgttttctctgtttttgatttgtttatcaatcgtagttgatggtaaagtttgttgcttttatcttgttgtaggctgttcctgaagtgattg

SEQ ID NO: 4179 - DNA, 194 bp, Arabidopsis thaliana
  Intron number 2 from transcript AT1G03080.1 (locus AT1G030 80) derived from phytozome v7.0 (chr-ID Chr1; pos 737403 t o 737596 reverse strand)
tttttgtctcgaatttggccttcattgacttagtggtaattcgtttctattttttcttttgttttcttctgtatttgtcttttatatgactgttgaacttgttcattattatcaaagcttaacccttgctattttcttcttcttcttcgtcttcttaagttaggatttttttacagaggaatttggtgtacttg

SEQ ID NO: 4180 - DNA, 879 bp, Arabidopsis thaliana
  Intron number 1 from transcript AT5G56520.1 (locus AT5G565 20) derived from phytozome v7.0 (chr-ID Chr5; pos 22885497 to 22886375)
atcatcataattactatcatcttcatttggagtgaccaaagttccggtttttctgatttgttgttgtaaagtttttatttttcccgtttttgtgcagagaaagatcatgttttgattttgggtttaattccttgggagtgttgaatataatcagagtctgttgttttaaatccttgcttatagaatcagagaagatgttgagcatttggtgatacatatatatttttagctttcattgtcttaaggagtcaaagaagcttgctttgatctattgcttgtccaaatctagctcttgatagattatgtagcaattcgagtttattatactgtttcttctggacatattggatagttggtttgacttaggaatgtttagttagtggagttaggagggtgaagattaaggatttggaattaggagatatttgatttcaattaggaggatgaagtttagctagagtttcagtctttttgtcgataaattgtattcgtgaagtataaggttacagggcataatccttagatgtgatctatggtatgcatacttttatgtcatcagaaactattgtggatgatcaagttcaaggactttcttcttcttgtgagatcatttgttgcaatactgtggatagtttgatgtgagctctaccgaaacgacgaatggtctcgggataaagcaaggtacgtttatcaagtctatgaaactctctttagactgttatttggaattgaatctcattttgggtgtgtatgaaattatgatgatgatgtgttcttgtcaaagatcaaacatcaaagtttgagttctcctgttgattacttcttggtggtcttcttcctgcaggttggagaattattctggaatccaaattcaagatt

SEQ ID NO: 4181 - DNA, 437 bp, Arabidopsis thaliana
  Intron number 1 from transcript AT1G36732.1 (locus AT1G367 32) derived from phytozome v7.0 (chr-ID Chr1; pos 13900233 to 13900669 reverse strand)
agagattatcctcccttcttttctcatcttacaaggtaaagcttcttcctttttaattgattctttgatccgatttgtaaatttagtttctttatcgattttatggattgcccacatgattatttcttagatttgattggttttgaataaaaaagagatgatttgattcgtttatgctgaattaggttttcagattgtaaatattgaaacttttctctgttctcttatgggttcttgattcttttcaagatttaggattattgttgttagatcttttgaattagtgaatcttgtgtattgaaaaggtcaagtctttgtttctcttaagcagagaatgaaacaataactttgaatatgtctttttaatacaggaagttgggcagttaaagctgctgggatcaccagttttgtcaaaagtggagtgtgaagaatctttt

SEQ ID NO: 4182 - DNA, 507 bp, Arabidopsis thaliana
  Intron number 1 from transcript AT4G03250.1 (locus AT4G032 50) derived from phytozome v7.0 (chr-ID Chr4; pos 1425053 to 1425559)
cactcaggtgaaattcgttttttcctctatttcaatctctgtcttcctgcgagtttacgtgagagaatagtttttaatgatcccgagttcgtcgaattacaatgcaactcccagtttttgtagttttaattagcgaaattcatcaatggcattggaaattttaagccttttttggtttgttttatggtactactaattattcaagctaaggaattccaaagttttcgttcgttttgattgggtttagaagtatttggctgatgagagaaagagccataattctgaaattaaacccttttatgtgaagcttgtgtagatgttttacctgaatttcggaattactagcaacatttctaaatacacaaagcatgattgtaaaatgaaattgattttggtcagggctttgcatctcttggttattgaatggtgtccgtgtttcactattatcttcttatgtttttgatttttatgtgctattttcgatagattcaggcgaagcgaccgctg

SEQ ID NO: 4183 - DNA, 432 bp, Arabidopsis thaliana
  Intron number 1 from transcript AT4G32790.1 (locus AT4G327 90) derived from phytozome v7.0 (chr-ID Chr4; pos 15812102 to 15812533)
taacatttatcggtaatatatcttcccactctactgcagtaattcgagttcaatttaggatagaattgctttacaaataaatttgagttatcttctacttcagtcttgtattgtatcttacaagttcatgggtcaattcaagatctcccttttcatgtttccgaatcaattttcttttacttgagagaaccaaaacttagcaggattcgcgttttcttaatttaatttgtttcgattcagctccgtttgcttcttgtcgcttccaatttcccgaccaatgggtgatagatttgtcctagcatagaaaaaaataagattaattgatgtctcagatgtaagatccattacagtaaaattcagttgtaacatccaattcgtgtgtttgaattcaattctctgttttttattctatcctgcagatcattcgttaag

SEQ ID NO: 4184 - DNA, 837 bp, Arabidopsis thaliana
  Intron number 3 from transcript AT1G05550.3 (locus AT1G055 50) derived from phytozome v7.0 (chr-ID Chr1; pos 1642339 to 1643175 reverse strand)
ggcgtctagcatcaacgcttaccaatcttatcggggtcgggctcgcttgtctaatgtggttcacttggtttatctatgtggattatatttattaatcaatgagtttctgtacgtgtaaaaaagtttttgtcgaacaacctaagcaatgtatgaattgtgtggttagtttttaagtcacgtgaattatattgtatacttgttttttcttttattttggtatacttgtttccttgtcaacaaatttatcgtaggttttaccagtggtccacgatagactgaatattgcgtaataaattaaatatagaaagtgaagaaaaaatatagaaaattggaggattcgattagtctgttttaaccaaaaaaggaaagaggaagaatgctatgtaaaccaacaaccaagccttggtttgctttgatttatttgttgatattgggtatcgagaatttgagatactcaatttctaattcatcaaaacattattagccttttaaaaaaaaaaaactctgttttgtggtctcttgaaacataatttctaatgtctcaatttctctttggtctctccaaactctctccccggaacgatgtgcttgtatgtaaacttctcttgcattctctctattgtattcgttatgtattagttaggttttgttttaaaaggctttgtagggaacaaatttgggtttgtctgtaagtagtgacatcaagaagataatcggagggtggagatgattgggtttaaatcatagttagataagagtgtttgcattacaatcccattctgatgtccgaattacttggcagatacagaagagcattcgtttgttttcaaccagccc

SEQ ID NO: 4185 - DNA, 536 bp, Arabidopsis thaliana
  Intron number 2 from transcript AT4G02570.4 (locus AT4G025 70) derived from phytozome v7.0 (chr-ID Chr4; pos 1128779 to 1129314)
aatcgggaatcggtaatcgtcagggtctgtttggggtacggcgacgcgattttctgattattagggtttaagatctcgaggtatcactatttctgtcggattctcgcttgttttgttccatacgacagttgatttttttatcattctgttgattgttcgtctttctaggtttttatttgaatttttgtgggatcgagattgttagggttacgtcggagtctctggattgcgtttctactgtgtaatttcgtgtttatctcatggattgattgtttctcgagtatattctgatgcttatgtcctcgtttgcgcacaatctgatagtttgggtttgatttgggtgataatactcgtttcgcattcgataatgtgggtgttaacgtgttattataacctctgaagaatgataaatattgttgactctctcgcttcagtcatttcattgtgttgcttaatactgctgttctaaattttggttttctccttgttctttggttaacttaggttgaggagagcttgaaaagttgtttgtcaac

SEQ ID NO: 4186 - DNA, 771 bp, Arabidopsis thaliana
  Intron number 1 from transcript AT1G64142.1 (locus AT1G641 42) derived from phytozome v7.0 (chr-ID Chr1; pos 23806188 to 23806958 reverse strand)
gccgtgaaaatctcgtaatcagattcaaaattgaggtaaattcattcttcgtttttgtttttcttcagttgaatttgcatgtttgtttttgatgagaaattcagagaaatttgacttctttttaattcgagacaaaaaaaatatgtctctgagatcgatgtctgggaaattgaataattctgttattctcgttgctttctttccttgttctgtttcatttatttctgaaattttgtgtcggtttaatctagaaagactcaagtttttgatttgaagtactctggtttggtctcttttgttttgatttctctctcttttattctaagcttctcatggaatcatatcgatgaagctagtgaataatccatcatttgtggtgtatctctttgacaaaaaattcttcatttctcaatctgtttttttagatctcttgttttgtttcatgttgtggttgactaacgaataaaaaggttgtgctttttaatcttggtttatggtgtttgtcctaaactatgtgtgttctggagatgttaagtgttctgtagatttgaggtgttaaatgatctgtgttctgtagatttggtaacccaattgaatttttcactgctctattgcggtttactgccactcacttgtttattatctgttatatgaagcaggatggttagctgctaccgtaatccttgcgtgaagattgagaagaactaattttggtttgtgagcaactttcgaatcagctctgttagatttgatttgaacttttatttgaag

SEQ ID NO: 4187 - DNA, 690 bp, Arabidopsis thaliana
  Intron number 3 from transcript AT3G16470.3 (locus AT3G164 70) derived from phytozome v7.0 (chr-ID Chr3; pos 5596854 to 5597543 reverse strand)
ggaagcagacactacttggaacagaggaggtaaatattttgttttcaatgagagttctcttgtcatcaacattaactgatcatttttggttgtctttttttttttttgctagtttgtggttgatccagaagattacataacatcagtgaaaatttactacgagaagctctttggatcaccgatagagatcgtaacggctctaatctttaagacattcaaggggaaaacttctcagccttttggactaacctctggagaagaagctgagctaggaggtggcaaaatcgttggatttcatggaagttcaagtgatttgatccattctgttggagtttatataattccgtcgactacaccgctgactccgccggtatcaggtggtctgaccaaattggaagctcaaggtggtcgtggtggagatgtttgggacgacggtggtgcttatgacaatgtaaagaaagtttatgttggacaaggtgactctggtgttgtttatgtcaagtttgattacgagaaagatggtaagattgtatcacttgaacatgggaagcaaacactacttggaacagaggaggtacacaaatctttgtatttcttgaaattgcccaaaagttttttttttctttctttctagtattgatgtgtttttgtttttgcagtttgagattgatcctgaagactacatcacct

SEQ ID NO: 4188 - DNA, 885 bp, Arabidopsis thaliana
  Intron number 1 from transcript AT3G22968.1 (locus AT3G229 68) derived from phytozome v7.0 (chr-ID Chr3; pos 8152232 to 8153116)
tcttccgtgaacatcgtcggacctgaaaaatccttctcctagactttttttttttctttcttctctttgtattattattctttgcttcgtttttgtgaagaagatgatccgctgatttcagaagttttcttcttctggattttagctgagaggtttttggtagattctgtttcttcttcttcctctgtggttttcgaatccagttttggaatttttgaagattttgtttagtttctgttgaagagatctgagatatttgaacgaagcagagtgtatatgaaatcaaatctgtgaaaatttctttgaatttgaattgactttggacttgtgagagaagttagatcttcttcttcgtgagctatgccatttacgatgaagatccaaccgattgatatcgattcttcaccaaccgtagctagagctgaatcaggaaacaaaccggtgctcaaatctcgtctcaaacgtttgtttgatcggccgtttacaaacgtattgagaaactcaacaactacaaccaccgagaaaccattcgttgtcaccggtggtgaagttcaatgcggcggagtagtgacggagttcgagccgagttctgtttgcttagcgaagatggtacagaacttcattgaagaaaacaacgagaaacaagctaaatgtggacgtaatcgttgtaattgctttaacggcaacaacgatggttcttccgatgatgaatcagatctattcggtggttcaatcgacggttgcgacgcttctgatcatctcaaggtaaccacaacaacaacaacaacaaattcttaatctctcttgatttaaacatgaaactgaatttgaatttgtcgatctgaaacagagtttgattccgtgcacaaccgtcggagagaggaa

SEQ ID NO: 4189 - DNA, 411 bp, Arabidopsis thaliana
  Intron number 1 from transcript AT5G60570.1 (locus AT5G605 70) derived from phytozome v7.0 (chr-ID Chr5; pos 24347992 to 24348402)
gatctaaatctatctacccattggagttttcttaggtaagcttggagattattagtcttcgttttttattgcatggtttattcattcgcttatgtttgtatgatcctgctttttggatctgtgcgcattttccaatttcagaatttttgataaggatctttggggtttatggtatcagattcggatctactttctcttgttcataatcatatggtagatttgactttggcttcggatttgaggatcgatctcatgtttaatctgaaatgatttctatttcgatcggagaagaagaaagaaaggaacgattttttgtgacatttatttctgttttttgattggttaaaagttttccagattctgacatcgattttagtatttattacagattcttaatttgggttttgcatc

SEQ ID NO: 4190 - DNA, 504 bp, Arabidopsis thaliana
  Intron number 1 from transcript AT1G77000.2 (locus AT1G770 00) derived from phytozome v7.0 (chr-ID Chr1; pos 28940384 to 28940887)
agaaacccaaggcaccgaagaacacgatttcagaggtatgatccggaaaaaaaaatccaaagttttgatccttttgttttttggtgagcaaaaaaactggtcctacgctagtcaatggacattctcctaaatttttgtctctgtttttttagattgtaaattataaagtaatttctccaactttctggaaaaatccatccagcaaaagaaaagaataattggttttattgatcaaagatcttcagttttcaaaattaagcactaattatggggttttgtttattaatgtcctaaaaaagagttacacatagagagacattaatgcttgcagtttagtttaaagagttttaagaccatatctcactcaatccttatttccttacatttgtcgtcttttgatgtcatagactcagagatatttatttatcttctttctctctcatttctcattctcatatttacttttgatctcgtggtgttagaatcaaagaaaccgcttcaagg

SEQ ID NO: 4191 - DNA, 731 bp, Arabidopsis thaliana; identical to SEQ ID NO: 3320
  Intron number 1 from transcript AT4G10960.1 (locus AT4G109 60) derived from phytozome v7.0 (chr-ID Chr4; pos 6717591 to 6718321 reverse strand)

SEQ ID NO: 4192 - DNA, 615 bp, Arabidopsis thaliana
  Intron number 1 from transcript AT2G39300.1 (locus AT2G393 00) derived from phytozome v7.0 (chr-ID Chr2; pos 16412870 to 16413484 reverse strand)
gaggaatcaatctctctgtttatacggtaaacttcataactccatcgattttttggtttctctattttgaatttcaaacaaaaaaactgttactgatccatatttgtatttgattgatcgtaaatcctctgaaaattttcttctttgttttcttcgccactgagagactcaggttcgatgctctgcttcgttttttaaggtttttttagtggaaaggtttaaagggtagttatgtctttttgacttgtgttacgactcacttcgatgtttatggatctgtcagaaaagctctgacattttcttcattttgatcgtaatttgtggcgatcttgatcttgttttctatttttaaaccattatatctaaatcttcaaagctaaaaataaagatgctcttgaattattctcatcgagcaagtgtttaagtaagacttcactttagaacactctctgctctgttaaacctttgtgtttcatgattactgtctctaatcaatgtccctttctatgcgctgttttgccttttgttttttgaacaaagaagaaacctttttcttattttgcttctttataattttgattccagctgcacaactctagtgaacctttgttacca

SEQ ID NO: 4193 - DNA, 486 bp, Arabidopsis thaliana
  Intron number 1 from transcript AT1G24190.1 (locus AT1G241 90) derived from phytozome v7.0 (chr-ID Chr1; pos 8569928 to 8570413 reverse strand)
ttcttcttcttcttcgtcttctctgaatttcttcggtaaactctctaacacataaacgatgatgatcttctttcgttttttatcctttctgtttgatttttgggtattacaattttaatcgtgaactgaatgtgaaataatctgaggattaagttaagatcgattttttctggtccgtctccttttgttttttcttcataaattgtttctgtagctgctagatctacaggtgttgcttattgggatgaaattcaagttcggttctttgaattttccttgtttatgtgattgattttgagttttactaggttttgatttgtagatgaacatgaagaaagttgttttcagcttttgttcttttgctgaatcccaaattttacttgaattctctaaagaaacgttctttggtcttatgagatgttgaatagctttctaaatgatctgttttttttaatggtaatgaagctctgttcaacttcaaacacc

SEQ ID NO: 4194 - DNA, 658 bp, Arabidopsis thaliana
  Intron number 1 from transcript AT4G29900.1 (locus AT4G299 00) derived from phytozome v7.0 (chr-ID Chr4; pos 14618780 to 14619437 reverse strand)
agctgagaaaatcctctgttccgccgataattgaggtagatgattatattatatttcttttttttcgattcaacagtaactatagaaaatttgttgtttctggaatcgccagagattttttttttctctttttttttcctctttgtttacctttttgcttctgctactttgtgtttgtttattcgaatctctcctgcgctttcgcacgatttacgatgttaccctacacgattgttgttggaccacttcctacacctaaaactaatatttcactgagctagattcttcttcttcttcttcttcttcttcttcgttttgaattttgaaatttccgggaaatttttcggtatctattcgtttcagtgtatctatcggaaaacggattttcgaaggttgtttggttttaggtggcataatttggcgaggagtggtaattactgcttcgtaacagtgaaatgtgagacttgttcataagagatttgtctcgaatcgtatttggatttatttggtagtgacttttgaattggactgagattggttttagagaggaagaagagaatgctcaaggctatgtactgtttctgattgggatgcgttttttgttctcttttgtatgtgtttagcttaaagaagagcgtgttgctatctctcctgcgac

SEQ ID NO: 4195 - DNA, 453 bp, Arabidopsis thaliana
  Intron number 1 from transcript AT5G45840.2 (locus AT5G458 40) derived from phytozome v7.0 (chr-ID Chr5; pos 18597418 to 18597870 reverse strand)
atcatcttcatcatcatcatcctgtaaaaataagggcaagttctacaagaaatcagaaaatatcaatccaatatttgtttttaaacagaaattctatctttttaaaagtttttttataatcattttctattttctggggattttttttatatttaatttttcatttctcaaaccctatacccaattcttggtgaagaagtttcttctttgaggtaattattttgcaatgttcttcatttatcaagagaaaacaaatgtttttttttgtttggtgggttccatgttttcttcatattgcttcttcaagagggttattcttattctttatttttttggtttaattattattggtatacatttgttgttaaagttttgatatatgtttgtttgtttcttgttggcatttgtttttttccaggattaacaagaagaagagaattaacgtacgagttg

SEQ ID NO: 4196 - DNA, 448 bp, Arabidopsis thaliana
  Intron number 1 from transcript AT3G59470.2 (locus AT3G594 70) derived from phytozome v7.0 (chr-ID Chr3; pos 21980115 to 21980562 reverse strand)
ccgacctacatctgccggaaaatatcttttgaccagtaagattgttttattccttacaccattatttcgggtttttaattttcgattttggattgatcgattaagccacttagactagtccctgcgaaagaatgagactgagaagttggacatctcgatacttttggaaaccccgatttgttgatgactcttgaatctatgggacggtgaatcccaaagaatggttccattttaagtttgttttgtattgttggtggaggctggatgattttgagagcacttgtacttgagctttgttctcatatcttgaattagacagtggaatagaaaagatgacaactttgtattagtaagatgatgaacacttgtagctcttcttgctagatatttgattagtggaattgctgttttccctttttttgagttgcagtggatttcaggattgata

SEQ ID NO: 4197 - DNA, 696 bp, Arabidopsis thaliana
  Intron number 1 from transcript AT1G76650.3 (locus AT1G766 50) derived from phytozome v7.0 (chr-ID Chr1; pos 28767443 to 28768138 reverse strand)
ggactaaccgttggcaaaaaaaaaaaaaaagttgacaataattattaaagcgtaaatcatacctctcaaataaaaacttgaatttggaaacaaagacaactaaaaaactcgaatttaagagaattcctaaaatcaagtgaagtatcatcacttggtaaaatttcataaccgttggcttctatttctatgtgtgccttggtttgcaggagataatatttcatttccaaccaatgatattcgtacacatagtcaaacaaatgtttgtctttgttattatattgagaaagaaacaagaaagagagagagagatagataagacgaaggaagtgaagcttccaagcgcccaccgttaaaaatctcgtgtgcaagtttcaaatacaagtggccggtggtctccataatttgatcgtcatccaattaaaaaggaagaaaaagcgtgttttatacaagaaaactcattaaaataaaagtccaaaatatctaaacactaatctaccacgtctattacacacacacacacacacttgatcttaatttattttcaagattcaagaaaatacccattccattaccacaacttgaccacacgcctatatataaaacataaaagccctttcccctatttctcattcacttttcatttcaaaagtaaaacaagacaaacaaaaaatacacttaaccatttatttttctctc

SEQ ID NO: 4198 - DNA, 276 bp, Arabidopsis thaliana
  Intron number 2 from transcript AT5G43900.2 (locus AT5G439 00) derived from phytozome v7.0 (chr-ID Chr5; pos 17666655 to 17666930 reverse strand)
aagagagcagggaggcacgaaaagggaaaaacaaagtaagcaaaaaaaaaaaaaaaaaaaagagaaacgaaaataataatactcaaaaaatattcggggggaaatttttcccagaaacgcgtttagatttgcaaagttcgtcttctccaatctacagttctacaccaaatctcagtttattcgctttgaggacctttttttgtagatttagaagctcagtgctcgttttgatttaatctagatccagaaagctgaagtctttgatctacgaaacga

SEQ ID NO: 4199 - DNA, 352 bp, Arabidopsis thaliana
  Intron number 1 from transcript AT4G39160.2 (locus AT4G391 60) derived from phytozome v7.0 (chr-ID Chr4; pos 18236469 to 18236820)
gtctagattcaacgtatcgtttcgtggtttatcgggtatttctagtttccaattctcctcatcaaagtttcagtttttaatcaccgttgatttttctattcaatggtacttgaattttctctggaatgatattcaattgttctgttttgattgcctgattgattacagtattctccttttttttttcttttccttttctgtgaatttatgagtttatggatatactaatatacatatatatcttgagatctgccattggtcttgtttttggcctagtataatggtttgacaaaagctccttctatcttgtattgaaggtgacactttggtgagagggagagtatttgtgaaa

SEQ ID NO: 4200 - DNA, 697 bp, Arabidopsis thaliana
  Intron number 1 from transcript AT1G11720.1 (locus AT1G117 20) derived from phytozome v7.0 (chr-ID Chr1; pos 3951679 to 3952375)
tttctgttgggttttttcctcgctccatttctagtgtaaatctcttttgtttcttctcgtctcaatttttttcgctgatatgtttgtatatctctttagattctacttatcgggaatttaagtgtaaagtgttctactttttcatagtgagatcgccttttcgattagtatatctttaattgaatcaatgtactatttttaaataagattcaactctggtagggtctctggattgggattctcatgttagaacctcgtttgaaattggtaagagtataggaattgacttaatttctctaggaaatgttcaatttcttctggtcaaaatcgtcacctcattgagaataccaactcgaggggagagaaatgattttggggactatgagctagaagtaagagtcagctgaagattcacagtagaatgaaaatgtctcatcttttatagtttgattttaatatccaccttgttttacttatagtgtgattagtttaggtgttcttggagatgaaaatgtctcattcaatatggttttgatttataaatggctaatattcttcttgtttattgctggtgtggctagtttatgtatttgttagagcttgtgaaccaggtgactgaacagttttataatcgatttctaaccatcagacatgtttggctttcagattgcttcattggaaagtcaatacaaatcaa

SEQ ID NO: 4201 - DNA, 867 bp, Arabidopsis thaliana
  Intron number 1 from transcript AT3G25690.3 (locus AT3G256 90) derived from phytozome v7.0 (chr-ID Chr3; pos 9353053 to 9353919)
agtttccacaccatatcatgtaagattcttacatctctttacaagaacctgttctcttttgttatctcttcttattcacacacttgtttcttagataaggctaaaaaggcaaacatgtgaaatctatggctgataaaaaagggttttgataagataatgaaaaggccattcttggttttcatgtttggttgatttgattttcctttaccattttaactaaaattgaattagaaaaaaaattcaatctttctgttttcttgtatatggttgttgctatgtagcgtggcaacacacctctacttgtacctggtcccccaaacatctcaacataatctaaatctcacatttttcttatgcaaatggaccaaacttatttcttgaatgacctttaccaaattttgagatcactaatctttatattgactagatttgtctttgataaatgtcttatctttaactaacttatgtgtttagttcaccgtctagtttggtaaattgctataacacaagagacagaattcttaatctttagctttgaacttttaattgagttttttttcacagctgcttcttggtcatggcttaagaccccatctattacgatacatgtctatttcctcatctgtcttgagctaaaaacagcgactattattggttgttttttcattttatttaatgctgagatttttggactctgatgcatgcgacttgagaggtccataaagctgataagatcgaattttgtgatgataagtgtcttttttttttccttcttttctttggtggacatagttctgtaaagttttgtcagtacctggaagtttctcttacagaagcaagtgtgtttatccatttgtcataaggttg

SEQ ID NO: 4202 - DNA, 684 bp, Arabidopsis thaliana
  Intron number 1 from transcript AT3G13920.1 (locus AT3G139 20) derived from phytozome v7.0 (chr-ID Chr3; pos 4594129 to 4594812 reverse strand)
aagccctttactctcgcttaccaactttgctccaggttcgcatcctatcggattgtctatctattatctcgatgtaacttttacgattcatgattgtttctttacttttggattgttctgatttgtttttttgtgttttccgatagatttggtttcaactttgttgagttgatttggaagttttgatttttcgttacttcaagatcgttttttttgctgtggaagtgctttcgtttttgttctctttattagattctgagctgctgatgatgacgattattaaatttaggatctacacatctgtagatttgttgatgggtttgtagattttgttacggctaggttagtctctcaatagaatgaaatgaatcgtcttcaaagctcagatgttcttgtcttaacactcacttggttttgtctgattgaatgtttttttttgtaatttggagaaataggttgagtggtgtctatgtttaatagataaccatatgtgcctttatacattttctccgcacatcatctgaggcagatattaatgcttgttttcctctctttatggacttcgagtttggctttcttgtcacatttcctcctttgcaatcatattattaacgatatcaaaataggtgttgtctctcttccttttgatatgaaatctgattgtttttgttctttttatgtagc

SEQ ID NO: 4203 - DNA, 299 bp, Arabidopsis thaliana; identical to SEQ ID NO: 4104
  Intron number 1 from transcript AT3G09910.2 (locus AT3G099 10) derived from phytozome v7.0 (chr-ID Chr3; pos 3038122 to 3038420 reverse strand)

SEQ ID NO: 4204 - DNA, 703 bp, Arabidopsis thaliana
  Intron number 3 from transcript AT4G13730.3 (locus AT4G137 30) derived from phytozome v7.0 (chr-ID Chr4; pos 7971209 to 7971911)
aaccctgtaagtccgttttggtgatttgatactccaacattgtattgattggtttgtgaagagagttacacaattggcttaatcggcagtctcttttgatcaccccttcgggatattccatcaaatttctgattagagtggatgccattcttgtaaagtaatagctagctagattgatcgattagacacagtcgcatttctgttaaccggagagaaatgagcaatgaagttaacatagtggcatactggcatgtctgttgccagtagctaagggtgttatgatgaaaacgcactgccaatagaaaatgatgactgtcattaggcgttctgctagcctagtagaattcggtgatggtgtcatgatggtgttatgatggtttttattttattttattattttgatccagaagcttgtacgtataacatcatgtcagctaaatggtgtcatgcatttgactaagaagactgatctagggccactggtcatgtgatacctcctaaaggtcatattaaaacatatagtagttaatgataaagaattcggtcattgtagaggtgcttatgtaatctggatgataattcttccttttttcatgttccgttattgttttctgtttaaaattaacctggtttctatatatttttgtggctagttagtcagaagtaacaaggaaaatggataaatcaaagggcggtgatagta

SEQ ID NO: 4205 - DNA, 304 bp, Arabidopsis thaliana
  Intron number 1 from transcript AT5G15570.1 (locus AT5G155 70) derived from phytozome v7.0 (chr-ID Chr5; pos 5066448 to 5066751)
cgtgggttgttacaacggggaagtcttcttctccggtaagcttttcgtttctctttaaaggattcgtttttaatcggtccgttgtaatgcccgtgaattagacctcgctgagtttctagggttttgttgtggggaagaattgatatttattgaagttcaatttttcgttttcctaatttgggcaacttgggttttattcttcgttcttgtatgtcattcggttcaatttctgcttcagctcaatgtcgaatttgattgttttttctccgttttttaaggtacctagattagaattccgtgggag

SEQ ID NO: 4206 - DNA, 577 bp, Arabidopsis thaliana
  Intron number 1 from transcript AT4G35300.5 (locus AT4G353 00) derived from phytozome v7.0 (chr-ID Chr4; pos 16799072 to 16799648 reverse strand)
tctctgttcactgtccttccgcacaaaaaaaaaaagtattcatttttatattctcacggttacttcgaaatctagctttcgttttctttttttttgatttaaaccaaaagggtaaacaatgctttatgattgcttagtgacgccattgaagcagcggctcactgatagtggcttcttctgcctccaattccaagttgctaaccctagttttcatctctctctctgtatatcatattctctcgtactttcttactttctcttctacttggtagagataaaaagtagtcaaattttattcaaagttttgattttgacatctgaggtttcacctctgttttttttttctagaactcctttgggtatgtgtcttttacgtcactaaagggtttgttatagtcttaggtcatgctttttggtgttatctctctctgttttatcttttagctcaccaagtgattgtgtctgattttcgaattttcaggtggattttgtttcactcactcatcgtcgttgatcagtgactctgtttttgcgaaattctcttcagatttcttgataaaagatagaagacggaatt

SEQ ID NO: 4207 - DNA, 976 bp, Arabidopsis thaliana
  Intron number 1 from transcript AT3G50350.2 (locus AT3G503 50) derived from phytozome v7.0 (chr-ID Chr3; pos 18672240 to 18673215)
aactagttcacgcagtaaagtatcacttaaatacagttagttcaaccggccataaaaaagtttgttctcgtacatatggatattattgatttacacattgagaatatctacccatctattattaacaattaagcttgacctagagaaattctgatgtagatttttctgattatcttctcatggttaggaaccaaaccttaccttgtttctctactcgaatcaatctctttattagcttatgtatggtttagtgttctctaaccaaaccaagaaaaggattggtttagtgttaacatactgtattactaagtacatagttattgggctataagaagctaactgggccacaaatccagaatcccaatataagtcaatgtacatcgtttgctaaaatctaaaaacggtatctttaatctcagaaaggacattatacaaagatgatgatgttacacataaggtcgtttatctacatcaacttcaacccactagttcttcatattacataaagtctcataaaagcgatttcgtatcgaacttttactcataaaattcccttattctatgattaaaaaggaagaaattccaaagttttatagtatttttatgcaatgccaacttgtgttgcttcgtaattccaggtacattacataatttaataaaattaaaatgaaccaatcaaaaacaaatccaggtcatcatcatgacttgggccggcccaatatccctgagtcggcaacactctctctctctcttccattcctttataactaatcttcaactaacttttctcttccccctaacttttttcacccaaatatttcgacttaattaccaaaaaaccagccattgatcgtaaaacctttccaccaccgcacaccccctcgccgggggtagtgcgtcgcatacacgcgccaccgttaccttctacttctctcttgaagcaacactcgtggtctcctgatctaatccgcgagga

SEQ ID NO: 4208 - DNA, 508 bp, Arabidopsis thaliana
  Intron number 1 from transcript AT1G01340.2 (locus AT1G013 40) derived from phytozome v7.0 (chr-ID Chr1; pos 135235 t o 135742 reverse strand)
atcttactatctcgccgttacctacttcgtttcaggttagtttgatgatagaattttgattccgatttccgtttttgttctttttcgtctgaatttattttgctgtttctcagaaccgaaacgcttagatatatgtctttcgtttatggtcaatggttttttgaaatttggatttcttatctttgatgaacagtgtttttaagttgttcgtgtggtttccatttattgagcaggaatgggtaggaattacaggatttggtataatctaatgttaggtggaaattgactgattctaggttctctaattaaccttttcaagaaagaaatatttaaaaacacatacacacaacacaattgtatttgtagttaggtgtctacttgcttatttttaattggtattggggattatcattgtacgtaatcatgtagaagaattcgtatgtcttaagttttggttcttattataatgttaggactcgtcaccctgtaagcgaaagatcagttgaaa

SEQ ID NO: 4209 - DNA, 752 bp, Arabidopsis thaliana
  Intron number 1 from transcript AT1G54590.1 (locus AT1G545 90) derived from phytozome v7.0 (chr-ID Chr1; pos 20392463 to 20393214 reverse strand)
agctttatagtctttgaccatatcgtcatatctccgaccttcgaaattccgagaaaaaaaacggcgcatgttttttctcattgatgggaaggcaagagaaatatctaacttggcattgaaatccatattgattaatctaaagctttctggcaagtaatcacaaatgctcaaaaagcatagctgaggagcatcaatcacaattcttgaacccgaatcatgccgagaaaagcgtattcttataatgcgccttatcaatgacctagagagcacccgaaagactttcgcattatgcttcaaacatgcaacaatctttaactcttccgagagggaacaggatgagacaagtctctcaaaagtggcttcattgggatacatattatcttttaaatgcatagtcttgagaagaggtaaagaaacaaactcgacatcatcaaagctcacccgagccagttttaggtatacgagtgtcttgcagatataaaaggttaggggcatctcatgatactcaaaatctagaagatcagacacttaacatctagatgtgtgatgctacgctttactagagtatatatcaatccatgatgtgaaataagacgtatcacctacaccaccgtggcttttatcaatagttagcttgacttggtctaagcaaaacactctatcagattcgaatacttgtcaccataactcacaaaggcattgaaatcttgtgatcaggtgcggctggatcgactcaagtacgtgttgaagga

SEQ ID NO: 4210 - DNA, 581 bp, Arabidopsis thaliana
  Intron number 2 from transcript AT1G14610.1 (locus AT1G146 10) derived from phytozome v7.0 (chr-ID Chr1; pos 5013621 to 5014201 reverse strand)
aggagcttgagcggaaaaagaagaaggaagagaaggtttgacttgtgatttttttccccatttttctcagaaacgttttctggagtcgattcaacgtggttgtgctgttctctttgagcttgattttaacaattttgatatctagaatctcatagacgagtgtgattgagtttattgttcaatcatgggactagctaatagagattggatagtgataactatggattacccatttggaaaatggaactgatgagatcgtattgttatttttaagatagaaaagtttgagaaaccgtcttcactatatcagaatgaagaagtgttctacatttaatagtttgagtacttggcacaaattcgtataatcatagtttgtgtttcttttggtgttgttttagagttgtatacttttgaatacgccttacatttcatttttctttgtgtggtgggagttagttttaagtaaaatattgactcaattttgattttttcaatctcattaatttcattatattttgttcgaattcaattgtaatttattcataggctaaagaaaaggagttgaagaagcaaaaagcttt

SEQ ID NO: 4211 - DNA, 1007 bp, Arabidopsis thaliana
  Intron number 1 from transcript AT2G22850.2 (locus AT2G228 50) derived from phytozome v7.0 (chr-ID Chr2; pos 9731600 to 9732606 reverse strand)
atttgaaagaaaaaaaaatagaaaaaaaaaagtttagaacggaaaaaaaaaattagataaaagcgaagtatttttatttctgtgtctcttttgatcactcttatgtgtaaatgagaatatgagtgttactttagatgatggacttcgttttttttttgctgttgtttcgtacttgggcctctctaatcatatttatcaaggcccattagtgagtgggctaaaagatataagcctaatcaactactcttgttgacgactaccaccctatcatgtatttaaaaccttctgcatcaagttggagtcgtcggctttgagggttggaatgaaacctctacgtcaaccagagtctttcacagacttcccaattcccatgttcagcttgtttcctctttgattccttcttattcctcaagtagacagaccgcaagattcttcctacaagccttttttttatcaagtacgtagacggaattaagtatagttagaaaaatatatgcaaatttgaataacgtattatttgtttaaaatatatgcaaaactattaaccattaaccattaaccattaaccattttgggaaaagattgttaatgatctaacactaaatttatcatatgaaagcaacaaggttatgtactccaaactatatctaatactgtactcttgagtcttgaagcatcttgcatctagtgaagatatttattcggtaagaattgtcgtgtctagtgcaagtggaagtgtctggatcgtcccacacatgccacgtgttagaataaaatctccaaaaattacacaaaaaaatccaaattaaaaacgttatggaccatccatacattgagagattggtcctcctccactctttataatcaatttcattttttcttgaagaaaaacaaaaacaggaataagtgaaaggtagggttagagagagaagagcaaaaagtagttacagggacccaaaagtggagaaacagaacccaaaaaaaaaaaaaaaaaaactaaagttgga

SEQ ID NO: 4212 - DNA, 702 bp, Arabidopsis thaliana
  Intron number 1 from transcript AT5G52552.1 (locus AT5G525 52) derived from phytozome v7.0 (chr-ID Chr5; pos 21329278 to 21329979 reverse strand)
ccattttgccgaggttaggatccaattccttttcataattgcttcgattcaatcttcttcaatttccatagatcaatccaatttgagtcgattttgtaatactttatgattgccttaggttttgatctctgaatcgacctactcgtttcgtgtttgctttgatttgattttggtgtatgcattagtttctgaatgataattataggttgattcatccgatcgcagtttgtcccggatttagtgtgcgcagtatgaatttcgttaaatttggcttatgatttgtttcaaattgactttttatgtccatgtttcgtggattactttgtgtagtttgtggctagctttccgaatttgggtttcaatgttgatcgagagtatgtacattcaactttggttgatttatcttggtttgttgaccagtgttagttcttttgaatcactgtatcttctaggtcccttgtgcaattgtgtttataggttggtaacctgagtgagtaattaagtaatcagctgggtaacatctggttgtgaaaaagctttcttgtttaatgtttttgcatatagccatatagaaaatagaactgtgtggtcgtgcagctttcattaggttaagaaagcagatgggttggtttggtttggtatattatttttgagatccctgttaacgcaagtctaatctagtattgttttcttttgtagaaa

SEQ ID NO: 4213 - DNA, 852 bp, Arabidopsis thaliana
  Intron number 2 from transcript AT2G26550.2 (locus AT2G265 50) derived from phytozome v7.0 (chr-ID Chr2; pos 11291834 to 11292685 reverse strand)
cacatattgctggtggtcaagttcttgtaagacaggttagtttctttggaaagctttcataaagtaacatagaagagttatataactgcataaggtcacatccagcatattgaatggttaaagctagttcgatatattaaagattagtatcgatataaatggattcaggagagttcgatttatcgggagttttgctggtttttagtatacttttcacacattgctggtggtcaagttatttgtaagacaggttagtttctttgataagtgttcacagagtaacatagaagaaattttcaactgcataatgtcacatctaggatattgaatggtaacagctagtttgatagagttagagattgatatagatatagtggattcaggagagttgggtttatcgggagttttgcggttatggtgggtatgagagagtggcgataagaatgagaatgagaatgtgagaagatttccattcttcttcattgagactcaacttacaaatagaactgtgataaagaaacactcagatcctaaaccaaaaccaaccaacaccaggcttgctcaattagtttaaagcttgccccaaaagaacttgttaaccgactgttagttaggttaatgtggtattaaccaacgggtgaactatgcttttgtctttatttttgagatttatcataactgtacattctttttgttggttctgttgtgttctggttcttacttttatcaatatatcccatgatttggactgtcataattgtttggtaacccttatatgcgaggtgttcaaatgtaactgatcagttgattcattaaggtatctgagaaacttctggaaggaaaggagctgga

SEQ ID NO: 4214 - DNA, 565 bp, Arabidopsis thaliana
  Intron number 1 from transcript AT1G71770.1 (locus AT1G717 70) derived from phytozome v7.0 (chr-ID Chr1; pos 26993573 to 26994137 reverse strand)
agaaggagaagtagacggaaaaaaaaaaaaaaaaagtagagtaataagatgttaagaaaaaacataaatatctatgtggcactagatctcatctataagacgttagtcgtagttttttgcgagtatatgaagagcagacttaacagattcattcggttgcggcttccgtttagaacgcatgatcccttctacttcttcgtcaaaattgtgttcagttttctttatttgttttaatgattgttgtatttggatggttatatatcatataaatttaaatttttataatataatataattgattatcattaaaaaaaaaacatgtggcattggattattggccaggacagaaaaagcccattggcccacaaaaagatcccagatgtgaattaaaaagctgagtcaaaactcaaaagccacgtcaaatcaaactctgatccgtagggaccggttggttagcgaatgtataaataccaactctcattctttcacaccctttcgagtctctctactcctcttcttattcaccggagtaacccaaaaaaaaaaaggaaaaaatataaaaata

SEQ ID NO: 4215 - DNA, 626 bp, Arabidopsis thaliana
  Intron number 1 from transcript AT3G12020.1 (locus AT3G120 20) derived from phytozome v7.0 (chr-ID Chr3; pos 3826390 to 3827015)
cttctttgattcacttgagaggtactctctttctctgtcttcttatggaattttatcaaatgccgttaggtttctgagaaatccggtgataattcgatgatttcttacatagtagcgattattggtttttttttgaattgtccatttcgtgcttctctgcgattatgattctctgatttcatttcacgtcatcgcttgctctttagctgttttcatcgcttttttgccccaaattttttaattgcaactttttctgtttgtgcggcttcggcatgaactgtgaggaaagcgagggtcctactgcgtaagtttaggcttttagcttagtgtttattggtcaaattcacttttttggcaattttaatttcatggaaagctagaaacaaccttaatataaactgcttacttttcatggtttttagtgttgttgttagagctgacgtaacaaaggtttctataattggtttgattagtaaattttggtcatttccttcatttttcagttagtcatttcttcagatgtttagaaatgggaaatgctttatgcttgaggtttatcactatttattgattgttgttttttcgtgtctgtattcagtgttttggagttttgactacgacttgtg

SEQ ID NO: 4216 - DNA, 338 bp, Arabidopsis thaliana
  Intron number 2 from transcript AT3G66652.2 (locus AT3G666 52) derived from phytozome v7.0 (chr-ID Chr3; pos 2083646 to 2083983)
taaagaaaacagctaatatttcttttaatttttatgtttgctaagtttaccatatattatctaacttcttataatttttgttcatatttctaaattttgattttaaataattttaaattttaaattttatttatattaaaaacatactcatattttgtgtggccacagccacaacacaagcataatttttattttaattatgatataagattttatgtagtagaaaagaataatatatgaattaatcgtgttagggtttaaggcgttttctgtcactcccaaatctcttttgggtttatgcaactgtcaagtgtcaagactctcactttatggaatag

SEQ ID NO: 4217 - DNA, 679 bp, Arabidopsis thaliana
  Intron number 2 from transcript AT5G24620.2 (locus AT5G246 20) derived from phytozome v7.0 (chr-ID Chr5; pos 8430404 to 8431082)
ttgactctgccgctacgataagataacggtacgggaatatttctccctaatagctaacgaaaataacaatcactattttactttttgttgattttttctaatttctactatacaaatttgattaccaggaaaatattttatttttattttttatcatttgtttttttttttaccaaagatatatttggttactttattcaactcaattgtcaaggaacctggatctagtgtaaattctcttacatgagacatcacttcattagttctataataatataataaaccgatgaaaagatggggaagtaaggcaaagaattgccttgtcggagaggccagtgtccttagagtaatgctaaaccctaacatattgtcttggggcttgaagctctctaaagcaacttcaccgcttaaacattgcatccttctctccctctacattttatttgttataaaccctggtccatggacttcccagcaaatccatatttcagaaatcttaaacgtttatacgataatgggaagatcaccaatggttcctatggctgttcttgtttatgtttctctactgttctctgtttcttattcctccacgttcgtcatcacaaataactgtccctttactatatggcctggaactcttgcaggctctggcacccagccactacccaccacagggttc

SEQ ID NO: 4218 - DNA, 423 bp, Arabidopsis thaliana
  Intron number 1 from transcript AT1G16270.2 (locus AT1G162 70) derived from phytozome v7.0 (chr-ID Chr1; pos 5563330 to 5563752)
attccacctgtcaagctctacattttttctttgtggtattgttctatcagttttggattctttgccattttctgattctttatttttttggtgtctgaagctaattttagcgatttggtatggtgaaatctttcaaatcgagcgaaggttttgtttttcttaaattacttctattgaggtttttggattaattgatttaaggttgttgtagagaaagtttccatttttggaacaaaaagcatgtttttggagttttctggtcggattattcatctacaattgcaaatgggaagaactttgatgagtagtctgtgtttaattgatagtttctggaggattcaacttctgccaaaacttaattatttctcccaattgtttttttttgcagcttaaatatttgggaggggaaatttgtagcctaca

SEQ ID NO: 4219 - DNA, 390 bp, Arabidopsis thaliana
  Intron number 1 from transcript AT1G47900.1 (locus AT1G479 00) derived from phytozome v7.0 (chr-ID Chr1; pos 17651036 to 17651425 reverse strand)
accaaagctacatttctctccgatgtaagctctaaccatctgttttttttctccccgaacataaaaaaaaacatcctcttgttctgttttcgtcatgtgtgttcttaactttgtgatgcttaaattcaaaactcgattacagtagtttttttaagcttcgtagagtttaatttagttttgctattttctcttcaatttttgtgtgtcggcaagtttactttaccttgttgtttttcctaatttagtaacctacttttttgacgatgcatctctcagattaccttatcttttttcctcattcagcaaaaaaaaaaaaatgattatcagactttattagggtttttcttcggatctgtttgaaaacaatgtgattaatttatatagattgca

SEQ ID NO: 4220 - DNA, 518 bp, Arabidopsis thaliana
  Intron number 2 from transcript AT2G19780.1 (locus AT2G197 80) derived from phytozome v7.0 (chr-ID Chr2; pos 8524040 to 8524557 reverse strand)
aaaaagtcgatacaagaatcctctgaacacagaaggtaattaatggttttattatgacaattgtcactggtcagtggtaacttctaaaaataatttaatcgatagtatttttttcttctaaaagcatggaaacatgaactctaaatgttaaatgttgcgaaagacatacatataaactctcctaaccatatgcaataaataatatcatggagtatatactattcccagctaaataatgcttataaaattcatgtgacagttgatgaattatagcacgaggccattggaaaaaataaaacctaagttgaaaacaaaacagtaacggagaagcaaaactccatcaatcaaacccattgcccccacatttgctgctaatcatcaatcaatgcttcaaccacacttttgttaacaaacctcattaatccaacaaaagtttcaacattccccaagaagaaaagacagcaactttaatcaaagcttctcgagtttgttgagtatcaaaaagcaaaacaagaatc

SEQ ID NO: 4221 - DNA, 537 bp, Arabidopsis thaliana
  Intron number 1 from transcript AT4G04830.2 (locus AT4G048 30) derived from phytozome v7.0 (chr-ID Chr4; pos 2445935 to 2446471)
gaggaggagtggcgtgcggttctttctccggagcagtttcgtattcttcgtcaaaaaggcactgagtacgtttttgttttgtttttctttcccttttggtataatttcttttaatgaaattttgggaatgattttgatagtgcccttacgtatgttggattagccattagacttgagtaatttagggtttcataattagcatcatacatgtgagtatgtgaccttttgatttgagtctttttacccaagaatacctacgtggcttggattcagaacattgttgctcgtttaatatattaattaggctgcaagcaaccgttgaaagattattatagatgtagaaccaattagggaaattggatgatgttttgtttttggaatttggttttgtttgtatcatatataaggagagtattgattcagtgtttcactgtttcatataagtagtttattgaagtatgtaatgatctcaatgttcttaaggtttgttgtgtttttgttgttcaaaatattttagaaagccaggaactggagaat

SEQ ID NO: 4222 - DNA, 578 bp, Arabidopsis thaliana
  Intron number 1 from transcript AT2G40004.1 (locus AT2G400 04) derived from phytozome v7.0 (chr-ID Chr2; pos 16704063 to 16704640)
tgtagattgacgacaaaaaaaaaaaaaaaaaaatgtagattgtctgcttattttctattttccttcctcattccttaactttgaattcaaataactaaaataagtcatcttttgaggaaaaagaaatttagtgcatatataaaagaatatatcacatccacatatatggttagtaatagatatatggatatcattgatatcttctttttatgtaaaccatcaatatatgaaagtatgaaacaagcaaccaccggtccatattagtcatgcaaattacattaacattattataattacataaataatcacaacgaataatggaatgcatatctaacaaatactgtatattattactagtagtaaatatcacaattcagtttctggagtattttagaaagttacgatatggcaaacaagcaataaaacaccataaatgtaaacatttccaatttttagttcatctttattaataacaaaatgtaaacttaccaactgttgttgatgtaattacaaaaatgtaaagttagttttcaccaaaataaataaatgtaaagttagttttcaccaaaaaaaaaaaa

SEQ ID NO: 4223 - DNA, 961 bp, Arabidopsis thaliana
  Intron number 6 from transcript AT5G02680.1 (locus AT5G026 80) derived from phytozome v7.0 (chr-ID Chr5; pos 606727 t o 607687)
caggttggttatacttactttcaaattcaatatttttaagtatttggtgttacctgtagatggctttttagtttggcatatccaaaagaaaatatgggatctgttgtattcttttattcaaaccagccagttggtgtgtgcaagtgagagatatttgaatcgcaggacatcagactattgtaaaatgtttgcttgcgatttttggttttcaatcttttttttgaacaaataggtaatttaaaaacttgaaaatgatagaaaggtgcatctggcttgcaagagtctttactattatgattatcctgctaaagctaatgtaacgctctctgataagattcctctctttgtaagcttatatggacatggaacgattaactgatagaacatataaagatcgttatacatgtatatgtatatctgttcattcatacactctagtggatggtcaaatgtttgcatttgggatagcataaatgatcaaattctcttagaaacagttgagtaatgttatatgaatcttggcgtggtatggctatctgagtttctgtgcctgcttttttaggttcatagtaatgttatatgttggggtcttaaagggtttatcgattctcttttcatcgttgtgtcacatgtatgattcatctgggtctctacttcaagcaaagcaaagacgacgattcttccggatcctttaaaaccaaagaactatggtaagagattttcctactgaaattgcttttagaagaactgctgctggtttagtacacctcttgtgaggtcggtttgattgtttatttcgaaaattttgtttctatttatttctagaatgccaagtgtgattaaagctgtctattgcattttgtaggtatttaagcagcaagtaaaccatggtagataactatggcaagacttgatattctattaggtaaaattgtgaaggctgagaaacatcctaaggcaa

SEQ ID NO: 4224 - DNA, 671 bp, Arabidopsis thaliana
  Intron number 1 from transcript AT1G22060.1 (locus AT1G220 60) derived from phytozome v7.0 (chr-ID Chr1; pos 7780587 to 7781257 reverse strand)
ttccgacataagcagccttcagatccgggaactaggtgatgatcctcctcctccacttcatccccattaatgcaaacccaatcaatcaaaagctttttagttttcgttttgttgctatttttgttttccttaagaattcacgacttgcttcacttggtaattttgttctccatttttgggtttcttcacttcttctagctactaaatctggaaaatgttgtgggaatttattctagcttaggtaagcatgttacttgattggatctcttactagaatttagatgcttcaagtggatttaagttttggtggtgattggatctgaggagagctaggtaacaagtgggcacttctagtttttgtttctctttcgccatttagcagaaatgtcttcgctttttttggaattggttagtcggagagttaggaatgatcggagatcaaacctcggttatttatttgatagtttgtggtttagtggattcagcatctgaaaattttgaacagctgagtgatttggatctaagtttgtatgtatggtttcattcttctatgattgaagtctctgtttgttgccggaacatatagatacaagaagatgagcacgaaaatgaaaactgtgctcgtttcatgtgtgtgtttgcaggtgaagctgttttgatttttttgagta

SEQ ID NO: 4225 - DNA, 989 bp, Arabidopsis thaliana
  Intron number 1 from transcript AT5G54850.1 (locus AT5G548 50) derived from phytozome v7.0 (chr-ID Chr5; pos 22281364 to 22282352 reverse strand)
atcacttgatccattataaatcggtaagctttctttgtgcgaatccatggtttggtgatctatcgagattattagctaggttgctttttaattaagggaatttgtgtttgttctttatgtgaatttggcctattttttctgggacttgtttcttcgctgttgaatgtgactggtcaaggattagaatcacaaaaatgtcgttctcatgtttgttttacttcaaatcactagtgcgtaggttttcttttcctccttttgttgtgattgcctcttgcttttgattgatagagattgattttgataataacgtggaatcgtttctgagagacattaccttgctttatgtttcaaccttctatttcaatcaatctgatagatacacgtaataccaaacatttgatattagttaagagaaccagtggtatgataatgatgtgctttaagcacttattcaaatgtgtcatgtctagtatctataactagctttgatgtttttctttctcagcttataagtatggttagagtttgatcttggtgctttgatttgattttttcttttcttttacatttatacgctggatatggcttgaaagtgaacgccaaagactttagttatgatgatgcagtacacaattggtttgttcctctagattgtgcttgtgaagagctttgcaacatctaattctcagctctcatttgaaatgactcatttcacaattggttttatcatggaactctcagttcctcttttctgcttcaaatttgctaagttagaaacttaagctactaaatcgtttcgcatataccccaatttggaagccagtggtgcatttgtttggttttctactttttggtataaaaaagttacttattcatttagatttgatgttttgtttgtttattcagatttgtatccagacccgtgaagcaggtaaaactcaagaagtgtcttcttagagagttgcagaggcgaaataaaatttacaata

SEQ ID NO: 4226 - DNA, 402 bp, Arabidopsis thaliana
  Intron number 3 from transcript AT1G15165.1 (locus AT1G151 65) derived from phytozome v7.0 (chr-ID Chr1; pos 5218902 to 5219303 reverse strand)
cccaaggtatcctcataaatgatatgtttcattcatcactctttcacaaagattcctgtcagtagttgttggaatcaaattaaaacattgggttttacttagtatgttatgacgttattcatgaatggattgctttttttttttgatgttaaggaacttttacctttgatccatttctctgttgattgtagaaagtcttctgttgagggagtaattggtaatcttcttggggacagttaatcctgagttgaaaatattagtgctttctagtctttttttcttccttttttggattcctgttcttattctttgtttgcgtgattcgtttaatttgatggtcttgttctctatgctttgctaaagttgtggttatgggcattgataaaatgcagttacatagag

SEQ ID NO: 4227 - DNA, 280 bp, Arabidopsis thaliana
  Intron number 1 from transcript AT3G17998.1 (locus AT3G179 98) derived from phytozome v7.0 (chr-ID Chr3; pos 6154477 to 6154756)
tctctagatccagactcgccgtcgaaggccactgaattactctctcccctctcttggcagatcttcttcttcgttttttcccgacaaacgacatttccgaaatggctgcatcgtacggtgagatcaccgatcatatgcttcgattatcgttgattgcttatattaatagaaattggagatttatggaaagagaagagactgtgaaattgatttgatttgttttttgttatttttggggtgagtagaagaagagcgtgatattcagaagaattactggata

SEQ ID NO: 4228 - DNA, 858 bp, Arabidopsis thaliana
  Intron number 1 from transcript AT1G74088.2 (locus AT1G740 88) derived from phytozome v7.0 (chr-ID Chr1; pos 27861181 to 27862038)
tccatctctcgattaatcccagcaagatcctacttgtaagttgtatttctctcgttccctctcactcctagttaaaatcgcatgcttcgattgatgcttagactagtgtttagctttgatcattcgttgtggaatttcgtgaaggggaaaacaacaaattgtgatacctaagacttatcactgcatgtttataggatttttattagcccttagccatcagaacaagatcagaaaactataaaagtttcagactttaataaaagtgacatttttttagtcaccaacgaacagtaacctgctgtgattgttgtccaaggacgaagaaattgaggacacttcatgtcttctttgttcctagctctacctctgaaaccgtcagactccataggttcttcatgaattgcttagaatgaaaagtccattgaaatgatacttttttgttcacattgttttttttgggtctgtgtggcatgttagatccctccagtggtctgtgtattgattatcattgtgccttaatttcgggtttggtttaggtagaaatttcctgatgttgtgtgtggattttccagaggagtgaatatactttaccaggtctgataagaaactctaaatgcaccttactctcatttggtattaagctatttagctctgttttgctagttaggacagtggagttccaattgcttgaactagttcccagttatattgtctccccatcctcatttgcacatttgtatcatttgataatcactatagaaaacattactattattttcatgtctgtttctttagaggacttactctcatcttcttatatttaataggaaggagacgcaatagttgagaaggcatcat

SEQ ID NO: 4229 - DNA, 403 bp, Arabidopsis thaliana
  Intron number 1 from transcript AT1G13360.2 (locus AT1G133 60) derived from phytozome v7.0 (chr-ID Chr1; pos 4576930 to 4577332 reverse strand)
gtggagattacgtggctgttgaggggttgtttgaattttccgacgattgttttgactccggcgatctgttttcgtggcggtcggagtcgttaccggcggaataaataaataacaaactttttttttaattaggtgggaaatgaaaacgatatcgttttgttaaagcgtttggctctccctcgcttttttttttaacccgatggttaatatctattaactaaaattattaggatttaggaaaagttaaatattttgtaagggtaatttgctagattagtattagcgaattcgtttgtttgttcttccagatctttttttcatagcttttgttaatgtgaaatttcagaatgaaaaactctctttgtcagtttttattatacgttcagtttcacatatcgaacgg

SEQ ID NO: 4230 - DNA, 706 bp, Arabidopsis thaliana
  Intron number 3 from transcript AT4G00760.1 (locus AT4G007 60) derived from phytozome v7.0 (chr-ID Chr4; pos 330502 t o 331207 reverse strand)
accttagctccatcctgaaacactctttggctcaggtacgaagctgaacttgaaaaacactgaactgacgataagaaagtgtcttaacaaaaagaaaatatcttgaaagacgggagtgggctagtgaaatgcttaggagtgttaagatgtatttatgtgtggctgatgtgagtttatggaaagagagaggcagcttcttgatgaagatctcaagatgatgacaggcttagagaaagaaaggaactgagttttttgcttaatatataattaagttagttggtagagaataagacaaaatatgtgggacctaggatgtttcgctctacgtgtagcaagatttggagcttctgcttatgtgcttgttagtttataattttataattgaaactcaaaaaggtttgttggagctatgctatactcagttcttgtgtctagtcacaagatccagagacctggcgatgctattaaagtcggtactgctaataaatggtttttacttttttcaaaaattatctcaattggtaaaaaatgaggtctcgttttctttgtttttgttgataaacctaaaaagcttttgtgttacgtattgagcagatgaccgaaagttgtctgtgtagccttttgtcttaccttcttatttacactgcatgttgactgttgagtaattctgatttttggttgtgttctcagctaaacggtgaaagcc

SEQ ID NO: 4231 - DNA, 445 bp, Arabidopsis thaliana
  Intron number 1 from transcript AT1G70060.1 (locus AT1G700 60) derived from phytozome v7.0 (chr-ID Chr1; pos 26383344 to 26383788)
cttgtgcttgtagacttgtgtctctgcaaaattcggtaactctctctacgatcatcttttacttttttcgaagcgttttttttttttgtgtttcttaattcttatcttgaagcgccgtaatgtgaattaatctgaagattaagttcttaagatcgattttttctgcttcattgtttcttaaactcttttctcgattttgctttgattgttctctacttgctagatctactgctttagtttgagattgcttgcagagttcaatattttatttggattgtttcttgatttaagattcaaaaggatttatttttattttcaatcgaattgcccaaattcaaagactttagtttggtgaattgagtttgcttggagatgcacagtgatctaatttgcggctaaattttttggtttctgtggttaatgaagctctggcaaaatataaacc

SEQ ID NO: 4232 - DNA, 645 bp, Arabidopsis thaliana
  Intron number 1 from transcript AT1G47410.2 (locus AT1G474 10) derived from phytozome v7.0 (chr-ID Chr1; pos 17394173 to 17394817)
tgaaggaatatagattacaaacaaagatcctgaaggtatgtttcttttaattattgaatataaccacaatatcaaaatgttgaagaaggttaagataaggtcgatttctttgttttacacgtattttattggtgagtaagaaaaattacaaaatgtaaaacagaaaagaagatctatactatctttgcgtgtcatgataacgttagtttggtgccatgtcttatagtttctctatcactttcatgtattttgcttcaagtaagatatgatattttttcaacataatcaacttagaacttttttgagatgaattcgtaaagttgttttctatttacttaaccctgatttgtcttaatatccggaagcctaattaggatgattttgtactttcagaatctaatcttggtcaatggtcgtaatatttctttaattgttcatcagataataaacagtagaaaggtatgaaaacgaaagtggtgttgcgtgcattgaaaagaacacaagtgatgttagataaactgtcattgtgcagctcagttttgtctataaatcctaaactcagaaattatctagagatttcaacctttcactcatttgtattctattacaaatcattgagtttagaaataaaatttgcagctgaga

SEQ ID NO: 4233 - DNA, 590 bp, Arabidopsis thaliana
  Intron number 1 from transcript AT2G31280.4 (locus AT2G312 80) derived from phytozome v7.0 (chr-ID Chr2; pos 13339500 to 13340089)
aacaagctggaagaggttcttacagaggtagttagttactttgtatctcatcgaaaacgaatcaaaagaagcttctttttttttttattagaggttggggaggagatagtataaaacaactgtttagagttctgatttgtggtttttgagtccggggttttgaggtttaccctttagaatgggttctacttctcaagagatactgaagagcttttgctttaacacggactgggactatgctgtgttctggcaacttaatcatcgaggatctcgaatgtgagtcatctaaacaattctctttactgtctttgcgtggtggatcattataattgtctacgagttagaactgtggtaattgatttaggtgtattgacttcaacttgctagagtggaaatatggaaccttatatcgaaatgcagcagctttaagttaacaattgtagtttaagtgtctgaagattgtttctgtacttttaagttttgtgtgcagttcaggattctatttctttatatgttttagtgttttagttgaccagatagtttctcaattttttgaataatgaacacctgtagggtacttaccttggagg

SEQ ID NO: 4234 - DNA, 922 bp, Arabidopsis thaliana
  Intron number 3 from transcript AT1G78476.1 (locus AT1G784 76) derived from phytozome v7.0 (chr-ID Chr1; pos 29524613 to 29525534)
cttgccacttagattaaatacctgcatacataaaggtacaccaacttatgatctatcttaaatagaatttgttggattacaatttggtatgcttctcaaaaaaggacaatcctaacttgacttgtatagtatacaaatccatataactttactgtaaaatcccaatcataatttagcagacactaatatattaatttgaatctgctactgacttggcgaaaagatagaactagagaagcaaatgtcgaaggattttcaacacctttacttccttgggatgaaacttcatttgtggaagagatttacttttcccaggttaaagacgcgatcatgtttctcagactgattagtaaaatgcaccggattgtgacattgatggttgagatttccgcatgccatttattttgattccttttttttattcgcttgaatcatctgaatatttgaaaatattgctacacttatggacacacgtttctctttcacatatctttgcaagaaaagatgccaaaataggctttctagaggcaacatctttggacgtagatggtactcttacagatggtgatcgtgaaaacaaacggaggagtttgtttgttgtactcggtctagttcaaaccaaaacatctttgcaaatatgtatggtttgagctagaccgatgtcaacaaacaagctgcttcgtttgtattcaccatcaacatctttaagaaacgctgcaccactcctctggaaatactatttcgacatcttctcttaatctctttcatagataggtgaaggggcaacatgtgttgataagtgtgggggcaatgtttagatgatttaagcgaaaacaaagaaaatgaagcaaaaaaaagtggcacgaggttcaagattagttggaagaactagattgatgggaaacaactttcattgttgtag

SEQ ID NO: 4235 - DNA, 562 bp, Arabidopsis thaliana
  Intron number 1 from transcript AT4G15165.1 (locus AT4G151 65) derived from phytozome v7.0 (chr-ID Chr4; pos 8648898 to 8649459)
acccagaagaggactcagtgaacaaatttcttcaggttaaatttcctcactattctactgtgtttttgttctcagaatcctcgaaaatcgtaatatggtttttcgtatgctcctaaaatctgggcaattcattagatttcgttgcgtagataaacttaagcttgatgtattctttggtacaatgtaattctgtttagttctataacttggaatcactctaagtgtaatgtatattgatgcgaagtcaaatgttgctgaatttttgctctcctgcattttccccaattttttctgagccagtattgtgaaaaattggagtctgagaaaactgaaaagtttaatggattctcatttaatcagtgttcatagattcactagttgtttgaccagggcttaggcttaatcattcttgtgacacttggttttcttttaaatctgttttgatgttcagttttctttggaagctatatacccataaacttaaaatgaataaagatggaagctttagctgatataatttgggtgtttctttctttcttccttggtgtgaagctgtttcaaa

SEQ ID NO: 4236 - DNA, 988 bp, Arabidopsis thaliana
  Intron number 1 from transcript AT1G09794.1 (locus AT1G097 94) derived from phytozome v7.0 (chr-ID Chr1; pos 3172247 to 3173234)
gcctgtctttccaaaaacaattttcttcctcaaaggtgattgattccttctctttcttttttcctttcattatatcccgcagattgattattcatcgcgattgtccgtgaaatcgattttgatggtgaagtgctttttgcatttgaagattccttcatgtttcttatgacttatgaggctagtgaattggatatccatttaattgaagatttgggttgtgatcttagttttgggggtttagggttcatgtctcgatcattatgttttcagctaagttatttctcttgctagcataagatttgatgaatccttgaaggctttaagaatcctttttcttagtaactgtgaggtttggtgtggagattattgaccaaatttccaagtttaggtactagtgttataacttacctagtttgagaaacagagatggatgagtagaacctgaatcatgtcgtttcgtattgtcggatgagcaaaatcaggctggttatagatatcctcactatatattgtatattcgtctttggattgtgttaaaagttggcttctcttgagggaaaaaaattgaatgcattgtcactttgtttgcatgtacttaccttggtttcacttatgagctactataagaaaacgaatctggttttcttcttttgattaacgatttttcataaggctcttgactctttgatctacatgactacaggatctccaggttttatcatgttttgtgcatagaattatctttagtaatcattcatgtctctatgccttactttagacagttccatgaaaagtttgagaaatagcatcatgattaactcagttaagagatgttgaagaacaacaacgacaacatcactttcgatatgatagttttctacataatgttatcattcaaataatacactgtagaatagttttactggagatgctaataagacttttgtgtggatttgttgggggtggcaggtgccagagagtgatagag

SEQ ID NO: 4237 - DNA, 494 bp, Arabidopsis thaliana
  Intron number 1 from transcript AT3G05870.1 (locus AT3G058 70) derived from phytozome v7.0 (chr-ID Chr3; pos 1753467 to 1753960)
caccatcgatcttcacacttattttttaggtatgttcttgttgatcttgtttttcggactttgtaatgtggtaccagttttagataattagttcttgataattacgctcaaattccgttgcttggcactgatttattctgcgttcggtactgatgatcgttcttcattctcattccgatgattctgtggagttcactgatctaagtttgattttggcataccagttgttcgattaaatgcctgaaagagaaaacattcaattcgtaaatttcatattttgtctttgttttggtttatgatatttttatctaatcttaaggcttaactttcaaatacgtcttgtatacgtgttgcacagaagagttataccttgagtttttgtttgtgtagtcttttgttagtagtctctaattttacgagtctgtaaccatctttaggcttataacagggtttttgaaactgattgaaggtttttatttatccaggaggaagct

SEQ ID NO: 4238 - DNA, 380 bp, Arabidopsis thaliana
  Intron number 1 from transcript AT4G37680.2 (locus AT4G376 80) derived from phytozome v7.0 (chr-ID Chr4; pos 17700851 to 17701230)
tagaagattttgtctcgtcggcattgaagatccaggtaacaaaatctcaccttttctctcctaatttcacgaaatcgaagaaaaattctcataattctcttaattacttatctctcaatttcttaaatcttacagggtttgtctttcgaaattcaggtaattttctcaaatccatttatggattgaagctttaggtaatgaatgagctgaatctgcatataaaaatcgatactttcattatccagaacaaaacaagatttagcataaacgttcaaaattgaaactttgattcctaacttcttggaatgattcagattgagctagatttagatctgtatgattgatattatgggtttggtttgtttatgagtagagagaaa

SEQ ID NO: 4239 - DNA, 574 bp, Arabidopsis thaliana
  Intron number 1 from transcript AT1G68910.2 (locus AT1G689 10) derived from phytozome v7.0 (chr-ID Chr1; pos 25910504 to 25911077 reverse strand)
gttttttcatctactcgaactacagattttcatcggtaaagttttgatcttttcagatcctctttgaatcttcaacactctgttttgtctgtttccaagttttagttttgttcttgttgaattttgatatttttgttctggttttatggtaaagtttgaatctcgttgtagtaaattgttaaattagtaagaatttctggtggatctctttgaaaatgctgagtctttacaagtatgtaacattaactgacttggcttattggtctctttcttgacaagtggattcttctcaaatttcacttctctttgcttaggttttgttcaaagtaaggatttgatttagttgcacttactataatgtgtttttgggtacttggattacattttcaattatttgcttggatgttctggtttcagttgatgaatgattggtttcatatagaagaattgagctatgactagtgctaggattggaactgcgatacctcgcattagaaagatagtgtcatttcacctaagtatccatttttttggattagtttttttttcttgttcctagctaagctttgaactt

SEQ ID NO: 4240 - DNA, 662 bp, Arabidopsis thaliana
  Intron number 1 from transcript AT5G63050.2 (locus AT5G630 50) derived from phytozome v7.0 (chr-ID Chr5; pos 25292648 to 25293309)
attgaggtccgttcttctgctctttccctctcagtttcttcgcagctgttttctaatttgcaatctattttatggatttggggtacttttgttaagggaacaaaacctatcattttccaggtttcttatggttgcgctttagattttatagtttagtgtaatttaatctgatttggggaattgggtgttggataagagtgttttgcagctgagaggattgaaaaattgaatatttatgatatttaagctcgctaatgaggttctcttacttcggattttgctcagcttcgctcctgtcaagtaatttttgttgtgatctatatatgaaatttccttttaatgttttatggtcgctacttgtgatttcatcatctttggaggttacaatcatcttattcaatcctttcttcggcctcagattgtggcttttgagtaaatgattcactgctcagctagagacaatggtgttggtaacccataaattgcaggtatcttagacatagatctgtaaagtcctaaattctactttgttttgtgtctctgtaatggtcatgtctgcaaatggttgtaccttccgtttcactcttgtaaagccttcttttacttgccacactagaaatatagatgtttacctcccccttgttctctcatgtagggttcac

SEQ ID NO: 4241 - DNA, 587 bp, Arabidopsis thaliana
  Intron number 1 from transcript AT3G58290.2 (locus AT3G582 90) derived from phytozome v7.0 (chr-ID Chr3; pos 21581166 to 21581752 reverse strand)
acgtcaattggtaaaaacacaatatctttttctttccattccaaatgttctctttcattttaaataatgttatattagacatatgtgtatataactataaagttttggtgattcttttcatttgggttgttcatctttttttttgtttctggcaggcgtctttttgcctatccggagggaagtaatggtgatcacttgttattcaaaaaaaataatggtgatcacttgtctctgtatctggaagttgatttcgaatcattgccttgtggatggagacaatatacacaatttcgttttacggtagtaaatcaaatttcagagcattcatccgtaaagagaggtaaatatttctagcttttgattagtttcatgcatggtagaaacaaaggaaacacgttttaaaattgaataagtgaatacttttcatcactatgtcattttgatagtagcaatttgatgttccattaatccacaggcaggattttagttgatgtagtagtgatttgactattctatgttgattaaccaattaatggagtcgaaatgttgcagaaggacgaaagtggtttgataagaaagctccggaa

SEQ ID NO: 4242 - DNA, 947 bp, Arabidopsis thaliana
  Intron number 1 from transcript AT1G47497.2 (locus AT1G474 97) derived from phytozome v7.0 (chr-ID Chr1; pos 17431455 to 17432401 reverse strand)
tttttttttttttttgtttgtttgttatatactgctattatgagtgtttgtttttagattctctccgatgttgtactttcctttttttctgacttcttttttcatgcaaccggcttattaatttggacttctaacttatttttcagcttcctttttttatttgctaaagatttttttttgaaacataacaatttcttcgtctattgataacaaattaggatataatctgaaatacactgcatgttaaatattttatttattttttaatttttataaaattagaatttgttatatattagattatggttatttgtgttggttaataatttttgataagtttgtgtatggtttttaatgagtcgtaagtttacgatattaataagtttcatatttttttattttttaggacttgaccaaaagtataccacatgacaatattttattttctatttattaattttgtattaaaattatataatttaaattttcgatgcttttagatttaactcgtagaacatacgtaatttagtaactttgtattacaaatacacatttagatgtgtcaaaaaagattagcatttattttgatatactataatattgaattttattgagatgtctcatattaatatcgatcaaaactcatcccgccatataaacctgtctccttctttcagccgtggggtggtcttgtccaacagcttgttctctgatcatcatgttgtcgccggtgggatggtgctgatagttgggggtgatccgcaatgtcctgccattcagaagcgtctctctttgctaatcgaagattatcgtcccatggaatgcaccttttctgaaaagttagaatatttcgactcttccataagcgccaaaagatccatagcgggagttgttgcagatagtttgttaagttgttgttgtactatgatggatcgtacaatcgggag

SEQ ID NO: 4243 - DNA, 399 bp, Arabidopsis thaliana
  Intron number 1 from transcript AT2G34357.1 (locus AT2G343 57) derived from phytozome v7.0 (chr-ID Chr2; pos 14498689 to 14499087)
tccaacgagggattcttcaacttctctgttttcaggtaagaaacccgacaaacattattctcttctatttctgtttggattcaatctaaattctgaagctttattcttctctctacctgttttgtttgtttgcttgtttcatgtttctgagtctcttctgcaaccctaaagcttcaatttttgagtgtgtatttcactctctcgaagcctcaatcacgctttgttcatataaaattttagctagagtctagttttattgctatattgatgattattttcgattgttaaaataattatgaagattgtatagtattgcattaaaggtactgtctttgtgttcttatatttttaaccatcttatcagaatctccatcttacttttactattccttccaagca

SEQ ID NO: 4244 - DNA, 878 bp, Zea mays
  Intron number 1 from transcript GRMZM5G813370_T01 (locus G RMZM5G813370) derived from phytozome v7.0 (chr-ID 9; pos 3 352533 to 3353410 reverse strand)
atgtattgatcctattctcatcccttttatcctgtttttaatttagtttcatggttgtgtttcatggataggtaggagtacttctgaagatcagtaaaaatacaatctttgtctgtttgttcaaaaagtttagagatcttctgttttagtacaatttagctattttagagcaacaaccttaccgtgttatgtcacattcataatattaaaaattttagtcaagcaatcattcacaaatatttgaatgattaattcatttcctattgtatgaataagtgcacctgtagtagttttaaattcctataatttgcaagcttccttatttgctcgattctctagtttctctatgtttctagcagtcagtttgccacaacactttgtcaaactgtgtatgtttactacacatgcactttgtagtttattatctgtatagtctatctatattgaactttgcagttcattctatgtagcacagtacacatctgtatttacttgtcttacaccggatgatgatggggttatgttattccttctacctctaggcactgtagctagttgtttcctaaaatccttttttgtttttttgctacctgcagccatcttatctctatataaaagattaattaaaaatgtttctctaagactttacataatcctagcctcttcgttagatgattctttcgcttgtgtctgttatattggattagatgtcagttgaaaacaagcggcttgttaagccttatttacttttactatagtaatccaacatttttagatagcatatgacaatttattgcaatgaatttttatttctttttttgtctgttataaagacattaagagtttagtttaatttatgtttgctttgcaatagatat

SEQ ID NO: 4245 - DNA, 520 bp, Zea mays
  Intron number 1 from transcript GRMZM5G817350_T01 (locus G RMZM5G817350) derived from phytozome v7.0 (chr-ID 7; pos 1 38692372 to 138692891 reverse strand)
gaaccgtgcgccactgggaactgtggacgcctacggtagatacataatagtagtagagattgaaaacccgacattaacccgtaggttcagcccattgataaaaaaaagaactcaatcccacaccattcaaatcaacccagtcctactcatccaaagtatacccacccgagaacccaaccatgaaacccatttcaagccaacccattatcaggctgcaggcctaaacattgagttaactgacaaaacagagagaacagaataatgctgattattcagccatgatcccgtttatacttttgctattttggcctcaaatcaaattgagctgttggtgctcttccgtaaacaatgaccacaaaggtcgaagagaaattcccgcaccaactcattcttcatcggttggtgctttgcaacaaattgacaaacagatgagagatgcctgtcattgtgcgcacgcatctagcggccacagaaatctctactactctatatgtctgtagtgtagacgtccacaccctcg

SEQ ID NO: 4246 - DNA, 675 bp, Zea mays
  Intron number 2 from transcript GRMZM2G377761_T01 (locus G RMZM2G377761) derived from phytozome v7.0 (chr-ID 7; pos 8 193451 to 8194125 reverse strand)
gcgaaacggtaagtcgtcagaatctgcaatacctgttgactgttgttaggaaactgtacatgcacgagtgatggtccattcaatctgtcagtaggggttacaaaactctcagacattaaccttggagcacatcatttgcatatttgagttgttatttgttttgttttgggggaacacttacagttgctacttagaaattaaattagggcttgcagaattgcagttatactgtatgtgcatttcatcctgtcaaaacatcaaaacctctatgcttgtcattttcgcacaatttaggctgcattgatttgctactgttctgatttatatgctctacatgtgcatggcaaccaaatttgatctaacttgaccatgattgttcttcccatatctcgagtggccttctagaggacatcgtattgcctgttgcaagcacaatatagtgtttttttatcaaggctgcacaaaattttggccttttaccaaattcaactcaacactgctgtttgggttttgtttctctcatcactatagtccagtttaattgatgaggatagaagcatcctgaatgcaattaatttcgtttttatttcaatttcacgaccttattatgtctaactgtaacttcaaactgtgctggcagattctctactgttctgtctgtctgtcggatactcc

SEQ ID NO: 4247 - DNA, 941 bp, Zea mays
  Intron number 2 from transcript GRMZM2G398731_T01 (locus G RMZM2G398731) derived from phytozome v7.0 (chr-ID 3; pos 1 24904186 to 124905126 reverse strand)
ccgctccctgatgtaagtatattttgactagtaatgtgtctatgcctctttgcattctcgaatgacaaaaaatatgtcaaagttcgaagtgaaacgcattgattttctgcaattttgaagcatatgttacatgatgtcagtggaggggcaatttcaattgcatgagttccatgtcaatcgtgttgaagcttcttgttatcatttatcatggccaattatttccctttcatagaaatgcatgaatcttaatactcaaagaaaatccaatttagttatctttaaacagtcttgttgaaagtgaaagcattaataaatttttgggggaatttttttggttctctcactaattttttatcgataaataacaagtgccaggtagaaaaaacaaaatgacaggcaagaaagggtgttcctgcctatactttaagaattgatgtattggttagatgtggataaaataactgattttttttccacgatggcaaaacccaaatttcattacttcacaacaacaaagttacaagcattgtcagataaaataactgcattgtggctgcattttttaatcccagtcaatctccatgtctgccttgaattgaaaatgcattttgtatatggtagagtttgcatatggttcttcattgcaatttctactttgaccagattctatcacatttatacacaattttacaatctaacaggattgtcgtaaagtcatcagcttgtttaagtcagaatcacctgtttttcgtgagttttactctgtaattaatgttgcttcatttatgacaatcttctccctaattttttgtgggaaatctagaaaagattaaccccaaattagtgactactagtcaagtaagttttgaagtacatgattatatttactttctgtacttataacagagtgctgctctagctttggacgattcagttttgga

SEQ ID NO: 4248 - DNA, 765 bp, Zea mays
  Intron number 3 from transcript GRMZM2G164165_T03 (locus G RMZM2G164165) derived from phytozome v7.0 (chr-ID 3; pos 1 64480125 to 164480889 reverse strand)
atttgacttctctggtgcctttatacaggtccgctatggaatcacaatcctgctgggtcctggcttgcacatctgtggcttctcttccagtcttcccgcagggcaatctatatgtctgaaagcttgagataaagtacatgtttttaactttcaatactgacatatataactaaaaaaactaattaaagtttcttaaattttaggagtctaataggagctaataatatccaaccatcaaatcagcagaatctaatagatatgagttggtaaggaatgttgtctttcaagcaaaattttcattctgttagatgtgaatccaaccttgatctgaatcaataaccatttactattatcacaagttgatttaacgaactatattcgtaaacgtagaattgttttaaaaccataataaatgcctttaaaaagtgaacttgtttttgtttcagtattcaccattttatctgtggcctgtcaaatactcaaatattttatccttagttcttgttttattcttagttctgtttacttcctcataaaatttatattgaattagaaaaaaatgactggatggatattcactgtaattatgccatcactaattcatatcactgttttttgttttttatggaggaaaaccctgcttttatagagagcaaaatatgtacaatgttaccatgctggggtagcataccactgctttgttatcatggtttttcttgatttaattgaattgcatttacttggcagtccaggaaacgttgaaga

SEQ ID NO: 4249 - DNA, 993 bp, Zea mays
  Intron number 2 from transcript GRMZM2G343543_T05 (locus G RMZM2G343543) derived from phytozome v7.0 (chr-ID 6; pos 1 02760742 to 102761734 reverse strand)
atttgctgttgcaacaaggtatggttccaggaattcctatctagtctggttcattatctgagatgcctgtaaatatgtgttatctgatttcacggtgtaggcgtgcctccccctctaccacactatgcattgcagtaatgatagatattccaatttctctagtccatgtgttctcgcttttgtaaaccatcgatttctcaagtcgtccatgtgctctcttttgtaaacctcctcttatggtcttggtgggaggctgggaaaacatattcaatattgtggcggggaatgcatgtgactttctttttaactccacacagtttgaattagaactggttgggttgtaatttgggaacaagagaaaccattgcttctaagtttagggctcaattttctttggtggtattcttttcttttctcttatactgccttcaagttgaatgctgtatttgtgttctgattgaataactaatgttatttgtactaaattttacaatgaaacacggattgcttgcactgaatacaagccatctgtttcctacatgtttatgtatggtagcaattcatcttcgttagtttacataatctaatattatttttctagggaaattttcccaataagtgattaaagcataagggaatacttgcactgcatatgtaattaaagcataagggtttgcatagtttataactgtatttgattgcaattgttacttagtttactgtgtcaattagtagaaattgttggaatgcacctgatcagttctgtactttttgtgtacttgctttgtacagcctgcactagttagcatgaataaatttgtctgcctggttgttattgctgttgatacctcaagaaattttgtgccttaacaagtttggtgggccagttgtttttggttattatggtattgcatttttactgtttgcatgctgttgtttaggtcactaatctcattcaactaatggtactgtttgggttttgctgtttaacag

SEQ ID NO: 4250 - DNA, 594 bp, Zea mays
  Intron number 1 from transcript GRMZM2G343543_T05 (locus G RMZM2G343543) derived from phytozome v7.0 (chr-ID 6; pos 1 02762179 to 102762772 reverse strand)
gccgtaatcacgccactctgctgactcccggcgaggtactctgacgcatgcgcgagcgcttctcttcttctcttttcgctgtgcttttagtctgttcgtttgatgcccagatctactaggtttgtgtgatgagccgagccgatttatgcactggatttttagtcaagtgttgtttccgcctccgctatctttagtgtctatgtctgaatttgggttcagtgattatcgagctataaattatagttgttgcgctgttctatactagatccagttaccgatctatgatattacggggttgagcgattcatgtgctggagtactagtccaagatttgcttccgtctcctcatctacctttagtatgtactctgtatataaacttaattgcagtttgcaactgattctcggccatatattacttccgttgcgttgttcattagatccatttccgatccctgatattacgtgggtggggggtacttcgactttgttttttccggattgtttgattactggtctattcccatacatatttgtttctcattgattttatataattttgatgtaagcagcagtgtaacattttccttcagcc

SEQ ID NO: 4251 - DNA, 878 bp, Zea mays
  Intron number 2 from transcript GRMZM2G022229_T01 (locus G RMZM2G022229) derived from phytozome v7.0 (chr-ID 2; pos 3 6906768 to 36907645)
gctcctccgccggcggctacgctagccagcaaggggtatgcttccacttcctttccttgtcttctgcttcggaaaggatcgtcgccacttatttgatagggtgtagtaataataagtacaaggctacaagcttgcgttgaccaacagcgctgccgctgttcatctgtttggatcttctcttcacgactacgaaataggagtgcaaccaacatccgttctagtgggacgtgctacgaacaaatagtcttcgttttggcatatgacagtgcttttagctgcatttcatatgactgttgcatgctacttcagctcaggattgccaaccatactgctcacgattttccatctcaaaatctgatatgccaaaagtgtgatatctcatctcaaaaatataaaaaaaaggcgtaagagctagtgatggagtctgttggacacttggcctcgcttacaagcttgattgactgttcctttataaatgcagtacatcttcgatatctatgttcattgtattaccaattggcaacttattgcatatagttagagactaaagaacctatgctattgttagttcttgggacgctgcttaatttgctgaaaacttgcatatagtttctgtaagatgtatgggtcttctacttgcaacacattagtaaatctcatggttcacttggatatggcactctttttttttctcagtaatattgtaactatgtgcttatgtgttcgtcagaagaagaaaaaaacactgggttctttaatgctttgattcatttgtgatacgtattactctatttttcctagtcgattactaatggcacattgcagaataggcttaattttgcgatggttgtgtccagatacaagtttgctgcaatcac

SEQ ID NO: 4252 - DNA, 499 bp, Zea mays
  Intron number 3 from transcript GRMZM2G180612_T01 (locus G RMZM2G180612) derived from phytozome v7.0 (chr-ID 2; pos 5 9628304 to 59628802)
acataccgcttcttcctcgagtgtctcgcgaacaggtatgtttaaaagcagtgtcaaaccacccaagtttgtttcctatgagctattttattattttggatgattaagctttgtgatcttcttgtcatcgaggaagagtaatatctgaactttatgaaaagtacagagagttagctcaactttcgcacctgggttgtacagttgtacttccatgtgttttgagcttgttttctcaaacaaagcattgccaaacgaatgtcctgaaacgatggagcatactgctaaactaatattctcacttgttcatgtgagctttaaggagtactcctatgtttgttcatctatgaataaaaaatacagataactctgtcattacctgactactgatctaatccaattccttccattatgacttatacagttgcttccctatttccactgcaaaaatgctcatttatcttttcgttttctaggggagctttggtgattgctacacctt

SEQ ID NO: 4253 - DNA, 933 bp, Zea mays
  Intron number 2 from transcript GRMZM2G091973_T01 (locus G RMZM2G091973) derived from phytozome v7.0 (chr-ID 8; pos 1 52132095 to 152133027)
ctgcgcccctcttgaacatgtacgagacttcccttttacacgagagaaaaaaaattacaggatgctgcctaaaacaggctcgttcttttattattttattatctaaaccaggcttgtactttgatactactcaccagcagcactacctaaaaactggcctctcaaatccattctagcagaatgatatgtgagagccacagccacgtatcatcctctctacttttccgggaagagccgatggaggataggagggaggagaccaccgcagactggggggaagagcccacgggggacgggagaaagccgtcagcaccatctgacccctcagacccagagatggtcgtggaggaacgggatagggagagaagcccggggtacggcactgtcggagagggccacacaccagggagggccacgcacaagggagggggctacgcgccggggagaggagtcacagtcaccccatggaacttgtgcgagagagcgtcggaaagaaaccagaagaaatggcatggagaatttgttttggtagtcacgtgttggtggagggagaaaagcagggaaagggagagaaatagtgttaaaattagctgaagacatctaaatagtcaagataacatttcagttattagctacttttagcaaattaactaatagttagctagttaatcccactagcaattttttaactaactaactattagctctaatgcatttaaacaccctctaataaatttggaagacctattaggtagtctgctagggtatgtttctttctctccactatccaaatactaaatattctgtttaggtagtatgctagatatgctcttaaagaaatttcaaatgacacaaagccacaaggaacataattcaactaaccagttttgcgttgcagagctcctccaaggatcccagaagtgatcatctctg

SEQ ID NO: 4254 - DNA, 654 bp, Zea mays
  Intron number 1 from transcript GRMZM2G149988_T01 (locus G RMZM2G149988) derived from phytozome v7.0 (chr-ID 2; pos 1 668143 to 1668796)
tggatcctaagcaggaaaataacaagttagtaaaagtatggcagtagtatataatagcctttttctcagttattttgtaattgccacgtcgtcacatatattcaaattttgaatgccaattgccaacgtattgaaggattttgtcacttcggttcgatatttcaatttataagaaagttgaggatcgagttactcgtgtagttttagcactgccagtttaaccggtacacactattttttaccgtttgatttatttctgtaatctccatgtatctatatagggtcacaactcactataagcgaaagaattcagccagcaacagtcacagattcatgattatgcaattcaatttcttgaatataacaatagaacagttgattctcttgtgtttcctgaagctccaccaactccggacaggctgaatgactttagagtcttgaaagttcttatcgcctctcagaagtaaaattttgaaacattttgtgtttcatgattgatttccttaactttcatgatttaccccaacgagcacttatggaaacagtttatctggtttgccagacagggacttgcacaaatagctatgcaatcgtaatatgatattttcttaatttttaggaaagtatcttctatactgtagaaacacttggtgt

SEQ ID NO: 4255 - DNA, 405 bp, Zea mays
  Intron number 2 from transcript GRMZM2G174570_T01 (locus G RMZM2G174570) derived from phytozome v7.0 (chr-ID 8; pos 2 1447585 to 21447989 reverse strand)
ggagaaggtaacagttttcaactttataatattgtttcttgtgaatcaatagagtgtagagcctttgcaacattagtctgtcattgtaaaattgcgatgttattgtaccttcagaattggatgttggtatacctgtcatgtgtaaacatcagcatggtataagctaactgcaatcaaatatatatacttatattattgacttcatgcttataaaaatgtgcttctcaactggacaatgttcctatcttaatctggctactgacatatctttttaaaatgctcttcattaacacttcgagacaggatgtgggatactgcctctgtacattgtcttaaattgccagatttaaaaagaaacttctgttgctgatcatattctttctttgatttgcatagcacactcgg

SEQ ID NO: 4256 - DNA, 488 bp, Zea mays
  Intron number 2 from transcript GRMZM2G070659_T02 (locus G RMZM2G070659) derived from phytozome v7.0 (chr-ID 6; pos 1 67574868 to 167575355)
gtactagataccatcagggtcttcaaccagggcaggttctcttctcttcctgcaatcttcattctgctctgaccgagcatacgctatttgattgtctttgctctctctctctctctgtctgtggtgtgtatgcaacagtaactgttcttccaagtcctgtcatgtttgcaaatgcttcaaaattatcttgcttagttactttacaataagattttggttcctgaattgaaaatactgccgcatggagatggaattattaggtgctaagtattcagcatctgtgaaagaatttacttgatggaggtgcttagatgtttctttagctgttatcgttttatttttcttagtaattctggtcatcatacaacctttgttttttacttgttgtttagttgctagtactgccagctattaatctcagttgcagtgcttattcacactattaattatcggtagtagtaactggcaactattgggcctataggttt

SEQ ID NO: 4257 - DNA, 596 bp, Zea mays
  Intron number 2 from transcript GRMZM2G074427_T01 (locus G RMZM2G074427) derived from phytozome v7.0 (chr-ID 6; pos 1 60167398 to 160167993)
ccgggcctgctgtgcacaggtgaggacaggcttgttttacttgctttcccgtccttttgtgctcactgctcccggctgtgcagtggaagctatatgctcgtttgttttttcttgtcatcgcatacgcgcgcgtgatctggggaaaggattacatagtctgatgttccagtccacttcatcttgtttgactttttttatcctcagtctgtgaatcaaatcggataagcaagcgagtttagacaagaaaatagttatgaagcttccagtttcaagcagtaatcttggtcatgaaaatccactagtctgctataacagcaaattgcctagctatcaatcaatcactgtggctattttctatgacacagattagtattgtcctgaactttctttcttagctgtgagtagtatacattaactgtaggagctggggagtctgttcatctgctttctgctgtaacattttcagtttaacgcctcatcatttgagatgatatttctagttcgttaacacaacagtgattagatttccttacacaaactccttttttttttaaaaaaaaaggactgcaaactcactcaacttcaacgcagaggtg

SEQ ID NO: 4258 - DNA, 964 bp, Zea mays
  Intron number 3 from transcript GRMZM2G119640_T05 (locus G RMZM2G119640) derived from phytozome v7.0 (chr-ID 4; pos 2 36893309 to 236894272 reverse strand)
gaatctagctattcacggtctcccagtaggaagaggtatgcaattcatttaatatatgattaagtcattcatttgtaaatatgcttttacaaatgtaacacagctgtgtccactgctcaaattatcacttgtttatttattgtttcccattatctttttgttatcgccttatcggccttgtttacatgatgcaattttctcattactgttaattatgaagtcgcgaaagggcctctagccgagttggttaggtgacctgagtagcactcctcaggtcctaggttcgactccccgttggggcgaatttcgggctatggttaaaaaaccccctcgtctgtcccacgccaaagcacatgtgtaaggcccggtcgcggtcgtttctcacatgggctacggtgccgctgtgtatgggtggggcaggggtttggggttttctcgacctgtgtgagaaggtcttcttcttaatataatgcccgagggctatctaccccccctccccgcaggtcgatttttgtttttaaattatgaagtttggaactcaaataactaaaaatatttaacattgaatattatgttaaagcatcctctctgaaaccattattttcatatttttgcaaactcacagttgtggcatttattcaccatactattcactgtattggcatatgcatgtaagatgtgcccctagagaacatgcaagcacattttatgtcaacgattactaagttcatgatgtggtatctgtttgtggttatctaatgtgtccaattctaatgcacttcttaaaaaaacaaccaaatctgcttgttacaaatataattgcttattctgataaaatattctgaatagaataagttacatacctctgaactcttatcttactgattttttgggttcccaataaatatgtgaaatatggaacatattgatattgtagcttacttttccactctctctcagtgaa

SEQ ID NO: 4259 - DNA, 445 bp, Zea mays
  Intron number 4 from transcript GRMZM2G023242_T01 (locus G RMZM2G023242) derived from phytozome v7.0 (chr-ID 1; pos 2 98331832 to 298332276)
ggtggtcagtggatctccacagacgaaaagtaagaatactcattcctcgttttcatttgatgtactggtgatgtggtaacctagagctttagctttttccgatcagtggatgttctatatatatggtcattgcttgcccaagtacagcaactaggctttgcaaaaacccttatgagatttttggaaatccgaaatctggattactagtcttcacacctacaggattttgcagctggttaatctgaacatgtttctaggttcttctgtttcttcaaaactacatttttattcaataagttgctatctgagtggtttctaaaatgttatacatgctgtaaatccattggtgcactttgaatggcaatgtttctgtttcattctattctttttttacacagctgacttattgaaacctttatttattgtgtttctacagagctacagg

SEQ ID NO: 4260 - DNA, 543 bp, Zea mays
  Intron number 5 from transcript GRMZM2G023242_T01 (locus G RMZM2G023242) derived from phytozome v7.0 (chr-ID 1; pos 2 98332280 to 298332822)
ttctccctgggatcattaaccagcttggtatgttacaatctgtaccttaacgtttaggatattatccaaaaaatggttatcttgtactacctccgtccgtttcgaatatttgtcttccgttaattcacttttaactaaaacatggcaaataaaaaagaacagagggagtaacatatttgatgctttgtttgattaggcaagttctgctcatttaatttgtttgttattatctatagtcctggtcttttctaattttattagaaatgtgttgctgcattccaccatttcttgttttgtcatttgtggtgttctctcgacagttaccacttctagacgcacgacaatggatgtatacttctaggcatattttatctgttgccttgaagtttggcagtttctgttctgcctccctgttgctgtatgtgtttcaatcaatcaaatacaaaaagcaacaagcgtgaagcaaacagaagcttgttgccacaatacaaatgatatgaaagagggattaacaccttttctattcttccaggccctgacaac

SEQ ID NO: 4261 - DNA, 707 bp, Zea mays
  Intron number 1 from transcript GRMZM2G042636_T01 (locus G RMZM2G042636) derived from phytozome v7.0 (chr-ID 8; pos 1 372771 to 1373477 reverse strand)
gaggaaagaggcggagaactgcgactgccttcaaggtcaatttcgttttaaccatcctgaaatgttcattgttagttatctattgacctgaaagcacactgttaattatgtctatgtgattgctgtgatgcgtgttagatctgatgggagcactttcaggttcgatgttgtctatttactcttggaaggtgctgccatgtgattagtgtgtttgcatctggtacactgtactattttatattgttaataataattgttaatctaccccttgcgtttgtttttgatgactactagtaggattcacgctatgtattgctggggttttttttttctgtcaagtgtgcaatcacatgagttgaatttcactgatttcaagtgcaattgtagtttgacccatgcatgctgtttgatctctttcatacctcaaaggctgtttagaaatgttgatattgaatatgcgattggcatctgcaatagataatttcttctgtgtgatattggaccacacattgctcttcattttaccaataaacaaagaaatggactatatctggtttgtgcatagggggttactatgatagcattcatgagtccttgatcatatagtgtaatttaacctttctacattgtgtaggctacaacttactaattttcttaacttgctgtgatcaggattccaagtttgccattcccttggaggaggcaca

SEQ ID NO: 4262 - DNA, 478 bp, Zea mays
  Intron number 2 from transcript GRMZM2G026855_T04 (locus G RMZM2G026855) derived from phytozome v7.0 (chr-ID 3; pos 1 69072807 to 169073284 reverse strand)
cgacataccactctcctatcatctgggccttcttggttagttcctccttatgtcttttgtttcaaaaaaaaattcagctgtattctaaatcatagaaaacgcagatgttgtggactaccaaagtaccaaaacaagatacgatgttgagcagcagcaagtgcatgaacttatttatgttgttgttgttgcaaagacaaaccttggctgaacaaatttatttattgcatataagggacaagaaaaggatataatcaaataattcagtgcccctcgcaccttgtagacgtaataatgctgtgacaagatacagaaacagatacagaaaatggttcggggttgtgtcattgaaagaaacgggaaaccgtgcccttgattgacagatactggagtgaaaatgacatttctcgctatgctagttattgtttaacccaccaagcttatgtctcttattaattacgtgctttctccatgtataggc

SEQ ID NO: 4263 - DNA, 806 bp, Zea mays
  Intron number 1 from transcript GRMZM2G143644_T01 (locus G RMZM2G143644) derived from phytozome v7.0 (chr-ID 1; pos 1 96302257 to 196303062)
agggtaccgacgaggtggtgtccagacgcgagcaggtgaggccgatgctgcgagcatgaggcggatagggagctgcttagttatcactggaatccttgggttttgagctcggatgtgttgggataggctgaaaagttggcgtgctcctgccggaattgaatgatgtttttagttcagtaattttttagataatggaaaaaattcagttccggcctttgcttgtatacggccttacaaaacagtccacacaaatcttgaacaaactagaagtgacatagaatgctgttttttagttcagtttatccatttcataagatgaaatgtgatagctcagtggcaatttttgcgatctgtgcatgtactggagcgctagagtggtagtgatgtagtgaagtgctagagtggtagcgatttagatcaattcattcataaatcagtgaagtgttaagatcggttcatagacttttattagaactggccgtctactgcaaattgatgatcatttcagtgctgtggctgctgccctatatgcactgctgagtgttggtttgtatatgtgctgaattcggcttagaagtagcactgcagcagcttccatctcttcttgatcaaccattagtattacggtcctagatgagtgctgtgctgcctcttgttggctccatcaagcgtcttagatgagtgatcacgcttggtctctttgtgttgctttgctcttctgcccatattttttgctccatgggatactcttgagttttgctaaaatgggagttgcatttgctatcaacagacatttgtggttctaa

SEQ ID NO: 4264 - DNA, 939 bp, Zea mays
  Intron number 1 from transcript GRMZM5G852329_T01 (locus G RMZM5G852329) derived from phytozome v7.0 (chr-ID 4; pos 2 6376316 to 26377254 reverse strand)
cggcggcggcgggttcccagccagctttcgaaagggtcagtgctactgctctccctccgcacggggtttgaaccgctcttccttcctcctgggggtccaccacggccgagcgctgcggcttggcgacaccgatttggtgccacccgtcctctgcaccgcaggactgtgtgtgtgtgggtggtggtggtggtgggggggggggttcgctttgattcgggctctcgttcatgctaccttggggtggtcggtttcaggttcctgtctggtggttcgacgcatgttcggtgccaaaattgccattttaggggtaatttgttacggattagggattacctctttcggccgccgtcgaatttttttccactcctggggagtcccacgttggcggctgtggggattctagctcttgcaggctgcagctacggaaagatacatcatcatttctaccattgtacttacagattctaggacatatactgctgttaagagagaacacataagacgcatgtgccctcactttgttcctaatcagaggctaccaacaacatgattaatagcgattggttgataaatggaaagtatttgatgcaaaactggtttgtgccccacctagaatccattatctgagtacaactttgcaatgcttgtatgggctgtattacttacaggatggagggagtagtatatatgcttttctagtcattggtggtgggttgggttagttccttaagtagcaattcttggatggatgattttacttacggttctatatcttgatggcagtgcaaacctttgtgtattgtagaaatgggatctttgatcctctctctttgttctacctgtatctggtagagaactaacttgccccttgtttttttatctcagttttattccgtgattgcaggcaatcaatcgtcaggctttttgggagctgtgttg

SEQ ID NO: 4265 - DNA, 741 bp, Zea mays
  Intron number 2 from transcript GRMZM2G098679_T01 (locus G RMZM2G098679) derived from phytozome v7.0 (chr-ID 8; pos 7 1632383 to 71633123)
gccaagtacgttggccgcagaggggtgagaaccgaaaccacagctctgcttcttctttttttttttcattttctacgaccttgtttcctcgccgtgcagagagagagagagagagagagagagagagagagagagagagagagagagagagagagagagttaacagtagattagactaagactgaggtgctgtttggttgcgtaatgcgcaggttaagcgcataatcttaccccgctactccctacccgcacacactgtttgttgtttggtggtctatgatgcccgtaccttttttttttgggtgtgtttctgatgactctgtgcagaggattgacagcactgctggccacatacttaaaatttaatcagagtttataccaaagtcaaaaaaacactagagtagagtaagaacttttggttgcgtaaaggaaacgcgcacgtcaagggatggactacgcgcttttttagccagtcataataaaagaaaacgattccaaggtctccctatccgcggtgacaagaaaactcaatcagttagactgagcttttcatcggacgtctatcccaccgtcagtaacatttcgcacacgccttaacgataacgaccaggcaagacagagctggtttcactgcagacgcttccatcgatggaagaagagacgtttcgtgctgaagcttcggtgctagctctcttctacactaactgctagctctgcttggtaactctttcgcagtcactg

SEQ ID NO: 4266 - DNA, 876 bp, Zea mays
  Intron number 1 from transcript GRMZM2G588410_T01 (locus G RMZM2G588410) derived from phytozome v7.0 (chr-ID 2; pos 1 34608782 to 134609657)
gcttgccagtctctttgtcaatcaccaacctgcaagcaatttgtagcagtcagttgccaaaaagcatagctcaatagcattttaatcaaattcacaagttgcaaaaacataaccgtagcaaacatgttactgggccaaaatcagtttcagcaaatattcacctaggagaaatctgatcaaataaaggcacatgtgtatatgccagacatgtcagataccagtgctgctctggacttactgagatttatggttaagcatcagtctaactcaaaatatcacttgtgatagtcttcataagaaaactgtggttctatagtatgtcaggcatgcccaacgaaacttggtaagttccacatatggctacattagtttatacatcaatgttctatatcattaccattcctaaaggtaaatttacaagaatcataacgacccccccccccccccccgtctgaggaagacatgaatctttgaaagcaaagcaagattggcgagggggcatctatttttttagtttaccctgttctgctcatcacaacatatacagctttcttctgtcatatttgctcaaaagatatgtgctgcacaagcgcaattcagccatcaaacttgtgtaatcaatttgccgttagtcggtattctgaccgtggtgaggcaccgtggttctttttcatttgtagcacaatgccaacacctgaacatattccttcgtttttaatataaacagaataaataaggcaaaaacacacattttgacagtaagtgctagtttctacaacccatctagagctgcacgacagtgttacagtttttatgtgggtgagcagaagcgcacctgaaggatacgactgggccaacctcttcgcaaatctgcac

SEQ ID NO: 4267 - DNA, 762 bp, Zea mays
  Intron number 4 from transcript GRMZM2G470461_T01 (locus G RMZM2G470461) derived from phytozome v7.0 (chr-ID 7; pos 1 74106574 to 174107335 reverse strand)
ctaccgtcctgacatacggttcttacacattaggggtaagctaagcaagagccgcacgactttagagtcttaacttttctgggttttggcgcactttgttctttgcagttcatttctttgtcacacggttcttacacactgtggctatgtgggagataggcgaatttggtccttgcacttttggtgtgtctaaattggcagtttatgtttctcgttcatattgtgtacagggcgatgcctaattttatgttttgatttcttttagaccgtcacatcatgggctatatatcataggttcaatgattcacatgttttgtgttttaagctagcctacattataacttaagcacatcctttgggccttgggtagtcctgatataaaacgatcgcaggtgatctgattttttttttcaaacagctttactgcaccctcaattgtggatattgcagtaaacacgttactgccgagcacagttctattttgacatacttttggcttatgacatagtttgatgaatccgaataaaagaaaagcatcagcagctgcattccccaatactgcactattcttttgaacaaacaaacacattggcctgccttttatagactttttagtgtttatagggagatgagttgtcaccattgctcttcaagctttggggtctacggatggaaattagtgcctatgattatataaagtagcatctaagatgacacatctccactggatttgactaatccttgtttcttttctcaaggctc

SEQ ID NO: 4268 - DNA, 267 bp, Zea mays
  Intron number 1 from transcript GRMZM2G039345_T01 (locus G RMZM2G039345) derived from phytozome v7.0 (chr-ID 2; pos 4 160854 to 4161120)
ctggtgttggaagatttggtgggttatcttttgtacatgattattttttagggactgtccattttaccagttacatgctatttggcaagctttatttgcaaggatgaaacctctcttctgtatgtttatgaatatttttttcttttgggtcaggaatataatgtatgcagtttctgaatcttctttgagtttgttgttcaaggttatagttattaaaaagaaacttagtgttatgtggtggttcttttgttgccaggaaacacgcag

SEQ ID NO: 4269 - DNA, 682 bp, Zea mays
  Intron number 1 from transcript GRMZM2G098648_T02 (locus G RMZM2G098648) derived from phytozome v7.0 (chr-ID 7; pos 7 2960765 to 72961446)
ggtcagtgcctctcgcctctgttccgcccttagcccccgacctccgctctaggctcggtcggagttgcacgctctggatttcgaggtggtggttaggtgataggattagggtttacgtgcgccccagtttggaatgcgtgcggtaggaggatgagatctgtgcaccatagggtgtatggtgatgtaatgcagccctactacgggtacctgaaaaagttggatgctgatttgcagctgttgatttttgtggagattcacttgggaagaaaatggtgatttctgaagaggtagggatgtttaggaaggctatagattttggatgtgtgttgtttgagttttttactcgtaattcatgatagggtgatatctggtctcaggacagtgggctaagtgctagtacttctctgtcactgcacctgtacggagagctagggccctttttcttttgtaatttatcacaattattgaattatagttgtttggtggttccttgcatgttctgggtgatgaaagtgatacaaaaaacctagcatgttctctttggaaacaagcttaaaataaaatgctagactgctgtggttgctttgttgatcaacatacacatttcataccacattcatgatttgttctatacgcacaatttgcagaactggagactaaaaggatattgcttgagattttc

SEQ ID NO: 4270 - DNA, 906 bp, Zea mays
  Intron number 1 from transcript GRMZM2G007160_T03 (locus G RMZM2G007160) derived from phytozome v7.0 (chr-ID 3; pos 1 70444269 to 170445174 reverse strand)
ccggggctagggttcgcgcggcgcggcctcgcgaggtacggctctgcgttcgctccggatgcccagaatcattctgcgttccgtttagtcgtcgtggtcgatgctgtaggagctagtgcctggcggggttatgggtgctaccgcctcgcgttgctggtttcgagctaaacgcgaggttttggtgcaattttgaaggtgtgaggtggcgggtgttggattagctatcggcctaatgcagatgcaattgggtcgcttcgctgtacaatcctattgctattcaagcaaacaaactgtttgttgatgtgtttctttcattttggcagctgtttttttatttgatagcatggattgcctcgatttcattagtcgctatgactgtcctcaaatcttatatttgtcacctagaggcactataatgaaggaaattttggggtaattgaactgataatcatggactcacaaataattaaattgcttctatggctgtactagtgatagtgactagtcattagtttcttctgtcgcaaatttatgtgtttgctgtactagtaatcactgtagtttatttagttgtaaggagggatctaagcagcaaatcatttcttactttgactataactaaatatttcaggtcccacgtttattcatatttactagttctactatttttctgtcttgctacttttagtattaaaaacagagaacaaaaaagcaatcggagggagatctggaacttaaactagggttgttatgaagagattacaacattgaagatcacattaattgaatattagcttgcctgcttgatggcatctgctagtgcagctgtccaaatccgtttgttttatgtatcatcagcagaaatctcaacatcttgctgggattgtaccttttggtttcagggga

SEQ ID NO: 4271 - DNA, 1003 bp, Zea mays
  Intron number 3 from transcript GRMZM2G053934_T03 (locus G RMZM2G053934) derived from phytozome v7.0 (chr-ID 4; pos 2 24037585 to 224038587 reverse strand)
gtgcacacatagaagccaaagccaatgtatgaactacttgtttcttttcatttcctttgagattgtcttactgcatgcactaaatttgatatgttcaacccatggtggtgcagaatggcatgacaccattgcatttagctgtctggcatgcaattcaagctggagacttcagcacagttagcgtgttactaagctacaaccctgattgctttgtgaaagatgatgtactacttgattcacagtaatggttttcaattaattgtttaaaatcacattgtaatttacaatgtggtaaggtttgttataacatctttccatcaggaaggcaaaatgcccttaaatcatattccaggaggagctggtagcgagaagctgctgaaactcctcactcatcatatggaagagcaaagaaaacggaaagctctcatgtcatgcctcgaagggaaagcaatgtcagagtttgaagaggcaatgtcacaaattgttggattgcaggagctaaaaatgcaattgcgccgatgggcacgaggaatgttttttgatgagaagcgacgggctatgggcttggggattgctaaaaggagagctccccatatggcatttcttggcaatccaggaactggtaaaatttcaaaagaagcaacctttttgtgttaccatagttctgttcagttctatgatcaaaagcttcgccatggtttccttagggtgctttcatagtgttgcctatcattgcattgggttgtatggtacagttacaatctgctatccaatgctaaacatcttgttgggagcttttgatctgatcatgaacggaaattagttacctggaagtttggctaaacatgtccttaaaaggctacattctttctaattctgcctgcttcttatacattttgcagttacatgtacagtgcagtaaaatgcacaagtgctgggtagatagttactgaaaacatcaatgctctgtttatattatctatcctctattgcaggcaaaact

SEQ ID NO: 4272 - DNA, 892 bp, Zea mays
  Intron number 2 from transcript GRMZM2G015592_T01 (locus G RMZM2G015592) derived from phytozome v7.0 (chr-ID 3; pos 2 29663495 to 229664386 reverse strand)
caagatttcaattgagaaaagcaaatatcttggaggttggttgtgattctgtgctttctttaaggagatagtttcctttttgtggtgaaacttcctttggcatgtctacttacctctgttttgaattttttgtgtatggcatacctttgcactgagctgtctgaatcatgacttctgtaaaaatgagagctgctgacttctgtaaaaatgagtgttgtttaacttaatcttataaatttggtaaattggtaatgcccagcgtccttaggttaggaacatcgttttctctaacggggcgtttggttcccttcattttaaagaaattgaaattcacttaataaagtaacttatttagtttgaaatttggtattccaccactttccaaagttcagatataagactatctcaaattcatagggtagaggataggaaatgattttatgcattgctagaatttgtttctactctgtaacttacatgacactcttcgttccactcctctatagtaaaaatgtaggacataaatatctccgacatcttgctaataatagtatacaaatatattttgtataaaagcgaattagtttaatttatatatgcctaaattactattattagaatggaattgaattccaaagatccaaacggggtgtaagtgaaatataaagagttagcacccatttgatccttttattgttttgaagtgaaatggtaatgtacattctattttattgttttgaagtgaaatggtaatgtacattctcctattgtgtgggcaatgcagatgcgccaacagagagaaaccctaggaaaacatgtcatgcactttcttgctggttatatttccatgttttcaggacagggtccttttcagacagggataacacggtat

SEQ ID NO: 4273 - DNA, 229 bp, Zea mays
  Intron number 3 from transcript GRMZM2G144726_T01 (locus G RMZM2G144726) derived from phytozome v7.0 (chr-ID 7; pos 8 309320 to 8309548 reverse strand)
gagcacagacaccaactgctgtcagtgattctcctttctttgtttgatatgtgttcagataatagtatctttattttcgtttattgcaacctggagattgtattcattcgaataataattattctcatcttcacccatactaaatgttacttcttgatttccatgtgctttgagcgtattttgattggttgaaaataaattctttattcatgtattgttcagggtacct

SEQ ID NO: 4274 - DNA, 513 bp, Zea mays
  Intron number 1 from transcript GRMZM2G540834_T01 (locus G RMZM2G540834) derived from phytozome v7.0 (chr-ID 4; pos 2 8031518 to 28032030 reverse strand)
tcagcagccagaaccagtcagctacctgtgcggaggtgatccctcttctccctccttatcttcctcttgatctctatttgtcgccgcgattcccggcaggccgacctcaccatgactgatttttttgttcgtagcagcctagcaagcagcaaacataagttaaactagctatggtttccttgtttctcacctggaaaatatttttggcggttttcttctgagattacatatcgatgttgtataagaggactgcaagtgatcctagaattttaacatgtagacatgtatgagcagcttctcgaacaaagggcttttcaatccgagaaattagaaaagctttgatgcctgaaatacaggtcaaatctacaagttttagtgattcccataattgtgggaatgtttggtttcatcttaatcaagtaaagtactgaattcctcgtccatattctgatgtgaacgaaagctgcttttgtttcagattgtggagctgagaacacgctgaagccgacagat

SEQ ID NO: 4275 - DNA, 604 bp, Zea mays
  Intron number 2 from transcript GRMZM2G456487_T01 (locus G RMZM2G456487) derived from phytozome v7.0 (chr-ID 8; pos 6 5057048 to 65057651)
gtgctccgacggccgcgtgcgcagcacagactgcggtaagattcttgatctgccctttttctctgttagtagcagtagaacatagttctcggactgcacttacattgtgctctaaattatatactataagatttaatgatcggatcgaattaaaatcgagacttatttctattcatttttgaattaaaaattatttagggtactattattttgtgaggaagcatttggatcgcgatccattatcacccctaactacagtgcagtgcaccatgatacatacacaatacgtgaacgaagaactggaccttgatagctttcttcacatatttctttcattttcatcgtctgtttgattgaatagttagtactagctagttgacaagtagcaggcctaactactccgaagaacgagataaaactgtaaccaacttgtgttgcaacttgcaagacatgatcccttgggggtttatgtagtaataaactcttcttaggaaaaccagatgccactgatatcatatacttggtttgctccctgcttcataacttgttttcccctacttcttttgcaggatcgaagaagaacaaaaaagcgattgcaataggt

SEQ ID NO: 4276 - DNA, 795 bp, Zea mays
  Intron number 2 from transcript GRMZM2G358467_T01 (locus G RMZM2G358467) derived from phytozome v7.0 (chr-ID 7; pos 1 55358333 to 155359127 reverse strand)
gcctcttctgctgctgctttgaagtctgcttgcaggtacttatcatagcactgcagttttattttatcgctttagtaacaattgtagcatttaaggtctagtcctctgtttgctggtaatgacacattaatattagttggtacttgttttgttccattttctttgatttgaaggaagcttgctttatttattccttgtcattagtttatcaagcatttgattcatctggtatttttctcaattgatgtggtctaggctttgtttctgacattcttctgaaaagcacagcacgaattttaaggcattgctggcctgatcagtcaaattgttacttcatccaagagaacttttgatttagccacttttatactttttttctctcatttcttttgtgactgcttccagcagaaaccaacgcacggaccaagactagtctgtctctgcccaacacatggagatgaatccccttttgttttgtaataaccaaaaaaaaatacagaaaaatatttgtttttggaaagagaactcactatgaattctccaacgcctgggaacacccatccctgactctggggatacgatgggtacctcatctcgccagcagggccaagtcccacctcaatgtccacaacgacaccagcatccaagaagtctgccatgttctccctgaagctcttcatgtaatcagcatacagctgcaacagacagacagagaagttcgcttgattttaccatcttcctttcgttctgcatgtgctaggtacaccaagagggcaggagtttcaagtcagctga

SEQ ID NO: 4277 - DNA, 987 bp, Zea mays
  Intron number 1 from transcript GRMZM2G072323_T01 (locus G RMZM2G072323) derived from phytozome v7.0 (chr-ID 2; pos 2 19866952 to 219867938)
tgcaagttggtactgttatttactcactccgagttcatctgttaaattttatgcctaatcttacagtgcatttacatgggaccatatttgtatctgtacatggaaacaaaatatatatacgtaacttgatagactagctcagtagtttgtttgggtttcattttgaaccttagtattaataacttgatagatcaggtcagtagtttggttgagtttcattttcaaccttagcattcataacttgatagatcagctcagttttttgtttgagtttcatttcggaccttagtattcattattcaatacatgaatcagcaaaacacaaagattgtgaagccttttttgtggcaacctgtgcaaatcttatttttctgcctaatccttatttatagtgacaaagagaaattaggtaaggcttataatttctttcttttttccagtgtgaaaagtagcgctcatagtattaagacgaagagtttagctcaatgtgttctaagctgtgcatacatgagaagcattttgaaaagaagaatgatatttttgagctaacaactaatgtaaaataattctttgaaaaaagtgttgaacataacagtgtttgtttctaggatatgtatggtaactgcatattttggaaagtggatgcaacttaaggcaaatgtggaccacatttcaaaaacaaaaggaatttgagttataagatcttttctaaggctcagccaagtggcacagctaagctaagagatgactcagctgcataacactagctgtagtgttgttttaaaatctacaaatgaacagaatcactaagagttgaagcaattcatgtgtctcaacagtatgatgtgataccaggcatagtttcagaattgaatatgctgatgacacattcttcaagagaattttcatatgatctgtaacctcgcataacatactaaagccccatctaatatcttgattattgtttgttcttactacttcagtcgt

SEQ ID NO: 4278 - DNA, 982 bp, Zea mays
  Intron number 2 from transcript GRMZM2G168706_T03 (locus G RMZM2G168706) derived from phytozome v7.0 (chr-ID 2; pos 2 02958725 to 202959706 reverse strand)
cactgattttgggctttccgtcttcatcgaagaaggtaatgagaatattatgctctgtggacatttggaattgcatttttagcttaataatataaataacagttgttagccatatttttttaactttgatctgttcagattcacgacgttagtatgtcatgtataatctgattttgggtaatgggaacgtatggtgcttcttaatccaagccatttgggacatgttcaggcaatttccccctgcaaagtgtatactgtataacatgccataataattttagtaacttgaaaaacttttgctcctgcctatcttcatagagaaccagccaaaaactggtgatcgataccgtgttcagtttgagggaaaagcactgaaaacagtacagctgtttctatgtcagttaggccctatttgaatccattatctgctaatagttagctagctactagctcatagctaatactagctagctaactattcgccaaactagtgacatagttaatagttggttattcaactaacaattagctagactactagctggacccgtttggatccaaaggatctaattattagcagctatttctatgtcagttagtagtgggaaaccactagtaatagctcaatggcttttttatgtttgactggtttgaagcccgatcacaatcacattaagatatgaaatgctttatcattttattgcccttgtagtggcgattcatatatctgaggtatatattaatttgttgtggatggtaataacaattgcagaatatatagcaattgcttattttagggaggcaaactgttctgttttttcctcatacattttcatcagtcgtcccagcatttgttttttctctatgattcctaatcaaagagaacttgctgtcagaaactgttagtgattgataccataagattcgatcctaaatttccagatttgagatctttttatctctgcactgcataacaggaaag

SEQ ID NO: 4279 - DNA, 562 bp, Zea mays
  Intron number 1 from transcript GRMZM2G355274_T01 (locus G RMZM2G355274) derived from phytozome v7.0 (chr-ID 6; pos 2 1285735 to 21286296 reverse strand)
cgaagggcacgaaggatacattagattaattgagggtaagatggaaagccctttttgtttataaatctatggagaaaataggtggtgatgtccagatacttgaacctaagaaggatacattagattaattgatgtccagatacattagattaagtgtttttgtatgaaccagtcgggctgtgtttgtacacatcttgtttcttgtagccaaaaagaaaggtctgtcagatcagatgtgtttgtacaagttaaaaaacacaatttggatgctcatggttttcaaaagcacaagacgtaatttggttgttacctcgccgacttgaatacaaagcccgaggttccttttgacgtcgatctctctatatacttggattgtagagggaagtaattgtctttacctatcacaatgaaaaggtagtgaatgaagaactgaacttacatatgtaggaagatacaactaatagaagaatgaacagacacactattgtttgaacttggatctaaccttttgaactgaataataaaattcaggaaagggagatttattagtccacaaaataat

SEQ ID NO: 4280 - DNA, 947 bp, Zea mays
  Intron number 2 from transcript GRMZM2G319169_T02 (locus G RMZM2G319169) derived from phytozome v7.0 (chr-ID 3; pos 1 2791378 to 12792324)
cttaaaagggactcaaattcgtaagttaaatgcactaatcacaagcgggcccaacttcagtttctttttggttcttatttgcttggcctactgagctttgttgccttgttctgagatatactcctatagacctgtcttcggttccatttctccatttatatgtgaacatgaataaaatccatccttttatttggtattggagaaaaaatagagttaagcattcagataatataaaaaacacatgaactggacaatttctgaaaatttaagaacaaacaagagcaaatgtagattgatgttggagaaaaaaatagacttcagcgttcagatcatatcaaaaacacatggagtggacaatttctgaaaatttaagaacaaataagagccaatgtagattggtgcaggttacatttattttatggaaaaatacaacatctgtatttcaatcataggtagacgttttttttttctaaaaaagtttacaacatggtttttaaagcggtatggcgagacaaggtgttggaccgccgtctggacgcctagacggcgcctaggcgaggtaggcgtgcaaggtgcctaggagatgaatcgccgcctggacgcctaggcgttgcctaggcgacacctttaaaacagtggtttacagtgctctactgtagaactgaaagttttcaggattcaccgattcagacactatctacattaagatacaaaaatttgtacagaactgtcaacatataataaaaatgagaaaattgcgagtatctggctgaatagtatttagcttatggatgttgcattacagcattagtctgatcatcacgtttagaaataagtatcagtttatacgactgtaaatgctttgttttattgtaaataaagcaaggggaaaaatattgtattccttgcttgctatcttattacatgagtttcgtgcagggttttgt

SEQ ID NO: 4281 - DNA, 733 bp, Zea mays
  Intron number 2 from transcript GRMZM2G378515_T02 (locus G RMZM2G378515) derived from phytozome v7.0 (chr-ID 2; pos 2 36255769 to 236256501)
cacagtactcaaaaggttttctataaaaggtcgatgtatgtataggggagaagaaatcttctctatataggggggagtgaatatgctctccacgttaattatgtggttcttattcctaattaactctcgtgatatgataataatgtgtattatggtattataaatattgtttgcttctaattcaaagaaaaaagataaataaatgttaatctgtagtgtatagaggaagctggattgtagtgtataggggaagctggataggggggaatggttggagacaaaacatagtgggagaataagggagtttagtgtagtaaaatatattaaaaaatacagataaggggagatgtataggggaaatggttggagatggcatgagttcttattatcaattgggtctaaatttaacgtgtggtctttttgtttgaactttttgttatttgtggccgaaagttcaaaagataaaaaggggaaaggggttgtgcaggctgtgacgttttttagtgaggttgttgtccttttatttatgttgcacgttgaagttgcttatctatgaatttgccctgtatgatgcacgatgttgtgctgtctcctgtaatgcatggttgaaagatgtgaaattgtgtttcatggttttaccccctaccctagaacacgtatatattgttatctgatttctccacatgatgatttggcaggtaccttgctgagttcaagtctggtgcagagagga

SEQ ID NO: 4282 - DNA, 912 bp, Zea mays
  Intron number 2 from transcript GRMZM2G380582_T01 (locus G RMZM2G380582) derived from phytozome v7.0 (chr-ID 2; pos 2 283861 to 2284772)
tccctgacacatcacccttggaattagtggtacaatcttttgtctagataccatggtttacaatattgtgtccaaacaatgtttcataaaacatggtattcttgggtatggcaaaaactgtggtattgttgtcatgacaattacaaagtatagtattgtaaaactatgattttgaaaaatattgttgccagatgttgtagaaggccgcaagagaaagtttcttccttccctttggaaccgtcacatgctcaaaagaatgaagaggcttcagcttcaaatgattcaacatagcaagaggctcgaataactgataacaggactatgttcatgtttccaagagtgtctcggctcggaccctaaatccttattcagcatgaatcgccggtcatttgcagcttgcaggatcaattcgaacgatttgcacttctgcacttcatcacggaaaaatcaaaaaagaaatttcgaccctcccaacaagattcaccaacttttttgcaatttggcccttttaggttttttttgcacaaatatgcccttcgcaatttcatttcaaaaaatggacccttagctcagcgtcgtcatcattggcgccgaggttgtttatgtcggcgccagcaatattggcgtgcatacgtcagacgtcgggataccgtggaacctacgtggcacgtacctcggcgccatagatcttggcgtcgaggtacgtgcctataaataaaccctacgcccgactagtttttgtgctcattcctattcttcgaaactatagatatcgacctgatttttaggatgtctagacgtggtaaatctgctaaacaaaggtaagcattgtattaaatcttattttatgagtctattatatttgtgattgttatagatcttatcgaaatttaggaagggtcctttgaccgg

SEQ ID NO: 4283 - DNA, 903 bp, Zea mays
  Intron number 2 from transcript AC190588.3_FGT003 (locus A C190588.3_FG003) derived from phytozome v7.0 (chr-ID 4; po s 159906399 to 159907301 reverse strand)
acgagtatatcctcttccggggaactgatatcaaggtacgtggaaccatctacggggctcctgatgcagtgctacttccattgtcgacaattgagtgttgttcaacggctcaacgctttatgttggtgcctggtctctgcttaatcaccaatttattttgtgtttcaactttcaattatgcattttggctcattggtttgagggtccgatggatgcaaaagcaacaatgggattatcttctcaccaaactaagccaaactcacatgtggtgtccatgtttctatttcacaaattattgtattcgtgttcttttcaagtatctgtatcattcagatttttagaatataatattagtgatttgctgtaaagtcactaagcacatgtgttgcttgaattgtttgcttgcctacagttatatttgctaattctatttaatgtatcatgcactttttgttgtgtcattattatgtttcatctcttacctacctcaacttgtttttgagggctctgtgtatgtttatatttcatatgtatccaattcagtacaataagcagacaagtaatattagctatacggtagttagttctgaatattttagttcaatatgcgagcaattcataaatgcatatgtattatgtaccatgttgtcatgcactttttaaaagtttctattttgtacttttcttctggaaacttcattgattattttgcattatatgttttgatgcatgaataacatctatggcatgttttagtgcatatatttgaatatgtatatatgtatacttttacattttcctcttttaaactgtcagcctattttttatttaacattataatttacttgtggttcccataattctgcagtatttgcaagttaagtcattaccaccacagccgcc

SEQ ID NO: 4284 - DNA, 459 bp, Zea mays
  Intron number 1 from transcript AC183514.3_FGT005 (locus A C183514.3_FG005) derived from phytozome v7.0 (chr-ID 3; po s 168433148 to 168433606)
aagcacttcaaagagaggtaatttgcttagatatttttaataaaacttatttttagtttttcagtgcttagttaaaatcaagtggcattgatactatcaaaggaccatttgtttttcgttggcatttcttgtggatatcgtggtcagatgtacaatacagattaatagtatgagcaaagtccttcattatgtaggttccatcaccctgaaagttgtggatgaactcatcttgttggtagttcagttaacccgagtgttttttcataaaagaaaaatgggtgacattagctaattattgatcccaactcactggagttgttcttctcttatctaccttttgtgcttctgttctatatcttatatcctatatagtgccaaacactgcactcgtaggcctaaatttgttcaatatataaatgtgcagagttttgaagctttgaaccccagagccgttgctgt

SEQ ID NO: 4285 - DNA, 936 bp, Zea mays
  Intron number 2 from transcript GRMZM2G463622_T01 (locus G RMZM2G463622) derived from phytozome v7.0 (chr-ID 8; pos 6 240491 to 6241426 reverse strand)
tgaaggtttcagaacgcctagagaagctattgaaggtcagtatttcttttcttgtccaaccaattagtagtaggttctgttagcttattagtccatatgaatttatgaaaatccacaacatacatgtgcagctgtttgtcactatctatattagtttcatcgttgtgattaagaataaggaccacatggtttctagactgaataaaaatatagacaagttgttgtgatatgtttgttgtgtgcatatattgtaaaatagttatgaaactctgcgcatatttacagcacacatacaaaacaaatctgttttggaatgataaaactacttcaattacttctaaggctgtttagttcgaattgaaaattattgttttccccttttctctctgcaacatggccattttattactccatttgtcattctatttgatctaaagaaaggaggtcagtgcaagatacatatgtgtttcaaacttgcttctgaaactatgttcatttcttcatttagtcatttttagaaattgtatacatttttcattctaatttacaaagcttagacatatcttcaatgaattctgtatttttatttctgtgcatgtattacctacaccttgtgctatttgtgaccaatcatattccaatcttctgtcatgcctcgccactttggagtctctatccagtctggtatggcccttctggaacctgtgcttaatgatgtacaaaaaaggttggccaacatgtgggcgtcactactgttattacgtggctaggtccgctctctctccatataatggttgtcatgaatgaaattggaagacaggttctaccttctaccgctcttgctagatggcccattgtattataatttgatttgtatcagtttagttcatttatgagataatatgacttgttcgcactgcatttttacagtttctc

SEQ ID NO: 4286 - DNA, 816 bp, Zea mays
  Intron number 6 from transcript GRMZM2G078458_T06 (locus G RMZM2G078458) derived from phytozome v7.0 (chr-ID 6; pos 6 2564486 to 62565301 reverse strand)
agctcagttgaagttttgtttgaggacttcctttggtatgtaatattcttgtttgcattaaaagcagaaacaacatactacaaccttcacttaataataccattttaccatcttgattgataatgccaatatgtggagttgtggactgtgggcagcctgtattaatgtaatgttgtaaacagtacatgggaatatgggattggtgaacctccttcagtctgtgggctgtacttacgtacataaacctgataaagactatcctgaaatgacgtaatcaagagaagaagcagaaggatcgtttgtggttatctttgtttatgcagtgtaaattagttaggtttcatctgttacaatagtataataaatagtgcattttcaccatggttagtggtgttgctgttgcataggtatactattgtacctgcaaatataccatgtagttggatgttcagcgtagctacttacataaacgagttagccacacaaaaagcaacagcttaaccaaataaggcaaggtgttactgtattattcatccaaaaaaagttaacatgctttgatatctagcatcgtgtacattgcatccttttcctgtggtcagggtgaaaatttgatcagaatcatggaatctgcaatatgtacttgattaaagtgatggtgtcaaagactagttctttctttagtttacataattaaaagtttaaagaaaatgccatataggcatcccaattttcttatctctagttaatttttactctaattagcagtacgagtctatgacagggcaaactcaatcttctggactcgagcactgaaca

SEQ ID NO: 4287 - DNA, 858 bp, Zea mays
  Intron number 1 from transcript GRMZM2G017269_T01 (locus G RMZM2G017269) derived from phytozome v7.0 (chr-ID 6; pos 1 62691129 to 162691986)
tcgccagaccttcgccggcgacgagcactcaccaggtatgcgcaccctctctcttccgctccttctgcgcggaaccgataaaactggaaccctagccttaactatttggctttctgtatttggatctgatctacttacaactgtacgcattcgtactacctggttcctttgcaaggaatactgtgtgtgcaagtgtacgccgatgacccatgtccctttctgggtctggcctgtgtaatggtagtggttttttaccacttcgctgtggctgtgggctgattgaatccagttcattctcctgcacattctgttacttctagatagatttatgtgctgcgtggttcggttaggttctacgtttccacctgtggcactgttgctgataagttaccaaacctttgtgggtactgcttgagtgtgccggtcactgtaggctaagtcgtcctggccttaagcctcgatgagatctattacttgtagaatttaacgtggtgagatctcgtcggtgattagattatcatttgtcattgagtgtgcttttgtgccttgatgtttgagtgtgcttttgtgccttgattattgagtgtgcatccgatgattattggtgcggcggaaccatctaaatttcggcttccattaattatgtttttgcactgttgttttattcctcgacccttgttccatggactggttgactgcactatggactgtcgatttagtatggacagcgttccacataatcaccagagatactctaacctattttattaatctgtacctgtagggagggcctggattttgttcattttttttcttaagtgcctttttttctgtgaataacccatgtagggcgtgaaa

SEQ ID NO: 4288 - DNA, 590 bp, Zea mays
  Intron number 1 from transcript GRMZM2G002626_T02 (locus G RMZM2G002626) derived from phytozome v7.0 (chr-ID 3; pos 1 74693540 to 174694129 reverse strand)
cgtccaactctggcaagtcccacctcctcctcgtaagcaaatccacacctcctatactccttcggtccaaaatatgatgcaaatggcgccaacctggtggcgagctcgcaatattactggaagtgtcaccactcaccagtaatggtcgccgagagtatcgtcataaaatcagaaatcatttaagctataattgtgtacgaatacaacgttggttaagttctatacttataactggagatctgcaggacttttaggaatgtcggcaattttgataggctacaatagtttctgactctggtgatgcatacttgtatatcttcaacgaacacagctgttccatcctcttggcgcttgctcacttgcaatgcttcatactggaaatgaggaaaccactttggtttttgcattttgatactgagttcctttagaaaaagaatatataagcatgaggctcttatgtggaaaagcaaaacactgggaccaatttatcgttaaaatggcatccttgttctagtagaatggaacgactaacatagagtaagtttcgtatctcaggctgcagtgcagtgcatattaccaaaggagtggga

SEQ ID NO: 4289 - DNA, 1036 bp, Zea mays
  Intron number 1 from transcript GRMZM2G100321_T04 (locus G RMZM2G100321) derived from phytozome v7.0 (chr-ID 3; pos 8 0514885 to 80515920)
gcctacctgcattgcctcggcaaccggctcgggttgtaagttgtctatatcgtttaatcggtttggtgattttcgggctgtacgttctctgtaccgtttaataggttttggtgagttatttattgaactgttttctggggatatacattttgccctcacttatttggtgcaaatctacaattaaaccatccagaatattcaatctagatctaaccagggatgaaagcgaacggatcgaccaggataagctctctcccgctttcattttcacattttatttcggaaagaggataggaaacaggaccagcgggatgaagaaaatgaatcaaatgaacgcaacaaatcgattacggatttgaattggacgtaaaaagcggaaacatcgccgcataaagtataaaaataaagtagtattctaatcaattgaaatatattttctagacatatggaaacaatatattgtaatatacatatggctaccaaagaaaataattaactatggattagtttgttgcgatgtgacatagagtcgtctatgatttgttcattgtattatctaaaatggaatattatatatggataaaaacgagataacccggctaaaatcgggaaaaatgaaaatggtcggaaaaactcatataccgttttcatcccattttcacatttgtcaaaaacgaaaatgatcaggatgtccataaatacgaatttgaacgagttaatgtagaaattggagcggaacggaacatgatatatcccgactgttttcacccctagatctaacgatgttaactgttttttgcatttctacaccgacaccacattccgtatacaggatatagagaaaatagattgatgttgacgtcagagtgtagaaatacaaaaatacggcagacatcgtttgattagattggatgttctatatggtttgattgcacacttgcgccaaatacgtgattggatatgtccattcttgctaatcttgttgcttatttgtggtgcaggccgcagacaacaattgcgacggctgtggtgttct

SEQ ID NO: 4290 - DNA, 677 bp, Zea mays
  Intron number 3 from transcript GRMZM2G341405_T02 (locus G RMZM2G341405) derived from phytozome v7.0 (chr-ID 2; pos 1 82510223 to 182510899)
cctcgagaacctcttgttccgctgccagtaccgtacttccccgtatgcttggtttcctactcttctcatcggattgtatatacatcctgtcgttctttttcacctttattgtccccgattcggctcttcggtttggttttatttagtttccgttgttcgcgtaccaactatcaagaagtctacggagatatttgggttgctgtttttgcattttttttcatcacataaatagcaaccccgactttatgtgccacccccacttcatcctcctcctgttgttttcaccgtgaaataatttttgccatgtaatgtcatgtcaggctcagtttcatcttctttcttctgcaaataataatcgggtttgactctgccgatccgattttatttgtaccatgcgctagcacacggctatatttagaacaatcttatcttccaaagcttttccaaccgccagctgcgcgatttctgtacacttgtgtgtcctgcaatttctggctgtccatttccgatctccaccgtggtctggttttgttcaacgtaaggaaaaaatcgttctcgctaactttcctcggagtcgagtgattccacatgtataatgtgttcctccgggggctttgacttgtatacagctatacatgcgctaaactgtccggatttgtgatgtcgcagtgacaaca

SEQ ID NO: 4291 - DNA, 815 bp, Zea mays
  Intron number 2 from transcript GRMZM2G130950_T01 (locus G RMZM2G130950) derived from phytozome v7.0 (chr-ID 7; pos 1 74290363 to 174291177 reverse strand)
tccatgtaagtgtttccccctttcacactgaatatctaactccacttactgattgtttggatttgagctttattgaactcaccatgcttttagagggtgtttgcgactgcagctccaatttgaagctgtaatttataatactcggtccgtcctaaaatgtagttctttctagccctattttttccgtccacattcaaaaaaatgataatgatacaaataaaattcataagttgattattgaatgtaggtttagtctagaacgaattgtattttgtgatggagggagtgtaaatttaaatagttttgtattcaaataataaacaaaataatatatggaaatgtgccatgatataatagtcgtgtgttttgcatagattaaagatatacttaattaaccacaggaatcaggcacaatgcatatggaaaatgtaccatttacaattttacatgatgtaatagtcggtcaagtccgtttgttcgaatgttgcattataatcatcctctgtagattattacagaccaataaactgaaactaattactcactgaacttctgcttgagagaaacccaaattaaacgaaatcacggtttaggcttccagactgttataggaaaagaaccgaaaaaaatacaactgtgtggagaggccatctgtagagaaaacaccgtgtttcaattttaccaagttgattgctcactgcatgtaccttcctttgtggtaaaactccaccactgtctagctgttgcatgtaatcttactgcttgtttgtaatcatgcaggacttcgttcctgacagcgtggaaagtgtgtctga

SEQ ID NO: 4292 - DNA, 653 bp, Zea mays
  Intron number 3 from transcript GRMZM2G417658_T03 (locus G RMZM2G417658) derived from phytozome v7.0 (chr-ID 4; pos 2 33540913 to 233541565)
ggacatcccaaagcaaaaaggtatattaagtgactaaaatcaatagagctaagcataatacatgaatataaaataccttgaggtatatgtatacttgtgggttctgtcagctccctatttacaatgccatgggcaacctaacttcagttagtgtaatatattctgtttgatggctactcttcatgggatgtgtgctatgccctccattccagaatgttggtctttttagttttgtgattttgtccccagtcaaactcatttatctttgaccaagtttataggaaaaacatactaaaatctccaatatcatataaatgcactatcaacatatattgtatggtgggttaaataatgaaactaatttggtgttgtagacgttgctgtatttttccattcacttagtaaagttagacttctgagtgtcatatactccaatcctaatccaagaagatgaatgagatttgaagttattgtttctatatttctcagcgtagtagtagaaagtgatgaagatatagtgcaaactttgatatattcttaaacattgtttggcacagctagttcatatttcaccatgctgtattactaaaggtcagatgttcctaagtacattgtattcttatcagcgttctgctctggaagatatccaaaag

SEQ ID NO: 4293 - DNA, 739 bp, Zea mays
  Intron number 3 from transcript GRMZM2G035712_T01 (locus G RMZM2G035712) derived from phytozome v7.0 (chr-ID 9; pos 1 14162422 to 114163160 reverse strand)
ttaggtaaatatatttatcttaccattcttttcatctcactattacctttgtcgacaaacaattccgatttactagcacgcgatttttcttacaaaaccatataatacaattcaataatagaaagaactcaaaaaaggatattgaaacttcacatgaagtatgctttactgccttaaaaataactatattcaacgaaacttaactattaaaccatgtcatcgtagggtccagacgatttaacatttaataatcttgaaattatgtccagtacattagaattacccacaaaaaagttctttcgtctttgttttttttggaatgctaaaacatttgtgttattatggtaaatattgttgcttagcacatttctcatcaaagaaattctacaacacaggcccaaacaaattttggaagcagtccataaccttagttctgtaacacttgcttgaaacatgaataatgtacttcctcctaattttcctaacgtttgtttttctaattccataaaaaacgaaagcttacaaaaatcattgttgtgttatattttccactaacttttacagaaacatttgtccatccaggaacagaaggattagtgcatgccgttgcatatggcatgtgttggttctattgactttgtatcaaaatgatgctcttcttgtaatatatagctaatgtattttgtatgacgtcatgtatgcccctaggacatacgtggctctttttgcaggtatatac

SEQ ID NO: 4294 - DNA, 926 bp, Zea mays
  Intron number 1 from transcript GRMZM2G172512_T02 (locus G RMZM2G172512) derived from phytozome v7.0 (chr-ID 1; pos 2 49429760 to 249430685 reverse strand)
cccaaatccgcaagattatcaacaacctcttgcaggtagctgctgctccccttcctcagaaatatttcttggaatcttgtcaccgagtaccatacgtagggtactaggcacctgtagagtgtccttctgtttatgttcctcctcttcagtgttcagacttgctctgcacctcagatggaaaagaaaattctgctttttttttcctaccaagattgctatatacgcctagtttcttgctatttcgctctgtatggacgcggttgaaattcttgtgacggtggagtagaaaaggtagcgccttttcctgcttcaagaaaccacggggacacggctagatttttttttggggtttctcgattctctgcttgatcatctagctcagtggagaacatcacaatgctgtgcatctgaaatttagacaagcgtgctacaggatgattctagcaacgaaaccacctcgattttgtcctgtgggggagaggtgaatgcactctcagtggtatcatagttttacttgtttcccctttatttttttgggtgaggagtgtagcaaacctgacacttcattcgtcatgatggctcagtatttgatttagggggtgtttggttacaccccactaaaatttagcccctgtaccatcgaatgtttgaacttccgttccgggtattaaatgtagtcggattataaaactaatttgtcagccgaagattaaaagacgagacgaatctagtccagttggttgggtctatatttcatactcctatttaaaagtcaaacgcttgatgtaacccgggctaaactttagcaggagcaaccaaacacccccttaggaattccttttcttttctgacaaatgcatgactggggaataaggaatactcactggtttgtcaatgatactcaatgatacagctgtacgggaaag

SEQ ID NO: 4295 - DNA, 831 bp, Zea mays
  Intron number 1 from transcript GRMZM2G031846_T02 (locus G RMZM2G031846) derived from phytozome v7.0 (chr-ID 4; pos 7 3099838 to 73100668 reverse strand)
ggcaggctacggtggctgcttccccgagcctgcaggtgctggctactatctccgatgttcccttccacctcctctggcttctacctcagccgtcccccttcctcttcctcgtagctcttcgcgttcctgtggatctgacattttcctcgtgaatccacggctcagatcgggtggtagatctggttggcctagtcgctgtcggatgcagttgccgagctaggtcgcggctgcgcggcggcggtcggggtcttgcgtcgccagatctggataggaaaacgccgcgcacaagctgagctaaattctgttcgattcgagttcttataggggttcttgtggctgcgtgttttgaattttttcccactggttctggggtgccgagaaagggaatcgtggctgactcttgttgccgtcgtcgagccagatctggtcatgctgctaccgtggatgtcttattgcttgatctcctttgttttttaattccttcggttcaagaatagcatcattaccatgagcatacataccagagaaacggagacagattcggaaattttcatttattgctagcttgtagttttggggtcctataatatttttcttggttctcttaattaattgagctagtaaatcaacaaatctgccactacagccgtcacgggcaaacataaaaaaactgaacaacaccaaattgaggcgcctagtccacaaacctgaactgctgaacttaaatgtctggaagccacagtttctgatttctgatggtttgtttttatgctcatttactctttctttcttccaggtagaccaccttgtgttgattcctcgagtcttcac

SEQ ID NO: 4296 - DNA, 458 bp, Zea mays
  Intron number 1 from transcript GRMZM2G169942_T01 (locus G RMZM2G169942) derived from phytozome v7.0 (chr-ID 8; pos 1 54127343 to 154127800 reverse strand)
acactgtctgcttctttggacctacaagttttgaggtacgatgcgcttacttttttcttcatgacttcatctacatatgttcggtacaaaccaaagagtccaatattgatgagacttcaatccgttgcaaccaagtggatttgtgttacaacttacaaccttctagatgtcttaagaattaacgattgagggtataaggtagttgagtccaaataatctttgttcatttgtcggtaaatcgtcctaggtttggggtttacaacaaccagatctgtttacactgattgtatacacgctactatattgctttatactgttttcatataaaaagtttcagtcgaatttgaaccaatttaacaatgtgaggaaaatagatcccaacctatttgagtaagtgattttgttgtttgataatcaacataatcgataaactaatgttttgcaggtgtttgtatttt

SEQ ID NO: 4297 - DNA, 818 bp, Zea mays
  Intron number 1 from transcript GRMZM2G105579_T03 (locus G RMZM2G105579) derived from phytozome v7.0 (chr-ID 4; pos 1 21609449 to 121610266 reverse strand)
cctcgtggcctggttccttgctctccttattctaggtacgcttctgcttttcgatactgttatttcattcaggctcaggcgtggcttcggcttcagggaccacgcgatgctttcccagtcagccagccgggtgggcggggcgcaatgggggttccgagtcttggaggtgtgtcggtgtctcgtttgatttggctgtgggtgtggttctgatagggtaggtcgctgtacctctccgctacggctacctcacttgtgccacgctcacgcttcgccagggatcgaactaaaaggctagtggtagtgctaaatctcgcctgagcgacgtagcatttaggctatcgagtattgatgtttctgtttacaaccccactctggacattcatgacgatatatgggggatggctttgctggggttttaatgtaatataatcacggtcccgggtgtcacgtttttagtttgtccaatttcgttgagcaaaactatggctgaaactactgctcttgctcctgcgcgctggatatttgctttattccactgcacgtgttttacccacaagccacaacatgccattgaaagattacaagtactagagcaaataggatcacgtacacacatgccatgtctggcaaggtgatattacaataccatctagttgtcgtatactgggcttactttatatgctgaattttctctcagggctgttatgtgtttgctctctgtgctcttccacacatcaactcatggaattctgttttcaactaattccatgttttatatcatgaataacaagaacttcattttcttgatgttaccagga

SEQ ID NO: 4298 - DNA, 960 bp, Zea mays
  Intron number 1 from transcript GRMZM2G514336_T01 (locus G RMZM2G514336) derived from phytozome v7.0 (chr-ID 7; pos 1 43881784 to 143882743 reverse strand)
ggacaagataagtaagcagtcttatatagtttgcccactcgagttttgtatatcttgacataaatgaattatgcaaatgttgctagagttcttttaggttgaagcttttgcttagttcagtgttgctatcggaaagctaaaattattttcttgccacctcctctgcattgttttactgcttcagctcctggtgcttctaatcgagtactatagaaagcatctctcttgataaatcgttgtgtgcaaatatagggtgcttatataatccatcattagagtatgaggcgtgctttattctgtgtgcttcccacaaaaaagagtagcctattataaactttgtattagagcacttgacgttctaagttttgaccacatttctctactattataatgcagccataaagattcaatttttatgttgggcaccataaagatgtttggcaccattcttcccaaacatttatctactattataatgtgtgctttattcaatttttaggattgttaggggtaaagtcttagtctcaagatagcatattgctgtttgcctatattatttagtgtcgattataattagtattgttgtttagtgcttggttcatactacatctaggcagtgttctaaaagtttgggaggaatggaataggataacggtcggctaacatacatcttttcttcagcagccgtggtaatgaatttgaatactgtagttactataatgaatgttttttaacttctctactcttctttactaatcttttagaactgtgtccttttctattatttctattacttcactgtgttgattgtcttggtgtttatactcttcttcagttgttctttgtgccaactgtagtcttgtacgagccttctctttgctagcctaataggattttgtgtcttttgtttatctctggtatttaatcttatactaaattggctcgtttgattttcagggc

SEQ ID NO: 4299 - DNA, 416 bp, Zea mays
  Intron number 1 from transcript AC200852.4_FGT005 (locus A C200852.4_FG005) derived from phytozome v7.0 (chr-ID 8; po s 114432396 to 114432811)
gatactcctacaccaggtgacttctcaaaaaaatgcaatgttgcaccctcctttccaaagacacagaccaaatgttctgcaaacctacatgcctgaagtgtcagattgatttgaatttttgcttttcctagctaagagatacatgtagtcctagaaacttatactcctaagctacaatctgaacgtgagtcgccaaaacttgctaatagaatccagttttcatatccaaagcaacaaataatgtgttttgacatagggcgggagatcaacggactaagcaagcatcccagtttcagcaagcaccacagagtcagtcaatacatagactctagatgcgagagcaatgagaaacattcctttgatttttctttttctttgcaggtcgccgccggcaccaccaccaccaccaaggctgc

SEQ ID NO: 4300 - DNA, 899 bp, Zea mays
  Intron number 1 from transcript GRMZM2G059225_T01 (locus G RMZM2G059225) derived from phytozome v7.0 (chr-ID 7; pos 1 35515668 to 135516566 reverse strand)
ttcaggaagcaggtgagggggcccagccggatcttggtgcatgctgtctgtgagtgtggatcctggtaccgcttgggaggttgatctcggcctctggggcgggcgggagagagaaatgttccagttttttctgcaatgcttggctccggtggctcccggattgggctgcgggtggttgcatggatctgcctttggttttgggttgtgctgatggggaatgagtgtggagactcctgatcccttttggggtaacttcgtctcgaatcaattttgaactaacagtgtaggaactaggagccacgggtttaaggctttcttttaaccgttttgtggcctgtgatgttttcataggcgcactttgtgttgttaggctatactgatacatacaaacacttgtcgaactttggccggccctttgctgtgtttcttcttttgccaattctctatgatctagtatcttagttgttttttttttgacaatttactgtttttgcatgcaaaaccagtagcatagcttgcctgtcaatgtgtaaattcgatatgccttaggatagtttggtgtacattttcggaaatgtttgattcatttgtgggttgcggaatgtatgctttagtttttgtcatgatttggacaaaagattctaggactcccaggaatcataaaattatttgttatttgaccaaagtaggtatcttcattcttcaatttcactcatgcttaatagcttgttcgatttcagtgtgtaccgtagtatagattcggtgaggctaacttaacctttgtatcgcgtttggggatattacattcttaatttgtattctttgggtcgatacatttggccaaagaacttgctttcttggttcatgaatactgcttaacttgttccttgcattaatag

SEQ ID NO: 4301 - DNA, 480 bp, Zea mays
  Intron number 3 from transcript GRMZM2G107867_T01 (locus G RMZM2G107867) derived from phytozome v7.0 (chr-ID 1; pos 4 4370209 to 44370688)
aagctcgtcgaatcttccagcaggtatttatcacttttcttggctggttacttctagtaacatgctttttttgagtcacaataggtagttatcaaagaacggttttatcttgttgctttgaattttgatatttatggatagtgcattcatattcttcatttgtttctgttgtgtttaatgtgctctcattaagtatctggattagttttgccttgccttatttttatcttctgatctgccaccattttgacttgcaagcatgatgtggtaattgctttgtcttagggtatcactattgcatgtagttcagaatttcaaatcatgatttaaacattacatctttccatggaggatacgacaattaaaatattcctttttcttttatatctaaattccaggtttgttttattagttgttttttcacattggaaaaattcatgaacagatcatatctggcgtcgaatactgccatagaaacat

SEQ ID NO: 4302 - DNA, 457 bp, Zea mays
  Intron number 1 from transcript GRMZM2G362745_T02 (locus G RMZM2G362745) derived from phytozome v7.0 (chr-ID 6; pos 7 2908176 to 72908632 reverse strand)
acccggagagcgtccagggcctataggagtggcaggtgcgtggcaggatcgcttcttcctttcgttttgttttgatgaaatcgcgtcttaataattaaacccagtagcagaccactgaatctccttttttcttgcttgttagtttgacttgagattagaaaagggcctaatgtttccagcaccaaacaaaattagcaatgaacatacaacattttggtggataagttcttaggtaaggagaaagcagatgctgatggtccgagagatgctaaactggccttctgccaatagctattcagcaggcatcgatctaataattctattgcatgtttgcataggatatcgaaaggacaagtatcttgaaaactatgacataaaccgttgtgttagctactcataggagtacatttttggcttctaggttgtttgaactattttgttttttgaacaggataac

SEQ ID NO: 4303 - DNA, 825 bp, Zea mays
  Intron number 6 from transcript GRMZM2G008638_T02 (locus G RMZM2G008638) derived from phytozome v7.0 (chr-ID 9; pos 1 47848519 to 147849343)
aggtgagtttaatttgttacttttaatgaactttacaaacatgtttgttagaatatgttgccgctcagcattcaacatatgctgtctattgtaagtagctagtagacagtccataaatttgctgttttcctagccaaagttcgccttagtggcacataaaccttgtattcctcctcaattgttctagttagtgtcttcgcttctcctccttgaatattacattggtttacttatctttgctcactgattcttgtgtttccaccagcacataattattaattttgtgcaaatgtaagtaactgtactaagtttttttctgttcctttcttgttgtagtaagtaggtcacgcgtgctagaatatcaaaatctcagaccattttattgagcagtcaaaagttgtaaaagaaatacagatgatgattaaacttggaataggagacatatttcccatagtaatcatgtgagtgtgaggatcataacttcatatgtttttttgggttatatctgtactgacttttccttctggcagcaaggttaactgttttttaatctacatagttttatgacatctattagctctgctgctgttttcttgtttctggaagatggacgcatactacaatagtaggctgccaattgcagtcacgtcattcctgatacattttccccttcagtagtgataagagataaaaatagcctacactgattaaactcaaatttcgtaggcagattatatgtatagttatatacagttccattccagggtagccatgtggaggtcacatgttttgcattgatttgacatgttttacacaggcagcagg

SEQ ID NO: 4304 - DNA, 845 bp, Zea mays
  Intron number 1 from transcript GRMZM2G119740_T01 (locus G RMZM2G119740) derived from phytozome v7.0 (chr-ID 7; pos 1 62798159 to 162799003)
atcccagcccaaacccctcaggactgatttggcgacccgggatcacgggaggattggaggggattgaggggggaattagtttatttccccctcaatcctctccaatcctcccgtgatcccctttagtttcgacataagatatatggaatcacgctctgtaggatttgaacctacgacatcgggttttggagacccgcgttctaccaaactgaactaagagcgctttcaaaacaaaaaaaaagaaaatccttttctattcctaacgtgtctcacgtccgtatagtatccacaaattcaagttatacccactttaatcgatctccccactactgcccataacgaagagagaattaataggtagggatgacatgatttgaacctgtgacattttgtacccaaaacaaacgcgctaccaagctacgctacatcccttttccaaattgttgtacaatgccattgtacacaattcctttcttgttttccacatcgtaatttttcataatacagatattttttttgtgtaagtactataatatgatagggtatgtagctctttctacacacaaatgaaaaacgtctatggatgcagatataagctacgatcataaatgcatgcatatgcgtagccgactatagcgagttttttttaagtggatccactaattttttttgaatagaaagtcaatgtatctaaccaattattttacaggagtactagctactgaaggctatttcagaataaaaaaaagtaaagtaaaaatcatttagcttgttctctcaatttcaattgaccgctactggatccctcagggcctcaggcagcccgcagccggtcagtccttcct

SEQ ID NO: 4305 - DNA, 917 bp, Zea mays
  Intron number 3 from transcript GRMZM2G154621_T03 (locus G RMZM2G154621) derived from phytozome v7.0 (chr-ID 7; pos 9 3226373 to 93227289)
taacaaggtatggaatatgcatttgaagtatgtttgtacttcttagttgttttgacttcgattttgattgatagaaaatcaagctacccataacaccattcaggcaatagcagttgggaaaaaaataccatctgcttcagaagatattctattgttgttcaggagaacgctgtctttgaaagcttactgcttggccatgctactctattttggttgagtcctatatgacactgctgtttccatatttatgtcgttcgagctagcaccatggcttcttttaagatgctagaaaagatttttattagcaatatttcgcataattatgtttttagctgtcgtttgctcaactagctctgttcttcgacaatgtagttctgacaatgcagtaagatgctttgccatgaatctaggctcgctacctggttaacttttctcataaccaataaacctgacaatgcttctgatgaactagattcctatttgctgtatttggtgctcagagaagcatgccaagggaagacttttagtttcagggctctgtgactgtattgataacatatatgcttagttagaaagaaattaagcagatgcctgcattgtcactggcaagttctttgccttctatgttgttcactttcatagcacttctacatcaaagcgaatatttgctgatcatggtcctgagcacatgaaatcaaaacttatactgttcatattgtactgttgagttgtcgaaataggtcaagcaaaatgatcagcactcaggagtcccattttgtggcatgtgctacattatgttaatgtgctcaatgttggctatgctttagcttgttatttccatactgctgaattggacaagttactggtgtaatttgtgggggactgatgtttaaccatcatcccttaaggtgctcgtc

SEQ ID NO: 4306 - DNA, 941 bp, Zea mays
  Intron number 3 from transcript GRMZM2G540589_T01 (locus G RMZM2G540589) derived from phytozome v7.0 (chr-ID 8; pos 1 48485200 to 148486140)
ttcttggtactgtcatactgtggttggaaccaaacctaggggtggtaatggatcatggccctaatatttgcttcacaaaccaacaaagcccttaattttgttagttcaaaattatattgttttatgatccggccctaacttgattcgatccgtaaatttgctaggctaaattaaatggcccgttaacacccctaaccaaaccaggcgttaagtataatattcatattttgaagcatgttagttaatacttgtttctagatatttatctgagcctatcatggatcatggctgtcaaaaccacaattatggtttgtgattctgtatatttatgatcttaattaaagggcttgattccacaattccagtcaatagaatatacatttttacaacctttatgtttaagatttgtaattgtgaccttacacaaaactctttgatctggtttagaatctgcaattgtacaaccttgatggaatctgacaaagaggcaccataccaaaggaaaaaatagcttgtaatattgaaacatggacaatcactatcaaatgtgatgctacaacagtacaactacacaatcccttctactatagcattaaactgcgtgaaagaagaataactattgtttgatttgtttggtggagaagcaatgtggaattgtgcttcttcaaaaaatggacaaatgttgcaacatgaagtttttttatatatacaatgttaaatatatatatatatatatccctggtagtggcaagatgatgagctgattactctttgcatacagttctaatatgcaaacagaaaacaaaatgggcttttggtagaaactagatatttgttttttatgttaaataattgtttttttcctgtgatgtgttttctttgctgaaatagctttcgttattacagaactttttggtagacataaagggtcctaatttgcc

SEQ ID NO: 4307 - DNA, 1004 bp, Zea mays
  Intron number 2 from transcript GRMZM2G005869_T03 (locus G RMZM2G005869) derived from phytozome v7.0 (chr-ID 9; pos 1 31566617 to 131567620)
tttgacaggttgacaaaaaaatatttcacagtttcaatctttgatcaattgttctacagtctcaattgtacctttcttgcacttacgatgttaccataatttgtcatttgggcatttccctctatagaatctgaatacatattaaatactccctatgttcgttttgatttgtcatattttagttaaaaatgaactagtggacgataaatattcgataacagaggtcatacatgtctagcatcattctcgcgcgtgtgtgtgtgaattcctccttatcatgtgaatacgcttaaccatatactctactttatgctcatgcataattgttatcagtttgttcgactaatcacgattagttgggctgattgatggcatggcgatcatcaattagtcatgattaatcacgactaatcttgattagttgggctgatcagtgccatgacaactaggatctatcggacgaattgataacattagtctacttgccatagctcccacaaaatcaaaatacatcaaagtttatgagaacgtaagttgcttccatttttttggggtgaaatggtaagttgtttccagttaaacgtgaggttgtaggctcactatatgaacatttactgtatgttataataatcgtatggtttgtgtgttttgaactgaaaactgagaccaattttatgcctaagcattatccaataatcatcctagcctgaagctattatttactgatgtaccctcttcaatgttcatcaagcaagctgcccattctgtaaaataaaaatattattattctgcctgctgcccatagaaaagttaatctcatgaattcaggaattgttttgtactgaagactgtcaccaattttatgcccaagaattatgcaacaatcatcctagcctgaagttattaactgatgtaccctcctcattgttaatttaagtaagctgcccattttgtaaaataacaatactattattctgcctgcagcccatataaaagttgatctc

SEQ ID NO: 4308 - DNA, 861 bp, Zea mays
  Intron number 1 from transcript GRMZM2G108285_T01 (locus G RMZM2G108285) derived from phytozome v7.0 (chr-ID 7; pos 1 55559766 to 155560626)
ttcgaagacgagtgagccctctttccttcccgagtgaaaaggacaacagctaattttcgctcctcctccacgatttgaaagacccccacctgttccggttacccgcatcgatatttgctcgatttttctggcgcctgggggcggggctttcgttcgcggttgcacagctgcctgctccgccggatctcgccgcgatcggaacgcgggcacggtttgggtcacggaggctgttcagtatgtttgactttgtgccagtgatatactgtaccacgttttaatctcaccgtcgcacttgtttgatgcgctgtttcgtcctatactcgtgctgtggggttagccggacaggactgtcctgcgccaaaattccgggcatgccgtgcctgcccagtatgcactaggctcagtaggtcgatgtaaggaggtaggtactataactgaactgtttttgtttttgcatctggaattcaggttcagtaagttttttttaaatgatctggttatggatgtcctttttgtttaattgacgacgggtagatgagtaattctttatgaatcatttaagttgtggagtgcatagttgatgtgaatagtgttcagtaaatcctggacggtgagtactctccaaagttagggcattgctatacttacaaagtggctcttttaggaagttattatagtacaaaattttaagtggattgtggagatccatgtgggtgaacctggatcgaagagaaacctgtagaatttgtggatcagttcctcacgtttttcttatgatatagtacatgatcttttcgccatattcaagtgattcactgacaattcttcttgacaatgcttgcttgattttttttcccacag

SEQ ID NO: 4309 - DNA, 789 bp, Zea mays
  Intron number 2 from transcript GRMZM2G012140_T01 (locus G RMZM2G012140) derived from phytozome v7.0 (chr-ID 9; pos 1 26719994 to 126720782 reverse strand)
catcttcttccttcttctctcaggcgcgttaggtatgtatgttgcttttcttcatcctagattataagttttttttttaacttttaagttaaaaaatctcacgcttaactaaatttatataataaaacaataatatttatactgaataactcataatggagggaatacgttcgagccttcgaggttctacgcaggtcctgacgccttttcctgagtcttcagagaatcagaggcaccgggttttctagttgctttttcctcacttctctttatcccttttttttttctgtcatccctccaaaacaactttctttagtgagattctttacttcgctggaaaatgcatgcgtgggcaatgtatgccaatgaaagtgtagaggattgcaacttcttgataagctacaaaggggtaggagtaggatatgcctgtgctttttacacctttttccatgccttatcttgagtcaacaaaggcgtaagtgcgcggtggacacgtgtgccatttccaagtggtttatctgaaccatcttctcgctattatctcgttttgaaaatcaaagatgctgtttggcacgtgtaactgtcgaaaattctgctctgaaacactgaatcctgaactacttactgtgtatgggactgcattgctgttaggtgcactaactaactatacgcagaggtcaatgtgccgccctttgtttcatgtgcattcagtaaacgtgtacctctgtctgctgctgtgaatatttatccggatttacttacagtcctcacaaacccgcaggcgtactg

SEQ ID NO: 4310 - DNA, 981 bp, Zea mays
  Intron number 1 from transcript GRMZM2G035430_T02 (locus G RMZM2G035430) derived from phytozome v7.0 (chr-ID 6; pos 1 61016105 to 161017085 reverse strand)
ggccggggccgtggacgtggccgtgggcgccaaaggtagagcatttccttcattttgttgttcgtcctgctattgtttgcaaaattgcaagtgttatgggaattggaccatagacatgcacttggtagtctgctttagtttcgttattataattctagtttatatatatgcaccccctttgatgggattctgttttcagttccttctatctaagattacccaatgatattggtacgttgactaatgaataatactgcaacaataccaaatgatttcaagtaatgttattatagcacatgaatagttaaaaacttatgaaaaagctgatttatctatttttctctcatttacttggtagatgaaaacagttattctattctttgtactctagaataacgatgcatctagaacttgcatcttatgtaacatggagcaaaaaaaatccctcaaaaaaacatggagcaaagaagctgagtgcataatgcactgcattaaagagcggtgaatggggcaacaaaattcaagtccacaaagagaggatagtgacacattgtattagcatgaaaacagggacaagaataaatatgaaacagggcaaggtggatttgaaacgtggtgtgcaatgtagcttagcacagggaataaaagatgatgatataaatgaagtgctggatgggagcttcaaaaaggtttctggtagagttagacagaggtagttgacctacatcattttgctcgtggaatttgtatatattgtattattgttatatttttaaattgcaacacttatttagaaaaaaatggcctgaccggtgagtgaactctgtactgaactcagtcagttttgtttgcatgaacgtcctttatattatgaatattgatgtgatgctctgtcacataagcttgatatttaagatcgtttatttatgatttgaggttttggattgctgtctaatgtttcagtattgctcatgtaggaga

SEQ ID NO: 4311 - DNA, 742 bp, Zea mays
  Intron number 1 from transcript GRMZM2G054093_T02 (locus G RMZM2G054093) derived from phytozome v7.0 (chr-ID 9; pos 1 03955955 to 103956696 reverse strand)
gtcacgcccagcgagagctccgaggtatacatgatgcttgttcatattcttttccgcttttggcattaaaggcgctactggattactacttctcaaattcttcattctcatttcttattgcccggtgttattcacgcgcactcgtttttctcgtcatttaaagaccaaaatgggagccattttctataagtgaggctgaagtaaaatctacaatctagaaagaacactgcacttagatcacaagagtacttgaacactgaagtcaaatataccatttggacagatcaggtgaacttgtatggagaagatccagtattcattccctttagagaaaaaaaaatggtggtgtcagaagtgaacaagctcgattcatgttaccgccgtttgttttaagttgagaactgtaaagttgttactagcatcatatcaggaagggtcagattaagattgcacagcaattattccccgtggatttcagttttttaattatgcaaaatattttccttgtcgccttaatcttttttttctttctgcctcttcatcggtttctgatgcatccttttgttgattgttttgtgcccatgcattcattagttggtgtcagataattgaaccagactcctgttcgagagcgtcaacgagttctacgtttagtttgctacatatgcgcctcgatttcactaatccttcctaaatttctattttaggttttttcatcagaaacaaaggattctggtgtgaa

SEQ ID NO: 4312 - DNA, 668 bp, Zea mays
  Intron number 3 from transcript GRMZM2G177631_T01 (locus G RMZM2G177631) derived from phytozome v7.0 (chr-ID 7; pos 2 6489307 to 26489974)
cagatctgccactgtatgtgctgtgctcatccgcacttgttgacttatgagtagttctttgattactttcctttgggtgctgagtgctgacggtgcgctacagtctgtatgcttattgctgaagtaagctgatgccatctgcttgcactagatatctaatgagttataagagtgcgatgtacacttttattaaactgttaatctcaaactaggcacacacaaaagtgatatcaaatttagttaggaaataaagggttacagtatttaatcacagtatatctaaaaatatgcagatatagctttgttattacttactacattgctagatgccacacaactacatgagttggagagaatccagaatacaagctcaactgtttatgcaatgctgaatttgtagactaagatgatacatcaactatattttttttttaagtggtgtatctgttgcttcatttcatgttaatgtttttcatcatgttcgttgcatgtatattcatagaaacctacatagtggtgtagataattttgcattgcattttatgatcttatctttatcttctaagtcatctgcaatatagtttttgataacgaaaactttgccttttcttttcatagagtattactagtagatggttctaaattgttatgtaaatttcttgtgcaga

SEQ ID NO: 4313 - DNA, 949 bp, Zea mays
  Intron number 1 from transcript GRMZM2G054470_T01 (locus G RMZM2G054470) derived from phytozome v7.0 (chr-ID 3; pos 2 08060129 to 208061077)
tacgtgccgccggcgacaagcacccaccacaccaggtacggccgccccctcttcccttcctgatgtgcaaaactaagcatccgaaccctaattaagctatttggctatctgtatttggatctgatctgtataaatgtattatgcctactaatttctatcgggtgtgcatgtacacccatgtcctttattgggtctacccttgtgacggtcgactagtctgtaggcctgtagctagtgtttgagctaattaattcgattcagctaaactgttttgtttgttaaatggtgaatgttcgatcccgttgtccatctattatttgttgtagatggcttagggcattctatccaccattcagttttagatctttcttaaaacatgctagttctgctgaatagcgcgctttcagtgaaaaaaatatcaaacctgttccatctaaaaaggaggggggaattctagctctctaacttactgtgattgatattccaaccattctagtttcttgcacttatgtttttccctgtagtggagcaccggtcctggtttctattccaaaccttttgtggattggtgcaagatggcacctgtctggctgttttggaccttcacctagctgtatgtattcctggatgaagactatcaagttaaattagtgatagagggttagtatgattgtgcacatgcattcttcttgcatccaagccgaatgattagctattgtttatattgttttgataaaaaatgattcattagtgacacctcaagatcattgaccatgaattcatcttttgttcatggatgccttcgattaaagataagtcaatgcatttaagaattaaaatggatgcaaacgttctaaaccagaaaccaaaatgcttgataacattttaatcaacctcaaacttttttaacgctgtggatgtgtttattttcatttcattttgcagtcaa

SEQ ID NO: 4314 - DNA, 834 bp, Zea mays
  Intron number 8 from transcript GRMZM2G035008_T04 (locus G RMZM2G035008) derived from phytozome v7.0 (chr-ID 3; pos 4 560233 to 4561066)
cagaaaaaggtatttctgttttttgagaaacaaatgtttgaaaataaattaagattcacaatagtaatatatccgcactttttgtgttatgtgaggtggagtcaagtggaaagatgatcttaaatatacatgttgtcatcttgtatggtgattatgtagtaaaattgatggcaagaaaactactggttactatgactaacacaaaataaaacgttctttttaaaaaaaacttgggtataccgtatactgttattttgatactatggcacttctgtcatgttatatgttttctaaagaatgcttccctgaagcagaacagtcatgttcattatatttcagttatgcatcagtatttgcacttgctaggttgatccttgatttctatggaattcaagtgttggacggatatgtacttatggactagctcagttttggagattagttgttttagttgtttttgtgtcatgtcttctataaagcaaataagttaccatggatcaattttgtgtcagaaggtgactatatcatctctgacaattggaatttcagttgtgagaagctttggtgatagatttttgatatatttctggtttgccactttgtttgcttgtttttttgcatgttttgaacttgttttattattgttaggtgaagcttcaattgatgatatattcttgtcagtatgctctttttgtgcaccttgtttttaatctctggcagaggagaccttcacctaaaaaacaaagatatatgttgaaatggttctttttaaaagattgcaacgtgatccgggtgtcagagattcagaaggtcttggacatcgccgacgagcgt

SEQ ID NO: 4315 - DNA, 1006 bp, Zea mays
  Intron number 1 from transcript GRMZM5G877316_T03 (locus G RMZM5G877316) derived from phytozome v7.0 (chr-ID 2; pos 1 25696431 to 125697436)
aggtacggatcagctctggatcttcgattctgcttctcgtagcgccgtgcctagcggatctatagagcccgtcgcggcagttcgatcgatggggaactggatttttgtttgatgggaccttcggtggtggattttgttgctagaagttagggttttgagtggattcagtgcgagactgcgagggtcggttgggtggggtccatggtgatggttcatggagcttaggtgatggttttaggttgtcggaagttagggttttgagtggatttggtgcgagggtcggttcgatggggttcatggtgatggttcctgtagcttacgtggtgaatttgggttgtcggaagttagggttttgagcggattcggcgttacggtcgttggatcgagctggtggtattgcagcttgctaggttcgcgatgatttgagcttttgttttgggtagattacggtggcttgatgtaggttttttgagaccctgggttaacaaactgttttgccagtagtgttggttcctcgatgccttgcaataagatctctcgaagctcatttccttttgctgacagtttgttgttttttacatcgatccgatgaagtgcatgatcttctaattttgcatggtttactggtctgctaataaaatgcaattcaatcttgaagaattggttaaaaagtggatgccattgaatatcattcaatttcttccaaaggatttggaatgttgagttgagagtatcatgtggcagtttgatgttacagattttcttcagtgtggtacaggaaaataaaaaagtttgttaaaacgcgatttgtaatgaactcatttgttagtcttataagtcgacaaacgaactgaattagttttgataacagtagcatatagttgtcattatttattagtaaaccgagttttctttttaggaggctgtccatggtatgtgttttaacttctattctcttgtttcctgtgcagctcgaaggagaagcccactcttgggtaagactctt

SEQ ID NO: 4316 - DNA, 746 bp, Zea mays
  Intron number 1 from transcript GRMZM2G156409_T01 (locus G RMZM2G156409) derived from phytozome v7.0 (chr-ID 8; pos 6 1018774 to 61019519 reverse strand)
agcaggtactgctctaattattgtgcgttgtacatcatgaaataattacaaaagcaaaaaaaaaattaaatgttttcttcaaaattattagtactcaaattatttggaaaaaaacattaaaacatccatataccttctctctcttttttttattcttttcattccatacagttgactctattaggtatttcaaatgtatacactttacagcatacaacatactatacccactttgtaaatacatattatattacacatggtaccaatcctgttttccacgcgcttttacatacatttacactcttattaagattatgtaattaagaacaactaggctgcaaatctgttacatgaattggcagttactatttgctatttcctttttaggtaattatatttttttaaggtgatgcctctccccaaaatatacattatggttatcaaacttttaacaaaatctgtcccaaccatctgaaatgcacatggagaggttctttgcgtgccatttgatgcatctttacatgtaacttacagttcataatgcaattttgtaaaaaaaatatgagcaccttgttacacaaatttatttaccaaaatgtccatatatagttttttcctcaccttttcttatttcatagttgatgcacttcttcaattcaatctaccaaacatgttcttcatggtcttcaaactccatttttttaatggcagggaacagccatccacgctgagattccagcagcctt

SEQ ID NO: 4317 - DNA, 814 bp, Zea mays
  Intron number 1 from transcript GRMZM2G100716_T04 (locus G RMZM2G100716) derived from phytozome v7.0 (chr-ID 4; pos 1 50464986 to 150465799 reverse strand)
atatcaaggtatctgctattgtacacccctttttcacctaataatactcagagatggtgtgttgcataaggcctacgcagtacgcacttattttatttcactctaatccatgaattaacctgttgagttaatttgaatcaacaaattgtaggcatacctgtttgttaattacttaattgtatattcctgtgctgtttttttttgtctaagcttctttgcctgatgactgaaccccctccccccctgtttttactttagtagttttttgagtccggcttcttttggactctttcacttatgtgtggtactggcctccgtaaggagttcaatgttgtaacctctggtctgctatagaccttttcttcttaatatatttaaggcgcagttcccctgcgctttcgagaaaaaaaacaataacttggaactaggagttcattaacgccacgtgcattgactacagattagattataggctttggtttggtttcgagaggatgctttgctatttaatctccgtaatccataagctgtgtacatctttgttcagatttggtaaattgctccccccaccctccccctgcacttaacttctggctccgccactgcatccaaaaacaccaaacatgccctatgttttgactaatatccagatatgtgtgctaaaattggacaaattatttcaagctgataactatacatgttaagttagttagctccttgtttgattctgctttagagcaagaaaccgactaattaagtctcgttccctatggtttcaggcaaataagaactgtctacttatagtaacaccaca

SEQ ID NO: 4318 - DNA, 863 bp, Zea mays
  Intron number 1 from transcript GRMZM2G172932_T01 (locus G RMZM2G172932) derived from phytozome v7.0 (chr-ID 8; pos 1 71330640 to 171331502 reverse strand)
ccagttgtcccgcagctcggatcgtctcatacctcgtaagcacttctaaactgccctcgtagtcgagttttggatctgtgctgcggcacagcatcacttgtaatatgttagggcacctttgttgggatgtttgccaagttctggattgtttttttttcgcgatgtaaccggcaatgcgactggatctgctgattttggacctgggaatgtcctggtccagtgcttggttatctctattttgcaacgaagattattagatcggtttggtggttctgcgtacttgagtgggatctctagtgtcggatctgggggaaatttcgtggtccttttatttttacgacactcgacctcggagactaatcactcggtttcggaaatgtgactgttagacctttgcgtgtttatcatcatagcttggtacagtattggactacaaatttcaggactgaaaactagatctggaactgacatccccccccccccccccaccatatagaagatttagttcatgaaattatttataatcacgaggaaatatcgattcgatatgctataaatatggatgcatttagtactcagtaggcgattcagtgattgatgtgtgtaagacggtttttggaaccccatatattgttgggttctatgtggtccgcgcaggagttcagtgacatttcggatctgaacagcagtgacaatgtgagcttgctttctggctcagtggtaaatgcctatacatccatgatctaatcaacctgagggagggtactgacagtagtaggcgtttttttagtattttaagtttgagtgcttgctgcagtatctaaaactaattcctatgcgcttcccttgtttctagggcgaaa

SEQ ID NO: 4319 - DNA, 649 bp, Zea mays
  Intron number 2 from transcript GRMZM2G347471_T01 (locus G RMZM2G347471) derived from phytozome v7.0 (chr-ID 8; pos 1 04452248 to 104452896)
gcagagttggtgacagaaccatcactgtaagtgcacaagatccacaccctcttaaccactccgtagtgaagattttctacatgggctcacctgacagcaacctgcaatagttctatttatttgatattttagtgtacctttttacttgcaactcaattaatcatgctctactggattaagagtttttaaactggtcattgcaaatatcatatgattttgtagattggttcatctacgatctttctcatctccttcgaatttgttctgtttatacatcatgtaggggggaaactggaagccatttgaatcgaatatgattccaccacctctaactctgggtgattaacccacttgaattagacttcacaaaagcaattgctatcagaaaccaggtattcaaattccacctgtcaatgcatggtatgaattagggccttggctagaaaatgggaacatataaatttttacgtgctagatagttgtgggagtgtcagaatctcattctttctaagaacaccatggaaggtatggaatttggcaatttgttctatagtacaggttagtaggcttgatagtttaactatatgtttgcaggtcaccgatattgtatttaatgaatttgcttgacatcccaaggtctatatttgga

SEQ ID NO: 4320 - DNA, 713 bp, Zea mays
  Intron number 1 from transcript GRMZM2G082894_T01 (locus G RMZM2G082894) derived from phytozome v7.0 (chr-ID 8; pos 1 21903146 to 121903858 reverse strand)
tccggtgggttattgacgccatcgtctctctctgggtacgagaattctcgctgctaaaatgaattgcttataagttgcttcttctatgagaacatttgggattagtggcgctagggtgtttgatttgtttcttcgatgaaaatattttggattggctctagcttgtttattttgcttcttcggtgactgactataggaaataaatgttagctcggctgaaaaatgtcatcccttgtgttggactaggtagcttaggttgatacctagaactgctcaaccaagaacgccttgctttttaacagcatcattttgctgttcatgttgtagtagtttttcaactgacctgagatttccagtcaatttacagtttcaccaagtaatgttgtttggcggagttgtactactatgcacttgatagtattcgattgtgcactgtgtcgtagactcatgaaaaacttgagcatttagattccgtggaatcttgacactgaaattatggaaccttggtctagctagcttactctatggctcaactaacatttataagcttgtccatctgataattgagtttgtgcataccacaaaatgccatacaatctttgtgtttattcattcaatacatgattttagttgattaaactgtcattaatttggattttacatctcttctgaaaacagctcctcacaatactgctgcctgtactggctctcgg

SEQ ID NO: 4321 - DNA, 400 bp, Zea mays
  Intron number 1 from transcript GRMZM2G365250_T02 (locus G RMZM2G365250) derived from phytozome v7.0 (chr-ID 2; pos 2 04030426 to 204030825)
ttattggaacctggtttgggaaaaagagtattgaggtaaaagtgttatccagaaattcagttttgttgtgatttttttgtgtttccggttgatgcttgtaccaatctctgactttctagaccgtagttgcctaattttagttgtcatctttgaagtttgtgaataagatctgaaagatttgaagtaccagataacaccgatttcatgttcttggtgtgtgaactaaaaccaaaaggttacctatgctgtttgtgcatattaatgagattctggataaccttatgcttgttgattatgtagtcttcagttatcttgttaaatcaacttgaacaataaaggcttttttttttccaattcttatccaggaggatagggtaatagcagtttcacttgcaagtaa

SEQ ID NO: 4322 - DNA, 942 bp, Zea mays
  Intron number 5 from transcript GRMZM2G365250_T02 (locus G RMZM2G365250) derived from phytozome v7.0 (chr-ID 2; pos 2 04031653 to 204032594)
ttattaaggtgtggaactatcgtccctagttaatggaaaggcatcttgttgcagagatgtaactattcaaactttctagattttttctgtaaatttagtcataatctcatttgatggtttacctggattctgcacaaatgtgcgctgtaaaatctgagcctgataggaggataaaatggtatctagcatgcctttaggggttacttggattgtagtggccctgccattactagcttggcttctgatggttatggaaattggtccagcctccagctggaaatatctttgatatcgcaaatcacaagcctgtttctgcaaaaaccatcgcaaacatcactattccaaattatatatttttttagttttgtcataagtaaaagttatctaactttgaccaagttatagaaaaaaacatatgttatctacaataccgaataaatgcactataaagacatattttgaaaccaatttgatgttgtagaagttcgtttatatttctataaacttggtcaaagttagagagtctgacttaggacaaatctaaagtaaagtgtaatttggaatggagggagtgctaatttacgtggcttatttaccttagttaaattatggaaatgtgtagttttgaagtggctgtttttatatgggacatggactatttctataaagaggactttggcgtcagtcagttaaatccagaccttctggatcaacgggagctactagctgttgctttcctggcacttttcttgtattcgtcaggaatattcagctcgacataggctgaacttccactgttcatactttcaagtaattataagaagatttttgtagtatttgttatggtttgctatgcctttaattgatctaagtttttattctcattttccctttataccatgtacagccaaacacacagtctaggtcacaaaaggaagggtc

SEQ ID NO: 4323 - DNA, 547 bp, Zea mays
  Intron number 2 from transcript AC217252.3_FGT005 (locus A C217252.3_FG005) derived from phytozome v7.0 (chr-ID 3; po s 22913972 to 22914518)
aggagtatccgtatctgatacggtatctgacaccggtacgtgaattttgagaagtatccgcgcatcataggcaatagcaactccaaacaaaattagtacaagcacaacatattacatggtacaaagtagaattaatgtctataatttagagaaatttacagtgtgcatatagccttttgtttttaagctaaattagtggaggctcaaagaggcagaaaacaaagctgtacaaatctaagatgaacctaggatatagaaggaaccaaaggaatccagctctgtttggagaataaaatgatgaaacagtgtgtatatgtatatagtataggttatgagcaggtttatgtctatctgtttgttgtaggatcctagtgcacattgataaccacagttttagaaagattcacgatgtgagtacctcatttccactacaaaattcagtttcttcaacacatcacgtccgttatggctcgagcgacagatgaactgtgtcaaatcctaaaataatgtagcaagagggtcatatattcacatacacaacaaagaa

SEQ ID NO: 4324 - DNA, 568 bp, Zea mays
  Intron number 2 from transcript GRMZM2G405699_T02 (locus G RMZM2G405699) derived from phytozome v7.0 (chr-ID 6; pos 2 69007 to 269574 reverse strand)
gttgcgccatacccacatcccggataagtattcaggtacatctcctgcactctcctgctgcaaattctttctctctctctctctctctctctctctctctctctctctcaactcatatatcaatacgcttaaattcgattgaaaataaaaactctcatggggaccttagagcaaaaaacatatggtttgctttcttttcattcctttcagcttcgcagacataactgtagcttgctgcaactagtaagtttgattttgtcttctttgttttgaatgcccttctgaccttcaagcatgtaatgtaagctcgcactttatttctgtactatcgtattattatctgtggtcgcatgttacatttagaatccaatgtagtattaaccgatatccacattgattcaaccatggcccaaactaatctggtacgttgcaacagtcagcatgccccgattcttatcctctgatgcagaaccaacctttcacaatccctcctccgcctcagctagtttcttcatattctttggaaacaacaggttgtgcattcagccttgggtttgactctttcact

SEQ ID NO: 4325 - DNA, 1014 bp, Zea mays
  Intron number 3 from transcript GRMZM2G303661_T01 (locus G RMZM2G303661) derived from phytozome v7.0 (chr-ID 3; pos 3 0543197 to 30544210 reverse strand)
ctttgtcagaaatcactctggatacttgtaccaaggtgctttactcattgttctctgtagctctgctattagttcttgtgaatgttaaataacactttgcctgacagtatagtcttttatattttcctcgtctctcctttgtttggtttgaacctgaggttgaagcattttttgacaactaggtttttcgttttgtaactagaatatctttcatcaatgaaacgatataaaaccctccgacatgatgtaaaagaaagcatgctttgagcagcgtgtcttttttccttccctgttttgctggtcattgtaagctcatcaaacctggaactcaccatgaactaactaatgtacaagttccacttttgcatggaagcagtttttcttagaagagagtttcctttggttttataggaagcaactggaagcagtttaatcaaaaagactttatcaaacttttcattgtggctattagtgccatactgtcatttgttgcaagcaccatcgtagtggttgattccatctggaatgcttggtattttgtatggttcaataaagtttaccgatggttaaacccatagtttgttgttttagtaagtcagactttggtgatcctagagattattcttgaaacagcgaaaagggcctctatcctagtggttaagggctttcgagtagcacctccaagacctaggtttgaaccccttgagggcgaattttcaggcttggttaaaaaaatcccctcgctgtgccccaaccgctctcgggttacgatgtcctgtgtgccaccctccggttggaccgttgcagaatcgacggttgacgtcgccctgttagtgatggggggccagggttcggggattttctcggacgggaccattgtttcagtctcttcttaatataataccgggagggtggtctttccctccccggccgagtttttattattcttgaaacatagtttttgtttgacttctactaataaagtcacagaagatgctttattggttacaggtt

SEQ ID NO: 4326 - DNA, 488 bp, Zea mays
  Intron number 3 from transcript GRMZM2G005456_T01 (locus G RMZM2G005456) derived from phytozome v7.0 (chr-ID 9; pos 5 7349236 to 57349723 reverse strand)
ctgttaaagaaataaagagagaatatatttgcaaggtaaattgaaacctgtgtttgtcaatgttattgctgaaatcagttgacatcgttagttcttcactagcctccttgatgcattctgatcttaaggttccttggttctggtccatcttccatcttcatctattcttccttttaccagtctattaggcttgtctctctctcctggtacagaatctttcctttctttttcttgtgctatgggaagtcatgacttcaccaaaattagaggagcgttcacgtctaccttgatctttgattgcacaagagtatatgattgattaaccatgaatgattgtcttcctttttccggtctcttcctttttttatttaatgtttcatcaagacatttttctatgtacaattatgggattgtttcattttgcttcctgctgtgaacttaatgctaactatgatgttatttgcaggtttttccatttcgcttcgtgg

SEQ ID NO: 4327 - DNA, 1045 bp, Zea mays
  Intron number 1 from transcript GRMZM5G835658_T01 (locus G RMZM5G835658) derived from phytozome v7.0 (chr-ID 3; pos 2 11760842 to 211761886)
cgctgaaccccacccgtttgcccacggccaagcaggtaccattctttctgttcgccggttgtccaatagtctcttctctctctgtgagttccatagaacgcggccagaaacctcttgctctcagtttccgtcgatgtgcaagccgccaggcaccactagctttatccccctgttccctcaaatccctcttctcgctgagctggacaccgccaggagccacatcccacctcaacgtcgggccaacgccaggaggcagcagcgccgcccttcctctcctggcacggcggcaacatctcgcaggcagcgccccaccctgccacctggcacacggcctgcaggctgcagcatcgcaaagccactgttccagtcgagcgtcgcgtgcaaccatgcatttttttaattccctttggtttacacccataaccaatgtttttaagtccctctctactactgctgaaagcctgtttgctcaagtaagtttgtccttcgcgcctaaggtgttttaactgtgcgatatgcgttcaggaattcaaaacactcggttagccaaaaagtactacaacttggctgcttgccactttcactataaagaaaaggtatattctcccactccgtctctggtgtgattagcttttcggggttgggatgtgtgagtatgtggactttgatatccgtatctacatgatcaattattggtaaaaaggtatctcaaccttaaatgtatctattatacatagaagaactatcaactaagttcatgttttaccttataattatacagttgaaacttcgcatgttgtccctacgtacataattctatggatgcacattcttttttttcccaaaaaaaaatctcacttgaaagaacgaatatagggaatccgatctacatcttcttaattgtacacgatttgctggtcgtctgttaacacactatatttttcccttcgcatatttatttacatagtttaccggtcgtttattagcccaatttctaattgattctacaggtcagccctccgtgtggagcgaaaacatctctaat

SEQ ID NO: 4328 - DNA, 591 bp, Zea mays
  Intron number 2 from transcript GRMZM2G151434_T01 (locus G RMZM2G151434) derived from phytozome v7.0 (chr-ID 2; pos 3 8977774 to 38978364)
gatctgatccaatcgtatcccaagttctccataaggtgaaagatatatgtgtatatcctctttgattcaatacctttggagagagattatttttcggtgtttaagttcttgatgctggatctctgtctttctgatgcgtcgattaattattggctgctgctttgagggatcggattgggtatgaatggttgctttcagggttaatccgtgttattgtccgggggtgtttaattagtttaattttctgctgattaatataaaggtggcctttttttccaccccagaatctgaaaataaaaggatgctcctctcattaatctttgtccactgcctactattggttttcttttccatatacgtggtggttctgcgataaacaggcaggcgacatatttttggagatttcagttttgatatgacagcatgttcagttggtccacgttgatgttgttttttctctcttcttttcaacctattgtggagggtttgaatcttatacagtttggcaacactatacatgagtgttcgtcatataggcacgtattaccatatgctaatgggcccatgtttctgtccctatttccagagatt

SEQ ID NO: 4329 - DNA, 827 bp, Zea mays
  Intron number 3 from transcript GRMZM2G151434_T01 (locus G RMZM2G151434) derived from phytozome v7.0 (chr-ID 2; pos 3 8979469 to 38980295)
agaagtacaacaaaacaagccatttgaactcccaggtagtgtctttaactcactctacatgttgtttgtcactgactctagtaccatgtttattgattggcacaatgtgatcttggaccattattccatggagtgcatacctattatttatcaggcctcttagactacgctttatatatatataatgtctggactgatgtggcttttgtttcatgaatgaagtgtgctatgcactacacctctttttaactccatgtgtcataaatggtttgtaagaacagatgtcaagcttagattatgttacctttgtaacttgtttctctgtgaaggtatgatcgaggaacataatcagatgttaggctagcttggattgtgttagctttcacagacatggtttagtttttgcttgatattcttcaccagaccaatgttcttaaatggagatgctagggtaaaggcaacttgtttatcttaaccatagagcccattgtttaatttctgctaagtcctttgtttcgtagaagataacagtaattatggcattttactgaaaaacatttttaagttctggagggaaagcctttagaaattaatttttgtgaacctgtgttggttctccatgggttagtttatgtttgatattagttttacagatgccatgtttttgctggatgtcgagatcatttttactttattaggtataaaacatttctccattgcatatgataacattttgttctgtggttgacttttaaaaaggttttccctcttatttttgcacctttgacttattgatatgggatacacacaggttcaagcagacccgc

SEQ ID NO: 4330 - DNA, 554 bp, Zea mays
  Intron number 1 from transcript GRMZM2G144338_T01 (locus G RMZM2G144338) derived from phytozome v7.0 (chr-ID 6; pos 1 12906893 to 112907446)
cacggatctacagccgacgtcgagtgaggtaaacgtctcaaattcctcatctccactttctgacccggtaatggacaatgtccctatcgagtgctccatagacttaatgttgttgtcaaattggcgtcaaattaatttctttcactgtggggtttagtttggtcaaattgtcttggaccaaaaaccgtgtaccatcttaagatctaccaacatctattcaccattgttcgtaatgcttggtttcctagcatgctatccattcaataaagcgttttgctcaaggcagaagctgttgggatggagttcttgagatgatcttgccatcattctcagctcattgacctaactcaaatggtttgggaagataaagaggatttattgatttgttttggtgatatatggggttcgaatatatttttaggtgaagcccttggggataaagattttttttctgtaaaaatattgagcctatcatgttcttatgcatcaaattaacaatcctctgccacaaaaaatttaaattattgtggatttgctcgtgcagcttaccatta

SEQ ID NO: 4331 - DNA, 530 bp, Zea mays
  Intron number 2 from transcript GRMZM2G051038_T01 (locus G RMZM2G051038) derived from phytozome v7.0 (chr-ID 4; pos 2 5372030 to 25372559 reverse strand)
ctggaggtactatgtttcagattcactgcttggagcgaacaacatatttatcagtgttatgagctctgtgttgtgacaagcccacctctcgttggtacaattgttacctatacatttttctctacaagctccagatataagtaatcaaatcatagatgatataatcattggataaattgtatattcttgtattgtattcccttagttccgaattatagttcactttggttttgtcccaagtcaaacttcttaaattttgagcaatttatagaaattcacaccaatatctgcagcatgaagtttatttcattaaattctccatgaaactaatattggaagaacatttatttgaaccttgagatgttgacacattttttgaaaaacaaggtcaaagttagagaggtttgactcaggacaagtcgaactgcactataattcgaaacagaagcatgttacctgtttgctttcttcaatactctttacctatacgtttttacaattgcaggtcaagcttctatctgaactaaaaa

SEQ ID NO: 4332 - DNA, 765 bp, Zea mays
  Intron number 3 from transcript GRMZM2G042195_T04 (locus G RMZM2G042195) derived from phytozome v7.0 (chr-ID 4; pos 1 62049271 to 162050035)
agctcaaccttcctgtcagactccttttttagtaggtaatgttgtattcatgccgtgctgcagtatattaggatctgtatcttcttaagaaactatgatatgcttggtcccttatagaaagctggaaattatttaaggttcgtttcatatttgtgcatccttgatggtttttagtttgtgttcaatgtcacatgctcattttatccatcatgtttcttctttgcttgagtagatttttgttccgaccaagattatagttgtgcttgtctaaattcgagatattttcatttataaatatttgctttatgtttgtttacaaattcattgttttactaattatacatgacaaacaatatctttaatttttttcgtaacaattttcaagctaaattcataaggtccagactccagaaagattgaaagcatagaaaatgcttggcataggcagatcattgtttttttttgcattcctagggtttatataattgattctctaccatgtgacaccaacctcttatggccctttgtccttgagattacttgtactatatcggcagtgtttgtttatttgagttgaataaatcacatgacttgaactatatgtactcagtagccaaggataatcatcatgtgaatgcaaatgaaactgtagaggtttctctatgttttctaggtttgagatttctattttctctattttatgaataatattgcattaattggcttgcagcgacacccgttcctgcacatccacacctaataatt

SEQ ID NO: 4333 - DNA, 842 bp, Zea mays
  Intron number 1 from transcript GRMZM2G168716_T01 (locus G RMZM2G168716) derived from phytozome v7.0 (chr-ID 3; pos 8 6663204 to 86664045)
gttttggcggcgcgcagaagtcggcgcaggtagttgccggggttcgcggcgtacagcgcacagcacacgcgaggaggaggttctggcgacccggatttattttgggggggaaagtgacctgcacggcggggattgcgctagtttagttaggattcgcccccagaccaggaggacgatgcacacgagaccagtcggccgcccggacggatcgatcatcagttgaagacgaggctgactcgctgggccccacctgccagtggcgtgaactcggtagggagcgctgcgcgcgaactggaccgagtagtgaggtatagagtgggctggtgggatggaaacggcccaaacccaggtttgtctctttccttttattatttttttatttatgttttcttttcttattttaattcccacatttcaaaattcaaattcagatatgagtttcgaattctaatctaactacaacatccataataatggcatgaagccaagggataaacttaaatatttatttaggatgaacaatcaagcaacacccaacctgatgcaaaactaaattattattttgttatataattatcatctccttttgtttattaacaaattatttctcatatgctatccatataccggagtatgtgttttaagaaaataattcctattacatgtttactcaacttcgtagtattattccttataaaagacataaaaggaatacccgaacccttagctcagttttagggtttacacaccatcttcttcatcgccatcgtcttcgtcgtgttcctcctggggtcgggcgtcatcgagaggcccaggctgacgctcccctcgaaccgcgtggg

SEQ ID NO: 4334 - DNA, 469 bp, Zea mays
  Intron number 3 from transcript GRMZM5G893381_T01 (locus G RMZM5G893381) derived from phytozome v7.0 (chr-ID 8; pos 1 7376705 to 17377173 reverse strand)
cctccgataacaggacaaggattgatcactcagaggtacactgtttttctctctttacttcgttatcaattgcgtgtttctttgaaatgaagcggggtaaacctttgctctaaaaacaaagagctacatattagttaaggtcagttcatatcatagtgatgaccttttcttggttaatcactatttatcatgataggtagttttttattcagcatcctgctgaagccgcatgcacaatgtgcctagttacctgtacattcaataataatttttgtattcataggacattgctgcttcataatttcaggaagatacaatagtactgtagtagtaatactgcatcaaagaatcaaaatatgatcttaaaagagcatattaggtgatgtgcatttattgctccgctcatggctcataacatgctaccctgttttcagtcaagctctgcatctggagtgaacctttcacaaag

SEQ ID NO: 4335 - DNA, 825 bp, Zea mays
  Intron number 2 from transcript GRMZM2G013114_T01 (locus G RMZM2G013114) derived from phytozome v7.0 (chr-ID 7; pos 5 138848 to 5139672 reverse strand)
cttttaagccttcgacttgggcttctaagccgaaggtttttcttctcttattgggctcttactgacctgtagtattatttttttgtgattaaccgttcataaactgttggtttttctggtgaggtgtttgtcttgcattttttacacccccatctctaaatgattgtttggaataactaaatgatcagaactctgacaaagatgcttattgctgattggttgtcaatcccagaccagggagttacaatgttattccttcgcttcttccttatatgatgttttagatttttgcacagctgcacatttgcaaaagattgcatacccctaatcatggatacatacccccaataaagttgtttctcctactatggtactaaattattttgtctacaaaaaccaattaactcagaatgagtattgtagcttttaacacatttaattggttaagggcacttccggaatatatggaattatggatatatctgaaaaagaatagatgagtgattttcgtcttgcatatgttttgacttgtaaaacatgctgttttttatgccttcatcttcactgtgatattattgaacttgaacagattgtcattcttaagcagctcgctagttaaaattttgtctacattgatatttttatatgctccctttgaaatgcccagcctgtttgaccccatatagcttatttgccattgttgacttctatctaaaagaatataaactagaattgaaattggtcatgataggttatttgaaaaataacactattgacttattttctacaggctgctagttcactggcttgtgctcgaagaggctg

SEQ ID NO: 4336 - DNA, 656 bp, Zea mays
  Intron number 11 from transcript GRMZM2G158248_T02 (locus GRMZM2G158248) derived from phytozome v7.0 (chr-ID 2; pos 200736582 to 200737237)
caagaggtccagaaacttcgtctttacaaaaacaggttagtctaagatccattgtctgccagttaggtggtgtcttcactgaacctttggttattatggaataaaaaactgagatgtagaactagcaattattttagtctcctctttttgttggttttatcaaacttagctgtctacttgaacaaaactcatgccttaattttttttatattttgattttactagaatcaggtcgccttcttggaatttgattgcgttagattgtttgttatactaatttttttgaggcaatgtgtgctatactaatgtaatgggccttggtccatcccatgtatctctctccatatacaagtacctgccctaatcagggttaagggtttcactatcagactatcactatgtgcatgtcttagctttctaacctgaatacctgatgtcccatgtcaatttttgtgttaagatattatcaatttggcatccagagatgatcatactaggagtaatttgttgctagttctgttcattctgctgcatgcttgtttcttttgtagtgatgattcccttctgaagaataattgatgttatagctccctgcaattaacttctttcacttgtttgtaggcgtctagtgattcaaacctctcagtcaataggtg

SEQ ID NO: 4337 - DNA, 849 bp, Zea mays
  Intron number 6 from transcript GRMZM5G839920_T02 (locus G RMZM5G839920) derived from phytozome v7.0 (chr-ID 7; pos 9 7223831 to 97224679)
cctcagtccagcttccaagcgccgcctcctcaacggtcagtgcccactcgcttgctgctttctcttagtagttgtagtcgttttttaacgggaaatacaacagggaagccaccagcccaccactatgtaggattttattaattgaaaaatagtgttgtagttgttattatctctatttaggacttgttgttggcaattgtcctatttcttgcttaattcgctaccgccatgctgtctttctgttctactgctaaaacacttattttttgtggtcgttgaatgaattgttaaccaaactcaattgcagaagacattcatccactaatcgtcacatgatccaccttagttcataagtttataccaccgtagttataggtcacttggtcagtagctgcaacttgcaagtgatttagggtttaataaaaaatttctggtagtaaagttgaaaggtatggtttgaggagagtgaatggtatcatgtcgaattacagtacattacaatttacaagtaaattgattagtcctctggtcttttgattggtagcatgtttttcctatgtaattgcctctgttcttctttaggggctaggttcgttgtaatcatttgaccgtggggatgtttgtactaaattcttatttctcttaaggaaaatcatgctaatgcacgaccacgaagaaaaagtaaattcatgaacaaatctacctaacttatgatttctgttggattttaactctagtctacctctttgaaattaaaaggttgtgctgtggttgttgatgaacaaacccagttgttgccaaatatcctgtttctctgcactaggttgcgtcctgtggtactggtcgact

SEQ ID NO: 4338 - DNA, 792 bp, Zea mays
  Intron number 7 from transcript GRMZM5G839920_T02 (locus G RMZM5G839920) derived from phytozome v7.0 (chr-ID 7; pos 9 7224707 to 97225498)
aaaatctttgtggcctgctatatcttgcccgacaggtaatttcacgactttgatatatcaaatattaggattatctgtaccagttcaacacagaatcaggtattgcatatggatcattttctccactgctaattgtcatccgactgacaataaacgatcgccggaaataatactgccatttgtagtgttactcccttgcaacttgcaagcgcatcggaatgatgtggttctggtcactgtttaaatttcacccacgtgagcactgtatgccctttccccttcactcacctggcaaacccctcttctatggaaggatccttgtgctaaaagacataagttttttggatcttgatagtgactagaagtttgggactgaacctgctctgccgtttaatctattggctgctagagcagccacaataagtctatcagcatttggaccatttggttttggcttcttcaatggcaagggcaaaaggcagaacaagaaacccaacaatctagatcagtcccaccagaagcctatattgcattgtacttggccttgaaaatagttatattatattttacttgaatttatgtttatctttttttatctgtttggacagatctctattaaatgtcatgtgctactatcgttaggactattaatagatgttgctctgtctatctatccatttacatcgctggaaattcccatgccctttcatagtacgcctgtgaaatgctcactgcttttctattggtttgtgtgcagttcaagctctacaaggttaggtctgttcagtttgg

SEQ ID NO: 4339 - DNA, 656 bp, Zea mays
  Intron number 1 from transcript GRMZM2G092493_T02 (locus G RMZM2G092493) derived from phytozome v7.0 (chr-ID 9; pos 9 9759867 to 99760522)
accgcgccacgggccgctccaagggctacggattcgtgagcacgccttcctcctgtttttttctctcgttcgtatgtgctatgttagctggggtgtttactctgtacttttttcactggttggggatcagggaccaggttcgattgtgttcgattctggagctgaatgttgtgtttgattctggagctgggtgttatcattctgtgtgcagaggtgaactttgcgggttgaattgggtggttgatcgacagtgccagttggcagtgaagattttagaatttgggagttttgcattccttgcgcaggaattttggtggattgttgacttattgccgataagattgagggaaaatagttacattttgttacctggaaatactgaaggttgccatgttaagcatttctagggtttctgtgttcaggatttttgtgaatttagttcaattttgcgctttggagttggaaatgaaattttgcattctttcttctatgaatcagggaattatgtgaatttccatggggttgtgatgagaacagaacacctttgggggttccagatttggctcagatattttgcctttttccttcttttgattcactttaatcatgtgtggaggtgtatataggtaaccttccgggacccagagtcagcgagg

SEQ ID NO: 4340 - DNA, 973 bp, Zea mays
  Intron number 1 from transcript GRMZM2G097856_T01 (locus G RMZM2G097856) derived from phytozome v7.0 (chr-ID 7; pos 7 082105 to 7083077 reverse strand)
aagggtgactaccacaggtataccattatcgctagcagatctcacttttttattcttcgtatttgcctgtagagtctagactatgcgatctatttatggagtggcgaaggagggaggagtccataccatgggaattgtgttttggagaagttaaaacctgagatctgtgcgtagatgttttgtatggtagcaggggcatgaggctccctgtaaaaacctcctccaaccgtgtatgcagtgtgcgcagtactcaaaaggttttctataaaaggtccctgtatgtatagggagaagaatcttctctatatagggggagtgatatgctctccacgttaattatgtggttcttattcctaattaactcccgtgatatgataataatgtgtattatggtattataaatattgtttgcttctaattcaaagaaaaaagataaataaatgttaatctgtagtgtatagaggaagctggattgtagtgtataggggaagctggatagggggggaatggttggagacaaaacatagtgggagaataagggagtttagtgtagtaaaatatattaaaaaatacagataaggggagatgtataggggaaatggttggagatggcatgagttcttattatcaattgggtctaaatttaacgtgtggtctttttgtttgaactttttgttatttgtggccgaaagttcaaaagataaaaaggggaaaggggttgtgcaggctgtgacgttttttagtgaggttgttgtcctttttatttatgttgcacgttgaagttgcttatctatgaatttgccctgtatgatgcacgatgctgtgctgtctcctgtaatgcatggttgaaagatgtgaaattgtgtttcatggttttaccccctaccctacagcacgtatatattgttatctgatttctccacatgatgatttggcaggtaccttgctgagttcaagtctggtgcagagagga

SEQ ID NO: 4341 - DNA, 568 bp, Zea mays
  Intron number 3 from transcript GRMZM2G009776_T01 (locus G RMZM2G009776) derived from phytozome v7.0 (chr-ID 4; pos 3 7455673 to 37456240 reverse strand)
ccgttcggaagcctggagagccatctgtttggtaagctcttcattctttagccttctgtggttcttcgttgggtgtagctactaattgcagacatcaattgaaatgctcgcccacctttttcgccttggatttatgacagttctttgcatttacccttttgatttgtgatagcaagttgcgaaagtgtttaaggggaaaagatctgggggcaactaattggacatttcataactctttttggagattgcataatgtaatgtacaaccttgtctccattatgcgtgcgcgcatatacattgcgacctctacattttgcatttgagtgaagtgatctctggcaaattaaataactacaatttagacgacactgtttgttgctatatcatgcatatagtaataatttttgagctattgtattcttcatccatgacaccatgacaattttttattcttaggttggaatagcaatcctatttgaggaatgatcttgctttttttgctgatgactagctccaattttttcccactgcagacaatcctaaggtctaaggatacagccgggtggcg

SEQ ID NO: 4342 - DNA, 549 bp, Zea mays
  Intron number 1 from transcript GRMZM2G156069_T01 (locus G RMZM2G156069) derived from phytozome v7.0 (chr-ID 3; pos 2 18176850 to 218177398)
cagagcgcgctcctccacgagctcaacaagttcaggtctgttgttttacttcgacaattgggcgaatgtggttctggctgagtggattgcgtgctgatttatactatttggatagtttgacttacctaaggatcaattgtagcaaggttcttgagaaatttgtagagtaccgtgggacggagccgctccgctcccaatttattgttgtttggattgattccatataggacagaatggctctaaaaaagaaaaaaaaatatgttcaaatgttgaaccatttagctccccaaaatctctcggacggagccgctccatcctaaatggctcaggaaccaaacattatcatatagttggagtcctagtactgcataatcgttagtagtggttgtattgctggttttgttgtttgtactttgtattgaccattgcatcaaatcttcgcattagaaactaaagattggtatgttcacctatctgaatttcctgttttggtgtgcactgaaaataatggcagccctgaagaggttattaaaaggtttgagcagcgaa

SEQ ID NO: 4343 - DNA, 509 bp, Zea mays
  Intron number 2 from transcript GRMZM2G150257_T01 (locus G RMZM2G150257) derived from phytozome v7.0 (chr-ID 6; pos 1 63979582 to 163980090)
aagaagagaaacaacgtctgaactcaaagatccaggtaaaaaagaatatcaacttgccaacttggtacatttagtatgatccaaaccgagttcttttcttattgatgtctgtgatgcaatgtaattaaattctgcttaccttcttgaacatcatgaaaaatgcaaaccttttctggatttcataatatgaaatagttttcgccctctttattacttgtgtttttgacttaatgcactgggtaccatttaaactgtgcttacgtcatttgtatcccatggtagttacaatcaaacaagcttacctgtatggttgtttacagttttgtgttttagttgcaattatacaagcttccaccctatgatctgtagatagatggagtaaagttagtttggcgccctgaacaaaatgttatgtcccatttacttttctgtccttaaaagtaagcatgtacttgacaatttatgagtaagcaggttgaggaggctaaggtcgaaagcattaagagaga

SEQ ID NO: 4344 - DNA, 731 bp, Zea mays
  Intron number 1 from transcript GRMZM2G309035_T02 (locus G RMZM2G309035) derived from phytozome v7.0 (chr-ID 6; pos 1 14435538 to 114436268)
cagttgtttgtgccgtgttggacctttttggtgtgtgcaggacaacatcacaatttctctttctacaagaagacaatcgtttaactaaagggaaaacaacaaaaaataaactgaatgcagcagtaaagcttgacattttaccgtgttttaggctgtggtgggagctcatcccccaattcagcagggggctcacgacaagtcttttcaatatgaccaaactgaaagcatctcttgcattggtaagggcctcttttcccagcctcaccactacttctgattcgacgtactctcggcctacccgcaggcctctctaacttcggaggaaccatgacaaacccaggatcaaccatgggccactaagccttatcaaccatcgggttaatatcaaactgataagtagctttgaaacgttcaactgagtagtactcatggacatagtcttcaattctaactgagtagtactcatgaacagcagtactcggtcacggtctggagaggaatcgagggcagtccactggaaatgagagctttttggtgttattttctgtaacggcgtaagaaacgaacgtagtgttgtataatggaacggaaggacctttttggtgttatctcctgtaacggcgatattttgatggtattttccaaatctgaagaactttcaatgctagagaaataattttccctttctttttccagccgcatcgccgtggccggccggcagccgccgcaac

SEQ ID NO: 4345 - DNA, 610 bp, Zea mays
  Intron number 2 from transcript GRMZM2G042824_T01 (locus G RMZM2G042824) derived from phytozome v7.0 (chr-ID 2; pos 1 10070865 to 110071474)
agcacccagtggctctggtactccgtgtacgcaacgtaagtgcttccctttccatgataacaaagtagatcgtgctgccactaccagtcttcagccccatatttgtgatttgtcagcactagcaagttcagtatatttgtggtttcagtcaaattcaaagtacaatttgaaggcactgctatctttgatcttaatcttgtttttgtatgccaaacagttcttagtttcattaccttgacctatagaaggctggttcgctggggtgggggtatcaaagaacaaaatcagactctaggtcgttataagtatattgaagtagttttgaatctatccattggtccacatatccatcagttcaggcaggaaatcccacaatgtttttgagtctagctgtttggttccttgccacatgccagatagtttaattcatgacactcattttcatgctccacaatgagttgggccaaattctcatgcatccaaacgcaacataggacttgtcaactcattgcccacattgctactataacactgctttgtttacctatcaaatcttcctgagatttattttttgttaacttacagctgcttccattaagaattggtcatc

SEQ ID NO: 4346 - DNA, 870 bp, Zea mays
  Intron number 1 from transcript GRMZM2G424857_T01 (locus G RMZM2G424857) derived from phytozome v7.0 (chr-ID 8; pos 1 73067928 to 173068797)
gaaatttcgaatgtgcactttgagaaacatcagatgatcaattaacctttacagtatcaggtagttaagcatgccttactgtcacacttggatttaagggccaaaacccagacgcgaatcaaatgtgtctgagattaagtctcacacacatgatgacttatggtacaaaaacgaatgccacatctttaatatataatggagttctgtacaaaatagttaaataattacatcatacgaaaacaacgatctaacaaccatagttaactgggagacgacggcctccgaaggaatgcaaacctcagtttgttgacgcccaatgcaagtgactaatgttgtggggatggacatgcatattatgttggaggagtatggcctaaaaaaagccttgtgcatcagtatcacaagtcctacatgtcatgacccgtggagaacacaaacgaatgagacaagctaagttggttggtactgctgcgcaacaagaaaatatctcatcctcttagatttcagtggtctatagagacgtggggctccacaagaaacttcttagctgatggtgacttggttatcgaaagcaactccaatcatatgatattatcagtaggtgaaatcatgcctattttttcggaatatttctttgcaaagaaaacttgggtttagctaccagatcgaccattaagcggatggatgtttttaaggaccccgacaccatgtttacaatcatgtttccctgtaattcccttcgcttctagcccttttttttgttatcttatagcatgacacatcaccatgtttatcctaccactataaaagtataaaggcgcacaaagcttccaaagcgaagaagctcttgaggagatactgtaacgaaac

SEQ ID NO: 4347 - DNA, 948 bp, Zea mays
  Intron number 1 from transcript GRMZM2G520672_T01 (locus G RMZM2G520672) derived from phytozome v7.0 (chr-ID 4; pos 3 8937621 to 38938568 reverse strand)
tttggcgagtaactgagcaaaaaaaaaaagaagggaaagtcacatcaagaaaatagttgacagctaattagaagaaatcaagaaacacatgtggctattcaacaagaatgaaagatgacagataaagtgcagatttccattcaaaccataaaataaaatctggtgcaatctcaagacaatttactgaatctagtattgtatatgcagtcatatgtaatgatatctttccatgcatggttaagctagctcaagaaaatagtccgagcaaatagttgacagctaattagaaggaaccaagatgcggatgtggctattcgacaaaaatgaaagataagaacggtaaaccataaaacaaaatttggtgcaaatctcaagtcgatctagtattgtttatgcagtcatatgtagcgttatctttccatgtatggttaagctagctctaattctaaatattaaaagttgaatgatgaacaaagcacaaagatcctgacaacatttctcaattctcatccagaaaccacacatctctatctagagtttaactggccttagtttatccggggtatattgtaaagctctgcacaaacagagtacaagaactccatgtcaatgatttcaagtcttccgactaatcgagattaatcgcgattagtcgggctggtcgcctgttaacagacgattagccggacgactcgattagggagcctggtcgtcctgaattcctgatcgtccgattagtcgacgataaggtcgattagtcatccgttttccagtttctggtcgttggtgctaggatttttgtgttgggctacaagaccaatgttttcacctatctacaagaacattaagttccgcctctcctctcctctgctaaaaccctaagactgcctaaaccctgcatgtatccctctgccggcggctgctccagaggtccagatcaccggcgtc

SEQ ID NO: 4348 - DNA, 481 bp, Zea mays
  Intron number 2 from transcript GRMZM2G343445_T02 (locus G RMZM2G343445) derived from phytozome v7.0 (chr-ID 2; pos 2 09807690 to 209808170)
gtctacgaagagatagagttttacgggaggtgagagagttttatcaggatacacaattgcatagacaaaagttgatgtagcattctttaaccgtgcattgaaactcctaccgggaatggtattagttgtcattctactctatcttttgctacggtcgtcttacatatttaaaacaagccccacccccgcccagtggccgctgccatacccagtaactcaaacccatgatacaaattacaaagtgtctaacattacaagagagcgttgcaagggaagagtcacatgttaggaaacgaagtcgaaagagaagggaacattcctttcttttcctacgttaaatggtatgaaacaaacttttttttctcattacttcatcatgcatcccattaattatagatggacgcctatctttcattcatgtttgatggacaaaagtagagcttgggattaactgagcatggctgtttctcaggtacataat

SEQ ID NO: 4349 - DNA, 744 bp, Zea mays
  Intron number 1 from transcript GRMZM2G145905_T01 (locus G RMZM2G145905) derived from phytozome v7.0 (chr-ID 8; pos 9 7476343 to 97477086 reverse strand)
caggtcgaccttcaacagcgacgagcatccaccaggtatgcccacctcttctctttgcttcctgctgtgtgaaactgagccccgaaccctaatttaagctatttgttcattagtatttgaactcgatctaattacaagcttatatatgcactccttacaaaaactggagtattattcctactaacttcacttttttgcaaaaattatcggggtgcgtagtgtgtacacccatttactgagtccactcttagggtgtgagtgtgtttgtttctttcctagattatataagttggattatggtagaaggatagaaaaataaaatatcactttaggaccacaaataagctgaaataagttagtattggatagcttattttagcttatctgtgatcccaaagtgatattttactctcttaaccttccaccataatctaacttatataatctaggagggaaacaaatagggccttagtagcgaaggaatttcctcaagatcaaaagtcccttgtcgagaccagttattggacgattaaatagtttttttttctctctccgatatatttcgggaatttagcatgagctattattgagccttggctactctgggctctatatgcacactgttatgatgggaccaaattggagcccagtgatgattagttagttttccttgtcattatttatatttaaatttacacttactaagtcattggttgaaccattttgataacttcagatttctac

SEQ ID NO: 4350 - DNA, 773 bp, Zea mays
  Intron number 2 from transcript AC193509.2_FGT008 (locus A C193509.2_FG008) derived from phytozome v7.0 (chr-ID 3; po s 128913640 to 128914412 reverse strand)
gctgtgcaacaggcagacagcatttcttcaataaggtagaaaggtactcttaataaatgcagacagcgtcacatttcggcccattcaaattctacgattagtcacacctacaaggggaggctaaggtgatatttacatagcaaaattggaccccaagttgtgcagcaatgacgtactataaagaatcgcccacagatatgcagagagcaaacaggatattcagaaatagtagaggggttcattgctcaacagcaacctctcccagaaaatcatcatcaaactcaaaagagtcaactccctctattcttacatttgcatcctaaattcccgtattcaccacgaaacatttcttaaagattagggcagaaacagaaaatgacacctgaaatacttccaggtcatagctctcaatcattgcttcttcgaccaaaaaaaacaaatgtacaccaggtacccttcacctaacctggcactcactcccaaaaacatagccatcatatagtcaaacaaagccacaaaatgctgcaaagcagattagtcggacggatttccctatcacccaacaaagaaccaaggtaatgatatcaacatcctagcatctgcaatagcgagagctgaaactatccactaacaaacaagcatacgtcaaatcagacgaacaataatatcagaaccgcacaaggctgtcatagacttatcatctactaaacaaaaaatgtattgataagatgtgagtttaccatgctgatttttttacttcatgcaaatcttag

SEQ ID NO: 4351 - DNA, 892 bp, Zea mays
  Intron number 1 from transcript GRMZM2G049088_T01 (locus G RMZM2G049088) derived from phytozome v7.0 (chr-ID 1; pos 1 72813885 to 172814776 reverse strand)
aagtcgcttcaggagcgcaaggagaggtcagtccactccactccactccactccactccactttccttcctggtgtgatggcaatgcgcgtgtgcctgggtgatttgagggggctcagtgctggcaaatcgctatatttatcaagtgatgtaactttgagctgggcagttggcctcggtcttctagtaattgctaagtgatcattcatcatttactattatcagcttgtctatgccatttttaggggagccgggttctgtaggcctattaacattttatctgtttgcaaatacttacaaaattgctaagggtctgtttggttccagggactaaagattagtccctccattttagtctcattattttcttttgcaatgagaaaacagattaacccaacaaggtggaacataccatacataattatcaacttatatggtcaagaatgaggataaaatctgcccatagagaagggaataaattgtaaccagttgactgctgaaattagccccaactttattttagtgcccccattagtctgcatgagcactgttagcagatacagcttcatatagaattatggattatggaagtaagtacaccttgcagtctgcttctgtactttggtatgaatatagatgttctatctgtattcgtatgggtcttagcaccacactcttgcagggtcgatcggtcgacttattttcttgactattcacatttctcttttgcccataagttacacttgacaactcttcttctttaggacttctgtaggccttattaaactgctgctgtatattgtttttgggatcatgcttctgctatacattgttgagttctggctaagtttgctgcaacccatgttgatatcaaccaatattctaggcgttgg

SEQ ID NO: 4352 - DNA, 674 bp, Zea mays
  Intron number 1 from transcript GRMZM2G178005_T02 (locus G RMZM2G178005) derived from phytozome v7.0 (chr-ID 2; pos 3 2949988 to 32950661)
aggacggcgccggcacctggccctggcccttccaggtctgaagtggaccatgagtttttggaagggaaatcaagcgtcgagtgttatagaactatgtggggggacgggatgcacaatgttgtgattcgtttatttgtttattatgtggttttgtaatgtcatatttgtaacgctgttatatttatataattatatatgtgaaatttgcactgtattgcgatcgagcagtttgaattctgacgagatctgaactaaaacaacgagtactcaccgttaagcagcctgaatctctgtcgagatttgagtggcttatttgatctgaccgttcgggctgcgtcatgttgttatcacctggaactggaatgtggcacaccgaagatacctgcaattttaatttgggagacgggggagccagcatctagggaagcgaatacgctgttacacagggcctttttgttttcagtgagctcccaaacattgcaatttagtcgtatgctccaacctcttttgtcaaaattttcaataaagaacaagcatacacatccgtcttgacaatggcctatcagtattcccgtgtgtgtgtgtgtgtgttggctgcccctgcggctctgccccttcagtcaaggtagagagtaaaaaagacttgggttttctgcagtggaacttggacattg

SEQ ID NO: 4353 - DNA, 926 bp, Zea mays
  Intron number 2 from transcript GRMZM2G126443_T01 (locus G RMZM2G126443) derived from phytozome v7.0 (chr-ID 4; pos 1 61880851 to 161881776)
ggctttagcgccggtgccgaccacaccgtgcggaggtgagcgggtttttaaaagtgttggtatctttgtctcttccattcctgccttatcccacacagtgcgcagcgtcgaattttgggatcgggttggtgatgtgcagcacaagcactgcgcctgcaaaattgcatgtggctgtgtgctttgagatcaacacttctgttatccgtttggtggtactgatgttataggtctgctgtgtcacatgtagttagagaataatagtattatttgctgttgccgaaatgtcttttcgggtgcatacatgatttcgaaaatagatccactcttttttgtgggttgcggtgcagtaaatttttatgtatctttttgttcacataaataagctggagacttgtggcactgtatgagaaaattgttttgatccagaattgtttattgcaatgactaaccaaacattttatagtcaaagagaaacctgtcagttttatgctgacaggattctgttctagaattgctgtttgtttggtgtttatattactgacatgactacttaagttcggaaatatctggtcatgtccttctaaaaatttccaactgttccggaaaccaaatgtaagtgtttgatcttatgttttttgttagatgcgaattgagttcttcatgtaagatggcaagcattatgcctagttgttttcattgaatgctactggttccataattggtagcttgtaaataaacttacatttgcattgtctgggatccatttgcgttggactttgaagatctgattattgaatgttactcgtcccataattagtttgcatgcaaatacgcttaggtttgccttcacttgtaatgtgattacaagaacaagtaattagcccaaattatctatttcaggttggtatttagctcgtccaaggaag

SEQ ID NO: 4354 - DNA, 269 bp, Zea mays
  Intron number 4 from transcript GRMZM2G426964_T01 (locus G RMZM2G426964) derived from phytozome v7.0 (chr-ID 9; pos 1 33930988 to 133931256 reverse strand)
aaatacaagggaggtgagttaatcctattgaattgccttaacagcattgaatgttataaaaccatacatgttatcacaaactctaggctaactctgcgtgagtaggtcattattaggtttgtttgaactttacaatagtctcttctgtttaacctttgaaattatctcttatcttggttctctttattgaaaaccgattcatgtttcggcattctaattctggatcatttagttcaaaaccatatgcccttgcaggtactttggaaatt

SEQ ID NO: 4355 - DNA, 508 bp, Zea mays
  Intron number 3 from transcript GRMZM2G434252_T01 (locus G RMZM2G434252) derived from phytozome v7.0 (chr-ID 8; pos 3 2602770 to 32603277 reverse strand)
caatccaccaccagaaccgccctaccccaagataggtatgtgcaggttcaactactcatttagatattggtacaacctgtaatagactttggtacaataggatttggttctgctattcactttgtttttagttccaaacaaccaaaaaattgcatgtcctttagaaaaaatatcacaggaatatcagtaatataacactgataataaaaatgcttcgattctatatatttttcatgttataaggttgaaaacattctgtctcacggatcaaaatgggtacaaggggacgtactgcatttacaaatatatttaaccataataaaacatctttggaaaatgaatatcatttaagtccaaaaatgtttttgttgaatgttcattaagctagagtgaagagtaaacttagcatttcttttctatatctctccctcgtgctcatgtagccgtagtctcctccatccaacatttcctacgcatgcagctccatctcagtcgttgtacccattca

SEQ ID NO: 4356 - DNA, 450 bp, Zea mays
  Intron number 2 from transcript GRMZM2G434252_T01 (locus G RMZM2G434252) derived from phytozome v7.0 (chr-ID 8; pos 3 2603804 to 32604253 reverse strand)
tgaatttcctctgggcccaactttggtatacataaattccattattgcctttaatttttttgtattctggtagatttgggcatgctaagagctaaggttgtttcatcttgcaacatattgacgtgctctatagctataaatgatatcaagttatttcatcttgcaacagatccgatggcaaaagtgtgtgtttatggttcctgagtcagatgatctttcttcagttttaggtacttttatgctttaatatagctcatgcaatatgatttattttaacacatatttggaatagaactggattgtgcatattttgtaaagtgtatgttctacattttgtaattcgtattattcattttttcctttagtttttctctttctacaactcctatatctttacaatcaaatttcagatgtgatagatattagtatgaaagataaaactagaatgct

SEQ ID NO: 4357 - DNA, 838 bp, Zea mays
  Intron number 2 from transcript GRMZM2G098583_T01 (locus G RMZM2G098583) derived from phytozome v7.0 (chr-ID 4; pos 1 81347694 to 181348531 reverse strand)
agtgtgctcccttgtctggctaccgtggaaatctggtatgcacccccttagttcagtaactttgatgttaatatctgaagatgtcgtattgtcaagcggctgtcagcttgagttgggacctacgagaatcttttttttcccaaagacatatttgcttggttcatgccaaattactgatgcagatgatgacctgaatcttgacatttttattacctaagacacaaatcttggttgaagaaactaatacattgcatgcggtttgctctaattccattgactattggatatcgtaggaaaaaaaatgcaaactgatttctaaacttggaaagtggaaagtaacatgactgatctgtaaacttcccaccatgtctctgggtcattttcagtttaaatttcactataatcactgttcttggctgcgttcaagttgtggtgcaaagtatgtacaccattatgtgaccataaaatatcacacggacaagaacaatccatctatgttttgatggaaattaatttctccactgttcagctgcaattgtaagttgcacaggcacaccgcacacctacatttcattgtcatggcttgcaagtttgatactggccaggtttttatttaggagtacaagtggtggtgtcatgtgtgaactttggttctcttctgttttgttcattttaagtttcttctatttcttcctaacaagtgcagaataagaggaggctaccatgattttaagcagtttagtgcttatttccagtgattgattggcaggtgctccatcataaatggagcatctattatgcaggatagagatcttagaatatacaggcctgctgaatc

SEQ ID NO: 4358 - DNA, 604 bp, Zea mays
  Intron number 2 from transcript GRMZM2G122239_T04 (locus G RMZM2G122239) derived from phytozome v7.0 (chr-ID 2; pos 6 1325601 to 61326204 reverse strand)
gaccattatcgcctccttgacaggtaagttttcatgaactatagtttcctttatcttcccaagcattcgcgtcgtttcgttaggaagtaggttcctcatttttcacaaaggtgttccattatgtgttcttattttgcaatattaactttctgcctgttgtttacattggttaattccgtcctcctattaatatttgaaacatctggagatctctgtcctcgagactcgagagtgtacaatttgtcttgctcatatgaacctgtagctgttgaggtgaagccttaaagcataaggcattctattaagttttgattgtgattgtaactgggatgttgggaaattatgtattgacatgcaagttgtgggagattcaactaaaaagtgtttctccccatttttcctcccaacttctaaaacatataaattgtatccatttctttcttaaattttcatttcctgggtattctgcattttcaaacaatatttagcaacatctttatgtgcactggggatatggaagttcagtctcttgtagcttgtgcctgtttcggttatagataaaacatcaacatgtgttcatgattaagtgttctttgtaggttaa

SEQ ID NO: 4359 - DNA, 610 bp, Zea mays
  Intron number 2 from transcript GRMZM2G166345_T04 (locus G RMZM2G166345) derived from phytozome v7.0 (chr-ID 8; pos 1 70317086 to 170317695)
tgtttgcaactgttcatccttttgtggtatgatgatgttactttatcacttttaatggtgcaaccttcatcaaacgtcaaatctgcgattcttttccttctatctctaatcctataaccaaagaccttgatccatcttcactgaaagctcaataagtattaattatatgttcctgtaggcattttatattttggtacaagtaattttagtgaaaactgtggctaatgcgttttcgcacacaaattgcaaaaagttttaccacacatattccaaagtgatgaaaacatctacttttgtaactggctgagtattaatcccttttgttctaaatggggcttgcaaggttttgtttgaaatgttatgtgtttgatgcgtattattttcctctctatctgttcttgtatcttagactgtctccagtagtgtgtaaaataggggacatggaactgtatatgacattgtttgcaaagagaagtttgaaataagggatgtgatatgggatctgctggagatagccttatgctataaacaaatgatgcaaatttgtaaacttgtagttgccttgcttgtttcagatccgtgttagtgacagcgagttgcagaaatatcc

SEQ ID NO: 4360 - DNA, 870 bp, Zea mays
  Intron number 3 from transcript GRMZM2G111172_T01 (locus G RMZM2G111172) derived from phytozome v7.0 (chr-ID 2; pos 2 33177736 to 233178605)
gcgctcatcaagaaactgcgcaaggcggttagtttccaaccgcttagttttcattaccactttttcttaacgtgttccgatcaagataattgcgtggatctgttatgctgtcatgattaacgatgcttattagatttttcctattttttccattctagaagaattcgagaaaaccgaaatgtgtcttctcgattctcgaatgagtttaatgcatcttctcttaattttacccatacgatattaggtgtgatcttggtgtcaaaattttgagcaaatctcagtgcctattgttgtttagtgtaaatgccgtcttcaaaggagatgcaattaatcaaccagaaggctggttacttgaatgcttggcaaggttgctagtattgagtgttgcaattacaaatgtcgtagcaaggttgctagtattgagtgtagcaattacaaatgttgaaccttgttatctatgtctagaagaagttgctgtattttgtagagctcctatgtcatttgttctctcttttctctagacaaataagcttgttggtttagaaggtgcaagtaaatatacttttgaaattgcttactgaatgttgcatacttttccattttctttgttatgtagtctgctgttttgtgacctgccttgtatcaatcataccattgttgtgtctgccgaatactattgggatattgataaatcaaaatttctatcctgaatgtacagtatgctagctgcagtgccttctgttctgtgccaggtagatgcggtcaatgcaagattgtgtttatcagtcatcatctgtggaactttgtttacttatacttgttacacaatttcctcacgagctatatcccactgtcctgaacagaaaaagg

SEQ ID NO: 4361 - DNA, 969 bp, Zea mays
  Intron number 2 from transcript GRMZM2G148118_T01 (locus G RMZM2G148118) derived from phytozome v7.0 (chr-ID 4; pos 2 25259695 to 225260663)
tgaggtcagtctggtcagccttttttttgaatctgttgtgagaatttcacttcagtgacacacgttcagcatgcgtcaagaatatattagtgacttggtgtcttatttttgaaagaaaaacatcaattgagtggaaatgcatggtgccagatagggcatgtttggatatcagggctaaaaattactccacctgtttaaaatggattaaccatgggctaattataggctaatgagggcggacgctaaccaccaattagccatcagtaaatcttattagcctaaaattagcccatgttaagcctttctaattggtattcgaaactaggggctaattgttagcccctggatccaaacaggccctcattctatggtgtacaaaaagtctacaaatcctaagagcccctttggcagggctctccgaagagcatctgttgtggctctggttctgccaagagctttaccgaataccagtgaacaaaacagctccagccagggagctagcagaagccctggaaaaaaagaactacacgcatggagctggaaattatggcttccaacagctctgtttgtttatctgcttcacaatgcataaattttgaaagaaagcaattttcttccaaaatatgtactgattttaaatccattttttttgaatttttgaaaaaaccccaacattctctcctttaaaattggaacattggattttttctcttgcttggaacatttttctttgttttcacacaaagtgtggtgcaatgtagcaggacgttctagacattatacacctattcattctagaaaatacaagaaaagtcattctggcaagcattttccaaagagcttcagctccaccagagaaggttcttttctgaaggagctagagctggagctgttttgggaggaattggagccctgccaaacgagtcctaagtactaattttgctgttatttttgtcatacacaggtttc

SEQ ID NO: 4362 - DNA, 964 bp, Zea mays
  Intron number 1 from transcript GRMZM2G055957_T03 (locus G RMZM2G055957) derived from phytozome v7.0 (chr-ID 2; pos 3 1045522 to 31046485 reverse strand)
gctcgagtttcttctctgcggtgaccaactgaccagtgagtactcggccaacattcttggaattccctgagtaccagctaggactcggcttccagctgcgtgttccggcgattggtagcggttagggtattggttggattgctatctggcctgttttcttgggtgattgcagagtagcacagataagctgtttccaaagattcactgctaagctgttttcagtaattttctgtgggataggattcgcacggtttcggtggcgggcttgacctctaaagactgaagcagtgaagctacagtgttgccacttgccactggcctttttgaaatgcctgaagctatagttttgctttaatctgcaacagacaccgtgacaccgggcctggcactgatgtcatttgaggcaccttggatcctcatgtgcttccctttcttgtaccttgttctggtgctatgggtgcatgatcaaactacctgctagtctcttctattccagtttgatctttcgctttctgtcctgtttgcctacctatgtttaatcacttggtttcggtagagttcaaagtaattgtttgaattagactgattagtatagagtacagacgtacaaaatctacagaaactagactactagttttttgaatctgtacagcacctctagttgtattataataaacgcacgatcatttactgccaggcaatttactaaggggcaatggaactcctagggcaaaattgtatgtgtgttcacaatcgaattcttcatattttaccttcttcaaacgactattttgtgaattcttgatgatagaacgaagcaattgtcatgtcatgttgtactaccactatctaattttgtttctcagtcaaagttgctaaaccgaatgctttattgtttttttttctgttttgattgaacctacgagaaggagggacagccttgtggcaatcatatataggacag

SEQ ID NO: 4363 - DNA, 959 bp, Zea mays
  Intron number 1 from transcript GRMZM2G070704_T01 (locus G RMZM2G070704) derived from phytozome v7.0 (chr-ID 8; pos 4 7887633 to 47888591)
accaacttgctcatcaggtgactcgtgacctcacactagtcgtagcaatacaaacaaacagtgtataggaaaaattaacatcacaccaaacatatatgcaaaatacatattaatgatctacatattaaaataaaatcacaggaacaagaattattaattttgaagttatagattttaagttatggacttccaaaagttctaggtgctaggtacaagattaattaggagattaattttaatatgactttcatgtcaaaatagtgaaataaaatgataaacaataatattacaaaattaatgtcactgaaatggatcaattcggaattagaatggattttctatgaattaaataagtttctgaaattattttaacactaaaatcattttctaattgaatttatttggtttcctactcctctgtactgcgcgcatcaatccagagaactgtagggtgccatctgtaaattcttgggccatcatgcaattactttagaactgactaggatcgcgggttgattagccaattgttcagggtctcttttacaaactcacccgctccgaaggggtatggggtcacaagagccgtccgatcaccattgaaccaccctgatcagaccccgagggtttatgaagctgtacgcaatcaaggtcgttggatcaacgaccaggcgcctggattttaagtccttaggtcgattatcacgcgccggatccacatcggacgaccgagaagagttcaggccaaaccagaatccgggatcaaatcccagcccttcatctgggattgacggcccatattccacccccatcgcccaagcctggtaacggtggcgctgcctgaggccacggcgaggcatcgccggtgagcctactggatggcggtcctgtgctctagatcccaatccggggagcgctacacggagacaagatcccaacaacagatataggttcacgtacca

SEQ ID NO: 4364 - DNA, 892 bp, Zea mays
  Intron number 1 from transcript GRMZM2G175743_T01 (locus G RMZM2G175743) derived from phytozome v7.0 (chr-ID 9; pos 1 43358865 to 143359756)
actggtatgtgaaacacttgtacctgtgatgatattgcacctctagaggtactcttggaggctgaacaaacacctgcaacacgaagaaaagtagttgatttgacaacctgagaaacagcttctgttgctgactttgattcctgtccatcttgtactggttcactcataatgccttccatatcatcctagcaaaatgacaatagtagatgtttcttacatggtattattgatgtatactttatgtagagaaggaataaaagtaaaaaatcacttacaattgctttctgtacagactcggtaaatccatttttttgccacaatggaaagttcttgaatagatcaaattgaggtgggctctacatctttgaatatatctttcttctaaaaataattgcaaacagtaacgagctattatcttgaaacaagaacatggtctcaagaatagtgatcatacacattattgtttcatttcttaccacaacatgggcctgtgcaatgtagcatcgagatccagtgcgctgatgtaaccggacattctctcgatttagttgttttttggtacactttttctgcatatgatacatgagtgacatgacacaagaaagtatctggataatataaaagattcaatgcaagatagcatgaatgcaacaagatgagatgttgcgtcttcaagaaaaccttgataataaacagttgtattgcttataggggaagctcttaaacatttaagaatatttaagcttataggggaatgctttcatctacagtgccaatagatgatatctttgtatatggaggtccacgtccacatcggatcttccctcccccaatgccatcttctgtgatataaaagttgaatatgacgtagaacaaaagcttttcagttctg

SEQ ID NO: 4365 - DNA, 934 bp, Zea mays
  Intron number 1 from transcript GRMZM2G092258_T01 (locus G RMZM2G092258) derived from phytozome v7.0 (chr-ID 6; pos 1 28206799 to 128207732 reverse strand)
caatccggacccggaacgagttccctcttttgctggtaataaggaaaccctagcttgcttttgcatgggttgttgtaggatctagtcccgttttacgtgctcttctatcgaaccgtgaggagcctcctggtggatttcactcgcccggtttgctccttattttgttttccgtatcgattcgattggtaggcgatggtagcggtttattcctagagattttgcgcgcgttgaatccgctacgacctcgggccgtttctgatggaattggtttgctacggacttgttttttgttgtgctagatagaatcgtaagaggtgtttaattgggttagggctatgcgaatggcaaacatctgcagcagcatccctaccatagtaaacggtgaagaattcgtctggtttacttgggtcagggttacatatatgcataaccattatattggtggaagatcttagtacttcatgaattcttgtaggctactcatgctcaaatgggttacgcaggttactatataggccttgtataattgataattcaatcatttggatatgtaccatgaggtaaatatgagttaggatctaatgaaaataatgctatatttttaactgtgagttgaattttgatgtgaatgtaaatatggtgtcgttaattattcttcactagtatgagcacagtggaaagcgatgcaagtttaaattggcatgttgggggcaatgtggtggtttcagccataggccaaggaaagggaccatttttcactagatagattgcttgtatagaaacaaatgatctgtcatctgtatatggctatatgctcaccctattgtttagcagaaattcattcgttcactccttggttttgctgtacctttcttattccctgactttactgtgtgcaggttacataaactttggaataggaggatatcccata

SEQ ID NO: 4366 - DNA, 676 bp, Zea mays
  Intron number 17 from transcript GRMZM2G132504_T01 (locus GRMZM2G132504) derived from phytozome v7.0 (chr-ID 2; pos 235494101 to 235494776 reverse strand)
aggagtccagtgtacaggtgagctgatagcctgatatgaaaaaactattgactgatgtcatgcaaatatattatcttagcagattcatatgtgattgcaaatgttttggtttctttcattgcctattgtttcagtttcattttttaataggttgattcttaggtgtgtgggcttaaatatttgctcatgtgttagtgaaaatagtgtagttacttaaaatatttacatgttaattggggaactcccttgcatctcttgttttcccaaataagagaacatcctcatctggaaaatttagataacacaaaaggaaagaggaagttgttaatgcacatctttctgtttttttttctatttagtgatacataatatccctacacacaaaataatttatgacaccatttgtggggggaaggcttaccttggtttatctcttcgctagaccccactcgtgggagtctcccacactgggtgtgctctttttaatcgtgaaggcacactattagtctggtcattttttttgtggtttctttttatgctataatggatagcaccgaatataatgtatgatattacagaagtacatgcagcattgttgggcctgcaatatttatgttgctttcttttaccagttgagttaacttcaactatcttcattacttttgtaggatcttgt

SEQ ID NO: 4367 - DNA, 791 bp, Zea mays
  Intron number 9 from transcript GRMZM2G132504_T01 (locus G RMZM2G132504) derived from phytozome v7.0 (chr-ID 2; pos 2 35497616 to 235498406 reverse strand)
ttgcaagtaatatcaaagcacatgctgatattttccccttgaatatgtaggagagctgcatatctttgcattatttgagtaataaaaagaatgtaagtacatgggtagatcataaccactcgacagggtacacttgtacacaaacaaacaattgaaacatgggaacatgcataccacagagcaggtagaaaaatcacagactagaatcacagcttaagctccgttaagcctttccacgattgcatcacattgcaggctgtgtgatttgtacaccagctatgcattgctaaactgatatttctttggcttttcatgactgttgagccacattcgtttcgtgttggttacatgtaattctctgttttatatgttttatatgcctttttgtactgtagcattttatgaatgacaagcttttattatgcttgagcccaaccaacctttctggaataatttagtgctactccctccatcctgagatatataagagattttgagttgtcctaagtatgaaagattttatcgaaaaggaaaataatatttacgacatcaaattagcatcattataattattattaaatgcactttcatagtttacctctttgaactcttctctataaacttggtcaaactcaggatagtttgacttaggataaacttactcatatttcaggatggagggagtagctatgatgatcactagtgatgactaaacttcccttttggaatcaactcgtacatcagacatttttcatatatatatgtatgtttctcttttggtcaactaggag

SEQ ID NO: 4368 - DNA, 518 bp, Zea mays
  Intron number 3 from transcript GRMZM2G132504_T01 (locus G RMZM2G132504) derived from phytozome v7.0 (chr-ID 2; pos 2 35501427 to 235501944 reverse strand)
ggctgctgggtgtgctggattacctgcgtttcttttgtgtgtgtatggggggggggggcaatccttcaatgcttgcgttacatctttttctcactatcttcggctgctctgaagcatttaaaagctttgaatggtggttgatgccagcaccttgcccgatgacttgtgtgcagtatcattaaggctaagttagaatgagcggaaagcaaaatttgccctaattattatgtcacagggctttccaacatcgaagctcgtttttttgcttcattttttaaacaaaccttactcctcgtcatccaactaccgagcttctcttccttcagcaccctttgataatttgatctatctcagcatgcttatttctcaaatctgggatgcttgaatctttgtagcccttttgctgcctaattggatgctaattttctctgtatgagctccatgctatgtatgactatttgatggggattggactgtctaaagttttcttcttatcccacaagtctctgtcctgattc

SEQ ID NO: 4369 - DNA, 343 bp, Zea mays
  Intron number 4 from transcript GRMZM2G098063_T01 (locus G RMZM2G098063) derived from phytozome v7.0 (chr-ID 1; pos 2 54401642 to 254401984)
ggaagagcaacattcgtaggggatctcagaatgtgagcttggaagctttgttttttttttcttttggattgatattctagtgcagttattgtgatccaaacctttcttcgcagttcgtaaataattttagttcaaaaaaaataaaaatagagtctgattctaatccgatccgatccttaaatttttaagatttagttttcttaatctctgaagtactactagctctaaacaagttgccttgaagaaattcacagtactgatgcaaatacttccagagcttgagctatttttcagttcagttttacacttccctactgcaacctgcaggccataccaagagcat

SEQ ID NO: 4370 - DNA, 694 bp, Zea mays
  Intron number 7 from transcript GRMZM2G013908_T02 (locus G RMZM2G013908) derived from phytozome v7.0 (chr-ID 9; pos 1 42036396 to 142037089 reverse strand)
tcagaggtgagtgatatgtgaagggtgtcagtaaatctttgtataattatcaaaatttaattcaattgcatttgtgatttcaattccttgattctcatattatgaccttaaagaacagttatgtgcccataaaagtgctttatcttagttatgctaatatggtatcttttcgacaggtttaagatgaaggtcaagtcaataatagtttgaccaccatttcatgctctttcttccgtatataagattttacctattttgcgggatcatgtcatatgtgacatgataagtttcatggaagcttacatcttagtggaaaacataccaataaaccattgcatggctttgctactgagtagactacatagtgttccttttagagaccaactggtaaatagatattttcactatgctgtgtgtggacagaagatttatttcagttctatcttcatgcatttgttgggtgggtcatgacttgatcttgccttatgtgtttccatgcatccattttcttttggaattgatagatttatagccttttgcatgctctgctcatggagtgtgtgtattttctgaatgatgatctctagctctctttgctaattgatattttctgtatgtagtatttggctaattgccttaataattttctcatgacattgttgaccaactgaagatgatggtttcaggtttggtc

SEQ ID NO: 4371 - DNA, 601 bp, Zea mays
  Intron number 3 from transcript GRMZM2G003385_T02 (locus G RMZM2G003385) derived from phytozome v7.0 (chr-ID 3; pos 1 85837441 to 185838041 reverse strand)
cacttggtgctggtcggattttcgcccaagggtatgttagatatttagttatttttggaaatatgttttctgttgtaactaatgcgctgtggtttcaatattgcatttgaacatcaatgtcgaaagctatactttttctatacaggccaagcctccacgtgagatagacatgtagttgcttacaaataattttgtccataaaagatcaaaatctttgtagcttggaacagtacaaagtttattcttcatgacgataatagaccctgtaattttgttatttttattgtcatcaattaccagtttcattgacacatcaatgattttattaattttattgctttgagcaattgatgctaactaggataccaatcttgcatgtgctgatttgtttctcactactgcagtgtactttttggctcaacatttgaattcgcatgcaaccaagaacttgatcttagtgtactattttgtttgtcatgttagtcttagataaaacctttagtccttaagagtacatactagatgttctctgatctgactgagtactgcattctttttgtctatagtgctaagcttgttgatcaagctcttgcctcaggaa

SEQ ID NO: 4372 - DNA, 970 bp, Zea mays
  Intron number 1 from transcript GRMZM2G053610_T02 (locus G RMZM2G053610) derived from phytozome v7.0 (chr-ID 6; pos 1 51201523 to 151202492)
aagtggaccagccgcctcaagtgcaacctctactagtacgatccgcctcctccctcccctgactcctcactgtattggtgcgtagttgcctagtatacctttttgctttccctgcctcgtgctaatccacgatttgcccagaactcgcgtactatattgaatttgaagggttttctgtaccatctagaactcgcgtgctgtattgaattgtagccatcaagaataaattctgcttgatcggggggggggggggggggggggggctccttttgatagccccagactgctggccatgttgctggttcggctaatgcagatacccctgacgaaccggcgaatacctcagagtgtatttgtctaatctcagccctttttcattctcatggctcacatactgccataagatgccaaaactaagaaaacgtatgctgctcataggtgtaagcattataatttttagtcccagaaagtcagttcgtgattaaaggagttacacaggacagtgtctggccgtgggttagcctttttgaaaattttgattgatgaattgtagtttcatgatacggatcagagtgagtagttctctgtatcgacttctgtggcctcagcctgtctactggtttacatgctagattaggacatgttggaataattgaaataagcttaattcttcgaaattttttacatatggtaagtggcttactcttggggggaagaaatttgtgtatgtgcatataaattacgcacaccattgttagtcttggagctttaactttgtgttggtcaagcatgacacacaagacttcttttttctttttgttactctagctctagatgcatccaacttagagaaacgtatagtgcactagcctacttgttagaaaaggcacattgttttcattactttgtgtctagaattaatttcttaaatttgatttgcagctacaggacaaactatttcatcttgatc

SEQ ID NO: 4373 - DNA, 575 bp, Zea mays
  Intron number 1 from transcript GRMZM2G466563_T01 (locus G RMZM2G466563) derived from phytozome v7.0 (chr-ID 1; pos 2 20850888 to 220851462 reverse strand)
ccgcacaggagtggccctaggcctacgcagacccggtcagcgccccgcttcctgattttaccgcataacttcagatcactgctggttcattccattccattccatcatcaactagttcactttttgaatgttttggttcacacccgatcgagtttcttgcaactacgtacttaatttgccctcatctccaatcatttattttctgtttcaagtatatgtgttttctgcggtaaatctatcatcatcaaaccagttcatctcacctatgtaagaacaagagagaataaaatcccatactcaataaaacccgtggaatcactagaaaaacacatcatctgtaactcaataaaatccacggaatatcatgcttgtgctagatttgcgttaattgctaatttgacatcaaaaaatgtcacatatatatgcgtatgtatctgtcaatattcatgcactagcttcttcactctcgaagattcatttcgtcccagccgattaactttctcattttttaaaaatttctgtatgtactcgttttcgcagtgttgtaagaggatttgtggaccaagaaagtattc

SEQ ID NO: 4374 - DNA, 1017 bp, Zea mays
  Intron number 2 from transcript GRMZM2G485898_T01 (locus G RMZM2G485898) derived from phytozome v7.0 (chr-ID 1; pos 2 15997773 to 215998789 reverse strand)
tccccctttctttcttttcgcaattgtctgtgttggtgtgtgtgtcctgttaggcatccactttatttaaggcccgtttggttcctttaatcattaaaagtatagcttatgaacaaaatactacaatatggtatcttgtctatcgatagtcctacaaatatatacttctatcactacagtaaaacgactcacatccgatggtcacttaatctccgacgacttcctataccaccgtcggacgtaagattatgtccgacgacctctgctagtcgtcagatataataacttatgtccgacggtttatctgacagcagtcggacataagtgattttaacgtgcgtggccaggcactgccgtttcatttccatccgccgtcgtcggacataaggtttcttatatccgacggcttctcctaggtcgtcggatataaggaaaccttatgttcgacgacttcccctaggccgtctaacataagcggcatgggccccgctgacggccgttaagactaatcgtcgatggctgaaagtggccgccagacataaccgacggctgccgttggaattaaggctatttccgaccctttatagccgagggatgagtaccgtcggatataggccttcggccatcagaaatagcttattttcaacggcttagtgcttatctccgatggctttggccgtcggaaatgatctgttttactgtagtgtatgattattttttcattcgagtttaatgactaagggtctgtttggatctcagaagctaaaacaaaaaccattaaagtttagtcgattagaagctaaagatctaaatagaaagagcaaaaaaagactaaaatggtaaaaatatcattttattcacttttaacttttaaggaggagctaaaatttagtaagtttgttttagctcctgaatcaaacaggtcatgtggtctctaggcgctcaattttcatgttgcctatatataggtgcgtcttctgttgcctaaatgattgtgattgcagcctaccggggaga

SEQ ID NO: 4375 - DNA, 603 bp, Zea mays
  Intron number 1 from transcript GRMZM2G096010_T03 (locus G RMZM2G096010) derived from phytozome v7.0 (chr-ID 3; pos 5 5166453 to 55167055 reverse strand)
ctaaggttagttccggtgtcatgcctgattgcctgtactgaataatgccagcgttttggttctgtgttgcttcagaagtactgtatttggtcctagagcaccaaggttgatggtttgtaggaagtagagtgatagcgacactaagttcagtgttactcactacgtatgtataatataatggtttgttttgcttgttcagatagattgaagataagtttgattgatgttatgtggcttgtattagtcacgaatctaaaatctggatggtacatatattctcacttttggacaatgaatggggataccctgtgcccctgccctttcaacttccagaaaaatatcttagcgctcaattcaatttgcgattgctagcaatagagacgtttggtcccttacaacactcaacggatttggattgtacttcagtaatggcagtgatttattttgcacataatgcatcatattactttcacagattactgtggttctgcccatgcgactgaactataaattttgtaccctggtttccttgccatcttggtttacattttatcagggtttaaatcaggaccaatttgaagaatcacaaaggccaggggcaat

SEQ ID NO: 4376 - DNA, 903 bp, Zea mays
  Intron number 2 from transcript GRMZM2G165755_T04 (locus G RMZM2G165755) derived from phytozome v7.0 (chr-ID 2; pos 3 8574102 to 38575004 reverse strand)
tgctccactctagtggctgctcccctcccaatctggtgggtgtttactcaaatccccgttcgtcaccccgacggctgcgaggcagagagcggaccctgagctcgaagccgtgcgccttcctcactgctccctgttcttgctcacacagacacaaacgattaaccacgtttcatctacgcttaatctccctaccacagctgaagccagtataatataaatatatgtcgtgatattgattttttgcctgaagcctcagtttacattttttgttatatttgtagaaatttttgaaccaattctaagagctgatgccaattattgatgtgccactgtaacctgattaagtttccggaaaatgtagattcgatttggcaaataaaggttagattagatattaaacctatcatggagtgcacgtgctgcatgtgcaagcgcaaaggtgccagcgattcaaatcgagttgggcccacatgtgcctggaaattttttagctccgccttcaaaatttgagcgtcccgcccatctccccgtttcaattcttccactttgaattagatcccccgccaccacagcctgaagcacccaaatccatgagatttgccctaggtctattactggatagcaagtgctagttccatcaggggtcccaggtgcctaggttggatatccagacgacctaatcgtgaggaagttttaggattcagccccttcccctcccatttcttggtgttctgatgcgattcagggtgctgcttcccgtgaacctagtggcaggagcagtagtagtatttggaccaggcaagccaagaatgcgataatttttggggttgctgccttcccatttgtgtttattttggtgctcaccaatctctctcggccgcatgctttctgcagagccccgag

SEQ ID NO: 4377 - DNA, 584 bp, Zea mays
  Intron number 1 from transcript GRMZM2G021276_T02 (locus G RMZM2G021276) derived from phytozome v7.0 (chr-ID 8; pos 9 6194 to 96777)
ctattatattttgcacctgttttgctgtgttcttggtaactagcttaattccttcgcctacaatcgtcaaatcccccccatcatcagtcagatgaacttttgatcgaattgaagttgttcttctaattcggccccagcagcgcccatgcatctggttttatttgctttctgttgggtataatatgcaagaccttttgttgctagggcaaggctgcaaccacatgcgtgtactgaactcatgatgtaactcatcctttttgtttgctcacagaatcactactctactgcacttccttttcatccgatccgcaatcttttttttcttttacatgctttagttttctctctttcttgattacaaacatgattactggaactttcttaggctgccttccccttccttggatctgctttagttttcttttttgggctaccgcgcgcggcttatttgagtttatcacttgctgcatatacataatatatatatacatgcatgcgatggcgttcatgttactcaactacagatctgtttctgttcgtgtgtttcagttcagcgcgcagttaagcatagcaggacgaccacg

SEQ ID NO: 4378 - DNA, 605 bp, Zea mays
  Intron number 3 from transcript GRMZM2G049839_T02 (locus G RMZM2G049839) derived from phytozome v7.0 (chr-ID 4; pos 2 33124962 to 233125566 reverse strand)
ttttccaccagcgaaaggtgctcttgctgcacttcctagcgtatatcaaggagataaattgacatgcagtacatatagttgtgccttctatatgagatgttcttgagaaactgaacacacttcttgtcttgttgcttatcaatgatgcaatgctttctggcagtaccaggtgttgcattaggtaaagctgtctattagtttcttgcacaataaataggttaaggttgttacaactaaattatttcttacatccttttttttcgtgtccagacgttttgtctttctttggctgttagtttgcctttaggacatcctgaccaaaacttagaatctgtctcatgttaaatagatgcagttgcttttgttatcttaactaaaccttaagattcagatgccaccaaagtataaatactttgctttgatttattgacaacacattgaagtagattgttcaaaagtcaaaactttaaattcacaccatatcctaagacatacatgaccttttcttagtttaataactactaatcttgagaatcaaggtactagcaaagcaccaatttcctcctaattaattgtttccgctgaaaatctcaggccatctcagg

SEQ ID NO: 4379 - DNA, 913 bp, Zea mays
  Intron number 2 from transcript GRMZM2G438031_T01 (locus G RMZM2G438031) derived from phytozome v7.0 (chr-ID 4; pos 1 63440101 to 163441013)
aactcttatgtacgcatgtggaaatgagaaagtgcacaaaagatatcaaggatacatttcttcgccaaagtcactcatcaaatatgattatatgtcgtcacatacattgtactaatgtttttatgaatcatttgtgggtaggattggccattcagttttttaagaatcgattcggtttttgaattttacagacaacaggaatcgatcggtttattagaaaatggaaaattgattagtacgatttatagttttaaccccaaatattttaatgggaattcctccagcttccttaaaaaagctcaataaagcgcaattacatcccttcattgaccgcttggcgaactctctcccgggttggaaggctgatcttatgactaaggcaggaagagcggtccaggttcagtttgtgttgacagctaatgtcgtctatcatgttatggctctagatctccctccttgggccctcaaggccatggataaaatcaggagaaattttctttggcgtggcagaagcgagactaatggaggttattgtctgattgcttggcctaaagtcactagacataaagagctgggcggtctcggtatctctaatttacagtctttgaattgggctctccgtgttagatggctttggcttaaaaagactagtccggacaaggcttgggcttcttttcaactccagttttcagatcaggtcaagtctctcttcgatcttgccttagtctctgaagttggagatggcagcaacaccttgttttggtgtgacagatggctgttagggcagcgcccggttgatctagccccccacctatatgctatggttcctaagagagtagctaacaagagaacggttgttgagggcttaactgatatggcttgggttcacgatcttccctcagaaagagaagaa

SEQ ID NO: 4380 - DNA, 1027 bp, Zea mays
  Intron number 2 from transcript GRMZM2G092244_T01 (locus G RMZM2G092244) derived from phytozome v7.0 (chr-ID 6; pos 1 28161953 to 128162979 reverse strand)
gattcgtggtcgggagcttccgtttctcttcggaggtaggagtatgtgataaatttcttccttagcttggattgctggcgggtgtagttagcatttagccagtctctagcgatttgtggaactgacaattagtggacaaaatgtggagccaagatggttgtttgctgtgccgcaccgggggtgcttctctctagcaatattttcatattcatctgaagggcataaatcacaatgttattcttttgacggacattttggtaggtattgttgttgctgtcactatatataaagattgatttggttctattcttcgagagtaacttaagattctgagttgaactgcatactcttccatcgttggaatttgtggatgtggattttcatctcaggttcctatccaggtttgattttgatgttattgtggtgggaagtgtatgttcacatgttcgtaacccttaataggattattatcctagtattcgccaactatggcgtgtgaaatcgatgagagtccttcctgcacaaatttgcatgtccgcacacgactcaagctattgggatgaattacagggtcagggacattacaggatactccctccgtttcgttttagttgtcgctggatagtgcaaaattgaactatccagcgacaactaaaaagaaacggagggagtataatatagcatgagcttcaaacatctctcagagaagctggatttggacacttggtcgattgtgtcattccagaactgtcttgtagtgaactatatatatcatatctcaggatttttaaatgaacgagaaatagcttcttattgttcctaaatcttgcaataagttgcagttatttgggttgaccttgatgcttacatattagtagtgtattgttattacttgtatgactttcttcataaagatattgacttccttaattaaaaagggagtgctaaagtgctaaatagcttattgatgtcaagtgttccttttctttcaggtgaagtggatctgacctactgtaggggaaagagc

SEQ ID NO: 4381 - DNA, 607 bp, Zea mays
  Intron number 1 from transcript GRMZM2G056920_T01 (locus G RMZM2G056920) derived from phytozome v7.0 (chr-ID 4; pos 2 33764518 to 233765124 reverse strand)
caaaggggattccaccggcgggaagcgattgcgaggtgagtggggcggagcctaccctcgctctggtcgcgaatcccgctcatctcgggatgtgttttctcgtttacgggaacttttctttgctgtgttagggggtttcagggaacttgcctgatttggtgatcaggccgaatctgggggttgttgattggtgaaacgagaatcgcctagttcccccaagtttcttgaactcggcgtgtaacttttcgtatctttgaaatcttgtataattcggggttcgggttaggcattgggcttatttgttgcattttagcctgaatcgttcatataacgtgcgggtcttctgtttcgatcacagaggtttatgagttttttcttttttctgttagcttgttgtgtctgctgtccagtcaataatttagccacagataaacggaaagtgctatttgtgtttttaattaatgcactatgctgatgtagacaaggcctcattaatgttcattttttgtataccgagattagtaaattagcaacatattaacctggcgcacataattaatttgatgtaacagcatcggagtcatttcaaagtggcgtaggaagcaaa

SEQ ID NO: 4382 - DNA, 411 bp, Zea mays
  Intron number 3 from transcript GRMZM2G156320_T02 (locus G RMZM2G156320) derived from phytozome v7.0 (chr-ID 4; pos 1 61066002 to 161066412 reverse strand)
tattcatcatcaggttttcttttctgttttaacggttctaaatacataaaaatagtggtccattgtttcatttgtattgtctataaactatcgttttgatttctccatatcgaaaaatgttacttccactaaagtgtatgcatgaatcattcatatcataaggcagataacatataccacgtgaatctacactaaaggcgataattacaattgttgaattaccaacctatgcatagagtttgtttaattttgagtttctagcattaactcattcagttgaaaggtaattaagtttgaaactttagaacttttcaattatagtgaccaaagtccttattgcagtcataatttcattatgcatccccctcagaatgtatgattcaaatgttttctcttctatttcaaggtcgg

SEQ ID NO: 4383 - DNA, 541 bp, Zea mays
  Intron number 6 from transcript GRMZM2G132712_T01 (locus G RMZM2G132712) derived from phytozome v7.0 (chr-ID 1; pos 1 91517775 to 191518315)
atacatatccacgcaagaagagaaaaaacatactggtattttataagtacacataagatcatatatatttttaagcatggcaaataatcacttccagttaaaacctcttactattaacactgtggttgcaatttttcctagtgttacacatttcccttttcttttccttttgtttttcagccttttgtcgaactgatgtctttatgtttctctgctcaaagtttctgctactttgattgaaatcctgtcccctttttgctactgggtggaattttggaccacgtttcaatgagatagctcacaggaagaaattgtttttttttggaaatgagtaaattctcaaaagcaacaaaaatacgaataaatctttataatgaatacattttttaatggtaaaatcaaactagacattgttcccatcataattttctacttctgtatcactatgtgttacttgttgcttcaatttttttttaaaatttaactctattatgtttgattcacagcgttttgtatttgaagcttgccaagatttaactct

SEQ ID NO: 4384 - DNA, 732 bp, Zea mays
  Intron number 2 from transcript GRMZM2G123159_T01 (locus G RMZM2G123159) derived from phytozome v7.0 (chr-ID 1; pos 2 64166666 to 264167397 reverse strand)
ggttacagtatgtctctcgtaaccttgcatctttgtttgggtgtcccggcctgtcataaattcgcggcagttgtgtgctgctagtgcctctgcatctttgcttgggaaattaaaattagctgaacatgtagagtgcaaaccctggatatgctagtttgagtgttcagacatgagtggtgtaaagacactggatcatcttcttctacaatgtttttaaggtggtgtttggttcgccgaagtctaacgtaaatagattacatggggtaatggataccgatattttgtttggttgtgctctttctagtaatactatgtactactattcaatccaattataactagtaaccattaccgccggtaagagatctcattaccattcccttaacaatgtctgaaccaaacatcactattgcctcaccattgtaaatggaattagacatatttacatgctgcctggtgcaatccatggtttgttttctccaagtagcattgttttagcatttgttgctcaccattcaaggagcgtgtgaaatctgaaatggctggtgaaggtataggatgactggttaactcactattgcctctgttggttttaatcttgaatggtgagcaacaaattagagatttatctccttctggaatgttgaatgtaatattgttctgcatgttccatttctctcttgttcgtgttcgtttagttcaagagaagtaagctagaaatcttttgcagtc

SEQ ID NO: 4385 - DNA, 685 bp, Zea mays
  Intron number 1 from transcript GRMZM2G398057_T01 (locus G RMZM2G398057) derived from phytozome v7.0 (chr-ID 4; pos 4 175145 to 4175829 reverse strand)
ctgagtgtacaggtaatccagtccagaaaattgtgtttattttaaaaaatgttatagttggcggcaatgttatcataccaagaaacattatttatgtgtgttctatatatttgttacctatcttcatacactattgataggcaaatcataatcataaatttagaaacatgcttgtagtacgtttcagtttctatttatccttaccacccctcaagtgcaggcactacttgtaattagcctgttagtgtttcccttggtagagctatagcccaaactttaatgttagtgtttcagtttctatttatccactgaaatctattttcatttcgagattgttttgactaatttcagcaaacaaataatgtttgttctgaattttattttccaaaaaaatatttgtcttaaacatgtgggcagacctggtgcagtggtgagagttgccatattttttggggtggggggcttgtctcggcttatcacttccctagaccccacttatgtgggagatcccagcactgggtctgccctttatttggctttaacattacgaggaactctagctcaaagacgatcaataagaacctcaatttttcttgtttttagcacggtatatcaagatgaattacacagtcctatttttgattcattagaacttggacaatctttggcggacttcggaaaggcg

SEQ ID NO: 4386 - DNA, 851 bp, Zea mays
  Intron number 2 from transcript GRMZM2G130332_T02 (locus G RMZM2G130332) derived from phytozome v7.0 (chr-ID 1; pos 1 50670281 to 150671131)
tgaggatcttcaactctgacggcagcgagccagaggtgcgcgtgtctccaccatttcatcacaatactgaattctattgcacggtcgtggatgtaatgttctcgcaattcttattggtagccattcttctcagccaccaaattgtgctaagctaagcatagtgcgaagctggtgcaggttttatcatgtgagctttaatgcaaaaggagaaaacatgtagatgtgtagttgtgaggttcttcaaattctggtagatgcaaacttcagccttcaaatcaacttgctagctcaagcttttaatttgccaggcaccgattagtgtagattgggacacctaacaatctaagcatcatcagaatattttccagaattggtcacttggtgtatctttactatatccactatttaacggccttaccagatttatggtctgtataccgtacatgtctcactctctaacataaactggggctatgttttagtattaaattctgttctgtcagtggtgaatggctgttatacaattcaagtttcatcatgtttccaatcctaaacaaatgcttattatatgatcacatatgttctggctgttaaacatttgaaacgtcataatgtttccaatcctaaacaaatgcttattatatgatcagatatatatgtttcttttttgcactgttaactatcaagtagagtgaaggaaagtgaatattaaatgtcgcgcaatgttttttccttatcttttttaatctccaggatatggacaaccagaaaatgtttaatacagcttgttaatctgaactgttctcatagactaaattttgatcgatcatttcttttttgattttcatcag

SEQ ID NO: 4387 - DNA, 848 bp, Zea mays
  Intron number 1 from transcript GRMZM2G084465_T02 (locus G RMZM2G084465) derived from phytozome v7.0 (chr-ID 3; pos 1 82279817 to 182280664)
gggtatctcactgtcttctgttgaagttttttgatctatcctcgtgtccatctattttctggcttagcgattatgagtgtggttcggtgtgactgcataagtgcatctggttgcttgacgcgcagctttgcttgcgctaatgtgaagtatacatcgtgatctattttgatttcttctcagtatccacgtgaagcttattgacggtccagtgctgatcagatactacaacgtcagcgctaaacatattcataagcgacattaatccgttgctgctgtgtagcaatatctttcttggtccagttacttggatttgggaagctatgcatggtagcatacaccttcattattcttcgcgttttcaaagagtcgcctttttttgtgaaacttcatttgaagttttgcgaaactcccgatttggagccttgaagcgattacagttataatccatttatttaagagtcaacagtttagctgttcaggtactgcaggtgtagtgcacctagtgtttttctcacaaacattttagacgcttattctagtacacagtgaggtgacgaaaacttaattagaactaggaaaactgtatataagtgtgtcaatatatcgactaatatcttgattcagacattcggttacctgttttgttcatgtaatgtcgaattgttgtgtggtattagtccttttctttctagcactgttaaaaagggttttggcatgcattgtcagttgtaatgtggggttttgggatgcattgccagttgtaatgtggtagtctatcacatttggatagaccactacattaaaatgttaaaacgtgatctgctttcttatacaggaagacacgtggt

SEQ ID NO: 4388 - DNA, 577 bp, Zea mays
  Intron number 5 from transcript GRMZM2G109526_T04 (locus G RMZM2G109526) derived from phytozome v7.0 (chr-ID 3; pos 1 68481596 to 168482172)
gccaccggttcctggttttagaaagtccaaaggaggtactgatcatcataagcacaccgcaacctctctctctctctctctctctctctctctctctctctctatctcttattaatgtcacgttctttcttgcttcacattggcactaaccgtttcttacaagacatattttagtaattgtttgcctcaagtaattcaaacttctaaccgttttgtgtcctctgcatgcacatatgttggatgttcgaagggaaaacatcaaatgtaagtgcacatggacctttttttccgatcagcttcaccaatgcaaattattcaaagtcattttatcatcttccaaggcatgctctattaatatatatatatgatgtccttttcctatagaaaaaaaaaacagtcggtttgatcaaacatgagtacacgcagctgttagcaactagatttcaaccacaagtgccggctatatcaagcctgcactgcacaatctttcagtttgtactttgtactccttcagaaccaactgagcagagattgtgctgtttctgtccttcagatacccagcagcatcctgctgcag

SEQ ID NO: 4389 - DNA, 573 bp, Zea mays
  Intron number 1 from transcript GRMZM2G525263_T01 (locus G RMZM2G525263) derived from phytozome v7.0 (chr-ID 2; pos 1 73436873 to 173437445)
gggggcaaagaaatctcagttgttgatgaggacaggtgttgtgaagatctagcttgctcatccatgtcatcatttccatcatccaaactatcgccttcattgacctgttgaactggttcttgtacactacatataataaagggattgtcaggaagccatattctctaaattaccacacaacttaccagagtgcaataataacattcagaaatggcatgctctaaatattaaagtacaaaaataaaataatgtaagattagaatttgccaaacataaaccaacaataataagttataaatgaatctatgaatctaaaaacattatagtgctaacagagagagaaagagatttacatttgactgagtttgctttcacatctattcttgttctttatctgtgattggatctcaccaaagatcatgtcagctttctttgtgctagtagcgatgacaacctgtatgaaagagagcataactggaggtcaatacaatcgctttttcagatgtttgataattcaattatagtttgattattctcaattgttttagttcaatatagattttaaagttgaca

SEQ ID NO: 4390 - DNA, 558 bp, Zea mays
  Intron number 3 from transcript GRMZM2G005256_T03 (locus G RMZM2G005256) derived from phytozome v7.0 (chr-ID 4; pos 1 62763954 to 162764511 reverse strand)
gattttttgtagccaaggtactttccgtttgactgttttccagttcaacgcgcagcaattttcgaaagacaaatcatagtgttctctaagtataaagttgcatgttgacccctcgaaggttttgttgtatttgttttggcaaataattaaactgggcacttgcatgttggattggttatagtgcattggatctgaagtctcttatatatggactctaattgtaacatttgttctaaaataattgacatcctagaaatgaatgcatgcgttcagtttttaaagttttaccgcttgtgtacaggaaataattatatatttttacatgaagattagtatcgagcatcacaaaatataatttgataacatccaaacattgtaatttcatcaatgttgttaatatataatttttgaagagtaatttgaaaaatttgcgcaggtgagatcctaaaaagaacacacaggacagaggtagtattttagagcatctattgacatgccatgttttttgtgctattccatacagctgaaaaagttaagcaatacaatcccggtgacttc

SEQ ID NO: 4391 - DNA, 695 bp, Zea mays
  Intron number 1 from transcript GRMZM2G703312_T01 (locus G RMZM2G703312) derived from phytozome v7.0 (chr-ID 2; pos 1 94825603 to 194826297 reverse strand)
ccttttgccctcaacaacgttccaggcaagaggaggtgctccactgattagaggcgttcgcgcggaggtttgatctgctctggctggcccgattagatggagatgctcattgtacaacatgtgatcgcattaggttttagggtttgtgatcctggtaacgtattttcacttccctcctcacttagatctgtttcatttatgcctagataggtttagggttcgtatacaccacctccacaatgttctttgtgctgattattcgtttgaacaacacccctggtttgggcaatatgactcgtgaataaaatggccatccagaaaagaaatggttaatcaaatgctatttagaactgctggtcatcgtgctttagttataagatggtttctagacgatcacagtataaggacactatttttgctttagtagcttgctgccaattagttataagatggttgctagctgcatatgcttactgcttggttctcaattacttcttgtgtatcatatttttcatttcttttctatcttctgattaattcttcgtataccattaagatgttgcagagtctgtgcgctagggagatgcaaggccatttgtagaggaagctgtgctgcaagtatctgactggggtttcaacttatctgacatccaaatgcagaagaaagaggctcaaagattatttgaactcatcaa

SEQ ID NO: 4392 - DNA, 867 bp, Zea mays
  Intron number 1 from transcript AC190631.4_FGT001 (locus A C190631.4_FG001) derived from phytozome v7.0 (chr-ID 3; po s 23237926 to 23238792 reverse strand)
gaaggtctctacgccatctgttgtagataaaactggtataagtagtccaggatttgaacggattactacagcggtgactccttcggcaatcatggtagctgaagatataggttcctttaagcctgccctggcagaggacaaatgaaaagggcctgctgaatttgaagaagccaaacaagcgaccgaagatgatacaccacttggtcagggaccttttgaccaatacctgggtgggcaaaggtaccgggtccaccatgatgcagggaaggtgatgggcgcaaagcagctggttgaggctattggtttttccgaacaacttggatacccttcggggtttacaattttgggggcgggccagatgattatttgtattgctgccccgacaatatggatacagaagtatgtcgttatacggcggactatgttggttttctgaagatggaggccatgctttcaactatgtctaatgaagattttttagattgcttaacttatacacatgttaaggtaatttatatcggtttttttgcttcaagttgctttgatgaaatgacttattcttctcttgtttatatctttgcagggtctattcctaagcaagaccttaaagaacaagaggaatgtcgagggcgaagctgcatagaaagaaataatgaaacttagatcagaagtgtccgaacttcgatttgattgggaagaaaaggaaaaaatcttttaagaccctagaaaaggattttattgacagtcttaccgaagtccagataatgcgcgaggagaaaaataagctcagcttcaaatgctgaaaatgacaaatgaattgcgttgctcgaagctgagctgggacgggtaagaaaggaacacgaagtt

SEQ ID NO: 4393 - DNA, 757 bp, Zea mays
  Intron number 2 from transcript GRMZM2G175797_T01 (locus G RMZM2G175797) derived from phytozome v7.0 (chr-ID 9; pos 1 55726592 to 155727348)
cgccgagaagctcgacgcctcttcccagttcgtaggtcccgatatctctgcccgcacctgctgctcctctgcactggagtccaatggagtgtctcgcacaactttttttttcttcttctatagaatgaatcactggctgctgccatagctaaaactgaactgaatcataataatactgtaatagcattgtttttgtttctgtcacaacaaaacgtgtagtgggataaggaatttaggcagaggaagggtcaaggagttttcatttagccctggtgataggcagaaacgtttaataggacacttttccctggtgataggcagaagcgtgaaggaattttcgtttagtcaatcttacattgcttcagctatctgattagactgtgatgaatctagaaactaggtgcagtgggttgaggacaagtccataaagaatagacaaatactgaagaacccattctgcacattgttatctcttgttgtttgaaggtacaaccacacttctgtaccatttcttctggtccttgcaataatatagtggaatctgtcgggatattttttttgagcttttgtctcctccttgtaatattcctatactgaattccttgtaattttgtttgctttccttattgaaacagaagcagatcttctgctaacaacatgtctcattaaaaaatagagactgtttaatctcctgctgctttctcaaatatgatatattataggagaccttaaggagagtttttacattgggcctctt

SEQ ID NO: 4394 - DNA, 697 bp, Zea mays
  Intron number 1 from transcript GRMZM2G074811_T01 (locus G RMZM2G074811) derived from phytozome v7.0 (chr-ID 7; pos 1 63755428 to 163756124)
caccggcaccgccgccctcaccaccagcgacccaagtaaacgcgccccctccacacccctccttgcctagagagcattacgttatctacacgctggctgggttagaattgccaagagaagatgaagagtagagaggtttagggcttgtaggtaatggagaggattgatgggactagaatctctcactattcaattttcaattttaaatagcgagagattttagcctaaaggtctgccattgccattgccaattgctaaagtttttttttgtgtgtgtgcttggggcacctgaactcggcttttgacatggaacaatgcggatctgatcatttttggcacatttcattttgctatcagttaccataagggcaccagcttaaaaaaccctaagttaaagctatctaggtgtactgctggtcaagcaagctttagggaatcgagttctgtacaggcacactgcattaaggctagtggtgtggcctcgcctaaaactagtaaaacacattagaaaaaggaacattttgattccggtgtcttgtatatggtgtctgtgttcatttccttccacgttcttctgtgctggtgtgacactgtccgtttcatcactccatcagtgtcctacctgtatcttacatggtctttgtgctactataaactttcaggttcttcaggctgctcttaccctaccggtgcaagg

SEQ ID NO: 4395 - DNA, 854 bp, Zea mays
  Intron number 2 from transcript GRMZM2G113775_T01 (locus G RMZM2G113775) derived from phytozome v7.0 (chr-ID 1; pos 1 9701912 to 19702765 reverse strand)
agtacatcgccgccgtctggggacgtaagaggtcagtgcatgggaccatcacagtataaataattcctacttaggaactgcgaatttgcttcatgtggaggtgattggtgattgcttctgtgatgatttgagcaaaccatgtgtgttgcctttggttagtcgcgtgtgaagataatggattgtagttgtacctttgtaggtgagaattgagtgtatttagttatctgtcaagtgatgtgtttcaatgaacatgtctagaagatgaaaagcaacagaaaatagatcgtgcagctggtgttactttaaaaaaaatagtatgagaggccagagctggtgcttttgtgaggattaattgaatttcgatagaaatgattgctgactgcagtgagaatttgatgacagttctacagttgcaaataattcttcttgtgcatgcaatttttgttcattattagtgatccaagaaccaagatgctagttttgattgcccaagtgttgcatcgctgtgttgtttactaagattagttgaaacaagaacctgtggaattttgttcgatattatacgacttctgcagcctgatgttattcagtattattgttgtgagaagctcagtagtccagtacttatctttcatgggtcttatgctgaacccagatatgatcaagatgctatgtggcagttcctatcctgctattttgtagttgtttcttattgacataacacctcagcatcttgttccattatagcttcaacgtctctttgaagcactaggtcgattttattggacaatgtataactgaatactcttgttacttcagaacagcaaggtggaggtcatttttagctgggttga

SEQ ID NO: 4396 - DNA, 799 bp, Zea mays
  Intron number 1 from transcript GRMZM2G033694_T01 (locus G RMZM2G033694) derived from phytozome v7.0 (chr-ID 2; pos 1 73791952 to 173792750 reverse strand)
gcttgtcttccgcgcccggggtcaatctgacagaggtgagtgtgcttggagtacatgctgctgacgctcttaacttacccaccgcttgaatgttctttgcttcctatggagagtgcccatataggatcgatgttactatcattgccttgtcgattttttttgctattacagtacttattttattaggcttctttgtctcaggctcagttctactaaaggtctatttggaagcactcagtttttaagaaaaaaacagaccagtttatgctttggtttctagaaactggattcccagtttctaagaaaccaagaagctggccttcccaagctaaaaccagcttttgcgcggcaaattacgtactgtccttagttggtttagtggaaattatagtaattgccactgctctcaggcctatgcatgtgatgcctaaatgcctgcactacctgatttgaatgtttcgttattatgtgaaaattttgaattaaaaacgagttcaatctatatttaaaattggcatgaaagaaaaatgaagtgaataattgaataaattaatttaaaaatagagtaaggatagacttgtctatgtgtatcgaaaagcctagaaactggtttccaagaaaatgggttccaaacacgcacacccagtgttttcccataaaccagtttcttgaagctggggattgaaatcagtttcttagaaactgtggtgcttccaaacaggtcctaagttacttatctcctgcttggaaatatctctcactagcctatcttttacttctgtgctgcagcaaatcgata

SEQ ID NO: 4397 - DNA, 999 bp, Zea mays
  Intron number 1 from transcript GRMZM2G140885_T02 (locus G RMZM2G140885) derived from phytozome v7.0 (chr-ID 8; pos 1 345337 to 1346335)
ggtgcgtcttaagaggtttgtggttcctgtcccaatgagcattttattgttttacacaaaaagaaaagatggtggctacttctacattgtgcataccttcatattgtgatctcatctgctcatatacacaacgttccaccctagtgaaaaagctgtgtcatggtatatttccggacaaggtgacaaaaaaccattatgttagataactgtgatattgatgaatatgcaatgttgatgttggatagtaatttttgttgcattcagtgggatttgcttctaattcaacagtttggccatatgcatatgctctttaatattgtgttttatctaaatagggctgtttcagaggtgggcatacatatgtcagtagttgtggggtacacactagacagactcactgttctgctttgtgcaaaagaagagatttgaaaaaattgattcatggataagaggaaagaagacctttatggactatttactacataatgctcctgttcaaaattataggccactttagctttgtccaaagttaaacatatctaccattgacttaagtttgaaaaatgcaccatctacaacatcaagttagtgcagatatttgaacttgtaggtaagctaaagtgtaatttggaacatagggagtcgctaatttgcagacttgagatctagaagtggactaatttgctatttacattttttttggtcatcttggtcttttattttgtgcaggcttggtgcagtggtgagaactgtctcactgactcaccaggccgtaggttcgaagcagcctctccgcatttgccggggaaggcttgcctcggtttatcccttccccagaccccacttatgtgggagtttccggcactgggtctgcccttttttagtcttgtattttgtattttgatcttccaagttgttatgtgtttctatcatcaagtgatgaagtctatgaattcaatttcaggggacgcaaacaacatacaaattggatctgggacc

SEQ ID NO: 4398 - DNA, 779 bp, Zea mays
  Intron number 2 from transcript GRMZM2G131402_T01 (locus G RMZM2G131402) derived from phytozome v7.0 (chr-ID 8; pos 1 45856296 to 145857074 reverse strand)
caggtaaagtgatatttttattttctccgtattttgtctttttaggtatttcttaataaatcaatctttcattctatgcattaggactcagttttcctaaagcttgttttaggtatgttcttaatctttttcagaacagcgccataacccactaatagttgtttatcatgatattcttttattccgactattccttgtagtttactagggagttttggtgctggtaggattttggtaatagtccatggtggaaaaagttatagcagaaaaagctctattttcagttttccatcgaacatcattttgataggttgaagagccaagactgacatatttgtctaaaaatgagaattatatatgtcaaaataaatattgctttactagcctgaaatagtcgaaatatcacactacaccgtaacaaagaacagagcttaacaaagcaagaacatattaaatcaagtagttattatctgcagctcctttaggctacagaggagggaacaaagtcatgttatatttcaagcaaacgaaacgaaacaaaacaaaggaggtgtgtgttcacacaaagaactacatgcatttacctcgttttttatttcattttattctatattttttcacactttattgtaggtggttcgaagttctatgatcataagacgcatttaggtcgatctcactcttcatgttcgtgcccgctgcgcagaacgccactgcagcaccgatgcagcaccgatggaattgtacggtgtcatcaggctcgactagatctagatgag

SEQ ID NO: 4399 - DNA, 1034 bp, Zea mays
  Intron number 3 from transcript GRMZM2G150193_T01 (locus G RMZM2G150193) derived from phytozome v7.0 (chr-ID 4; pos 2 39800661 to 239801694 reverse strand)
ggttaaagtaacagactggaatagctttcaaactggtaatttttaccagttttatggctcttgttgtcatgggcatcatagggagcggtcactcatgtggggccgcacccatgcgcgccaaaagcgagaggccgcagggggcgctgccagcgcccgtgccttccttgcgcgcgctgctgccagcgccccctgcggcctctcgctttttggcgcgcacccatgacacttgtttactcttcaaatggcctgttactatattgaaactgagagcccgaattgcaatgttaatccatagtttcataattatgctaatgcattctgtgattctgtatgcttaaccgttctcttacatgtatcatcacagaaaatgcaggcaccagggttataactgtgtttgttatagttactaaatgtcgttacacaatagacttttacaggcgattcagattcaatgatgtgaatatataatcttggagaatattacagaaaaaaattgttttataaattgatccctgacaaggaaatgaacttggcattttcttatggtaaaacacacaatgctgaatgcttaacaagcaaagaatgcgaaaggacctctagcgtaatggttaaggctttcgagtagcacctctaggtccttggttcgatcctcctcggtggcgaattcggacttggttaaaataatctcctcgctgtgccccgcccggattacgtcctgggcgccaccttccggttggaccgttgcagagtgggcggtgacggcatgctagtgatgagggccagagttcggggattttctcagtcgggaccatgttttggtctcttcttaatatataccgggagggtggtctttccctcccagtccgagtattttttaacaagcaaagaacaagcacgacctttgcgtttgatttgcttcactgtaataaaacatctatctgtctataagggctgtttctaatacctgacactttattgtttatctcgttcttttggcagaaaataaggcagcagcaagagctcactccaaaaaa

SEQ ID NO: 4400 - DNA, 752 bp, Zea mays
  Intron number 2 from transcript GRMZM2G156035_T01 (locus G RMZM2G156035) derived from phytozome v7.0 (chr-ID 3; pos 1 900599 to 1901350 reverse strand)
acgtggacacctacgagatcgtcgccgtgaagatcgtgagtgccctcggtttctctcgcctcctcctcctcactcctcttcctttggcggaattcttccgtgggctgctttgattcctgcgcgttagcggccggggatacggattatcagggttcatgtgttcaaatgtgccatcatctacttactagatttgttttcatcaacggatgcacatttcccttttttttagagagagaagaaaaaaacacgcaagctatgttctaatttcaaatgctcagctcgctttggttttagggactaatttttagtttctctattttattctattttagtccttaaaataccgaatacagaaaaccaaaactccatttaagtttccgtatttgacaatttagaaactaaaatagaataaaatggagtgactaaaaattagttaccagaaacaaacacccctttaattgtatgttgttgtcatgatatttgcctagcttttcaacgctgtggtgcctgttggccatgattacacgttccgtgggctaattgtagagcctccttgggcaaatgctgctacattagtatgttacaacagcaggggcgcgagccacaagttagcacctgcgcgttaaattaaacctctgctgctggcgacctttttatatataatcaataatcactgtacggaccagaggaactaaaccttgacaacctctctcacaggagagcagcaagacgaagcatccacagctgttcta

SEQ ID NO: 4401 - DNA, 915 bp, Zea mays
  Intron number 1 from transcript GRMZM2G160569_T02 (locus G RMZM2G160569) derived from phytozome v7.0 (chr-ID 7; pos 1 68251593 to 168252507)
cacgctcatccagtcggcggcggccaagggagcgggtaattcctctggttccagctcctgcagcgggattgtgccattatttaatctgtatatattttgttgcgaagactagtttttttttatcagcagccacgcccacgcgagttcttgggttcagtcactgggtcgagactcgagagtgtgttctttgattgggtcattgagttgtgtgaactgtgaagcatgttccgacagtgttgaccttggttggtcagcgcatctatataatagattggattgtgatttcccgtttcgtttctctctctccctcttccgtttcgccatctgtttggtcctagcactgatcctgatcctgacaaatgtatgggtgtggatctagccatgccactgccaccgttggtggttgtcatgatgaactattgttttcttttttatctttcatgatgaattattgttacctgattggggcaaaaggaactcaaaactatcaattgcatgtggtttctagcatgtgtctaggactctaggtgattgccaactgactattgcaaataccaaacaattcgtttatttgcttgtattgctccagatttgaacttgctgtaaggtggcgttcgctttccttttcttgatctatttcagatatacttttcgtgtgaatttactaaatcagaatttgaaagatctatgcacacctttgttaatcaaagtgtcgggtatcaatttcattagaatttttaaagtaatagctagattccccagcaagtcgatgtaccagaactttatacgcttgaagtagttcagctcaattctggtcagaattccagtgctggaaattttagtctagcttgtagcagggcagtgctggtaatggttgatgcttacttcttgtgataaccattacagtgtgcttgg

SEQ ID NO: 4402 - DNA, 964 bp, Zea mays
  Intron number 2 from transcript GRMZM2G479423_T04 (locus G RMZM2G479423) derived from phytozome v7.0 (chr-ID 3; pos 1 79642752 to 179643715 reverse strand)
atttgcagcttgagtacctggatctttatcttgtacgcatctctaacttacacttatatttcaatacctgaattcctctgttgtggtctctatatcattaacattttcctttgcgtgcattgatattgctacttctatatattttcttttcatttttcattaaagaaaaagtctctttggcaagctgaactaatttatactcaaatgctaattatagtttgctggcaaaattatatgtcactgacagtctattgcttgctatttctatgtatgatttctaacatggaaactggaaatatggttttctatgccatttattgaatatatgtgctcctactctctgaattctgtgtgcttaattagccatattaccatatctctttcaaaaaaaccatattacatccatgatggagttcctccatccacatgagtttgtctttttagggttgttctatgtcaaactatttaaactttgacaaacaatacctataatattaaattattttaaattaaaagaattatatattatgatagtttaatgtcatgatgaatctagtaattttacttttatgttgtaatatcttatgaaacatttggtataaccggtcaaagttgataatgattgatttaggacaaatccgaaaagacaaactcacgtggatgtagggaatatttggtatggattgacatggtgttgttgatttctggcatgaaattgtttattgtttcaaggtcacttctgttgtttgtttttggcatcttgaatacattgcagagaatattatgaagtttgtcttttattgttgtgcaacattttttctctggtaccttcggtttagcgtttaattattatgattgcaagttaaaactgtttaggtttttatatgaacgattcaattaaaatctctgatcatctgtgtattttgtagatccattggccatttagagtcaagaagggaacaaa

SEQ ID NO: 4403 - DNA, 711 bp, Zea mays
  Intron number 2 from transcript GRMZM2G063643_T01 (locus G RMZM2G063643) derived from phytozome v7.0 (chr-ID 2; pos 1 58838021 to 158838731 reverse strand)
cagccggctgctcaaccaaggtgagttcattttttaatccctcgcttgctcactgttgcttgccgattggtggaaaatctcgtgccctttcgcctcagagggggttcctctgcaatcgggactggggaaatgcccggcttcaatgctcggatggctgccgatctttttcggcaggttatatgctggggcgcttggtagagttaccaagccgccatctgatttgtcttattgtccctgattcgggattgggtttggcctttaggtgatatagcggattgttttgattctcttgctaccaggtttggtaatgagttcttagttcatactagtttatccaccatcagtgatcaagatgactgaaaacagcttagggccccattgatcaggggatgtttatataagggatgcaatcagttgttcattccatcctcatgtcttgcattatgcagagtaaaatgacaacttagttgaactgcattgcatattgattattatcatgtttaataaaaatactattttttccatttgaggaaaccatctgcagggctacacactctgctatctataacctattatttgagatgtttcttatccttttttatgcgtggtgctattatgacacctatgttaaaccaacttattatttcttcttttctgactactaactctgctatttttcttttcttccgttatttgtgtcacatagaaatc

SEQ ID NO: 4404 - DNA, 837 bp, Zea mays
  Intron number 1 from transcript GRMZM2G126120_T03 (locus G RMZM2G126120) derived from phytozome v7.0 (chr-ID 9; pos 1 18941951 to 118942787 reverse strand)
cgcgcctagggttcgccgagtccggcggcgctaaggtcagtgcccctaccccggccctccttgccagttgccacacgccccgtcggatcccgcgacggcggccctagttcggagtcttcatcacgcagatccggccttgtttcgtgtcaatccgtcgtttttttggtggttcgatctcttcggtgggagcgtagatgcggtagatataagttaggtttgagccaattatttgggatttttgtctgagggatgtaccctgaaagatggattcccccctcctgatatcaaggactcaagatgaagtttaattattagcagatgcatgtggttgacccttttgtttttgtttctttgcgcagctttggttggggcttggattaactaattaattaaattgaaaacgtgctactttctcatagaaacgtctgttctctgctttggaaatagtacgcattactaagcatattgataacatgatatgtcgactttgtaattgtagcgtttttttaaactagggctagctgctagccttggtaatgtgcatatgtaacaataaattaatatatacctaagttagtacatttgtttggttcgatggtattggcttattggagtttgcagttcagagatttcatgggaatttgatgtccaaaactttgtatatgtgtgtgcgtatgtgcgtgtgtgtggaggattactccatcgagaaaaaaagggttatagttatactgcatcacatcctctgctattaaggacattatgatctgctatttaagtttgtatttatttggtgcagtgttctgtgttttttgattgttttaccactgctttcagata

SEQ ID NO: 4405 - DNA, 641 bp, Zea mays
  Intron number 2 from transcript GRMZM2G376959_T01 (locus G RMZM2G376959) derived from phytozome v7.0 (chr-ID 6; pos 5 17598 to 518238 reverse strand)
cttcgagtgaaaccagagctaactcttccagcaacgtatgtttgtaatttgtttctggttatctatggtaatttgttctcccattttttcatgtgttgtctgttagtgtgtctaatcatttcaaagcccttacaaatgccttactttaggctttcttcaagaatgtcatttttgtcactgaaaggtacctctaggtcccacatgtgaatgtcatctacttgctagaaattttgattttgtgatcaggaagcttattttgtaatacaactgaaagtgaagttcgttttataggacaagtggacaacataaaaataagaccctgaataattcacaacagaccaaatgattccttttgctttgtttgtttaccctttttgtgctcaatgcttggggttcacatacttaagccttttccctatttatggtgatagccgggatacattctaatatgcagtttgaactcatacggcaaatagttctgtctataatgtttaattgtttagtttggagttttgcgctggttgaattgtttcacacttttttctgtcaaattaatcaaacttgatatgtgcgagtatgaaaagtctttaattctttatatttcagacctattgaagttgaacaatcgattctcgaggacc

SEQ ID NO: 4406 - DNA, 549 bp, Zea mays
  Intron number 1 from transcript GRMZM2G084779_T01 (locus G RMZM2G084779) derived from phytozome v7.0 (chr-ID 3; pos 1 55792348 to 155792896 reverse strand)
cagccaaggtatatgttagttctccgactactcttatccaatcagataatgatcctccttttgccttagagccgtgtgtaactgcacagtaaaattttgaatcctcatcaatttatttcaacaaaagttcaaaactaattaaatatataattctcatacaaacgtaccgtgttgcacgaaagattctcgacccttgaactccagggtccatgaaacccctgttgccttcttagaacaaagtctaatgggagtatccatatgtggttgagtttttttttcttcttgtatgtgttctttttttcatctcgtaaagtgtttctatggttctgctgaaatcttaagtaactgctgcactgtcgtgttcgtccttgccttactgaagagactaagcatatcagctagctgcttcatcatctaagggttgtgtgcctaaaagcatattgtctgctttctttcttgctttcttttcgaggcaaatgtaatctgattcagagtatgcactttggtaatgaaggttggctgggcgaccacactgcacctagcattcca

SEQ ID NO: 4407 - DNA, 753 bp, Zea mays
  Intron number 1 from transcript GRMZM2G408706_T04 (locus G RMZM2G408706) derived from phytozome v7.0 (chr-ID 8; pos 1 55026439 to 155027191)
cgccacacggtacgttccctctctgaacccatcagttccccgtcgtactgtgtgtgttaatttggaatagtctgatatttgaaattgttctgctcatgctaggatttcagtattggactgatgatacttacagttttgtccgtccaacttgtagttgtagtatctgtgattatctgtaaacaaacagattttccttttcagcattgctgatgtagtaacagtatggataatctttgtatcaattggtagtcttattttctcagttatacaatttgttcaacctatcggatcacactctcgtatgtgcactgcgtgtcttttctttattatggaaacaagagttacagctttagcataaagatgcgtacaaccaattcatgacgattattgcaccagagagcagttgcttgaataattaaactaactcaaagaaaacaaaatgccatgactatagataacactagacatcttcaattcttgcattcgagcgccatccatgaattgcaaagactttcatcgccaccatacattgatgttttgatgaggttattatacgcttcacgatttcattctgtattttactccatacatgcttaccaggatactacactttaggaaataaatgtgctgaagaggaaatgaatcagtttaatgttcactttttaatatctataatttggttgcatcggtttccttccttcaacgtgcatttattggcttgtttcttttaggctgataggctgaagtgggtcg

SEQ ID NO: 4408 - DNA, 550 bp, Zea mays
  Intron number 1 from transcript GRMZM2G318571_T01 (locus G RMZM2G318571) derived from phytozome v7.0 (chr-ID 3; pos 1 2511357 to 12511906 reverse strand)
ctcgtaaggagagtcatcaaagtcaagaatacatattcccctgatagctgaccatataattagatactggaggctggggggaactgacaggcttgaacgccttgaaggtcaaaacttaaaagggatagaagaaaaaggttattgttcaatatattttctcttctgacatgaatggttttggagccaaagttcacgcagcacgtgcctatattatagttgattttttttgggcttgtaaagttgcagttttaggcgggtgcattttgtgtgcagagttcgcatcggtccatttgttcggattgggagcggcataggaattgaccaagaaaaatactttggccaaatgatgaaagttgtaaaattcagaaaaaaatgcatttcacctaaattaagcgaaatgaatttcgtttgttttctaagttaatgcattgtgcatttgtgctctatacggttcaaatcaatatttacacaatgcaaatttatttttaacatcgtctagcggttgtcttccacagattttaaagctcaagacacagatttgctacctgga

SEQ ID NO: 4409 - DNA, 686 bp, Zea mays
  Intron number 5 from transcript GRMZM2G040720_T04 (locus G RMZM2G040720) derived from phytozome v7.0 (chr-ID 4; pos 2 10321829 to 210322514)
gtctcttgggtatgaacaccaacattttgtttcctttttattgtgcaatgcaaagaagagcacgacttggtgcagtggtgagtgcatggtttttaaagcggtaaggcggtccaaggcgttggagcaccgcctggacgcctaggcgaggtaggcgggcaaggcgcctaggcgttagaccaccacccggacgcctaggcgacgccttaagaacagaggttgagtggtcttactgagtcaggccgtgggttcgaagcagcctctccgcatttacgggggaaggcttaccttggtttcctttctccagaccccactcatgtaggagcctccggcactaggtctgcccttcttttattgtgaaatgctaataatttgccagtcagtacatctaattcatcatagactgtatatgtagcagaatggaagtcaccataagtcgactgctttgagcaagcaggacttggtgtgatggtacccactgtaccatcatgttgtctattgtgttattgttgtaatttgtagggcatgctttcatgattgttgtactaattaatttttttaccaatcaaaacatttacgtgaatcacctcctgttctagcatagtttcataatgttcttttggctggcacaatgctttatctttttctgtgcaggtttttcctgattataaatttgacagaatactaat

SEQ ID NO: 4410 - DNA, 263 bp, Zea mays
  Intron number 1 from transcript GRMZM2G067943_T02 (locus G RMZM2G067943) derived from phytozome v7.0 (chr-ID 4; pos 1 91265301 to 191265563 reverse strand)
agaagctcgtcgccgtcgagactggcaagcctacggtaggtatcgttttcgacgaaccagtcgtatacatgcagtgcagtcaaactaggtaaattaaaattcgtttcgtttgttctctttatacttacttggctttatcgatcaagccatcattgtccgtcgaattatattgaagccaaaaataaagcaaaaggcaaagctagtaggcccgcttgagttcgcttcttttcacctggtatcgtcatcacacatgcagaacggcg

SEQ ID NO: 4411 - DNA, 835 bp, Zea mays
  Intron number 2 from transcript GRMZM2G071790_T02 (locus G RMZM2G071790) derived from phytozome v7.0 (chr-ID 3; pos 1 87443872 to 187444706 reverse strand)
ccagttgcctcgcagtttggatcatctcatacctcgtaagtcgtaaggatttctgaactacgctcataaccgagttttcaatctgtgttgcggtgtagcattatttctgatctgttagctcggtttttttttctgttgccaaattctgggttgttcccgcgatgtaaccggaaatgcgattggatccgctgatttgccacctaggaatgtcctggcccatgcttgtctctctctctctctcttttgacgaaggttattcgattggttttgtgattctgcgtagctgagtgggatccctagtgtttgattttgggggaattcaagtcgtcctttaattgcgaaatgtaactgttaaccttagagacagagagctttgtggatttattatcataacttagtgcagttttgaagtataagtttcagtactgaaactagatctggaagaacatacgtcaccgtttgaacggttgggctcatggaattatttgtaatcatggggagatatgtttgaagtctgctataatattgatgcatttagtacctatcagtaggcgattcagtggttgatgtgtgtgcaagatggttttgaaagcccagatcttgtcatggttcgctatgtgatccgagtacgagttcagtgacgttttagatctgaaactgcagtgacaatgtgcgctcgctctctggtttcgttgcaaatggctagaaatacttgaggagggtgacaacaagcaaatgtttttcctttccttcggcgcagcattttaagttactgtgtgcttgttgcagtatctgtaactaattcctatgcgattctcttgtttgtagggcgaag

SEQ ID NO: 4412 - DNA, 1002 bp, Zea mays
  Intron number 1 from transcript AC218972.3_FGT001 (locus A C218972.3_FG001) derived from phytozome v7.0 (chr-ID 8; po s 170605785 to 170606786)
gaaacaccaccgcggtacctccaaggtacgcttccgcatcattccacactttcacacccgatcgatcagtcccccttagatgtatcgttgttttgttttgtcgactgccgactggtacggttcggtagaactggttccgttggtcgaattcggggaggaacgaactgtgcacgctatgcttcgcgtgtgcttggctgtgtggttcatgtgctacgtggctgcatacgctcttaattttgtgggtctgctgcgcttagcgttttgagcactcgagcttttttcgggtaggtgtgactatgttggactattgcaagctttagtaaccctttagaagcacaatcgctggattcggtgcagagttgattcgagtatagtctatagtctggttaatccaatgaagggtatttggttgtactttagattttttgtgatatagacatatagttgtgtgcagttatttaaacttcgatctgcatgtttgactatggagcccatttacagtgccatgccatccaacttggtgagggtcaaaggatattggggatgttactgctactagctcttatgttgcattcaccgtaccatccaactttgtgtgatatagttatgtgcagttattagacttcgtctgctcgtttgactgtgcacacatcttatctcactattacatcacatcgcatcagctgtaggctgagaaaagacgataaaatcaaataaacacaaaaccttggatggcttgcaaaactagtaattcttaatatattgtcaaatacacagaggtttagagaacatgtgccatattaccactcatgtatttgtcactgatattgcacactgtcaatggagttttattattcatcctaggtttaccattagtactgaattttcatatgtaatttgatttcttaagcagttcccatcaaatgattattttgtctgattttttggtagatttgtttgtatgccattgccaacattgtttgttgccttgtcttctccagg

SEQ ID NO: 4413 - DNA, 916 bp, Zea mays
  Intron number 2 from transcript GRMZM2G065244_T02 (locus G RMZM2G065244) derived from phytozome v7.0 (chr-ID 4; pos 4 2819905 to 42820820 reverse strand)
ccagcggtgggggcagtatcctcaggaagaaaaatgtgagtcgctccggctccgttcccccccttttgtctgttcgtgctaaaccatccgttcgtttctttgcttatcacgccccggtgcaaaattttagagacaatttgatcccattcacagcacagctctactagtgttcgatccctgacccaattttcacctttttttaataataaaaaaagaataacctttttagcaaaggagctcttctgtatccacatgaagcgttactgtattcacatgaggcaccttcacatgaagcgttactgcaactgaaaaaaaagagataattcctttatctgaaaaaaaacaagccacacaaatttaagtttgtcgcatgtcgatgtagggaccgatttaaaatttccaggattggaaaatgcgtgaagtcatgttgttctacgatagtccccgactgaaatcaaaaccgtattagggggtgtttggttaccccaaactaaaatttagcccccgtcacatcgaatgtttgaacctccgtttcgggtattaaatgtagtcggattataaaactaatttctcagccgaagattaaaagacgagacgaatctagtccagttggttgggtctatatttcatactcttatttgaaagtcaaacgcttgatgtgacccgggctaaactttagcaggggcaaccaaacacccccttagtcctagtccgtacggcaggcagcgtttgctgaccgtgtgacagactgacagtacatcaggctcctgtcttcctcacccgtacgtacgtacactacggatttcgacgcactgctattactatactgtccagtagtagatcgaactgattaactgaaaccgttctgatccggcacgcagacgcacgggatcctgaacgccgtgagctggggcct

SEQ ID NO: 4414 - DNA, 783 bp, Zea mays
  Intron number 2 from transcript GRMZM2G061922_T01 (locus G RMZM2G061922) derived from phytozome v7.0 (chr-ID 7; pos 1 74219349 to 174220131)
caatctacgaggcagaagttggatctgcacccaaagtatgtaccttgaacttcatgtgcttcctgtataataggttcagatcataattagctatctggcatatctatatcattgcatttttttctgtaagatgtgcaccatgtcactctgttgatatgataaagaaactctggtgtggaaataccaaatagtcaatgggttgacttactccctctgtcctaaaattgttgacgttataggattcaaaatttatctccaaatagttgtcattctcactttccaatgcacctttttctttttcccaatacatattttccttctccattactatatctctatcactattcctctctacccctcttgttattttctgtgcaccacatattttttttacttgtcctaaattctcgtgtcgaaacctaaaacgtcaactattttaggacggagggagtagtgatgttggatcaggctcttcatatccgtccctactaattagtttatgttggataaggctcttcatatccgtccctactcagcaaaatctaagatgtttaatgtgatgttttacttctctaaaatctcttccgttgagatcaaaactgtgatgtgcctcacagtggtacagatatataaaattgtagctttactttagatccttcatggcagggtttctatttttttgagcagcatatccacactgaattactaaagtctatgcctaaccttgacgttttcctttccgtggtagaaagaggatttgtcttatcaccatcagtttatcct

SEQ ID NO: 4415 - DNA, 170 bp, Zea mays
  Intron number 3 from transcript GRMZM2G336574_T01 (locus G RMZM2G336574) derived from phytozome v7.0 (chr-ID 3; pos 1 4221617 to 14221786)
agtgttgttggtatccttgtctggtgagcgaaaatctctcttatcttttgtttctcttcttcatttgattcagtccagtcatttccttaaattatttatagatatgaggtggaaggggtgattctattgcaggaggaggagggagtgattctcctggaggtggaggagga

SEQ ID NO: 4416 - DNA, 1013 bp, Zea mays
  Intron number 3 from transcript GRMZM2G068690_T04 (locus G RMZM2G068690) derived from phytozome v7.0 (chr-ID 3; pos 2 16841695 to 216842707 reverse strand)
gtccaagatcagtaattaacctttattttcctttcagaaagttcctgggaacaccagcatagttgcatcgctaaagtttcaaaaatggaagaagaatggaaaaagaaaacacaaaccagctttgacacaacaccatgatagtagtagtagtactaaattattattattattattattcgacgtcgtccaaccaaaaagcccagttcttgaacttcgtactgattctagctaataccacagcagctatggttagattttctaacaacttccctcgatcaaatcattttggattcagttctcttagattttctttttactccctccatcccaaattgtaagtcattttggttgttttagatacataaaattttggtatgtatctagatatacactatatgcatagcaaaatctatgcatatagaaaaagccaaaacaaattacaatttggaacgaagggagtatttaataagctctatcatgaaaagcttcagttgttttttagaattttctttgctagtaaagaaaagttaaactcagaaaaccacatttaattttgaaatgtgctggtttacaaagcttacatttggaaataacaaaggcgttaggatgaggtaggacaaagccaattacagtattttacttctaaaactcgcaatactctaacaagcactgagatttgttaaaccagtatttgtgattgcaaattataaaactatgctctgataactaatcatgcaagtcaaatagttggataataatggtctgagttttcatgatgcagctgctagtgctctcgattatcaagctgtgagtgttctacttagaaacaatagtgtatcagtagaagtgaatgggatgatctttctaagcatcaatgcatcatcatgtaatttcctacagtactgcatctttgtttcgatgtgttttgagatgttatgcagtattgaatactcaacctattacaaaaataattttcaggttccaatacaagtaccatcgtcatcagaccttga

SEQ ID NO: 4417 - DNA, 521 bp, Zea mays
  Intron number 2 from transcript GRMZM2G107092_T03 (locus G RMZM2G107092) derived from phytozome v7.0 (chr-ID 6; pos 1 14942445 to 114942965)
cttaccatcgtcccagtctagatcttctctcacaggtgatgcggctattcatgagggtctagtcactattttccccccttttgctatttgggtgaattaaggtatgtgcttggttgggggtttgaactgcataccgtaagcacgcttaaaaaataaccgtaaaagacagaaatagtctttgcttggtagtaaaccaagaaaaaaaaacagcccagtgacagaggctctccacatgggtgtggtctgaccgtgtgagggataaaccgagccaagacgcaagtgcagaggagatgctgcttcgactttgcacgacttggtagtaaaacacactgaataataatagttctttgaaaataaattgttttgcaattttatagccttttcgctttttataggtacgaactgcattatgcatgatattacattggctggatttagttgtcttgatgagagttattcagactacggatattcttttctaacattggtttgattggataattggacagatactgcaagtg

SEQ ID NO: 4418 - DNA, 442 bp, Zea mays
  Intron number 2 from transcript GRMZM2G324314_T02 (locus G RMZM2G324314) derived from phytozome v7.0 (chr-ID 2; pos 1 38310944 to 138311385)
cttctgttatccgtgtcattgctcatacccaggtaagaagcttaattgtgctttgttgctcattcatgtttgtaggaacacagtttcttaatgattgatgatgcaattactattggtcttttatttggcttcattattcctgtttatgcaatctttgtgtagtcaaatgatcatttttgttttctttattgtgtatatatatatgtcacaacccttgttattaagtttaaacttccattgcattatctatcaatgatcatgtagatttcttctgtgatgttaaaatccttgacttgttattaaatttcaacttctattgtacttcagtgccgggagtgaagtacacctatctttcatataattgaaaagtgattattttttctgaggcactaggtattagcaaactcaccttttatgtatttgtatattttagattaggaag

SEQ ID NO: 4419 - DNA, 955 bp, Zea mays
  Intron number 2 from transcript GRMZM2G153075_T03 (locus G RMZM2G153075) derived from phytozome v7.0 (chr-ID 6; pos 1 47902540 to 147903494)
gggggtcactaatctttcacttacgtgagcaactccctttccttcactccacctgtttagtcaatttggcagaatgttttgaatttgcttttaatggttgaaaaaactgtgcactagctgttgcctgttggattggatttaaaaaatatagtgacaattttgcaatattccttttggatccttccgaattatatggtgctgcaactaattagacaagttagcaatgtgtttcaggggaagtattaggaaattcctttgttttgtttaccatgttatgctatgcattgttctttcagtcaaagcttacacttcccaccttatcgtatgtttttaaaacgtttttacttgtggaagcaacctgaatatttttagctctattatacgagttctgatctgatattgctgtaggtctatggaacttgccattagatatccatatgcttgttccataagaagctttggaacgcaactggacctgctcattgactttccatttgctttccttaaaagaaaaccttctggtcttcggtccatggtttgtctaagttgccaagccacaaagttggtctcctttgatgtaagcgatatgtcatatgtgaggagtggagaaaaccaagtcaatgaatggcttcatctaccatggtagatttttagcttgcacagaaaacacatttgtaccaaattacacgaggaactttaagttgcctttaaacaaaatatctgcatccatcactaaccttgaggcccaatgcaatggattgaatcaacttcacccctggatgatttattgtagttaatactattttcatcctacttttagtttgaggacgtcaatttcttcctgcctttaactaacagcgaacccctctgtgcttgtgtgctggtgatatgcataccttttaaataacacactggctaacctgaaaagtgtatcacttgcaggtgcaaactgagc

SEQ ID NO: 4420 - DNA, 1026 bp, Zea mays
  Intron number 2 from transcript GRMZM2G061364_T01 (locus G RMZM2G061364) derived from phytozome v7.0 (chr-ID 8; pos 1 59091332 to 159092357 reverse strand)
ccctgtggactgctctcattgttgcattattatctgcaattaggataataaattagatccctgatggccgggcaatgcaacacatacggcttttcggttagctctcaattcatgtagattgagtgggattaggtgggtttaaatccaagcaaatcaaacttcttaatttttttaatcttatccaatctatatgtaatagaaataactgaataaggtctaactagtactccctcagtccaaaaaaggacgcaactctcgccttctgataaggcaaatatttttaagtatgaccaaaactcccctaaaaaattactgaagtttatcatatcgagtaagtatcattagaacgatgatgtcataaatattaaaagggaaatttggatccataccattaaaagatcaccactttggatccataccattactatctcacttacatgtgggtccacatgagtaaatgacatgtggggtccatggtatatatctaaagtttggatcttttaatggtatagatccaattgttccatattaaaaatattttctatagacttagtcaaaattagaaaagtttaacccaacccaaactcagaattgcatcccgttttgggatggaggttgtataaacaaaagttgctacagacagcgcaaacaattattatggtgatacaatgggtctgtttgtttcggcttctggcagcttctggccaccaaaagctgctgcggacgaccaaacgtccagcttttcagccaacttctataaaattcgttgggacaaaaactatccaaaatcaacataaacacataatcggttgagtcgttgtagtagtagaaatccgtcactttctagattctgagccctatgaacaactttatcttcctctacacgtaatcgtaatgatactcagattctccccacaactagattctccccacagccagattttcagaaaagctggtcagaaaaaagctgaatcaaacaggcccaataccttgtgaagcggtatctggactgcttccgtgagacgt

SEQ ID NO: 4421 - DNA, 701 bp, Zea mays
  Intron number 6 from transcript GRMZM2G095969_T02 (locus G RMZM2G095969) derived from phytozome v7.0 (chr-ID 2; pos 2 34439880 to 234440580 reverse strand)
tggctctagcgaaggagggtttagataaaggcaaggttgtgtatgattattttgtttccaagcaggcaaaaaatgttgtaactattattttcttcttgtaacctattgataaattgctagggacagtaattcagccatgtgttaggattggagctactgaaagttctcgcaggttcttacttaaacaatgttatataaatcaatgatataactcaaagttcacatgacccagaaacaacagtatgccttttctgtcccaagcaggttggattaggttagagatgaaacccgtctagagccacaagaaagtgtatatcataaatatgtaaaaaaaaggagctaaatcagttgtagtggtagtaaacaatgtttacttaatgcaaatgatgaacagttatgcctatttcagaaacagaaacaagaacgaaatatagatcaagagggtcaggtgcaaactaaacattacccgatctgtgcttgcgacgttgtgtccaattatttacttgtcaatccactgtttcagcaaaaggacatgcacatatatctgaaccgttctttaagttttgaaatatgaagatatgatgtttttgtagtgagccacacagtgcttatttcagtccccactctctaccatcctccagggaaaaaacactagcaatcttacatgagttccaagttttgcaggtcgttgctgttggtga

SEQ ID NO: 4422 - DNA, 895 bp, Zea mays
  Intron number 1 from transcript GRMZM2G075336_T04 (locus G RMZM2G075336) derived from phytozome v7.0 (chr-ID 4; pos 1 72080585 to 172081479)
ctcccgctgcctcctcgtcggcgccaacggatcaggtaggcctggccctgatccccgtttccatccgcggttcatctgatgcatcacgatctgtagtctaggtatccagtgaaaagggaaataacaattctgtagggcgtaagcctaggggacgatgggcgatcctgtcggcgacttaggagttaggatgctctgttgtgattgtagtttccactcttcactgccccgattctttttgacaccacgcaacaaacaattagtgtgtgatttggttgttgcttttgatggggattgcctgcccagctcttcacacctaataatccatttattgactagaataccgttgtttctaatgcaataacgctatccatgaaattgtggaatcacacaatctggtaggggtagtgtaaccttgaaacaacgttatgcttgtgctacagaagctgaatgaagtgacaaatgcaattaagctactgaatgtagcaccaattattggtgttcttgtatattcttatacattttgtgctacttccacatttttccagcattgtgcgttgcatctagccattcacacgtactttctttctgccattgtttctcctcatggagactgaaaagtgtggtagaactttgattaatttggaatttccattaccactgctagaatttgtctacctccaaagttggtgtgtaacaggagggagttcattatccatttcagataagtcttatgtgatgtacagtcatacagatggcccctagtgcttcatgtagcgctttccagccgagatgtggtttccagctttgctgagtaaattttatgtacaacggcttatgcacttacttatgccaatactcaggcaagaccacactcttgaagattcttgcgggaaag

SEQ ID NO: 4423 - DNA, 469 bp, Zea mays
  Intron number 2 from transcript GRMZM5G833774_T01 (locus G RMZM5G833774) derived from phytozome v7.0 (chr-ID 1; pos 8 273707 to 8274175 reverse strand)
accacctcttcaaccatctcagaagtaaggactcgatatgtcaaagttacttatgattcctcttcttttagctgcttagaggtactaatgatgaagcaattatcaagtcccaactttttcttgtgttgctttgattacgggtagcatttctatgactactagcatgatgctgatgctgactctgtctcaaaaggtgtctttgtacttattgccttcagaattgaaatgataattgttttggtagatctgattggtaaacttgcatatgatgatcgggataggatggcagttggaattgtattaaggttatcccagaaaaataaaacactgatttatttaattatctaacttggttctgatatactgtcttgactctgtatgtaacattacttactcttagctttcttaatctgtttgatgtattaaaactatttagtgttttccagggtttgcaactgagcacaagttt

SEQ ID NO: 4424 - DNA, 369 bp, Zea mays
  Intron number 1 from transcript GRMZM5G833774_T01 (locus G RMZM5G833774) derived from phytozome v7.0 (chr-ID 1; pos 8 274562 to 8274930 reverse strand)
agcacgaagttgacaggggagttctcagggaaaaggtgagccctttttcttctccctccccatccgtccaccgttgctaaactgtccgaccgccactggagtaatcgtgtagtcttaggtccgactgttaagcttcaaattcaactgtcgcctcttgtcccttgatctgtttctgccgcctacactggacgacgcttgatgcatacgagatgatgagttggccgcaagttttcttggatcccagcatacgatacgatccaccagcttaaccgcatacaaaaattattgcctttttttaaaactcgttttgatttgattgcatctgttgttttagttgcgcaggggaggaaggaagagcctgaaagggcg

SEQ ID NO: 4425 - DNA, 1049 bp, Zea mays
  Intron number 1 from transcript GRMZM2G701367_T01 (locus G RMZM2G701367) derived from phytozome v7.0 (chr-ID 3; pos 1 9011925 to 19012973)
gcgctccaaggtcggtcggctctcctccatcggtggtgagtacatttccctctcccaagccgccagtgccggtgtgctgtttcctggtaccggcgtcgtgtacgtaggtagatgtgggtagcggcgtaaggaagaagaaaactcctagtcgctggaatctagatgtagggctgagattaaaacctggagtagcattttgctttgtaaagttttggccgtcggtgtgataatctatggcttgggtttggggaaagaactatgtccgtagattgggttgccaacggttaggattagaaggcatttacctcttttggattatttgaatctgtgccatcaatcgtcaatcgtgcggtccgcactgattatgggctcggtatcgatctaggccatccgatcttgatccagtggcccatagcgcgtatcgttttggggaatagaagatctaatccggagcgtcgattgtggatcagacggctagagtttacccgtaccccttcgcgggtccattttacttaagagcccctcggtttcattgaaataaacccgccgtcctactgcatagtgttctgagtcttaggatcttttgcgcctgggcccctgctgttctcagaaatgaaggcccagtccagagctgtttaaaatggaataattaaattggaaaataggtttttaatacaaaaatatatgctagaacttcaataattcatagaaaattcatatgatatccaaaataatccattccactttctaaatttttgtaattttattatttatcacttagagcctctgtttggtcatgaaaacagtaagaaaagttatttcccacttaatcccattttaaacacataaaatctttgaaaatccataacttaaattctataactccaaaaattatgattcctgttcctagaattatattttaatatgtagaatattgctgtgtattttgttcacatgcttggtgtgatgttaattttcccctgtatattgtgcttgttgtattgtggcgagtagaagagcccgtgactgaggaccctggtgagcagcag

SEQ ID NO: 4426 - DNA, 537 bp, Zea mays
  Intron number 1 from transcript GRMZM2G089876_T01 (locus G RMZM2G089876) derived from phytozome v7.0 (chr-ID 4; pos 1 83736884 to 183737420 reverse strand)
aagaagaccctggtcagtttctttctcatttattattctcaaagtaatggtacgatgtggaaaatgatagggtagctgtagcatgtagccatgtataaactcaatgcaaaaactgtcgtcactctttgcaaactgtgagtggtgaaacccagaatacttgtccatgttgatatcgcttctagtatcagttttgcaaaggagaaaaaaacacacacaacaacaacattacctactacttgttttcgcaaatgattcgataaagaagattaaaactatcctgaaaggcaatatttgaaagatatatactttcatttctgccacgaataataacaccacaaatcgttcatactgtggctgtgttattagcatctgaaaacgcctctgaagtcagcatttatatatccttgaactccacgtgctacagctcgtaaactgcaaaggttcctgggttcaactcaaatgctctacccgctgataaactgaagttcattgatgtaagccaaacttctgttttctgctttcctcgatacagttctc

SEQ ID NO: 4427 - DNA, 764 bp, Zea mays
  Intron number 1 from transcript GRMZM2G317689_T01 (locus G RMZM2G317689) derived from phytozome v7.0 (chr-ID 3; pos 2 1598746 to 21599509 reverse strand)
acaaaaaaaagaaaggtatatcttcacatcatgtgctacacattctttaatggcattctattgtttcattttttcttggatgatagcttggtcagtttttttcttacttgtatattagattagatggtggtatatgcagatgcgcttttggttagaattcatagcacaactcattatctatatgctgctagggtgctaacacatagttgatggtctgaaatattttctcttgttgtagggtgagattatgaaggtttaattatgccagagatcaaataaaaacatgtgttgagtttccagagtgttttgtatgtaagtagtgcacattatattttcttttcattttttgtaccttgtatgttttaaaatttaaaaaatgattgggtatctgagctccatgccttctatagaggattgctggtcaaacatgagctatcactgagagagaagaatcatgtctctggtgtttctacctgcgtggtgtctccccttcaatgcgtgccctcttccctccggttctccctgattctcacaggtgggttttgcactggcacacttacattggtgctctttctttttgctgctagcacaagtactatactactatgacctacctaagaactaggaaagtttatgttatcgaatcatcaaacatgttagtatcttgttagtattaagaataagcagtgaatcatttacatatatttctaatttgcctatgttttttagcgaaaacagtaggggaagccctaaacaaactagtt

SEQ ID NO: 4428 - DNA, 606 bp, Zea mays
  Intron number 1 from transcript GRMZM2G427409_T01 (locus G RMZM2G427409) derived from phytozome v7.0 (chr-ID 4; pos 6 2695396 to 62696001)
gctgcctgcacatcacttgcaggtaagttcagtactaaacaaatacctgcgtagtgttgttttgtttttgttcaatttagaagtccactgcaatgctcgaaatatttaaggttctttttaaagaagatgatgagaattaaggtcctcgtttgtatgagttctctattgtaggttcttcattgactcaatcaaaagtttaaccaaccaaacttagttaaagcacttcgtcgtaaaccaaaatcaaggcaaaaatgaagccaaagtcagttttagctagaaactgaaaccacgcaaaaacatgatttcttatcattattaagaagctctaatcgtactagagagtagagaccttaacttataaggtctagaaatcttggttttatcggatagattcagtgtcgaagactcatatataaacaggcctagaaaaagaatagaaaaatacgagcttaaatttaatagatcaaggcacatgtgcagctcgtttttgttgagatttttttgaagcaatgtaattgtcttgaatcatttcctttgcatggaaatattcttttggccgagaatttgaggatttatgattttgtaggtgtggctttgagttttgct

SEQ ID NO: 4429 - DNA, 828 bp, Zea mays
  Intron number 2 from transcript GRMZM2G097987_T01 (locus G RMZM2G097987) derived from phytozome v7.0 (chr-ID 9; pos 1 19288239 to 119289066)
ctgaggtcaagaggtatttatttggatttaaatgttccttcctctatcaatatagccactccatactttagcactcttgtaagctttgtttttgagaccttgtggtgtcctgttcctgtgtcattggggagaattcagtacctgatgtacaagggaactaagggggtgtttgatttctagggactgattttattccattttagtctctaaattgccagaaattttagtttttctatttggcaatttagagactaaaatggaataaaatggagtgactaaaaattagttcctggaaaccaaacaccccctaagtctcacaatatatatactctgaatgaagagttcattcacagcactagacactgctgaatgaacactgtgcctataagtaattcttactacaactatcttggtattctatgttagtgcaaatgtacctggaccatagttataggataggagctattttagcagtttgacgaagtgggcacttgactgaaaaatttctgaaacagttacttgttccattggcttattatatacttggtaactaaacagagtgtaagatgtgtgtgaaacaggaagggattaataggttgtgtttcctatagttgcattatagtatatggagctactaagtactaattactccatccgttcttttttatttgtcgcattttagttcaaaaatgaactagcggacgacaaatattcgagaatggagagagtaccaagcaagtatctcttcaagttcaccacccacatttgcaggctcttctgaaaatgctacacttgctgatccttgtgctcccagaggatattcacgca

SEQ ID NO: 4430 - DNA, 649 bp, Zea mays
  Intron number 1 from transcript GRMZM2G173299_T01 (locus G RMZM2G173299) derived from phytozome v7.0 (chr-ID 2; pos 2 9907459 to 29908107 reverse strand)
cccacgttattaacatcaagctggcaaagttgggggttcttggagcactttgaaaaatagatgctacaagaaaatccaatacttctatgatgatcggtggtatgatctgagactaggattgctatgggctttgctggtcatttagctgctagccttggttgctttaggtctgttttgttgtgtgctggtagatagcaacttttgtttactagcagctatgaaaggctagctggcagctaggatgctaatattcagtcagtttcaaaatcttgttgtgaacctttgattagttagaattattactcgattttagtatttatgactcctattattctcactacaaatatcttggggcgtttcttcttcatacagtgaagtgattgcaggtgtatcaacgatttttcggcttcttttacggtttcttaagtaatcatttgaaaaagaagggctagaatattccttctgttttatagacatagtaattggacattggattagcttgttgaaataataatgtctccgtgtccaattctgtggtggattttttttgggaagtgtcgttgcgtggggaaggccagggcagtgtttgatgggatgggagttcggaacaacgtgtcctggtgttctatggttgttgcatatgcataga

SEQ ID NO: 4431 - DNA, 608 bp, Zea mays
  Intron number 6 from transcript GRMZM2G135568_T05 (locus G RMZM2G135568) derived from phytozome v7.0 (chr-ID 4; pos 3 9602036 to 39602643 reverse strand)
caggaagtgcacactcagcctgctctggatacaaggtactttctttcttggcattgaaatgttaattttgcgttgtatggtacatttcaatctactcgcatctcaagattcttttttgaaattttggtgcctctttcttttggttcgtatgtcctgttagttattgttgcacgggtgcctagcgtgttaacatcccaacatatcaaaaaattgtactgctcatgcttttcttttttctggtgaataatgataaggaaataatagtattttttagtgaacatgccttgatgctatattgctaatttgttgcgagtcattatgatgatatactgcatgtggttgtgtaaccattagtacgcagtttgttgtaccttttgatttgcttttggaattggtgtgccacatggtaatgtcatgtgttgttttcacaggtgtcctcaggatgccatgctagcatctgtgataccttcattgttgatttaatacttaggacaatataactggatcttgatgcgacaaattttgcctcatctttatggactgttattcctatgttctaattgtgcattttgatgtttttcagtatagtccagaaagcctgtagtgtc

SEQ ID NO: 4432 - DNA, 892 bp, Zea mays
  Intron number 1 from transcript GRMZM2G086648_T02 (locus G RMZM2G086648) derived from phytozome v7.0 (chr-ID 2; pos 2 0792440 to 20793331)
acattgatgaagaaaatggccattcatcgccaacaaacattataaactgcacttagggcctgtttggtttgatggctaacttgccacactttgcctaacttttgtgcctaaggttagttcttcaattcgaacgactaaccttaggcaaagtgtggcacatttagccacgaaccaaacagccccttagtgcatgcacaggtacattgttaagatttcatcagtgtctacacgatcagtttgttccaaatgcctctgcgattatgattctttgaggttgttaatcactagggatgctagtcaccgtatcacttttacatgtataccttctctcttaacattacaatggtagaggataaccataattggagtacatatttggatatggatacaaggtttactgcctttcttggatgtttaggagacaaaattgatgcaaaaataaaattcaattagtactcacaggactactagctgctttgggaattttctggaatatataaaaagaagtgaactcaaaaccattcaactttttatcttagtttcagttgcgcattgctgaatttaacatatgtgcaattaagggttggcaatcataatactcatggatagaagtagaatttgtgaaggttctaagaatttattttctggtcctccttgatgactcgacgatgatcagagcatagggaggcatacttttatcttcgaacaaacctttggtggatatacaagtatttgttgactgaagaatccgatgcagcagaaaatgtctttgaaaaagtttggattgttttaccctgttgcttaatacaccactagcaataatgacatcctttactgaacatgattttcttttgcagccaatttcttagattgaggttgcggttgaacctag

SEQ ID NO: 4433 - DNA, 927 bp, Zea mays
  Intron number 3 from transcript GRMZM2G013583_T01 (locus G RMZM2G013583) derived from phytozome v7.0 (chr-ID 8; pos 1 29977967 to 129978893 reverse strand)
ccagcttgaaggaggaggtgatgtgcccctccacagctagttcctgtaggatgtggtttttgttgcagatgcagaaacttatcgagacgtgctcctagtcagggaatgatgtaaaaatttctgcagttgggtgccagttgctaggtgctagctgtgctcaagttatgcattgatgtttcaagtaaatgaagtttagtcgttaccatgtctgggcatcatcaaatctattttttatctggaaattttcttttatttgtcaaacacccccttagaattaaaataggattttttggggactaaagtttaggaggatgacatagggtgtttggtttgaggaatgagttgtccatcatcttctcactcatttttttttgtttggtttgtggaatagaatgagttgatccatcaccacctcattcctcaccacctcattcctcatagctagttagttagtactaatatgagtaattggtcatcccaccaaatttgaggaatgaacccgtgatgcaccacctcattttggatggagtgattcctcaaagcaaacacaccataaaggaaccaaacacccccccttagacaatgtggtgcttaagggttcgtttccaatttcggaaaatcaatgtaatgcgatgtcctagtgctaagccagagtcaccaaaatggattattttgttccaaatgtggtacttaaaagatttcggattgctatttaacaccactgaagcatagttagtttttgtttatctggttagtgaatgttaggaagtaactagaatgctagccattaaattgcatacggatagacattatagtttcaccaaatatggttatcttggtgcatcaattctgttttggtaaagtcaggatactgatattttgcgcaccacaggaaggtcaaccaagttcttcatctggtaaactaag

SEQ ID NO: 4434 - DNA, 937 bp, Zea mays
  Intron number 1 from transcript GRMZM2G376918_T02 (locus G RMZM2G376918) derived from phytozome v7.0 (chr-ID 9; pos 2 1680266 to 21681202)
agtagtgtaaccgtgtgtccgtgtgcttgaagaaaccgggacatgacatgcctatggtcttggtgtgtcggattgctttatcgtgtattcatgttttatttttgtttactgatttagagcacctgtttggatacacctggctagttaccagtttggctaaaatttagatcaaattagctatgatggttggctaacaactaggtgaagacttggctaaaaaatcagctcacctattagcgctcatgtttggatgcagcagagctcatttgaactgtgtttcctcagcaatgatgattggcattgacgcactgtctctcttgaaccaattaggttgagtatgatccccggttgattcactacaggcaacttttggatgtgttctgggcaagtcatgacccacgtgaggtgtttgggcaagggccagatgttggcaaccagtataggtgattgatttatcgtctctttcatgcaaaagtggtctttttttttccttgcatgacttgtggtggcccttttgtctagtaagtttgtgataatttttacgtgtgtcctgtgccattgtcagactaaagccacggcatttttcttccaatcttgtaatcatgaaactgataataaatttgattgacaagcatcatgtgcccagttcatgttaggcgaatttcatttactatgattgcttgatgcttctatcagattattaacatcaccatttttacttcaaatcttggtatccggaattccggatttataatatattgagctaacatgcatcttttatgttataatgtagatgtatcatgcccttgtatcttaagcaaatgattttcatgaaccgtgaatgaacattatggctattacgtgattggataggtccaaaagacatgaacataattgtggagtcactgatgtggttgcagatctgtcatcttcacta

SEQ ID NO: 4435 - DNA, 905 bp, Zea mays
  Intron number 2 from transcript GRMZM2G120584_T01 (locus G RMZM2G120584) derived from phytozome v7.0 (chr-ID 1; pos 2 562053 to 2562957 reverse strand)
acgagtatatcctcttctggggaactgatatcaaggtacgtggaaccatctacggggctcctgatgcagtgctacttccattgtcgacaattgagtgttgttcaacggctcaccgctttatgttggtgcctggtctctgcttaatcaccaatttattttgtgtttcaactttcaattatgcattttggctcattggtttgagggtctgatggatgcaaaagcaacagtggggttatcttctcaccaaactaagccaaactcacatgtggtgtccatgtttctatttcacaaattattgtattcgtgttcttttcaagtatctgtatcattcagatttttagaatataatattagtgatttgctgtaaagtcactaagcacatgtgttgcttgaattgtttgcttgcctacagttatatttgctaattctatttaatgtatcatgcactctttgttgtgtccgttattatgtttcatctcttacctacctcaacttgtttttgaggactctgtgtatgtttatatttcatatgtatccaattcagtacaataagcagacaagtaatattagctgtacggtagttagttctgaatattttagttcaatatgcgagcaattcataaatgcatatgtattatgtaccatgttgtcatgcacttttttaaagtttctattttgtacttttcttctggaaacttcattgattattttgcattatatgttttgatgcatgaataacatctatggcatgttttagtgcatatatttgaatatgtatatatgtatacttttacattttcctcttttaaactgtcagcctatttttttatttaacattataatttacttgtggttcccataattctgcatgatttgcaagttaagtcatcaccaccacagccgtc

SEQ ID NO: 4436 - DNA, 824 bp, Zea mays
  Intron number 10 from transcript GRMZM2G439339_T06 (locus GRMZM2G439339) derived from phytozome v7.0 (chr-ID 4; pos 182571079 to 182571902)
cagaagcagttttggaaagggttagttattgtgcttgttactatctctaaaccctaaaccctatcaactgcccatcttcattttacccaagtgatcattggttaaatttcttttgtgccattggaattctaattgcctttgtcagtggcacaggttaaatttcggccagtggtctggttagaaaggggctgaattctctggttccgatgggtgcttacattatttggaaccaccacaaaagatgtgtcttcgataattggattcctaatgtgactttagccattaggatggctatggaggaaagatggatgtgggaaatggctggagctaaagggctttcctatctgtctgccccccttctcgaggtttagcctcggaggacgtttttcttcagtagtttgttgttgttctcagatgaactattttggttttttagtttttcgacctccgtaaggaagtcggtcgttttgtatctggtctgcttagaccttgtttcttcttcttaatataacgaggcgcagttctcttgcgtttttcgaaaaaaaatattaatagaaaataaaagatgattttttttgctatggcaaataagaaattaccatgtggacatttggagctctattttcagttatcatttctatatctagagagcaaagtaatttgaatcatctgatgggaattaaaaagaagtatgctagtttttctacaggatcacagaaacagcaatgtctttccctttaaagagatcctttgtgcaaaagtatgtgctgttttatctaaatcactgtcgagtatctgaatatctcttgcacatcaggttttgc

SEQ ID NO: 4437 - DNA, 852 bp, Zea mays
  Intron number 19 from transcript GRMZM2G439339_T06 (locus GRMZM2G439339) derived from phytozome v7.0 (chr-ID 4; pos 182573707 to 182574558)
aagagttgacaaaattgaggttgtcttttctcattgttttatctggcttacttcacatagctaatgatcagtgtatgttttttttatttcatcatacaagatctgcagtaagcttctaggggattgtcagtagctttataggtcagaaactcatgaactattgaagaaaagcttattcaacaccggttgagatggtttggccatgtccaccggagaccccagaggcaccggtgcatagaggcatcataagacgggataataatgtgaaaagaggtagaggtcgaccaaacttgacatgggaggaggcaatcaaaagggacttgaaggaatggaatatcccaatggagttgtgtttggatagaagtgcttggaaagaagctatccacgtgcccgaaccgtgattaggcctttttccttttagtgctctcaaaacttttcccctcccctttctctctatttctctttttggtgacatcttgttgggtttcaactctagcctaccccaacttgcttgggactaaaatgctatgttgatgttgatttgaggagtaagtgctatttttttgttgcgaaaaagctagctactttaccgtttgatagaagccttgtctgcggtagtctcatgctggtagcatgttgtaggaactttcagttctcatccacaccgggtgatatacactgttaatttaattttccttgcacttctgtttgccttttattttgtttggttgtagatggcatatttattgaagtttgactatgattctatttctggataaagttcaaatacgctcaatacttactgttgccaattcaggactgagcttgagtctctgcggtctgagcgtgata

SEQ ID NO: 4438 - DNA, 494 bp, Zea mays
  Intron number 38 from transcript GRMZM2G439339_T06 (locus GRMZM2G439339) derived from phytozome v7.0 (chr-ID 4; pos 182590782 to 182591275)
aacttcaaaatatcaaagttagtcttctgttttcctcttcgtttttctttgtgatgatgccattttgaatgtttcttggtcaatgatgtatacatgattggatttctttttctgcacaaaagagtttgatgactgtcatttttgtctagtttgactaaacatttgatgaatcactatagtgtcttgtttccctattttgtaccaaatatttttgtaccactttattttctttgctgtgagtttgtgacataaactgtatgagcttctgcactgtactctgtattacgattattgttatcttttggatggatgcttgctttgggtgaaagtgatggcgcaagtctctaactgtacatgagtcattaagtgtctaatttcattagttgtatgatattggatttgcttgacttttttgggtcatagtttaatcgtcttactatcacatacattaacataattatcgttttcaacagtcaaccttgagagagaattct

SEQ ID NO: 4439 - DNA, 966 bp, Zea mays
  Intron number 1 from transcript GRMZM2G162931_T04 (locus G RMZM2G162931) derived from phytozome v7.0 (chr-ID 1; pos 2 50957776 to 250958741)
ctcctggccacgcgtgccttctgctgtggagctaggtaattttgtgactctaccaaatgatgggaacagcctagactcttaacagactgctgttagtgtgaacatactcgaacataaataatctgtaatatctagatgtagtcttattagtgaaatgttagtacctgaaatgcttttgtaaaacaaaattaagaagggagatttaggacttacacacacataattggtataacagccatgcttcgggagacttacccaataacccaacccatggtgggggtggactgttttttttagataggcccgtacagtctcacattgttgctgccaaatttgaatataacctctgttttgttggtttacctggagctgtttgtgcatggagagtatattagaccatgtccactgttaccttaaaggatgttagacttaaaaaccctctacttgataccactcatgtgggagggagccttcgacactggatctgccctctatgacatattgagccaaatgaaaagaaacattcatgatgacacgatgagggatacctacttctcttgtattctctaccgcttttttccatgaatcttcgtactgccaggtgcttgggcttgcgggaagcaacaacttgctgtcggttgtgcttgtgcctctcaagtgtggtgaggagggagcatgtgaagaaaaatgtttgtttttttaaaatttgctgactcaatttttcatctgagttggatacctaataggactctatctagctgaaaatttatagcataaagattgtttagggatgtatgaatgaaaaccagaaagctgtagttttgctgtttttttgtatgttaattttggcttaatggttaatatctattaaatttgttgagaaaattatttgacaattttatttatatatgtgcacataagtttgttacagaagaaaacaagcgttggtttggctgaaatacagaa

SEQ ID NO: 4440 - DNA, 560 bp, Zea mays
  Intron number 1 from transcript GRMZM2G533436_T01 (locus G RMZM2G533436) derived from phytozome v7.0 (chr-ID 1; pos 2 81163116 to 281163675 reverse strand)
agcagttctggtaccagctcatagacctgagcagttgatgcaatgcaagagagttaaatttatgaactggagttgccattagcaatcatgaggacgtatagctcacaaaatcaactaagaaaataagaacgctaaattatcttatgactctgagcactgactgagcgcgacccctagaatacggtgttcgtaattcccaggtaaccatatggtttcccgatttgagtagaacttcagagttcagagtcatcttttgcatgaagaattttgcaagtagcagacaaatactaggcaaattctgaactagacctttcctcaaatcaaacacgaacaaccacaccaaatcagccatgaccttatagcaggttgctatgccatcacaaaacataaatcacccccctatatatccaggggaaaaaaaactcggtaactaacgagtccagaaacactgttgggaaagaaaaaccatcaaggccgaacacccacacgtacctcactaaaacaatcctctcatatctccgccagaagactcccttccgccgccgaccgcagcccagccc

SEQ ID NO: 4441 - DNA, 631 bp, Zea mays
  Intron number 1 from transcript GRMZM2G091189_T01 (locus G RMZM2G091189) derived from phytozome v7.0 (chr-ID 4; pos 1 76500405 to 176501035)
tcgtcgtcagggccgctaccgtcgtcgcccccaaggtgcgtggccaggcaatgtagcttgatggtgctgttttcatgggggaatggtgttagtgggttgggttattggctattaccgaattgcgtgctgttgcatatgcttaccgaggcagcagagcgaaaagttatcgatgagagtctttggtgaacgctgaggtactgactaggttcctttggctttggttttgacggaatagaggcaaaacggttggggttttgaaatgctggtttgttaggttatggttagcttcttagaattcgaaactctggtatctgtgttgtggattaagttacactaatgtatggttgtggtttcattaatgcttacatgtggtgaattgcaccttactccatgcttacatgtggtgaatttacatagtgtatcgaaatgcatagcaaaagctatgtatctagaaaagccaaaacattttataattttgaatagagacttaatattttcttggctctgctgttgggcacagataatttcatttgctttgtagagtctatttttaatgctttgcaggaataaacactatgccttgttattcattgcagtatacaacacttaagcccttggctgatagagtgct

SEQ ID NO: 4442 - DNA, 754 bp, Zea mays
  Intron number 3 from transcript GRMZM2G063754_T01 (locus G RMZM2G063754) derived from phytozome v7.0 (chr-ID 6; pos 1 23750526 to 123751279 reverse strand)
cctacggggttcactggtgctgatccgtacaagatgtgagtaacatccctctagacatgtctaaattatgcattagtataatacaatacttaatgtgatcgtgtgaattcttcagttttatcagggctatttaggtgttgccaagttgactagtagtttctaaaaaatacaagattctagaactgttagatgtacaagtgctttttctctggatgagaaatgacgttcaaccttgttctttctctaagatagcatatctgtaaatgtgctgtgcctgtgagttaatcacataagtgtttaggtctttctacctcatgattattttgattatggaggatttaaatcctggaattaattagcaagacattactggatgatgtgataggaaggatttgcaatatataactataccttatgaaacatccatccaatgcaaaggcccataatggttatggctgtaactcccctggaattgcacattctagaacttgccatgttctagagaaaatctgtaatattcctctgagtatgatatgatgctcattttgaggcggacatgtattaaggattatattatgcactgcacttatcttcaaatggactgaatttgatcagcgaaataacaatgactgaatatgataatgttgcaccactttgtatgctttttactcaattattgtttttttatgaggctatctttgcagaagtatgtttgtcttacctttatgactctgcagaacatttcaaattggac

SEQ ID NO: 4443 - DNA, 852 bp, Zea mays
  Intron number 1 from transcript GRMZM2G137120_T01 (locus G RMZM2G137120) derived from phytozome v7.0 (chr-ID 3; pos 1 67050897 to 167051748 reverse strand)
gccgccgctccccaattggaggatctctggcccgggtaaaaatcacttttcccttctcagttttcgaaattggtaacatttcttttttcattcacttgggaattgggtcattgggatgatgtgaaataatagctttaacgttgaaggcctggtggttttctgttttgggggagtcacaaacttttggtgccaaattgagaagtttctgacaatgtatacttcatatgcgtgtaaatacactgcaccaataaatcaaagcatgttttatttctgagtaacttgtttcaaatgttatgcatctctgctgatggtggaggaacgggttgagtccatcagaaaaaaactgaaggtcatgaagagcagtcgcgtatctttttttttaaatagcgaagatctatcatgtttttcctgttagattgctgaactggtgtatggttggataactgatgaagtaggtgctctttgagctgctagtataacaatttgctcgattcattagtgcatcatttttttctcgttttgagtaagttgatgagtgcctgttgactaataattttcagtgcgatcttttttattaagaaaactttgtgacaaaatttagttatgaaagaattcaagatgtttacattactgtctctcttagaaacacgaagtcaaaaactcgttagtcagtcataagggctcggtctgtcaagttcagacatcaaatccgtcttatactaatccatactgattcattccttttgtttttgatgggctttgctgccttttaagttttaggagtactttataggaggtttgacatagagaataaaaatttcttctgctactctatttcatagaaggacatcg

SEQ ID NO: 4444 - DNA, 1032 bp, Zea mays
  Intron number 1 from transcript GRMZM2G702844_T01 (locus G RMZM2G702844) derived from phytozome v7.0 (chr-ID 4; pos 2 27496293 to 227497324 reverse strand)
acttctagacgactgtacttgcgccgtgaaacacggtatgataactcccctgcaaaccaccattactttctcagtacgtgagttatattcgcacgtcgacccgtaccgacgagtagctagctcaccgttcaccatgctgggtttcctggcacttgcaactactgccgggttgacgaaaggaagaagacgaacgcagagcccttgatctcgcgatgactggttaggattagaagacatgttatagaagccggggccgtaggattctaaacggagggagtggattaaattctgcgtacaccttcaccccgcggaattcgggcggttggatcgcaatcgtgcggttcggatctggattagatttcataaaactcagaccgttagatctggatccaaggccttatatttcataccctttctgaaaaattcaaatctaatctgcaccgtctgttggggatcggacggccagatctggctgataccccttcgtcgggtctgttttgcatatgggccctgggtttattgagattcaacccgcggtccagcgcggatggcgctgtgtcttggagatcttgcgggttagcccctgaacttaccagtaattgaggcccagtccagtaaatagaaaatccagggaaataaatagaaaatggatttttaatataaaaataatggctagaatttgtttaatccgtagaaaattcatactaattccaaattgagtcattccagttcctataattttataatattattgtttatctaatagtgccactaatttgacacgaaagccaccttaaaatttatttcctaattaaatccatatcaaatacataaaacattaggaaattcgtatcttccccgttttaactctgatttgatccgttcaagttgcgttagtctcgtagaaacgcgtagatcattattattcagtttgtacttatgcttggtgtgatgttagttttatctataccatatttgtttgtattgctacgactagcgcgaggacacgtgtcatccgaagagcaagttggt

SEQ ID NO: 4445 - DNA, 681 bp, Zea mays
  Intron number 2 from transcript AC203374.3_FGT006 (locus A C203374.3_FG006) derived from phytozome v7.0 (chr-ID 4; po s 198711309 to 198711989 reverse strand)
ctcgcaacaacctctctccacagcccctccacccggtacgccataaatccctagctaaaatcagttaacacttaataccactaggtaatatctgaaaattgaaaggaaaattgtggaacttcataagtttaacaaggaacacaaaaataacatgaacaatttagttcaaatggtactaagacggatacctctttcaaaaggcaaagagaatctgaagattttttagccagttgatcacgcagaacttggatctcgttctcagtgtccattgcctagacatgtattcagatgacttgaaatatatttggtaccccataagctccataagtaatcaaataaatgcattgccattactagattcttgctcttagtacttggtgttgttcgttacacctaatcatgcacttatgatgatctaacatagcaggtgaatcttccggtgaatatgctgcctgtgacttatccgcagagcccaaaattaccaacaagatgatttccataaaactgttgcacggaacttgaagccaaggatcaacaccgatgagcatgatttcatcactcaacaaactctctaatggtaaatctactgtataatgcttatttatataaaagtttgggttagtccctgttctgccatctcagtatgttgtatttacccttggctcgctgcagttggtacca

SEQ ID NO: 4446 - DNA, 860 bp, Zea mays
  Intron number 2 from transcript GRMZM2G030915_T09 (locus G RMZM2G030915) derived from phytozome v7.0 (chr-ID 9; pos 1 48078781 to 148079640 reverse strand)
ggaagactctcgtatccaggacacagggtaccagggtatgtttttctttgattatcgatgtttttccgtactgcccctacattctgtgttgtgaacttgcgcatatatgcatgtatatgtagaccgcgctagtcatgcggtatattagatacgctcgttcgcgcgtttgtttgtggggactactattcaggtttcattgcaagaattcgtaggggaggtaattaatattgttcgggtttgattgatagatagtttgtcagtatttgagatcatacccttgcgtgcttattctaagctgttcgtaggtatcattaagtgcaatgcaactagaacggcatagtgaatctgctgctttactgataattaagaattagcctctgattgtatttcttctaaacgccagctgctcaaacccatagtcaaaatagaattttgtaatagctcaccttagtttctgatgtcccactcccatctgttactatctgtaatgtgtttatgtttgttggcacctatcatttttgcactttctgttggaatgattattattagtttgtgcttttgctttcatatgtacaataacgaattgccatttatttgagcaccccaatggcaacttgtccttgttcatttcaagtttcaaatcttttttcgtgcactatatcttgataagtaatcaatgatctgtcactgaaggccacatgatcttataatgacatggatatgattagtcttattaggtgccactctgtttgcaatgttattcagaacgtagatgcactgcttgctgtcctaatttactgattgacgtactttatctggttttagattgcttctgagggtctgaagcacagagtctttga

SEQ ID NO: 4447 - DNA, 548 bp, Zea mays
  Intron number 1 from transcript AC225359.3_FGT006 (locus A C225359.3_FG006) derived from phytozome v7.0 (chr-ID 7; po s 96047145 to 96047692)
gcgctttttgttcgaggggcaaaagtgtccagtcactgccaatataatcaaataaggttaagtttcaaataactctataaatgacattttgtctctaagacaacgtttgataatgatttcttagtgaagtgtgttctcgtaataacatttaagcgaattctaagtttcataatggtataaatccaattttctcgcgaattaatggacttttgatttagatgggtcatgctatctttttttctaatatattttttcatatagttattcatgtcagggacttcgtcttccagaaacacgatcaacgatttgctactggtagctggtgcgcgcattgcgcgcgtgcaaaaaattgtaatataagtgataacattttgagcaaaatatacatatactcatctaaatagagttaggtaaattatcgtgtttcaacgtttgaaattaagttgttatatttataaaattgtcttgaaaaggatgaagaagcatatatatacataattgtagagagcatacaaaaataaacaccctagaacttcaaaggttgttga

SEQ ID NO: 4448 - DNA, 1025 bp, Zea mays
  Intron number 1 from transcript GRMZM2G161087_T01 (locus G RMZM2G161087) derived from phytozome v7.0 (chr-ID 2; pos 8 1635151 to 81636175)
gggtggctcagcagtcaggtaccatcctgacactaaaacccttctgcattctatttctgtttcattaatagttttcctattgaagaattcgagggcagtttagttctttaatttggaaacttatgcatggtcaaatttttttgcatccatttttgctttcatatctgccttctgaaaaaaacattgaagggtaaataaacaggtccttgtttgtaatagcttgtccatggatttagtacaaatcataacgctgaacatgcgaactgtggaatgatggttcttgtagctactgattttttccaatattgactttccacgctgaaatgaaatgcaatactctctccgatccaaattatagttcaatctggctttgtctctaactcgacctgcgaggggtaagacagcccccgggcattgaattaagaagaagaccttctcacacaggtctagaaaacccccgaacccctgccccacccatacacagcggcatcgaagcccatgtgagaacgaccacgaccggggctgagccttagacctgtgctttggcttgggacagacgaggagatttttttaaccacagcctgaaattcgctcccacgaggagtcgaacccaagacctgaggagtgctactcagaccacctaaccagctcagttagaggccctttcgcggctttgtctctaacatcgactacgtttttagaaaaatgataaacatttacaatgtcaagctagtttcactaaattctccatgaaatatattttgctacttgatagggtatttatctgaacttgtagatgttattatatttttcctaaaacttggtcatcaaaattatagaagtttgacttagacaaaggtaaggtgaactatatttggaatggagggataagggatttaaattaatagtacttgtgttatcatgctgtgtgttgtcgcctgcgcttgtgtctatgtctgtgatttctagtttttttttccggtaatttttgttgttctctcctgtttctcatttcagtctctgga

SEQ ID NO: 4449 - DNA, 457 bp, Zea mays
  Intron number 1 from transcript GRMZM2G124638_T01 (locus G RMZM2G124638) derived from phytozome v7.0 (chr-ID 1; pos 1 89358582 to 189359038 reverse strand)
ctgctggtaaaatttctactgctatcatttacactgattttaaggttttggtatggtctgtagactcaaaatgagtaggaactggcgaagtatatgtgtcagttgttattgagattgcactggctcaagtgccattgtctttgttagaatttgaatctgcttcatgtgtgccgaaatatgtacacccttctagctttaattagttaactgtgcaaaactataaattgtggatggatttgtttgtcctcagttatttcagtgtacaatttaccacgttttcttttcaagagtggtggcatgtgcttttttctctgctgaattatgtaacatgctggtagttattctaagttctgcaaagctgatgtacatcgactaatttttctgttgatgatatcagcataactagccctaacctgaaatcatcttgcaggatcgtcaggagctggatttacacctc

SEQ ID NO: 4450 - DNA, 921 bp, Zea mays
  Intron number 2 from transcript GRMZM2G382890_T01 (locus G RMZM2G382890) derived from phytozome v7.0 (chr-ID 2; pos 1 28160210 to 128161130 reverse strand)
agctggctaggcggccgagtccgttcggtgctgccgtgcgggagcgcttgctgtctccgattccgtcccgtttgctttcgtggactggttcggaaatcgggaggcgttgcgatgagatgatgcggaggcggcgagaagctcactccccgacgatgagcagaatcacaacagtatcttaatctcccttgcctcctcgttccctgtctccccggcaagccttcggtcgcatcggggtggcgagcttgcgctgtcagcggcgaacccctcccctgcccccgcagtgcttccgcctgctggctggactcaggtgagcagtgtggattttcgggttcgtgcgatgcggtcgtgggattgacggatgtattttcccatttatttattcgattttgaactgccaattaaagttctactcttgattttttgttcttcagttcggcccttaacaagagaacaaagaccatgccgatgcgtggcgtcgatttcaagtggtgcgtctgcaccctctcgtctcgccgtttcttccctaacttggcccccttttaatttgaagatccattcttctataatgactcaaaggttgactgattgagaggctaggtttgggattcactgcaggtatgacgggttcttcctctccatgctggccactagcgtgtatcctactccacccgataatcccttaccaacttcatctatacacgtggaactcaaattacattttttttctaagtgtatgttgatatgttcttctaattattagtcggctaataagttattagctaggttaaaattatattatttgtgctcaagtttttaagctttcattatacaacctatcgttactgaagagagcgttgtgctattagtattttactgtatctaaaattattgtaccaccacttgcagagaaggccaatattc

SEQ ID NO: 4451 - DNA, 1046 bp, Zea mays
  Intron number 1 from transcript GRMZM2G104769_T01 (locus G RMZM2G104769) derived from phytozome v7.0 (chr-ID 6; pos 3 643407 to 3644452)
aacgcctcagcgccgccatcgacgcctacaccggggtaagcctgactgactccccgctcccggcggccaggatcatcggcctgcttcgcgtgttgcgcgcttgctgtcccaagtagttacgtgcgcgtcatttccgttaccctgttcgatcgatgcgctgtggagtgagctacgactgcggcgtgcagagttctgttcagcgcggcagcgcgtttggtgcgtccctctgacaatttctctgaatctatgctgaattatccgagatcgaagtggtctgtggtattggcagtttggcactgctgttctgaatgtctgacgtgacgtgtttttggcttctgtgtcgaaggaaatactgtattgaagatggttacctcttgatgtagccttatttgtgtgcactggtttggtggcctggttactgattttacatattgcttactgccatatggagtggtttgtttggttaaaggttaaaacgtaaaacagtgatgtttgatatgtagttgaaagttgctgtgcaacagtgcaagtcgcagagcatttctaccttttaagatattgtgggggctaggcgatgctaacatgctggtgtttgtagttctctaggcagttaatgctaggcagggaaagggggtgaagagggtttactgggaaaggtgcaaaattgagtggagagttgatagagattttttccaatcttttgctagggtgtacaaacatcataggcttctaacattcatattcttgcaaaccactgaattattcaaaattgattctgggttaaggaacatgacattggacaaattggttttagccactcagctaagattatagcttactacctctagttacctgggtagttgcttttgtctggcatttctaagaaaatgttggcagctatagtaaatgcacaaacatagctgaatcaatgaacactagatgctagtaaaactcttgtcacctgcatttcagatcctgtatatcttgaacctcctttgctaacttcagtgcctattttggttgacaggccataactctttgcccaa

SEQ ID NO: 4452 - DNA, 735 bp, Zea mays
  Intron number 2 from transcript GRMZM2G174249_T05 (locus G RMZM2G174249) derived from phytozome v7.0 (chr-ID 3; pos 1 45731927 to 145732661 reverse strand)
gtaccacttccagcctcccaagaactggatcaacggtactcatctcttctcttctcttctcttctcttctcttctcttctgttgactttccgtatgccttgtaatccgaggttcttttactggatcaaggaaaaggaagttcgtctgattttttttttgcctaactggagggagtttgacctcccttctctttctgaataaaaattactggcgaggttaatttccctagttgcctagctctgtgttcatggtatacatgtgaaagggaaggtaggtaggctacacaatacttgtgctgcacagagccaaattttctgttggttcttgccgaatgctgcacagagccaagatacatattagtgaaggctcacattcatggcactgcttttacattttagtgaagtcatagcaatgttttacctaaagggatcgatgctattcccttttcgcactacattggcatagtctgaagtattgtgttaaagttttcagttaggcaatgcattcaggccaactgaaaatttgtctggaaatgcactttgcccccgtttggtcttatatatgctgattatattttcatttcaagttcctgataccatctgaaaagcatgttttggactcagggtctttgccctatcaagtttctgatatcatcttttattcttttcccgtccttgaaaaatccaaatgaatcggggaccgtttcaaacaacgactcaaaaaaaaaagatccaa

SEQ ID NO: 4453 - DNA, 906 bp, Zea mays
  Intron number 2 from transcript GRMZM2G088138_T04 (locus G RMZM2G088138) derived from phytozome v7.0 (chr-ID 4; pos 2 22475580 to 222476485 reverse strand)
gggagcagcagcgacgaacgacaatagtatctgttggtcagcaaacttcccagtgcagcctccatttctcagtacctcctcttcaattctagtgtgatttgcttcaaattgtcccttgcatgatgtaggatgttcagtgacacaaaaaagtgatgatcatgttcagtttcttgttattaacagtatatcataaataaaagcaaaggaaatgagtgatgatctgtgcatgacaaaatttcaaggagaaaacagaaattttaagcttatcttagctttgcatattatctcgatctcactggtgctctatgtactctgtagcgaaagggcatctagcctaatggttaaaggcttccgagtaacacctctaagtctcgggtttgattaccctcgggggcgaatttttcattaaaaaatgctctcggtgcaccatttgctatcgggttacgatgtcctatacatcaccctccggttgaatcgttgcagagtggacgtttgacgccagtccgttagtgttgggaggccagggttcgagaattttctcgactgtgaccattgcttcggtctctttttaatataatatcggctcttcccagccgagttttttctatgtactctataatatgcttaacctgacatgcatatttcccatctccttttgaaacctcgtatccatataaacacatgcaatacatgttcattaaactaatttcacatagtgataatgtacaagttttcctacaaagggtctggaaaactaaattttccaccatgacttcattgcaagtttgctacgtagaaattgcgttacaaattcattcttcacaagtgaatttaatttgcaacttgtttgattgagtacccttctttctagcttggaaggaaatcaacggctagagcaactgttgt

SEQ ID NO: 4454 - DNA, 923 bp, Zea mays
  Intron number 2 from transcript GRMZM2G080917_T01 (locus G RMZM2G080917) derived from phytozome v7.0 (chr-ID 3; pos 1 70106814 to 170107736)
tggagaggttcttcaagctctgtgaccccggtgagtgcgctcgatctcttctattcctctcccagggtggggattgggtggccaggaggcttccatggtttttctacttgggtttcgttgctttggtgggagattgaaagctaattctggagaattttcctctttctctgtctcctctaccctcactcgctctacacgcttcggattcgaattattggtggccttgcagctttcgttaatgctgtgcttgtgctggattgtagctgttcgattttggtgagagattggtgcccaagataacagttttgtggagtgaaaaacgttttttattatgtgttgattggaactgtgggacccgtggctgccgtttcttttgttgttaggttggtagtactatgggtgttgctaccaatcttttattgttagcttgatagcaaaaaaatcgctagaggatttttgctgattggtaacatgggattatcgattaactgtctgctgcgtgcttggtttctatttgattattttgaacttctatgtgtttgttatggtactacctagttgttggcgcagtcaatttagtggagtcagtgacataatgtggatatgtatattgattcagcaaatcttttttctttagtgcattgatgacactgtacgactggctgaatgcgtggctgctttagctgctcacccctatttatgtaaattattattattgtggagtttggttgcttctcattattaaatattatggaccggttcgcagtgttttctgtttctgcctttcactcttgtttgcagcagttcccagttggtgtagaactagtacctagttttgatagttgctagatgatgctatgccatatcttgttatggctactaattccattggttttgaacagaaaaggagaacttgtgcctct

SEQ ID NO: 4455 - DNA, 689 bp, Zea mays
  Intron number 2 from transcript GRMZM2G092261_T01 (locus G RMZM2G092261) derived from phytozome v7.0 (chr-ID 6; pos 1 07634560 to 107635248)
agctggagtttcttcctttcctttgcagattccaggtgttacctaattttggtttttggtgtttcaaaaactattcatctggttctccttttttaatacagtagggaataagatcctttaaattcttaattgatcagtttgagatcttcctgtacttatgctctgttccagcctagtgcttgttcggttaggggtggattgagggggattggaggggattaaatccctccctattcaattttgattagggagggatttaatccacttccaccgagtgcaggaaacacattgttttctccccgtattttactatggagggatttaatcactccaatccccttcgatccagacgcaaccgaacaagccctcaatcccctctaatccccctgtaactgaacagggccttattagggtaaatgatgataaataaaattttctgaatctggattgtaaatttgcctccaatttgtatatgttaacttaatatggataatttttagttaattaaatgaacaaaaaaattataagtactcttcctaccaattggacagctgagattccttattattttttccgacttcatttaatattttcctacaacgtttcatattacattacacaacctgattcttcttttctttcaatgaattgcagtaccaaagtagtagtctgtacatcataaacatcat

SEQ ID NO: 4456 - DNA, 770 bp, Zea mays
  Intron number 1 from transcript AC211006.3_FGT005 (locus A C211006.3_FG005) derived from phytozome v7.0 (chr-ID 8; po s 21386315 to 21387084)
agacaacggtatctggtcatgaaagccgagagccgagagaatgatcaaggtgtcttccgaggtactttaataagtttctaatttcatcaaagagaggatcaaactattcaaaaagatgattatgtttttcacgtgttcttttttccctttattcctactaccgtttctttatgtacctaataacgcgcatgtatttaatgctattggccggcctcttacatggattttcagaaattgcggaatgcagttagatgttgccattgatatagaaagaacaaagatatattgcacactgcaatgtacgaccagatataaattaaaacaagccagttttttattggtgagcaaggttaggctattgttttctataacattttacatgtaaatatctattaaatcaacttctatcattcatctttccaattctattattattgatagatacaataaaaatgttgtttaacttagttataattaagaacacgcgctggcgcgtgccaatttaccagtaataatttaaccaggaggaaaaacaatacggtgcgttcttagcttgacctctgacgtggccacaacgtcagagctaacttggctttacatgcggtaacagtagtgggcctaattttgagctacttttgctcaaatcactctaaaagcgcttccttaccacctcagcagcccactacggccccttccaggcttccactgtttacattgcacccgtcactccgtcagacggcgccgcctgtggtccgccgtctgcggcgatc

SEQ ID NO: 4457 - DNA, 1012 bp, Zea mays
  Intron number 2 from transcript GRMZM5G846185_T01 (locus G RMZM5G846185) derived from phytozome v7.0 (chr-ID 1; pos 6 5098414 to 65099425)
atataaggtggtgaaagtctctgctactttacaaggtagaaatccatccatattgtttagttcaccaaactgtgcttccaactagagttgactccgacaaaagattattatagatcctaaacagactgattgctcatgaggagttttagcactggactgcaaagaatacagagcaggtcgcacagatggtgtggtgattaatgaatgtatattatatggttgagcttatattttagcatattgtgcactaaacatgtacaagttctttatataatcattgtgatttacacatttttaaaataaatttatgacacttcttgttgtgtcttactttcagtaaaaagctcaggtgcctctaatttgcattcacgaccatcaatgttattcatgcacatatgctttaagttggtgatgatttgatagtaccataattgaaaataggtggaaagctcatttaatttgagataagatcatgccactgggtttttatatgttagcatgtttaatttggttgtttttatacttgacccatacatcttatatgttgataactcgacggaactagaacagacagacttgtttggttcaattttgaagttgtagattccttgaaaaaagaacaatagatgatactattctcttgaatataggcttttatattgtggtcatgttttcattttctagatccaagattgctctttcttgctttgtttctatactaacatcttggcactatccttttcaaattttagaaaaaacaatttaactttttaatgattgacccattgagttttttatacttgcaatattattatactttagcagtcctacaaaacacctttatacctaccattgcacgacttatgactatcattggagtacatttatgcacaccattgcactatttatgactagttccaatttttccccactgctattgcaccgtatgtacatgagtaaggagttatgtactgtaactaatttgtttttgcattcggaattcaggttcagt

SEQ ID NO: 4458 - DNA, 858 bp, Zea mays
  Intron number 2 from transcript GRMZM2G078862_T03 (locus G RMZM2G078862) derived from phytozome v7.0 (chr-ID 4; pos 2 30932562 to 230933419)
tgttttcgccaccaccacggctcttcctcgaacaagtatcactccaaactgaagtttctacacgtatatatagttccaaaaacaaagtaaattgcatacatataatataggcttcatgctagtgcgactatggtgcctacgaaaaattatgcaacagattaatgtgtttatataatggatgtacacatgtacactggtaaaaggaagaagagatcatgcttgtctcttacacgtacatactatcgattcaagttattcatttgaattagaaacagttttttttcatagtaaatgaactagaatcggatacaaacttaattgcaatttaaacctgataaaattaacattttttccagaagttctagacggtaactgtactgtgactgttctacaggatgaaactccagtaccctcaattgctgcggcagttaatcgacatagtcaggaggtttgtagtttaccagcggaccctcagccaagcgacactaacaactcgcagttgcacaacttcatcgcaaatataaccatgccaccagaaccccctctgattcaaacccttccacacaacaatttacccaacacagcaaatgcaatttgggtttcgccccaacagcatataaataggcctggccaagcttccacctccggcaagagatatagtgttagattggctgcaaagaaaaaattaatgttggggcgttctagagattcaatatccaaagctcaggatattctggtagctaaactatacaactcaacaacaaaaaataatctaggctctttggcttcttgctcatctaatgaagtcaatcattttgaacagattgcaaggctttttgcaagacctcttaccaagat

SEQ ID NO: 4459 - DNA, 569 bp, Zea mays
  Intron number 1 from transcript GRMZM2G058690_T01 (locus G RMZM2G058690) derived from phytozome v7.0 (chr-ID 8; pos 1 24646574 to 124647142 reverse strand)
ccgtcgtcatccagaaggccttcagaggatacttggtaagttggtagccgaaacgccttcgttctttccttgtgttggtggtgattcattaccgcagtgcatttttgtttccttcacaaaaaaatgcactgctcaaccgaacgaaggtttagtgggtttggccattcgtttgctttctgtcggtccaagaaacgaacggatgagtgaacaagtaagtgggcatgaacttggcagattcttctgcgttcgcattggacaggagatttgacctcactcactgccctcgatccatggctggtcgctgctgctgttcctctccgccgagtcgactcgtttcgtttgtttaattaatccctactactatagaatagattattattccgccgatatttttgtttattgctagagtgtgcttcgtgaactgcgcggcgtgacgcacctagccgtcactcatcccagcccaattcttttcggtttccgatgcgacctgcagcgttaaatttttttttttttgaattttttcgtgcaacgcaggctcggaaggcgctccgcgctctcaggtcgctggt

SEQ ID NO: 4460 - DNA, 953 bp, Zea mays
  Intron number 2 from transcript GRMZM2G391559_T02 (locus G RMZM2G391559) derived from phytozome v7.0 (chr-ID 2; pos 1 74585678 to 174586630)
gcaagcagttcgcagctgaggagatttccgcacaggtttaacactaacttcgaatgtatctccagtaccgctattactctagttttttggattccgacagtatacagttaatcaactatctcaacatatttggtatagttaccagtggataatttgccttataatttagcagatatgtgtggtgctagaattatttttgcagcatttacttttaatagatcgatgctcctagatcaatgaccatgcgggtgttcctcctgcactgaataagaaagaattttggtgatggtgttcctcctgcactgaatattgggctcccatcgagcaaccaacagaaagaaaattttatgataattagcggtactgtcggaatccactggtaactgtaccaaatctccagtaccgctattactctgttttttggattccgacagcatacagttaatcaggtatctcaactgatttggtacagttaccagtggacaatgtgccttataatttagcggatctgtgtggtgctagaattatttttgcaacatttactttttaagttcatattttgttctgtttgccagagtaatatatgagtcagtaacttgacttcatttgaatcatgcggcttcttaggtttcagtctaactaaatatctaagtttgcaactgcaccttttgtttcatgtcttctttggggtggcccggtggagtgggttggagctagagagtccctgatttttagtgcattttgtcgtagtgcaccggtttctaatttgatgttgtgatttccaagttatgcttcggaatgttcgtaatactaacatgccgatggatacatttgttaaaaaggttactgaggtaccagatcttgtacagaagtccatgaatcatcaatttggtttcctaaatattttctttctttcttgcagctgaacctgtatcttgtcctgcttccacttg

SEQ ID NO: 4461 - DNA, 580 bp, Zea mays
  Intron number 1 from transcript GRMZM2G084525_T01 (locus G RMZM2G084525) derived from phytozome v7.0 (chr-ID 9; pos 1 30994700 to 130995279 reverse strand)
aggagaaggttggcgccgagccaatcgttaagaaggtagctatggttttctcttgctaaaccattactttactaacttaacatcagtggtgaacgcgaatacgtgacaatgtattgttaaagcattgtgatctagcttaatctagtgatatttggccatttgggaatagtttgatcttaacatgtggaatgagtgttgaagctcttgtgcgtttgttggcacctgatattaattgagttggtcggtagtcttgacctgtgaagagtaatttgctgaaacggaatgttacaaattatgtattgaaccaagacgagtttgagtgggggggcctatggtgtgaaacacattgcccctgaacggctgaactctcaaaaaaatggtgtggctcacaggtttactacagggtttatgacatgggaagcatcatgcattttttggtgacttaattttcataatctgatgtggaacaagttcatggctggagatcccatcattttgcaagttgctatctccccactcccctaccctctaccccttcattcttacaaaataacgcattacatttcaggctgctgctgca

SEQ ID NO: 4462 - DNA, 607 bp, Zea mays
  Intron number 2 from transcript GRMZM2G474546_T04 (locus G RMZM2G474546) derived from phytozome v7.0 (chr-ID 6; pos 1 60701790 to 160702396 reverse strand)
tcattaaggtaactgtgtgaactttcatgtaacattttgttgaggtgctcggcaactgtgcataggattggcagtgaactactgcatgtttcttttgtaaatgggttacgataattgctacatttttttgtgtgtagttatgcttttctacgtaattatggaacagtccagtacgaaaatgcttcctcgtttattttatatgttgcattagttttggtataagtcaaactcttctatatttaacatctagcatcttcccatagaggcaacaactatgtatgggaatattcttgttagtggaatgactttgactcatttgacatatttcagttttaatcgaggttatcaattaccatatgccatatgggactgttgatttgcatgtacccttgaaatcattcagacaaatgaagccaaagtatttttgttgctactagcttttcaaaattatgagacaggctatatggcaaattcactatttcagaatatagattctgtaggaaccttccaacatatattaccataaaaccagtttttgttttcttctaatccattcccattttcttgtttagcttgttggggcctgtaattgcccgacggtcttctg

SEQ ID NO: 4463 - DNA, 1044 bp, Zea mays
  Intron number 4 from transcript GRMZM2G163658_T01 (locus G RMZM2G163658) derived from phytozome v7.0 (chr-ID 8; pos 1 17631358 to 117632401 reverse strand)
ttggtggaggtagatacaaagtggctacaacagtgctattttcttaattttccttgtgagagatttcactaattgttccaacaataaatttatttgtcaaaagttgttcgtctgttttagatccttgggttatctatgcgactatgccacatctagagtaatatatatagcattgtcaaccttttgtttatttgttcatttatttggaagtttagctctggtgcggctgcgctatggatgatggggcataagtaggttttttttttcgaaaacgcaggagagctgcgtatcattatattaagaggaaaaaaggtgaggataagaaacctcatacaagccaaactaacccacacacccacacacactcaaggatagctagaagtacaatgaaattatgaccaactgccctcatgaccaagaaagaaggacgccgattagtgcgttggagcggaaaggatgctatctaatccactggctccagccctacaccaattgtgagactcctccttgacccacttgatgaccatggtagaacaaggctgctccccattgaagacacaacggttgcggtgattccaaatggcccaagccccaagaatgatcaaagaattgaggccctttaacagccccttatatgttggaggggcataagtaggtcattagaaatattatagtgtgatgcttattactctacagaaacctatatgtatttgtcaacaaaatgacatctctattagctcgttttgctaaaacattccctatttcctgggttccattatttcttgtagtttcttgaatttgagactgaagaatattgatattatgagatggagagaacaaaatagtgattatatgtagttcttgtgttcttatgttcaggttcttcattcacatgctagtaaggactaaaaatacctgttttgttttaaacaaattctttgagctttcaccttttcaatttagagtgctttgtttcaaattttaatcgatctacaattaatatcttcagggaagtccagaatcagcagtcaaggtttatactac

SEQ ID NO: 4464 - DNA, 960 bp, Zea mays
  Intron number 5 from transcript GRMZM2G351070_T01 (locus G RMZM2G351070) derived from phytozome v7.0 (chr-ID 3; pos 2 3626898 to 23627857 reverse strand)
cactttctgatccttcggacgcggtgagttttctttgaaaagccttccaaactgctctgcttgtttctagaatttgaaactacatcctgttgtgggctgtgattagctgatattatattgtgttatttgtatgcgatgacttataaagttatagtttagtaccatttcacaactcaatcaaggtttggatctatttggagggcacaagctgcaactgttgggcctggtactgtagaaccacaccccagcaccattggagtaataatcttagatgataagttagattcacataatctctactatatttaaatgggaataatctctcttcgtgcgtcgccacgcgtctccgctcctcccgcctgcctagctgaattaatcaaaaaaggagaaaaggaagatggctccaggattcaaacctggactgcaaggaccaaagccacgccccttaaccactgcatataatgttcctttgtgttacagaaggatagatattataattaaaaggtagatattatcactacacctttaaagcttgtgcaaaaaagatgcgggatgaaagattcgaaccctggtctctcaagaagggtacaaagacttcgcctgctaaccaatacacctcatgttctgttatgttttacaaaggatcaataattttaatataataatacgtataaacagcgcctgcccagggtgggtggttgccatgctcgtagcgatcggcagactggctgttcgctgtacgtgcaaggaacaacctccaacctgaccagtcagcattgaagagaactgtgactatttctgctggcccttgatgacagtttccccccccccccagttatttgctacaagaaaaccttttttcagcagagtagcttttggacaccttgtatatgccttcaattaaagcgtttgaaactctttgcagcctgctcacgagaaaatcggtgtcgttgattccca

SEQ ID NO: 4465 - DNA, 865 bp, Zea mays
  Intron number 3 from transcript GRMZM2G053047_T02 (locus G RMZM2G053047) derived from phytozome v7.0 (chr-ID 3; pos 2 17821562 to 217822426)
ttctagtttctactttctagggagtaaaagatggcccatgtggtaacatctagggagccattggagtacaagtgagcatactacctgaggacgcaaacctacctatttcagtagattggttagagtaagtttttcagaaattatctctcctgttgttttcttcttggttacagtattatatgtcctgtcctgcttctactgataagatatgtggcctcagcctcactttctactgataagcttgggctgggtggggttttcttgtgtgtgtgtgtgggtgttttctctttttaatgtttgttccggggtctttccccttttcttattaatacctgcgtgttcaacaaaaaaaaggaagatacacaaagctaactgtgaggttacttcaattgatgcatagcagttaaatgctctgcagtttggtgtagcgttgaagtaatgtaatgcggactgtattttgctaggtttgtgtcagtgcagtttctgtggtatggaaaaacatttatgggctaaattggagatgcaatcctttttgctgaatttacttcctctactatgttttgtcctgagagttgcttcctctaataagtttctgttagaacttggaagcattttggtatccagattgatcaactttgcctctttggtgtatagtcttatgtgctaaaatgtggaatgaactggtacttttaccctttttgtgtgtaatataaaatgttacctgcataggttgtgaattagcaatatttgacttgagactcatcaaaataagattcagcattatcatgtacatcaaaatacttttgctgaattgctccctctaattcccttatcaaattgtcaatccaggttttctcacttgagg

SEQ ID NO: 4466 - DNA, 543 bp, Zea mays
  Intron number 1 from transcript GRMZM2G089507_T01 (locus G RMZM2G089507) derived from phytozome v7.0 (chr-ID 2; pos 5 9761195 to 59761737)
acccaaaggtcttggcctccttcaagcaagcgcaggtactggcctgaggtctctatgcgcaaccgttttgcagactgaactaccgaaacgcatcgttttaattaatgttattatgaatttctttagaatcttaagaaattgttaactgtttttttcgtaatggggcactgataatctctgatatgaaatacgaactggctttatggcatctttttgtcgagatgatatatttttagtttgccccggaagcaagcaaactctatgtctttattcaaaaacaaaagcaaaatagcttcttttttttctatgcatgtgataacatttttctttaaggacgaaaagcgaatgctcttctttcgatatgagtaaaagtatcccagagggtccctttgcacagattggccattgcttctaaagtctaaacgcaattgtcatacatccaggacagacgaaaggaaaatatcgtccacttcaagcattttatttaatgtttaaatttgaattataggctttagcgggtggacccctggtgcaagcacgaaa

SEQ ID NO: 4467 - DNA, 1057 bp, Zea mays
  Intron number 1 from transcript GRMZM2G157472_T01 (locus G RMZM2G157472) derived from phytozome v7.0 (chr-ID 4; pos 1 71548597 to 171549653 reverse strand)
cgcggtccatccatcgatccaattccaatctgcaggtgagcagctcggttagattcccaatcaacagctcgaatcgcctgctctcccatcctattgaatgaaactatgatatacaattggtttgcctagttattatctcgaattaatttgtaaagatctccactttggttcgatttgattgtttcttcaactagtggcatattggtctgcttcttacgcgattcaactattggcatattggttggatatgaatatggccatttgcagtttttctagcgtttgctaatgaacacctctaaaggtggctgttgcacttgcagtaggattacatttgtgtgaaatcgaatggttggtgatctgttgttgactggttaagagtgctgccaaagttttagtttagagacctgctgctcggtgttcgccgtatcccatcgcgtgttagcgtctgccgactgtgttctaaatttgtgttcgttttgaaactgtgttctgaaaccgtgcaaactgtgttttaaaactgtgccgtaaaatagactgtcctgtgaacggcggagcttagcagttttgatctagagctgagcggcggcagagcggggggagggagaacagcgaacagatttgataggggcaagtgtccggctactagctgccaatataactaaataaggttaagtttcaaataaccctctaaatggcattttgtctgtaagacaacgtttgataatggtctcttagcgaagcgtgttcctataatagcatttgagtgaatcctaagtttcataatggcataaatccaattttctctatgaattatataaattatatcagcatctattgacctacttatgaattatcataatttaggtatatagattatataaaccacctaataatctgtgttgtttgtttacctctcgacttatttaagttggattatataatctagagggtaaacaaagagggcctaagattagatagtatttgaaaggcttgcctgcataatagtcgcactttacccgcagcgaggaggtcggctacctttctcctccggcgagct

SEQ ID NO: 4468 - DNA, 761 bp, Zea mays
  Intron number 2 from transcript GRMZM2G004161_T02 (locus G RMZM2G004161) derived from phytozome v7.0 (chr-ID 3; pos 1 64975392 to 164976152 reverse strand)
tccacgtcctgcagcgcctgcacgaggccgacgtacgcacgcttttttttcttcttccatggattgctaccggaccggaccggaccggaccacggtcggtcgatgtaaatctgactgacacatgcttgcacgcaccgcaccgaatggaagtgcgagtgcgaagaaattatcatgcatgcatgcatgatggcgcacgccggcggggtggggtgggcactggggagcatgctttctttaccgtcaagcttttgttccaggaaacggtggacatggtcggacctccgtgtcgcgttcgtgcgcgtacggcgtacgaacgacatgacgccagtgttcttttctatgtggttggtgcgtctgtttgggccggcccgtccacgccgaatggtcgggcgaatgttcgcatctctccgacctcttacctttccgactctgttttgattttacacgttttcatctggctgggggtagacaaatcgtgagaccaagtaatttgtgccttggtttgaccaaagttagcagaaatcttggcggctactccatcagttccatctacaaacattcttcgtagggcttcaaaagtccagcggagaacgtttcaccaataataacgtttgttggaaacaacagttccacgatgcacgtttttttttgtgtaccgacgaccgacccagcctcttagctaaagcactgacccgatgcgcgctcggttccttcctggacatgcagcggcggcgcaagtggcggcggaagcgcgcggagca

SEQ ID NO: 4469 - DNA, 707 bp, Zea mays
  Intron number 2 from transcript GRMZM2G016106_T01 (locus G RMZM2G016106) derived from phytozome v7.0 (chr-ID 2; pos 2 09506971 to 209507677)
gcaagggtaaatatccctttttatccaaaaggcttatttgtagcaaaacttgttcaacaatccaattattgttatgcaatacctattgtcaaattcttttaggggctgtttggatccttccattttgtagaaatgagaaatccaaatcaaaataacactgatttctgcaaattttagcagtttacagaacatcagcgatgcacatggtgaattagtgatactgttttctgtataaaattttgtacgaattggagataaccagcagttagaagatatttcttgtggatcctttcataataatgtgctacttcatgctagctagttctgagaattgcattaacggcagtttgttaatgatttatcatatgaagatagcaaaaaccaaaacaaaagtaacagggttcgtataagcttatgcatccctgaagaaatttgtagtaacattctacactttgttggacttgttctctgcttccttcgatgcttataaatcttttcgcctaaagaagcataaactacctgattgcgagaggagttaagatattgactcacaaagaaatccatatgctgatctctaagtagcgaggcttatgtcagtcattgtgtgcagcatttggcatgcatttcttgattttatacattcttaatttgcctttgcactctttatttcaggttgttagagataagaggactggcaagactaaagg

SEQ ID NO: 4470 - DNA, 710 bp, Zea mays
  Intron number 1 from transcript GRMZM2G325008_T01 (locus G RMZM2G325008) derived from phytozome v7.0 (chr-ID 7; pos 1 52391667 to 152392376)
cactgtcgctgcccctctccgtcccgtcggctccggtacggataggcacgatcgctctgcccatgttctctgcatctgcgtgccaattcgtaaaaaaatagcttcgctgcctgctctcgtgtcagtgttcttcccaccgggtggacattgatacgagatcatgtgctaggcttcagagaaccgcggcacatttcgcggcgcatgcttactggtaaagtggtaaatttaattgttgcactgtacttctatccaatttatgtcagttccacatacagacatacttgccttttgtgccagtaatagttgagttttgagtgaacctatttttttacttgcttgggttggttacatgcctcccttatatgttttaggactcagattgaaaattaattttatgccgactcacgtgacatcgtgctgtttaaatgattttattgccacctgtccttaacactctgcatggttatcagacacttctagtaaacaatacactcatgactcatctagtcatctccatatctgtttctgcacatatctagtttgctttctccttgctgtttcaaggtgcaactatggacccatcgggtggctttggatggagtgtactgctctagatagttgtgaagttggagttcctaatgtcattgtccgcgaaggcattttttttgtgtgcaggttacaactaaggtcgttttgctataactaggcct

SEQ ID NO: 4471 - DNA, 645 bp, Zea mays
  Intron number 2 from transcript GRMZM2G341405_T04 (locus G RMZM2G341405) derived from phytozome v7.0 (chr-ID 2; pos 1 82510255 to 182510899)
gtacttccccgtatgcttggtttcctactcttctcatcggattgtatatacatcctgtcgttctttttcacctttattgtccccgattcggctcttcggtttggttttatttagtttccgttgttcgcgtaccaactatcaagaagtctacggagatatttgggttgctgtttttgcattttttttcatcacataaatagcaaccccgactttatgtgccacccccacttcatcctcctcctgttgttttcaccgtgaaataatttttgccatgtaatgtcatgtcaggctcagtttcatcttctttcttctgcaaataataatcgggtttgactctgccgatccgattttatttgtaccatgcgctagcacacggctatatttagaacaatcttatcttccaaagcttttccaaccgccagctgcgcgatttctgtacacttgtgtgtcctgcaatttctggctgtccatttccgatctccaccgtggtctggttttgttcaacgtaaggaaaaaatcgttctcgctaactttcctcggagtcgagtgattccacatgtataatgtgttcctccgggggctttgacttgtatacagctatacatgcgctaaactgtccggatttgtgatgtcgcagtgacaaca

SEQ ID NO: 4472 - DNA, 741 bp, Zea mays
  Intron number 1 from transcript GRMZM2G013652_T01 (locus G RMZM2G013652) derived from phytozome v7.0 (chr-ID 7; pos 1 69267655 to 169268395)
ccggcggcatcctcctcccggaaacatccaagcaggtagcaccatcgtccgctacgttgttttttagtagtttaggggattcagtttccggcgggacgtttagatcatggtgtcgggcaaggtgttccgcgccgtcgcttgccgaactgaaaacggctgcagcagttgggcgatttggatcgcttttgtaggttaccaatagttgtaagcagctaaaaatttctcaccatgcttcctccctctggtgaatttatgtatgtttgggttgtgattagctctatgttattcagattgcttggtttaggctgccattcttaactttagctataacaattttatcgttcaagcagtcatgttatgtttttttattaagggtagatttatatactagagtacttgtgaaatactagcatgtttatggctacctgcagttccaaactgttctgtcccattgttttgaccgcattgtctgtgggatctcagtaagatacattacttgctattttcaagtttttacctgaaaatgtacctcagtaagatacatgacttgctattgtctgtgggatcccattgatttcctgtttgacggtatttcttgtctttcagaattcaaataaggattttacttatcaattagcattcaattcagcactgtattttggtgtgttcgactggagaaactaattattgtgggtgtagaatcaattctctgcttgacaatgttgctcttgttgcagctga

SEQ ID NO: 4473 - DNA, 742 bp, Zea mays
  Intron number 1 from transcript GRMZM2G064012_T01 (locus G RMZM2G064012) derived from phytozome v7.0 (chr-ID 3; pos 1 32386743 to 132387484)
aacgccaaagaagcacaagcctttccccttccaaggtacccggtgattgcatctaaaaaaatttccgtctaaaaaagaatttccattcaaatctcatctcaaatatagaattctacttccggtgttttttttgtcttcacctttaacatgtacatgtactcaaggttcagaatagagaacatgccatatcgccagtcaaataaagcatctttttgatttagaaggctactgaaaatctgattgaaaccttcctaatcgttcatcagttggggaatcattttatttgaggtgcacccatcataatctataggttttgcttctatctagatgtttcctccgcacgatatttagaacctgcaaggatgcgaaagtccctattcacggcgggctacttatgagtcttccgaacaagaaaacaacaatcatgagcagcaggtgcccacggccgtggtggcctgcgcgagaggaaatgtagtgttagctctagcagtgttctctacctgagagaccgatttgctagatgttttagactttggattcaatacaatccgctggttacatggatattatcctgaattgcgctatgggttttcagcctatttagttattcaaggtttagattgagcagcctctgaagtttgtttttccttgaacagatgatccatgcttgggagtagcaattcacaattatttcatctcttgtgcagaagtcttgctagagaagggaagcagtaactcgaag

SEQ ID NO: 4474 - DNA, 800 bp, Zea mays
  Intron number 4 from transcript GRMZM2G122869_T01 (locus G RMZM2G122869) derived from phytozome v7.0 (chr-ID 4; pos 5 240857 to 5241656 reverse strand)
tctgcgggagaaggtagaatctgagacaccatgaaaattaagatttcaaaataatgttgatttacaattagtagaaatgcatccacatgaccaagagaaaaaaaggtttgttcatatatacatcatttggtctattatatccttttcctgcctcaccggatcagcattagatgtgccatttctgaactccagtactcctctgacgttgcatagttgatagttgtgattccacactttgcttcttaggttcatttgcttttagtatcgtaaaataaaaatcctttgccaacattatctatcaacatttcgctttgcagacttttccagcaacaagtttgtctttttcatgtagcgatcatgattttgaattacatccatttttagttaatcatgttcccgcgaaagggcctctagctgagttgattaggtggtctgagtagcactcctcaggtcctgtgttcgacttaccgtgggagcgaatttcaggctgtggttcaaaaaatcccctcgtctgtcccacgccaaagcacgggtctaaggctcagcctcagtcgcggtcgttctcatatgtgcttcattgccgctgtgtatgggtggggcagggttcgggggttttctcgacctgtgcgagagagaatgtcttcttcttaatacaacacttgggggctatcttacccctgtagcctgtaggtcgagttttttagttaatcatgttccggtttctaagagaaactacttattaatacatctcaacattttttgcagggttattgtgctggccactactcctgtcctgatac

SEQ ID NO: 4475 - DNA, 928 bp, Zea mays
  Intron number 1 from transcript GRMZM2G049487_T01 (locus G RMZM2G049487) derived from phytozome v7.0 (chr-ID 2; pos 1 0607703 to 10608630 reverse strand)
ggtgagcgctataaaacttttatgtttcagcagccgccgtggattgcctccggtagtttcaggtggaataggaatttctccacgcgctttgtgtgctagttcattaacgggtcacattgttatctgttaaaacgctgtggttatactaatcgcaaagaggtgcccaccgggtgattttctttccggagctgcatctgtgttctgtactaccaagtgtggaagctccggagctgtgaatttgacctcgatgacaatgttttgagctgtaacaatcataacacactagttctctaaaaaaagaacacataagctcagaaagaagtgtcttgatagtttagtcctggaatacaaacgtactatacctctgcaaattgcacgctatcatgcttagatgcttttgttgattggagaggctttgatattctgctgccagttgtcatcttattgtatatgtgattcattagcttcgtctcaggtttggattggcgtcattgtaaagatatataggctaagctgccatatataaatttgagttaagctctgatatgtgtgctatctaagtgtggaccttgttaaccacttggattgtacgatgtgaaccatattgaggaaaaaaatctaagttgtccctatttgaaaaactggcactattgaattgatatcaggtaacattagcacgtttacaaaaaaggactattcagtttttatgatgctttgcacggatggtgattttttaaaaataatcttgcaacatttataacttgggaatgccgttctttttaattcaaatggttgattgaaaaacattgcagagtgcctttttttcttttacttctgtgggatcctgttgttttctcttcctgcaacttcacttgtaccttatcttgtttttcctcagctgatgtgttctgtgctctcttgaatacag

SEQ ID NO: 4476 - DNA, 410 bp, Zea mays
  Intron number 3 from transcript GRMZM2G150743_T01 (locus G RMZM2G150743) derived from phytozome v7.0 (chr-ID 1; pos 1 20643295 to 120643704)
ccccaaatagttcaggctttgtgaagtttgtacaggtacaaaaaatagacagttgaattcacaaaattagtgttagaatgacagaaattatggaccatttcacaattgtgttcatgtacattatactatctaaatatcaattccaaataaactgaatgcacaaagttttctatgcatggtttgctattccagttaagctttttcagttactcatcatgaacctcaaccatttgacttggtttgctcatatgtttgtggattcttacgaaaaatgaatagtgcaggcatgaaactttccagtttgcattgttcctatgtacatcgccctgcaatgtctttttttgagtttaatggtattctatcttcattcattgcaatcttgttcctacttatagttacctaatttcagg

SEQ ID NO: 4477 - DNA, 567 bp, Zea mays
  Intron number 1 from transcript GRMZM2G701392_T01 (locus G RMZM2G701392) derived from phytozome v7.0 (chr-ID 3; pos 2 5210631 to 25211197 reverse strand)
tcttgccattggaacagagcttgcttcaacacatcgtaagtggattatttcctatccagaatttgttataaccattacggtgtgtggaggtggatgtttcgaggtcctatgacggtgtgctctttgctctgcatgacaggtaattgaactgccactttgctggtgtggtataatgtatcacaaacatgttgcttttgtaacatgaacatgcatctaaatggaaaacatcaagatcactatctatcatgtgtgactgtttacccactgcatttgctatttagctgatcattagttggatggcacaaccattttttgctacacccatttacataatttcgctatttactaaaatactataatttttattaaattggcaagctattaaatttggttttataattatgagaattgagaacacagttttatctgccaattattgtctttgatactggccttcttcatgaatgatgcacacttcagtttttgtaagcagctgcaggaagcatgtcgttacagttttatttggtgttcttaatttttaaggctataagttgattgagaggaggc

SEQ ID NO: 4478 - DNA, 551 bp, Zea mays
  Intron number 6 from transcript GRMZM2G081538_T06 (locus G RMZM2G081538) derived from phytozome v7.0 (chr-ID 4; pos 9 0842685 to 90843235 reverse strand)
tggattataaccccaagaagcaacacattattgtgagtatgacacttactttcatgtttcccatatgaagcaatatttcatatatatttacattaatcgaacattcctatgaattatctttatgtagtaacattgaagacaacaactttgtattaccttgtgtttcttggttatatttctacattatttttgttataatttgattatggattctttttttttcttgcttctgtagttcactgcatgttcacactggagtatgacatgattttttactttgttattattaaataactggttagaactcttgattgtgttctacgagcaaaattattttttatcgatttattgttgtattagtttaatctagccaactcctgatccaattacgtagagtctgccaaattgaacacccgtgttctagttcacaacgacgacagctattacttgttcattttgaattattatcaacttatttatactgctactcaaaaatatatatttgcttctgaatagtaatcggttatacgcttcaggcaacaacagaagat

SEQ ID NO: 4479 - DNA, 448 bp, Zea mays
  Intron number 2 from transcript GRMZM5G813111_T01 (locus G RMZM5G813111) derived from phytozome v7.0 (chr-ID 1; pos 2 76110963 to 276111410)
acagggcacgtgatgatttcttccccatctctgtttttcttatgtttgcttatcttgtactccctcagtctccaaaaaagtgcaacttcaaatcttgtccaagtctggccactttaaatttgactaagtttgtagaaaatagtttcaaaagctaagctatgacaatatgttacacgatgaatattgatgcctatttgatgtcataaatcgtaggcatactagtttattgtacatttttttggtcaatttaaatatggtctgacttagaactgtatcgagaattgcactcttttcgggatggagtatgtagacaatttcttttagtcagttgattctaagttggcattttcatgaactgtagactttatccaagcacttattgctgcttgatgtgatgatgataagtgaatgattgtttttgcctatgcgattttgtgtttcaggcatt

SEQ ID NO: 4480 - DNA, 606 bp, Zea mays
  Intron number 3 from transcript GRMZM5G813111_T01 (locus G RMZM5G813111) derived from phytozome v7.0 (chr-ID 1; pos 2 76111586 to 276112191)
acctggtactgcttctttcctgttgtttccctgtggtcctaggtttaagaagcttcggtatgagttcttttcaattttaaatgctcacctagtgcaacaatacatttgtttcatatttgataactatcttagttgctgtttcttttctattcccctatcaggtccaactttttttttatctgaaatccaaaaggaactatgagagtatgcatttgtaattttatataaacctaaactaattatagagtcaagtctttgcagtcaaaagctgccgcaaattcaaatatgagtactaactaaaactactagatatgggtcagcaagaagaaattgaacttgaatatgaagagcatgatacgatttataatttcatattgttatctatgcctccatatatctaagattagatgtttatattagaagcctaacagatgtaacacccgctaaagagattttggtgaatatggatcaatcaagaaataaaatgccaacttctatagtctttccattttattcagtgtgactggctttgcgtggaccgtggatatctgattgcaagcaccttgtgcattattttacagatagagagccatataaaacgccttg

SEQ ID NO: 4481 - DNA, 897 bp, Zea mays
  Intron number 2 from transcript GRMZM2G177575_T04 (locus G RMZM2G177575) derived from phytozome v7.0 (chr-ID 2; pos 8 3268407 to 83269303)
gctgcacgcctccagccactgctgcctctggatcagtaagagctcacctctcctcagaattctgtggatcttcggatctgtttggttatggtcagaaatgagtatcactccacacagctgagtgttggcaataattccaactttagaaacttatgaattgttcagtgtattcaggatttagtgcatgcttaaatttgtgctgtatcttgatacccttttgcaagtgttatgcttaactgcatatctaagaatatttttgtcacgttgcaggactctaagctgtgacatgtgaaactcatattatggttaatattctattcttctgatatgcctattcatgtaacaaaaaggctttaaagaggctcatggttagattaacattaaactcagactttgtaataattttagtctgatgcctgattttatccatcatctaaaaacaatctaaaggcaacgctttaatgataatttccctcctctcaaaaacacgttgatatgcctagtgagtttcattccatgccttttatgttcaactgtagcgaacgtaattaaacacaaaattgaagctcaattgagcaaaaggcatgtttatacaagccatgtactagcatacatcaaaatgtggagaatttgaagctgcattgagtaatgggacattatagcatgctgtgtgaaaggctattgatgtgcaggtgggaattcattattgtgtttactaagtatatagcagtttttccctattatttctctcacggttagtgtgtatactgtactactaatctggaaattgatgtatgacagtaaattttttatgttggaactgtttacatgtatgttccttgaaatttatcttttatctcaccatttgagtttcaggctacattttacatccctggt

SEQ ID NO: 4482 - DNA, 936 bp, Zea mays
  Intron number 2 from transcript AC193440.3_FGT009 (locus A C193440.3_FG009) derived from phytozome v7.0 (chr-ID 2; po s 46859855 to 46860790)
aagaggagaaactccaagcagaggccagaaagtgggtaagtctgctatggtttattttatggtattgcctgaatattggtgtttgttttgtggcatcatgaagagcacccgtttttgcaaaatcactatattcctaatacattggaaattataattgcattcttataagcactggaaatataattttggagcaactttgtttaacctaccattttcctccacattttgtggtataaatattttgaacttcatcgaggtcacttttttacatgactcatgtctcgtctttgacttatcaaaatactatctgtttgaggttttggaaacaatcattacgacaattgttatcatttccatattgcttagttagtgctgtaaaatgcaagaaacaaaaaagaagttaggatatgcttgatgccttgaaaaagaatgcagcttatctgttaacagataattttggattctccagctcttaaaccagatgaacagaggaagaatatagataagaacaatacacccatgactaacttagttttattcaacaatgcaaagagatgagaaccatttggtgtgaatttggaaggcactattaaaaagagttgtgtactggattttaatagttttgacaccacctttgaaaataggtatgagctggcaaagagtaatttggactccacaaatatggtgggaaatgaattacaagaaccagatttagcatgtttgttaaatggctgatgccaaggatttctgtgatgattttctcaacttttgcctgacttttttgctagacatgagaagggaattgtttgcatcataacaatgtcatcatcatgtaaattaaagatgcaaacaaacattaaacaatcacagtgactttgtgtgtactgtttgaacattatagtgtttcaagattccgcggactcaggattgtgtcat

SEQ ID NO: 4483 - DNA, 921 bp, Zea mays
  Intron number 1 from transcript GRMZM2G469298_T01 (locus G RMZM2G469298) derived from phytozome v7.0 (chr-ID 8; pos 1 6219417 to 16220337)
aagaatacaggcaggtatgagacaggccaaggctggctcgctgagaagagccaggctgtatatggacttgtgcagtgtcaagaggacatgctgaagggcactgaccaggattgcctgagtagtgccatggcaaaaagggagcagatggttgactagatgggtggtgcaatcctcggcgtgggatgcagcttgtggtaccaaacagaagttcagttctttgctggcacaccagcgttgtcgttaaatatgcccacacgtaagttcatctctaatactgcttggttgactttttttggaacaatctttcatcctcctttccacttaactatcatattagaattaagaaacataggggcatacagaaaacaggactgccagcatcagaaagacaaatcacaaatttgcagaagggtttagattggaacttggtaaatcataaatataataatactgatacatataaaacaatcgaccaaaacaattatggagaaaatgaaatgtcacttctttagttataatttacccattaagtaccaaaattctctgctattagtatttttcaaattaaataatactaagcatttgagtattgaaattggtcataaatcatatacatggacatgcagcaagcaagttttggatctgggtcatgcttggatcgttctctgtcgtggtttcaatttcatggttgcttgttcatatttggatcaaaacagagagaaaaagaggtaacattaatcttacatcatgtaacccttgcatctggtttgattctcatggtaaaaaatgagtgccaagaaaaaccctcgatattgttttcagaacgagcaagatacgaactacaattgctgtcaatggcaatataaaatgtaataaatatgtggaggattgaagaaggcaattctggattttcactgtacg

SEQ ID NO: 4484 - DNA, 511 bp, Zea mays
  Intron number 1 from transcript GRMZM2G383059_T01 (locus G RMZM2G383059) derived from phytozome v7.0 (chr-ID 8; pos 1 54740520 to 154741030 reverse strand)
gattcaagattcaggttcttttttttttgaaatgtaatttagtactggtcctctaggacctgaaactctgtcttaatttaatgatgtgcagccctcctgcattttcgagaaaaaaacagtattcaggttctagcagtgttggaaacttggaatggaaatcattattttttttccgaaagcgcaggagaactgcgcatcatttaattagagaagaaaaaaggtccaaaatggaccaaggtacaaagccctaggcaggcttaaatgagttggaaacttggaatggaaatcattatagcagcagcattagcagtcaaacactcaaacatatccactaccctagtggagttcaaaattagtttgttgcctaactgagatttgaacttagaactgtcatgaattggaaaaaaaacttcttacctttgttgaaggggtgttcccttgtcattgttgtttaaggagccatgattagagattcataggtaatgattgtgacttgtgtcttctctaggga

SEQ ID NO: 4485 - DNA, 587 bp, Zea mays
  Intron number 1 from transcript GRMZM2G062416_T02 (locus G RMZM2G062416) derived from phytozome v7.0 (chr-ID 2; pos 1 74980913 to 174981499)
gtgcatcagtgacaacattgctttctgcatttgtggtcagtaaatacgtactattcttctaaaattatctctgtttactattgctaaccaatgaccatataaccaatatgtggtgcataatatttttgttcgatgttgtttttattgccttctttgtgcaaatattggagatggtcagatacctacttatctgcattatgaacacttaccaattgtacaaatttcaatatctgcatgtctgtgctaacagtttattttgtatcaccgatgtgctggaaaacggtgcgggattgtttggttggtgtcccatcctgctgcactgtaattgggcatactttctatgaaattagggattagtcagaaaaatgtatgtttgagggaacaaaaaactccaaaccttttgatcctctgatcaaatgaatgaacctgtgacgatttcattgtagtgcttttttaacactttgacttgtgagtgagattgtgcattgccatttaaacgtcttattttgtatgtttgctaatacttttaaatagttgggtctagcatgattaatttaatctttctgtattggcaggttgctaatttc

SEQ ID NO: 4486 - DNA, 663 bp, Zea mays
  Intron number 1 from transcript GRMZM5G815343_T01 (locus G RMZM5G815343) derived from phytozome v7.0 (chr-ID 3; pos 1 8018999 to 18019661)
tgctggagtcaccagtcttcgtttctaattccgtatgtgctcttctctaggttatgatagggtatggacgcgttatcagaatcagtattgctttcgtctatggatgctaaactgggagttcaagaatgcttgctttaataaacttttgacctctctaggggagttcgtgaaagctctacttcagttccatgatgatcagttctgccttgttttgtagcatccagtctcttctttccaaacaggcttctgtttgttttctcaaaagcagaaaaatagtattgtaccattcaaatatttcaaagttttcttgaaagcaggaatatgatgatcaatctcttttcattccatagttatatggcaatgtatgccccacacttcaggtccaaacttcccccttatgtactacttggaactccaatataacagctgttaatgttgtcaaagctggataggaatttcatgtgtttgctctgttcatattcatatctgtattttgaatcatcatgttatttcatatgtaaattaactaaggaggtatcacctaggacaattattttaataaactctgatactgaagctatttcgtacctgacagcaatgtttttttggtttccttgcaattcttcaggaccagggctcgccaaccacggggacactattcat

SEQ ID NO: 4487 - DNA, 1008 bp, Zea mays
  Intron number 1 from transcript GRMZM2G041159_T02 (locus G RMZM2G041159) derived from phytozome v7.0 (chr-ID 4; pos 2 36173819 to 236174826 reverse strand)
aaggtctcactcatccgaattgggacgcgtgggaggtgatcaaattccaccctttctgcggtttctttggttgggatggcgatgaatgtgtggttttgttgctcaaaatcgtgtctttaggttttgttagcagttgcatttggggacggcggctatgcgttgcgagcgcctgagagatcctgtgtttagctctaccgccgggaatgtgagttttgagatgtggctctgaacctattgcgtctctattactaggtgttgaatattgtggataatttggtgaaatttaaaggaaaggagtgtcgagaatctttagcagaaagggtgcacttctttgttaagtaggatgcaattccggatcagtagtaactgggcgttgaccttgataaagcttaataatggctcttaatagtcggcaaaattgtacattttagatgttatacatactattttgtgtcaacaccatagatgctgtattgttcttgtgctattctcatggtagctagtggtttcatgtcagtgtttacaaggatgttgtctttacaagtcttttctttgacttagggcggtgtttggttccttgagtcaccctcctaaactaaactaaactttagtccctaaaatttctatttggaacatctcctttagtcacattgtttggcagtttaggactaaaagtgacaaatttagtcactaaattttaggaggtgggatccaaacacccccttagtcctagcaaatttactatttttcttcgatcttacagaaattctatgcttttcagacatttttcttttgttgggagaaatttattcaagaaccagtttaaaaaggaatagaaaaaagttactcaagggaactcactgtttactgccaaagcaaaattttccttccacttttcacttgaaagtgtagtttgcttttttcatgtggaatgcacaaatttgtaactcttgtcattggttatttaggacagtcctcttgctcttgcacaagcccacgaaactcgag

SEQ ID NO: 4488 - DNA, 635 bp, Zea mays
  Intron number 5 from transcript GRMZM5G834205_T03 (locus G RMZM5G834205) derived from phytozome v7.0 (chr-ID 6; pos 2 384523 to 2385157)
caaggtactttcttggcattgaaatgctaatcttgaactgtgtggtacatttcaatcatctcgagttttttttttttttgaaattttggtgcctctattccttttggtttgtatgtcctgttattgttgcaaggttaactagcctattaacatcctaacatgtcaaaaagtttgtactgctcattcttttcttttttttggtcaatagatttttggcgaacatgccttgatgctacattgctaatttgctatgagtcactatgatgatatattgcatgcggcaatgccatgtggttgaataaccattagcacgcagtttgttttagcttttgatttacttttgcaattgcagtgtcacttggtaatgttatgtgttgttttctttttttctattccatgatatttatacatcatcatacatctcttctgggtggaacctatgacatgatgacctcaggatgccatagttagcatctgtgatgcactgatacctttcattattgatttaatacttagaataatataactggatctggatgcggcaaattttgcctcgtctttatggactgtaattcatatgttctaacagcgtattttgatgttttttcagtatagtccagaaagcctctagtgtc

SEQ ID NO: 4489 - DNA, 1003 bp, Zea mays
  Intron number 2 from transcript GRMZM2G083539_T02 (locus G RMZM2G083539) derived from phytozome v7.0 (chr-ID 6; pos 1 41658425 to 141659427 reverse strand)
tgctcgtgaagcctgcccgagcctcctcgtgccaggtgacagaatttgtgcaaatattttatttagatcaacatttctgcttgattttgtgtgtttgcatgatacattgatgttttgatgcgcttcgattcacatgtcatattgggtgcaatgtaagtcgtactacttgttatacatatgctgcctgctggccatataccgttgttcatgcagaatttcacaatgaaattaatgaagcatatctgtcacattgggtggtcatttgttgggttcagttagtacgcacttttcgtccatgtgcgataattctacagatcttagatgcttggtattagaattgcagttgtgggacattctagcattgcattgtccagataaatgtttaactttgctaccatgttactggattttcaatgaaacaaattagaaactggagtttgattgatggatagaatctagaaattttagtgacccaccgcataaatgtttgtttcaataggcactgatttttttttttgcttcgctacacctcttttgcaatagtagctaaacttaaacatagttgccaggaatcaagtactcttgtaccaaaagtttaagtgaactaaatctggctgatactaattgaaaagactagattgcataataaactatttcagaacgtggatatctttttagcctaaaatatgttttgatctacttgatccatccatgcaacaattggacacctatctcatctcttactaagtttggatcacaaaatgataccaaaaatagcaatttagtacatatatacttatatagaaaataagtttaaagggaaccaaccaaaacctagcctgccatctactgcatataaagtaatatggaattaattggttgagtataagaggtatggattcttttatactatatatgcatggctgaatgactcacacatgggtgctcttcatctttgactttatcagatctggccaaacttgaatcagttgtttactgattt

SEQ ID NO: 4490 - DNA, 809 bp, Zea mays
  Intron number 1 from transcript GRMZM2G074085_T02 (locus G RMZM2G074085) derived from phytozome v7.0 (chr-ID 9; pos 4 4334366 to 44335174)
tacaccatcaacctacacaagcgcctccacgggtatagtcgcagtcgcagacacctccgcacccttgccactcccgtctttccccgaacctgatctagcgacgcttgctgcgaacgaattttccttgcaagaatgaatcgatttcgtttagttatacaggcgtgtgcgaactttgatctgtgcatattgggccagcacgttgcaattgttcagttctctggttgtttttgcaacaactccgacctccgggtatagtccagtgcatgtctttgaccttgtggctgtgcactctacatacccggcacagtgaaatctgctcatcgtacacgtgttgctccttgaaatgctactatgtgttacatttgggcaggaaattgctctaattcagcgctcccagtggatggcctgttcgatgtgtttgccacgttttgtcttggtgcctctagtagacatagttttattttctgttgtaattgtaagatactgccgtttgtgcctcattgaagatgcgttgctaccacttactttcatcctgaactcatgatacatgttgcatagacaaatagcagcaattttgtctatagcaggtagcagcaatttgtgtttttttgtcttgtgttctgtcaaggtgctctatccatgagatttatcagttcctgtactggacatcaaaattagtccagccaactgcaaggaagtagatattttaaagatcaaagtagtctcaagcctgttttcacctgatcagatcttgcactactccgtttgtggcaggatcctctgctgtaacgtccgtgaacgttgtggcc

SEQ ID NO: 4491 - DNA, 646 bp, Zea mays
  Intron number 2 from transcript GRMZM2G328859_T01 (locus G RMZM2G328859) derived from phytozome v7.0 (chr-ID 6; pos 1 32398281 to 132398926 reverse strand)
tttaattgttctaatttcagtgtactgagttcgaggtaatatataccaaacactagtattttgaatacatgtttggttcttgttagggtatatcagttagggtcttgttcagctaggttgtagttcttacattttgcatcaaagcatcgtaattttagctctaattttaacggatagagcatagagctgggcttgaatagaaaagcacatctgacccagttaatgttttaggccaatgagctccatacagattagattagtcttctttattattagataataataggtttgcatcactagacaataatatgtgattggacggagggtatttttgtttgactactattaagacaatttttgtggtagttgtgatgccaaacaaaataaacacagcttgccattgaagccaggcatgatgacaattagcaaggaagcacctggtttagtattattaattatagatgaccggtccatattttgaaactgttcttggacaacttcataagccttagtctgttcgaatcctgtttgtctaggttcagttcaatggtgtacatgccaatttaattgttctgttagaatctcgtttgactttgtaaacatgattttagtgtactgagttcaaggtaatatataccaaacaccg

SEQ ID NO: 4492 - DNA, 435 bp, Zea mays
  Intron number 3 from transcript GRMZM2G176081_T01 (locus G RMZM2G176081) derived from phytozome v7.0 (chr-ID 9; pos 3 010995 to 3011429)
tacgaaaaacctagaaaggtatatatatatactacgtacaaagaaacaccacggatcggaaaagctatatatatatttgcccggcccaacgcaagaattaattcctttggtgggcatataattaattgtttgcatagctctttcttgcattgtttaatttcacatgatttctctcatgagcttaaataaaggtgtccatgtattagacaggtgaataaagcaataatgtgctcatgctaaaaaaaaaaccactcttgaacataagtttttttttaaacaaaagggttctatttgtagttttgttccatctccttctgcagctcatttgagttcattacttacacacgtactgtgagtcatatccacttgttcaacttcaacatattattggtaaaactcatctcttctctcacaaaattatcgtcatgctttcag

SEQ ID NO: 4493 - DNA, 732 bp, Zea mays
  Intron number 1 from transcript GRMZM2G098187_T01 (locus G RMZM2G098187) derived from phytozome v7.0 (chr-ID 2; pos 1 0656101 to 10656832 reverse strand)
attcggaggccatctcctaccggctctgggtaggtgcatatactcacccacacgaatgcatacatgggccgtacgaacatggtcgggtagaagtagaacacacaagcataagcatatgcatatgatggtgcaatatgcttgcgggcttgtggctagggagacaagcgcaaactcctgcacattaagatttcaaatttgctggaaaaaggttggagaagagaaaattctctgtgtttactgaaagttcgtgatgttgttcgttcgtttcatttactgttgttattaatactatactctcaaaataaatggtttaggagtggtggtggtggtgattacttatatacctccaggctggtcaatgatgtcgtcgcttaaaataagctggtataaatatccatgcgcatgatcaaagaacaagcacgttacttattgcaatttgcaagcgatgcagagattcttctccgttgaacagtgtttatgtattttcgacgcgctctagtttattattattgcaagttgatcgatgcaagctgagccgtgcgaccttgagcttagtcctagtgaacagtgacgatcgatctagcccgtgcggccactgtgcttatttatagaccggcaagcattgtaattataaggagccaggaaattaaagcagctgacaggcgatctgcatgcatgcgtgtgtgcggtgccgcaggtgaacgggtgcctgtcgtggggcgacaagatcgc

SEQ ID NO: 4494 - DNA, 1003 bp, Zea mays
  Intron number 4 from transcript GRMZM2G085885_T03 (locus G RMZM2G085885) derived from phytozome v7.0 (chr-ID 1; pos 2 749213 to 2750215)
tggccagaacatcgtctttgggactgtattggaaggtgagttactttctttttcagaacattgttttcacaacacattatatttcgaatcatcggtatttcaagaactttactgttcttcccttcaatattttccaaacacactacaggttcaggaaattcattgaatgactaacaaatgagtggaagtgttgataaaacagcaaaatttagggtcacacccaaagtccgtttaactttgtggtccaacagaagaaacataaacaacatgaaagctagttcatttttcagaactggaattatattcgatgtcctttgtcatttctttaatatcataagcttgctagctctgacacattgtgttcaagaaagctatatgactacatcagagtatggaaggtgcaaatttaatttgcatctttacatgaacacagctgagtaggtgtgcccttgtgccatgcaaacttcaagcatgtgtgaaacagaaaacttaagaattcttatattattacagttaccaaatttcattcgtagttacttttgtgggccgaacagaagaaaacataaacattgaagctgagttcatttttatcaaacgatattttgttgaagctatatggctagatcagtgtatagaaggtgcagtttgatttgcacttttgcatgccttgtgccagttcttgaaatatttcagcacaggggtttcctctttcatgaagaaaccatcgttcttggtgattggcaatttatgtggacacaaacatattttatgcatgaataacaaacaaacaatatggatatggatatgcattcactgatctcgtctgtcaagtgcaaatggcacaaggtagaacaaacagaaagtcaggtgctatcttttctcatgctgataggttacacaagatattatactagaatcacaatacttttgtgtagctcttgaaatgtctttggctcattggcttttgtgttgtgatgcccgcgccatttgttgtcctgcagga

SEQ ID NO: 4495 - DNA, 474 bp, Zea mays
  Intron number 1 from transcript GRMZM2G052142_T02 (locus G RMZM2G052142) derived from phytozome v7.0 (chr-ID 2; pos 3 3776658 to 33777131 reverse strand)
tcaattgcttctaatcaggtctgtgacaagttgtttatttttctttcatcttgtgtgaatgtttatgcttctatttttgttcctaattttgtgttatgcatagtctgagtttttagactaatatggatcattgcttttcttcattacaaaataattgttaaatttttatgtgtcatttaccttcatttttcttttaacttgtcattttggacataggtcatacttccatgatgcagtctgcattatatgtttagatcactgttttttaattatatgcacattttgttagaatatgttagcaaactttttaatgtgaatgtgcatgctgtttgatagcatttactagttcaccttctaccagccgtctagccactgttttgggattttctggaataacttgtcactgtttgatttctttcttgtctctccctacttgcttataaattcacctgcagacatcatcattcaaacgtt

SEQ ID NO: 4496 - DNA, 896 bp, Zea mays
  Intron number 4 from transcript GRMZM2G118957_T02 (locus G RMZM2G118957) derived from phytozome v7.0 (chr-ID 4; pos 1 25352164 to 125353059)
aggtaaccaattgtttccttcaactactactccaaacgtagcaaaatgtattgttttggcgaaagggcctctagcgtaatggttaaaaatgtattgttaaggctttcgagtagcacctccaggtcccgggttcgatccccctcgggggcgaatatcgggcttggttaaaaaaatcccctcgttgtgccccgcccgctctcgggttatgtcctgtgcgccatcctccgattgggccgttgcagagtggacagtgacggcccgctaatgatgaaggccagggttcggggattttctcggccgagaccatgtttcagtctcttcttaatataataccgggatgtcggtctttccctccctggccgagtttaaaatgtattgttttgttatttcttgtataaatatttttccttttgttttctttggaaggttttcgttaggataaataagtgtcttgtttttttgtattttaaacaattttttgcgtgcacctagtcttaatgcatggtattattatatttctggctattatttaaatgtttaaacatagtaatttgtcaagatgtactaggacctgtagtaagcaaaaaaaggggagggggggggtcatatctgaggatccttccatgagcaaaagagggtgataagcttgcatcataactcgagctagtttttagctgaaaatattttgtatcataaatctaataataatttcatgaatttgaattcttgcaaatcaaaatctcaccaattttcttctctgtgctatgttgcactttgcaaaaatgtttattcttccttgctaatttcactgtaaactttgtagctgtaaatagattatgagttttattctctgtttatcagtcgtacaagcctggttacactgccccaacccaggt

SEQ ID NO: 4497 - DNA, 566 bp, Zea mays
  Intron number 2 from transcript GRMZM2G047486_T05 (locus G RMZM2G047486) derived from phytozome v7.0 (chr-ID 2; pos 1 36179234 to 136179799)
ttctacaagcccggtatgcgtgtttctttgcttttacattgctcaatttggtaggtcaactgctgctgtttgccgttgccattgatagttctgaggatgcaaggtagttatttgctgagttagaatgaccttttcagtttgttattaaaacaaagacacttgatataacgccgtggtcaaggctgatggatttggcattagtgctttctgatcgtttgtttttcacagaacgagaatgctatccatcatattgatgacgatattattatttgatttgacgagaatggtaggagagaagatacaaaaccatgttgaaggttccactctcgttttagaatgtgattgagttactgcaactgttaatagaaacttacaagaagccatttgtggtgttgagacagtgatttatgagcgtctattttgatgtgtttgttgcaatggtacttgcattctaaattgtactcggtttgactcttgtgttgctagatgttctcagtgtcccttgtgctaagattattgatgatgcaaactgctcatttccatttcaccaggtgataaattctctg

SEQ ID NO: 4498 - DNA, 930 bp, Zea mays
  Intron number 5 from transcript GRMZM2G310155_T02 (locus G RMZM2G310155) derived from phytozome v7.0 (chr-ID 9; pos 1 51562623 to 151563552)
actcgtattctaagttggaacagtttgaggtatgctgtgtgacgtttcttttgctagttccttcaccgttggttgtgttcgtgtttcttttttgtgttcatttgatcctttggcttaactttaagttttctaccgccctctttgctttcatttttttcttgtccactctacttaattgttctgttcttagttcttacaaccataatatacctttgccttttccaaattagtcctgtgtattttacccatcctgggaacttgatactgcttgttggtactgttgatagaacatgcaagtttttgctttctcgacttggatgcacctgacagaaatttttgagcaacgtgagatgcaatatgtctctacacgagtggaccttggaaaaaaatgaccagacgcacactaaacatgattattaagttagccttatatttggtggtgtgtgaggactgaggacttcatttgtgtgggggcactcatggtgaaaaattgtcatgtacctcactcaacataacttgggtctgcccctgtatcactatgacactatgtttacttcctttatttctttctgtttttacttgggaccaaagtgggctcctaccattatgagttaatgcccttaatgaaaggtaccttttggaatgggatgtagacttgtagagacttcctggactagtgatctaatgattgtcttgcaccattgctgagagaaaaggaattccattgaacttcaagattcagacctattccagatccaaaacagtattaacttatcaaactccagcttaaactgctcgatggtatatgttacttatatctaggcttaagtggatatagatgttgggcggggatcacagaacggggatcatactttatcatactaaccttacgcaggccctcaggcgaaggagcccataggagaaggggtc

SEQ ID NO: 4499 - DNA, 898 bp, Zea mays
  Intron number 3 from transcript GRMZM2G144716_T05 (locus G RMZM2G144716) derived from phytozome v7.0 (chr-ID 8; pos 1 55970843 to 155971740)
gaggtattgtatcacttttgagttgtgcttttatagaagttattaatttctgcagtttctctaaatacggatctcatactatagtataatttgtccttgtgctttgtgactgactggttgggagatacttatggatgattgccttgtgttgaaaatgctcctttggttttgttctcagaatatgtttataagatgctcctttgagtttctgatggttcacagtggaaaaatgtattgcaattcaatcttgtcctggtagttcccagtgtattacttctagaatcatcctatccccgagtcttcctaatgcagactccttttaaaggaaacatattacaaacactgaaactagtatagtacatggagctatagcagaacatactctattgattcactcctttctttgccatcagcatgaaactagtatagtacatggagctatagcagaacatactctattgattcactcctttctaaatgggagtcgaccaccccttgtgtttatcaccacagaatacttaatactgcataaactggtgcactactgtattatacgctgttagtttcagaacgaatggatcagatagctgatgaagagatggtatattttacacgggcgaaccttttctgcaggaacaggaaactcattaacactttagttttctgtgcatttatagtttcatactgttgtgcattagaatgatatgggtggacttgtgaattcaatagactatatgtccctacaacagataataccttacatgtagtaatttcttatatttttaaggacatgttcagctttgctgcaaatacctagcttcctgtttacatctatgatagaatatagtttgacaaagttgttatccaggtttgtcttctgcatccttagaaataactg

SEQ ID NO: 4500 - DNA, 797 bp, Zea mays
  Intron number 2 from transcript GRMZM2G157061_T01 (locus G RMZM2G157061) derived from phytozome v7.0 (chr-ID 2; pos 3 2258305 to 32259101)
gatacacaagagatcaacttctcgagctgcgtgaggtatttaatatctgatgcttcatacaaagccaatttgtgggtttgaagattgctacagatgtcttcctagatgggtcacttatatggttttaaagaatagcacatataatgtagcttgtcatatctgaagattgcagaaattctcttggaatattattgtatatcgggcctgtggcaaaaagagcacacacacattgagaaaatgtaccccctcttgcaactgtatgctactgttaagtgtttgtgcagtaaaatgacatctttggccaataatgtttacagcagtttctagattgctcgcaagaatattgtttatgactattctgtttgttgcactttcagtttcttcttttgttaagtagacactttgacatttgcactttgtgaattttatatcttggagtcagtgctgtatccaaagtgtgtacttttctgaactgaagaatactcaggatggaggtagaggcattcacagtagatgagggtgaagttgcacatgtgtatgttaaatagaaatggcaggaaccttcgtagctgattggagtagccaattttaggtggcttcatttaatttgaggagggtgacaactggaaagaatggatgggtctagatataaggatttggttataactttttttggggacatttcctatggctatggccgttagataacttaatgatttgtgattggggaccatctatacagtttcccaaattcgtatacactgattatgattcttccccctcttggcagattgttg

SEQ ID NO: 4501 - DNA, 591 bp, Zea mays
  Intron number 2 from transcript GRMZM2G036752_T01 (locus G RMZM2G036752) derived from phytozome v7.0 (chr-ID 2; pos 2 09584762 to 209585352)
cgccggcaccgccaccctcaccaccagcgacccgagtaagtggaaccaacgaacgatcatgcatgccgtgtagcattgttaagcttcaaggaatcgggttctgtacagggtaattaattttggctatcggtgtagcactgtagcctcgcctaataactaataataggaagaagaagaaaaaaaacaccaactttctgagcgaataactgtaaaataagatttgcaaagtgcaaagctgtttgcggtatatatgctttattattctcgaccctaaaagtaaaaccctatcatagtgtctactgggcagacattggcatcaaagtgcgtccaattttccccccgatttttccaaaagggaaagtaaactgtaacgcggtcttttgttttgttttatgactccaaactccaaagccagattccaatgtcttctatggtgtgtggtgtctgtgttctgctgcttccatgctcttcagtcttgtgacactgtccatttttaccacccattcagagtcctacctgtagtaccttatatgacctttgtgttccaaactttcaggctcttcgggctgctcttaccccaccaccagtgca

SEQ ID NO: 4502 - DNA, 605 bp, Zea mays
  Intron number 2 from transcript GRMZM2G338406_T02 (locus G RMZM2G338406) derived from phytozome v7.0 (chr-ID 4; pos 1 11256741 to 111257345)
tcgacctcctccagtttggctccaacacctccgaggtaattgtcatcacgaccgggcgcttcgctttcctccactcatgtaggtctcgttgccaaatcctttaatcctgttgatgcattgtaattgcccaccaaactactaataagggaaagaaaaacaatcacttgtcgccactgtcgttcaggaatcaggattcatctcttctcccatgtaatttaaaccggatagttagctctacttgtagcaaaatcagcacaatatttgtgtgctatttaatttacccctgcacgatttagtattgactttcgattttttggggaagttcacgggggatccccacctgaatgttttgatgtcatgtagtcttatttatgttttttctaaatacattttgttttccttattttgccatgcagcttgataaccaccataatcagttggtttaggtataatttacaataatcttgacctctacatgttactctttgttagagatgtagaaatttcagaattgcaaatagattttagtcacttttagtagtttgatgtgtaatcagttggtgttgaatgtacattccataccatatcacccaagggacaggact

SEQ ID NO: 4503 - DNA, 789 bp, Zea mays
  Intron number 1 from transcript GRMZM2G133073_T01 (locus G RMZM2G133073) derived from phytozome v7.0 (chr-ID 1; pos 1 14919327 to 114920115 reverse strand)
caggtaccttctatatatcgtatgagtagttttatttctttttttcctactatatatatatatatatatatatatattcgagagaaagtttattggtaaggaacatatatggtaaacgtcttttgtaaaattatggttctacaatgggttctacgcctcgttattaactttttattttagtaattactaaccataaatttacaaacataaataatataatataaattaaatgaatggtcaaagtatagttttgaggatcatgtcattctaacatgtcctttattaaacggaattaatggaggaagtaatgtgttttcgggaaatcttttgaattctcctaagaacgtgagatgtgatatgcatgcatttctggcatatatcaacaagatcttcagatcgaattgtatttttagcagtgggctacattttttttcctataagacttctatttttctgccacaaaaattaagactgcatattatgacatatttgaactaaataaatctttaaatacacatgactcactggtgcataatcgatttttttgttgacggcagcaattattttcctgatgtgcttcaatatgtacaggtgttaattagtagaaataaaaccgtggtttaccaaccgtcatatgcatacatctttattgttcacttctttttaaaaaatatcatcagaaaaaatcatgtatttacattgacattttttttaaaacgcattttactagtggtcttgttaataaaactgtcagtttaaatacatggtttttacttgcagttttcttaa

SEQ ID NO: 4504 - DNA, 818 bp, Zea mays
  Intron number 3 from transcript GRMZM5G801409_T01 (locus G RMZM5G801409) derived from phytozome v7.0 (chr-ID 1; pos 4 0804770 to 40805587 reverse strand)
cttctgttatccgtgtcattgctcatacccaggtaagaagcttaattgtgctttgttgctcattcatgtttgtaggaacacagtttcttaatgattgataatgcaattactattggtcttttatttggcttcattattcctgtttatgcaatctttgtgtagtcaaatgatcatttacatgtcaatgatcatttttgttttctttatatatatatatatcacaacccttgttattaagtttaaacttccattgcattatctatcaatgatcatgttgatttcttctgtgatgttaaaatccttgactttttattaaatttcaacttctattgtacctcagtgccgggagtgaagtacacctatctttcatataacggggcgtttggatcccttcattttaaaggaattggaattcactcaataaagtaacttatttagtttggaatttggcattccaccactttccaaagttcagatataagcctatctaaaattcatagggtggaggataggaaatgattttatgcatgattagaatttgtttctaatctataacttacatgacacttttcgttctactcctctataataaaaatgtagcacataaatatttaggacatcttgctaataatagtatacaaatatattttgtataaaaatgaattagcttaattgatatatgcataaattactattattagaatggaattcaattccagtgatccaaacggggcgtaattgaaaagtgattatttttctgaggcactaggtattagcaaactcacctcttatgtatttgtatcttttagattaggaag

SEQ ID NO: 4505 - DNA, 385 bp, Zea mays
  Intron number 2 from transcript GRMZM5G801409_T01 (locus G RMZM5G801409) derived from phytozome v7.0 (chr-ID 1; pos 4 0805826 to 40806210 reverse strand)
tcacattgtccgtgaggttgagaagccaggatccagtatgtccacccccttcttttttattaatcaattaagctgaggacatagtccagtttgtttatatctgaaaaatgaattgtaacataagaacgatttgatttctgaccagcagctttagttttttttataaatttgagggcacttaactttagatgataagccacacaactatctcttcacaggcccatagacttactcaaaacaatagatttttctgtttgaatatccacaactgcttgcacccatgaatctcaagtatatggataccatttcactccattatcgtaactgctctgcctacttgatttctacagaactccataagaaggaaacttgtgaggctgttacc

SEQ ID NO: 4506 - DNA, 715 bp, Zea mays
  Intron number 1 from transcript GRMZM2G436981_T02 (locus G RMZM2G436981) derived from phytozome v7.0 (chr-ID 7; pos 1 147076 to 1147790 reverse strand)
gactacaaggtcgcccctccatccctctctcccgtctctggatcttatgcttaccttactgtcgcttattcgtgtattcctccggctagcattcttgtggatgactcaattcaagttcgacaggttgcttagatgccttttcttgaaaaagaagacgaatagctgctcgcgtgttcctgtgcttgcgcttatgtgaactggctgtgtcaatttcaggcatatgcttattgtcgactgaaactacagactgttcatttgtttcgcttctcgtctgttaatgacctgcatgttctcccaactcccttactgtatagtaacttgctagctctgacactctgttctcatgtgtgctgtgagctgtttagcgtatcagcagtgtttctggactactgaaactacagacaaaatgaaccggtaacttaaggccattcactatttccttgcaacaagtgggcatcaatgaactggataacaaactgtattttggaagaagaatataaaggcttcaacacgtaaaaagtaaaaacggaggtgtttgatttaaacatcaaaacgataagcttctgcccatggtattgcggtgattccactgacagtagctcctacgacctttccaatgtttctgatattgtagttctgatttcaccattctatttatacactttctgccattgatatttcggttttcatggttgcgcaggggaagagcgagcaa

SEQ ID NO: 4507 - DNA, 1018 bp, Zea mays
  Intron number 1 from transcript GRMZM2G131529_T01 (locus G RMZM2G131529) derived from phytozome v7.0 (chr-ID 3; pos 4 6574215 to 46575232 reverse strand)
ggtacgcggcggcggaggagcgtcgcgtgcctagcgaagtgggcgcggcttcgaaccgaagccaactcacggccgcttcgggcgttaagtggccggacggcttcctgcggaagcgcgtcgcggagaagcggcgcgagaagctaaccgtttggctccagcttctgcttctggcggccagaagccgcccagaagctgaaccaaacagccgcttagacttttttagacatgagtgttttccagtgttttcattttgggaggaagacaaacatatgatctccatcgattaatgattgtttccagagaaagacatataaattttgtgtttatccgagactatattaaaaattacagattattctacttttatattaatttctctactacttcctccgttattttttattttcttttgtacagtcacaacatataaccattgtaagagcatgcccaaaaatgtctcaaattgttgtttcaaattgaaatatagggctctagccaggaaaaactactccaataatttcttatttcataaaatttagtttaaaaagttataggactcctctcaactgcctcaaatataatacaccgtagtatgtaatctaaggtattttattagtggtctaaattttgtaaaatatacttaattttaaattatatgatatttttataggtcatctctaatagttaatttttaatgcagctatgagtaggcgggactgataaaatatccacttccattttctagagacggtttttttttttgtagagacgggcatttgcttgattgccgatgtgaccatttaacagagcggtccgtagatgtatttgtctcattatctttccttcatcggtcggtgcaatagctagcttgagaactcaattttatcaagagaaattaatttatttttcttttcctagaaaaacaaaaacttctgataaaatagggttcctaaactagcattaatggatcgtttttttttcaggtcacaaatcggcaatcaagaaacgctacttccac

SEQ ID NO: 4508 - DNA, 832 bp, Zea mays
  Intron number 1 from transcript GRMZM2G162409_T02 (locus G RMZM2G162409) derived from phytozome v7.0 (chr-ID 7; pos 3 9504090 to 39504921)
cgatcccgccacgcgctgcccgcagcggaggtgaggtcagccctctcccggcctcggttggttctgctgattcgacctctctctttcgcctctgcgctcggttaggatcatgatccgattctgtttcgcttcggttccttgtggttcgattagtcagttggcgcgccttaatgacctaatgattgcctttaggttcagattggtggatggactcgtacgaagtgcgaaattatcctagatatgtcagctaggctcgtgggcgagtggaattcgggtcgttctcggttaggtggtgctttgcctagcgatttattcgttgatttcttatatatatctaatgttttgaagattgtttgtctatgtagaatttacacggagtgcgtttaatcctgatagtagagacacttacagactagttttaatgccatgaacagagaatcaaaattgtataatagcttatttcacaatgtaaaaagtatggctttgttgccagcttcttcctgctaccgaggaaggaccttaaactgctgtctttctgctgctgagatcgattcagactgtgtgatatgttctcattttaattcgatgggcctgttgcccaaatggccctgcagtccaattaaaatcggctatgtagtctgactcatttgttgagcaaaggctgacttctggtttagcatgtactttttatgacgtagttggattaatgatctgtttcatggcaagtgtatcattcaatttatgttgtcaaaggttccttgttgtcacaaacgtgaatgccttttctctaattgcagacacaataatcttaggtgaggagcatagttcaaaa

SEQ ID NO: 4509 - DNA, 641 bp, Zea mays
  Intron number 1 from transcript GRMZM2G126190_T03 (locus G RMZM2G126190) derived from phytozome v7.0 (chr-ID 4; pos 2 14239277 to 214239917)
gccggcggcagcggcaggttctcctagatctccgggtaagcggtgaaagaagaggaggtgttggaggaattagttccgaatctttctccattacgattttcgtggcgtcgaggttagtctgaagcacgcagttcaacccattcttgcgcacagtagatcagatccgatttgttactgcggcattccgattgctgagctctggttgccgattagttatcaacataagccgcggccaagcagttcttacggggtcacaagaagaagatgaacagtttgtccatcttgcctcgcaaggataaccgcccgctagtgcgtttgtatttgtttgatttctgaaatattcgatttggagtgtcattaactgccctcgtaacgtgttttgactgcagaaactgtgcctgttctgtagatttagatgaatcacagtgttgagacaagattcatctgaatccttttgttaaattagaaaatagagatgatccaaggtcctgtctcagtggatagtggtgtagtgtgtttttgccctgtttcctttgctgaaaatgcagctaataccaaacttgctgtttcctattgagatagatattctgttacttatcctttgtctcctcgtgtttttgttccagcatcatcagtaacaa

SEQ ID NO: 4510 - DNA, 868 bp, Zea mays
  Intron number 1 from transcript GRMZM2G125494_T01 (locus G RMZM2G125494) derived from phytozome v7.0 (chr-ID 2; pos 1 5580269 to 15581136 reverse strand)
cgtcggtcttttcaccggcgacgacgacccactaggtattcccaccccttctattcccttctgctgtgcgaaaccgagcacccaaccctggcttaaaacttgatgatccctatcaacttagaacttttttgcaaaaaaacgtccgtgttgctttactgggtccgctcctgaacggctggggtggcggcacttttgctctttgctccttagcagctggagcgcaggagcggtcgtatgctgggcgtgatgggtatgctgtttgaactaaactttgggtgatgttctcgttttggagctgaatggaattgtggtgttttctcttttttagttttgtttccaggcacttagtgtgctagttatttgcggtgttagctcagtagaagttcgaatccagttttaggatgaccatagaatctgttgtttttaggatgactacagaatctgttgttatgttgcgatagtttacaccttgattatttcatgaagcagatggagggacatttgatttgaaattttatgtagccagactttgcttccctttgtttatcagcttggcgtcttttgatccatggaagtaattaggtgcaattgccattagaggaaattttatgtgtatgcttctataagtatttattaggatagtgaaaatataagtgataagtaaatatggtccaacctttatttgcaatcattactaacaattttgatactatcctcaatctgtagcataaatttcatttgtatgtacgaaaagaaaaggcatcagaaccatattaatgctttcattatgtgggcctgtgaaacttgcctattaatttgatttcacatgtcaggaaaagaattttcctggcatatttttgtttccaga

SEQ ID NO: 4511 - DNA, 870 bp, Zea mays
  Intron number 1 from transcript GRMZM2G010863_T03 (locus G RMZM2G010863) derived from phytozome v7.0 (chr-ID 9; pos 1 02496458 to 102497327 reverse strand)
gatcgacaacggtggtgcgattcggatgtgagtgtggccggtccagcactctagtttttcttctgtgcatttagtttagagatgggctgaattttggattaaactattaaagttgcttgttaattatagaatcctgttttgtgggcgcttgggtggtcccattaatctgcgaagtttttgtttccattttgcgacaaaattgtgaagggagaacggtgtttatccacacattcttgattcttctcttatgtacgactagaggtccgatatgttttactgtttgtttcttcaaggtatggtcatatgacgagtggtgtggtcacgaatgtagtttggtttagttctatactttgcttatagtgtgtttcaaacttaataccatcataccagtatagtatccagtaatgtaacatatgcgcaatactgtgtttgcatcatctattgtttcttcagttgtttttgtttatgcctatatccccttgtaccctctgtttgttgctagcttcaatatgctgatgctgtctggcaatatagtacgaaaataatttcacaagttcaaaagccaaaaggcaaaactgtgtgattgtgatgcagttatacttgccagtctgcttttcagatttgcttcagcctgctcacgttatagttttctttttcaataagttaggttactcaatccaagtttattaatactttgctgtgcttccactatatcattcctgttcaagtattttatgtttgttcctttcgaatgccagataatgcttatattctaaacttgtccaatttctgtgtttgatgtaaattgtacatatctgttgcagttacatttttttatttaatccctggtttattctttttgggtgcaga

SEQ ID NO: 4512 - DNA, 637 bp, Zea mays
  Intron number 1 from transcript GRMZM2G135782_T03 (locus G RMZM2G135782) derived from phytozome v7.0 (chr-ID 7; pos 1 43631585 to 143632221 reverse strand)
tcatttgacgccgcgcagcttctcaccacaaccaagtaggtttctttcttttcactttgcagctagtaccattattttttattgtcagccccgaactttcaattctgctccacttgacttaatcctgttgctacttggcttaaagttcaccgcttgatttcttctccgtcacctctgtcgcgtgaaacattaatttgattttgtcaaagccagagagaaaaaattagaacatcgttcagttctgtaatgtactcacatgaacataattatcgagttcatacttcagagaaccaaattgtagttcttgcatgctacttggagtctgagtaaccaatttggttgtctggaactggaagtggaacctaggccgcagttcgaatttgtgtcacttcatgattcatttttatttttggtagcctttgtttggcccagggcctttcactgatgcttttatagcctttgtttggcccagttcgaatatgtgcttttttttaggtttgcttggacccatctcatgtttgtttgaggaatagatccattcccgaatctagtctttcattctcagcttgatatttgcatacgggatcatgatcactgacttgttttcctggatttcacggtgttactaggtgtgagc

SEQ ID NO: 4513 - DNA, 1015 bp, Zea mays
  Intron number 1 from transcript GRMZM2G056572_T01 (locus G RMZM2G056572) derived from phytozome v7.0 (chr-ID 2; pos 3 969584 to 3970598)
gatcctccgtcagcggcggcggcctcaggtggtgaatcttatatcgaaactgctcccgacgtccgccccccacggattttgtttttgtttggtttgtgattgcccctgctcgaattgcgatgtgggcgcttcgatacatctgtgaagtcctttttgtggtcctgtacccgtccgtgtcagctttggccgagattagtttcagaaatgtgatggttcgcgtccttgactgtggccctgagtcctgatgcgtagttagtttgagatatgttgcttcatgcatcacatggattaagctttgttgtgagcagccaggtgtttatgtgttctagctcggaactgaactgatccctaagctttgttttgcctaaaaggggagttctggctgtagtattgtctatcgatttggtaggacatcagaaatgcacttttatgaggaaccaacgcttatggtttacaaggccagactataaatcaatgctacagactggtattttaaccgtaaagaaaccaggttaagttcgtcttagcaggaatgtagtattgtaagcaaaagttgtcatttcaaatgtggatttttatgatagcataagataagagaatatttaagtattcatattttgcatcagttcggagcagccaagttgatgcataatatagttaacatgctctgctggctggctgtgggaaaatgtcgttcttctatcacttctatgaatttggcccttgtgtcacctaacctatgaacacgtgccagcttgcaatgagagcttgcagtaatattaacaagacactagctcatttctgctgtagctctacatggcaagaatttatccatttataacttttcaaaatacccaaactgtagtgattggagtggcagcacaagttgtactctgggatctccagtgtattgttacagtagcttggctccaaatatcaaatcagtggactatcatgttgttcttgtattacctatttgttcagtgtttcacatttattttttctgccagccaga

SEQ ID NO: 4514 - DNA, 644 bp, Zea mays
  Intron number 4 from transcript GRMZM2G023748_T02 (locus G RMZM2G023748) derived from phytozome v7.0 (chr-ID 3; pos 1 76678969 to 176679612 reverse strand)
tcctcgtcttcttggtcctggtcttaacaaggcaggcaaggacctcttccttttctgtactttgggtcaatatagtctgttgttatgttactgttttttattgagcttaacctctacatttatctgtgtagatgtttcttgaatcttgatccctattttccctagatttcttaaatacctttttttcatttttgttaatcaaactgtatattagtatatattctgagtatggtgcagacaattactgttcttgtggagcgtaatctaattttcttccagagggtagctgccaattaatagggtatgctagtttggaataggccacagtggccttggtacaaagcacgatgataatatagttccatgtttgtacatagtttgtagacgtactccctccgtttctttttatttgtcgctggatagtgtaaaattgcactatccagcgacaaataaaaagaaacggagggagtagtcttttattttgttctatttttgaagcctctgatctgggaacactacacactcacgtgtacaggtagacctacaactgcacatagataaggtgcattaaggatctgcactcatcttttgaatcgtgttttactgcaggaaaattccctaccttggtgacacaccaggaatcc

SEQ ID NO: 4515 - DNA, 684 bp, Zea mays
  Intron number 3 from transcript GRMZM2G378717_T01 (locus G RMZM2G378717) derived from phytozome v7.0 (chr-ID 3; pos 1 6308821 to 16309504)
gtaaaagagaagtttccagaagaaattagattgaggtaaaacatttacaatctgtcttttcaaaatttgtgcactggattttttttgtaagcagctttaagcatggagaattcctctaattagccagcttgtgaccatgcattgcatattggctaaaacatattgctaaccatgtattgcagcatagacaatttcaatcacttattctagcatacctggtacttgttaactattgggtgcatggcatttgttttagcataatattatacattattgcactctgaaagtcatgcatacatgaccacaaagctgcacatagccttgggaatggtatgcactgacatcagggaagtttgttatacgtatataggtataactattcagagaagtttggctaactaaaaacctaaaatgaacaattggattccattgtactatatttcttttgattggctgtaatttgcttcttgttctgtgctagatattaatacgtgtagaagttagagcattccatttgcctaaagttgatctacttgtcgttgttcttttcttcttacaggacttatgcaaattttattcaaacaatgtgtttatgatcttccagtttaaataatgagtgcttttctgtaactttctaccgttgaatactgtaggtttagagtgttggacttgcgtcgtccacaa

SEQ ID NO: 4516 - DNA, 741 bp, Zea mays
  Intron number 1 from transcript GRMZM2G042380_T01 (locus G RMZM2G042380) derived from phytozome v7.0 (chr-ID 4; pos 1 70966926 to 170967666)
ggatcggccagccccgtcgccgcaagataagcaaggtctgttgctgctgtaaaggcctcctcccttttcctccacgcttcccttccctgctccagttctcctcgtgcttcctcgtgccctctccgttctcaccggttttcgtggagatcaagcgcaggctccaggcttggggctagttaaggttgattcggtgggatttaaggctgctcgtagttcctggtttgactcttagggttgtttcatgacggatgctattgcgctcccctcgtgcctgctgtcttgcgctgctctcccctcttcacggttgcacaactcctgcgcatagattctgctacttcagtccaaatcaaaggcgtgtttttgggctcggcgctgtctgaatttgaggtttgtttgggctttgtactgattattagaggctccttttttcttatcaaatatgttatagctgaacagccatgggtcgctggctacagagccagttaggttctcacttcagctttcgttcaattgcgaatcactaatcatgttaatttgtctccacttgctgcatctaaaaatttccatgcatgtttatcatctggggggggggggggggggggaatctgcacttggttgcctgttcttgtcccacaacacctgttaccaaaacattattttgcatgaccccaattatgtaatctgcatttgcgttttatgcctggttttgtttccctaattggtccccactgcattgcagct

SEQ ID NO: 4517 - DNA, 716 bp, Zea mays
  Intron number 1 from transcript GRMZM2G037807_T01 (locus G RMZM2G037807) derived from phytozome v7.0 (chr-ID 2; pos 1 98497086 to 198497801)
gctggctgctcgaagagcagaaattttggctactgcgtgactaatccaaaggcgtataaagacacatcttatgcgaaaggaattcatcaaattaagaaaagcctcagttcaatctcagaagttctggagaggtatttcttcacaagtttgagcaccttgtgccctaaatttcagttgtcagcaaaactggccttaactgaaactgacatacaatttaaccaaatcctgcagcacgactagctaaaaagatttttgagtatatgaggagagacgttgcttcaattaggatacaaaagcacgtgcgtgcgcattctgccagaaaagcgtacctgcaagtatatgaatcagctacagcaatacaaacaggattgcgagcaatggcagctcgcaacgaacatagattccgaagagagaccagggcatccataattatccaattatccaggtttgcactattatgcctatcattatttgcaaatggtttttctaggaaaaacataatgaacagttccttgaatcacagactcggtggcgccaacacagagcttatgctgcttacaaacagcaacagaaagcttctttgattctccaatgcttgtggagggcacgcattgcaagaaaggaacttcggaaactgagaatggtatgtagtacaattatgcatcttcaacacaagcacaccattcattgttaatgctcataaagtaagcataacc

SEQ ID NO: 4518 - DNA, 1048 bp, Zea mays
  Intron number 2 from transcript GRMZM2G327406_T06 (locus G RMZM2G327406) derived from phytozome v7.0 (chr-ID 2; pos 2 06492476 to 206493523)
ctgtgttgtctggatcacaggccttagtggctcaggtaagcaaaccttgttttctctcgaactggtttgttgtgtgcttcttgcattgttgatgcaattgttaaaaaattttaagctaaaactaagataacgtcaactgcagttggtaagataatgtcaactgcagttggtgtctctttctgcttcgtatatatattatatcttctttgtttgcctcttgttggataatttcatctgtcatttatatgtacatggacagatttctatactgcactgttttgcttgaattattgaattctattaaagtcattttggcccaatgaaggattactgttttattcattttagagtacagaaaattgatgctttcacagttttgttactgaacggctttctagttttcctttgtctctgcatccattcaattccatcttcttcacgaatttggcaaaaaaaaaattatatattttttttcagaaaataagttcaactctgttctagatttatcaataagcaacctattcgttttggctttgataaattacataccttgccttaaatatatagtttgctgacatgtactgacactcttctgggcggttactatgctggtttctcgaagtttggttttatttagttgagggaagtgccttgggcaccttgatgaatatcttgtaagctggtgactccagcagaactaaactttgttttctataagttgggatcaatggtctttggtctaaaaaaggtaaatacgcaaagtttccaaaagaactctaatattttttttttcaatttgtatggcatatgcctactctgtttactgtcactgcattccctcttcacagttcttcatgacctgcattgcaatttttttagaataaatcaggatctattttctgttcattcaaaggatagttacatttaaatgataaatctccaatatcatttgtccttcaaattgaatcttttagtttttttaaatggtattcttttaatctaatttcttttcaattttttcatcttgctaaggtaaaagtaccttggc

SEQ ID NO: 4519 - DNA, 831 bp, Zea mays
  Intron number 6 from transcript GRMZM5G812498_T01 (locus G RMZM5G812498) derived from phytozome v7.0 (chr-ID 6; pos 1 67413579 to 167414409 reverse strand)
acattgaagaggtaattttcgtcagttttttacaagattttcttgagttttgaacatcatgttcttctttgtttttttttctcgaatgcgcaggtgaactgcgcatcattatattaagaagatagaagggtccaaaatacaccaatacaagataaagaaaccaccttacggtgggcaaaaaagaaaatacaaaaagccacccaacatcatgttctttgtagtgtgctataattttgtaacaggtattttacaaaaaaaaagtggttgaatttctgaatgcatatgttgcgaatgttaatatttgtggatatacaagaagggatagagtctggaacaatgatatatgcggtagcaccagttgaaaaaaaacttgtctaacatcgattgagatgatttggacatgttcaacggaaacctctaaagactagtgtgtagtggaattctaaggcgcaacaataatattaagagaggcaaggctgaagttgacatgtaaagtggccgcaaaaggagacctgaaaggatagaatataccgaaagattttgcctgaaataggaggaatgtaaggcaactatccgcgtgtctgaaccttgatttagactaaaaggctttgttgttgttgttgaattcctgaatctgtcataatatcttcattggtgctgttttacaactaaacatttcaaccatgtgattttatgcaaaatcagaaccttgggattctcccagataactgtaatatataccttcattgctaaagttatgctgctatctgtgtatggcatatttcatttttcatgtttgattactgcaggcacaaggatcccacgaacgag

SEQ ID NO: 4520 - DNA, 693 bp, Zea mays
  Intron number 1 from transcript GRMZM2G311914_T01 (locus G RMZM2G311914) derived from phytozome v7.0 (chr-ID 4; pos 2 33087765 to 233088457)
gggcccgcccttcaccggcgacgtgcatccctccggtacgcccttccggtctcttccctccccgctctgtccgaaaccgagtaacccaaaccctaaaccttaatctccgtgtattgggatctgacgcagtcgtatacgtacgttttgtatacacgcagaaacttcgttttttttttgagaaaaaaactttatcggttgcacatatgtccacagatgtcctgtactggatcatcccgtgctcgtgaatagatgaccttgggcagtttcgctgtatttgttgctctcgctgcactgcatatcggtgtgctcccggtgcagattacagaaagtcagaaactgggaggttgggaaaaggatggggaaattttgatatgaaagagatacatttctggcgcaagttattaacttattatgctatttattggtttaaatgagataccttaaaaacttgtaaaatggcgactccgatccggaacgtcacctagcgctagcagtactggctttgtgacttatatgtagctgatccctttaaactaccatgcctatacatgcttatatatgcatgctacgagatgttcatggattcagggtgcaatctgatctggaagtttttcttcaaagtctcattttgtactgattcttgcttgttatggtgcaggagaagaatattgcgctcacataactgaataactg

SEQ ID NO: 4521 - DNA, 500 bp, Zea mays
  Intron number 1 from transcript AC234166.1_FGT002 (locus A C234166.1_FG002) derived from phytozome v7.0 (chr-ID 7; po s 104394566 to 104395065 reverse strand)
gaatcaaggcaagtgggcatcttaactttttggattgcagtatctatcattactaggataataccatgaatgattttggcgagtcacaaatatatattgagaacctatactcacccccatttgtgtacaacttcaatttgaactcaattattcatatgttgtattatgttttatcacacctaatgtttagttatatgcaacattactcttataaaaacagtatgtgtctatacaattataattatttatatttgacactaattgtgtaagataatgtacacttttttggcatgaccacaaacaacagaattcaaaccaaggagaaaaagtatgggcaggcaacttgaatcgttaagcagaggactggaaatcaagattccaatccaaatcactaaagggaacaaaaggaaagttgtgtgaagaacaaacttaatcgtgaaaaagtacaatatcaacaatgcacaggctctcaatcctacattgcaaaggctattatattg

SEQ ID NO: 4522 - DNA, 919 bp, Zea mays
  Intron number 3 from transcript GRMZM2G304079_T03 (locus G RMZM2G304079) derived from phytozome v7.0 (chr-ID 7; pos 8 8153791 to 88154709)
cgaggagtgcctgcatccgggattatcacacacaggtagcctgcacattttttttgtaaatgcaatgtgcatgattttataccaagcaaataagttactcaatcgctttggcttctctagaaataacatatttattatgtatataggcatataatatatctagttgcataacaaaagctatacatctagtaaagccaaaacgacctatattttaggacaaagggtggtgtgaaccaaacttaacacttgggtttactctctcaatgcaagattcttcattccagacatctttgtcgttgctgtgatatatatggtgttgtctattgtatgactaagtttcagtaatgctttaaaaacttgatggttgccttgcttatttctatgattatatgttgttcaagtatatatataggcattagggctgcaaacaacaccttgatcgttttgataaattattatgcttgtacactgaaaatgctcgatcctgggttactgtcgatagttcagtttcttttgccaccgggtgaccatttatattgtatttaaacaactatcatatttaaacaaggtctacctatatggtatataaaaattgggtctttagttaatcctggatccgccactgtagacaaggacaatgatgatgaggtgagcgggaggttagggtttgagtctttaatcacattttttagggattcagtttaacgagggatttgacctatgctaatttgtttgttttttattgttgcaagtacatctgcttttatttttaatcatagttgtggcatgaggtatttgtatgcataaccataacacttacctcaatgaaattcaaggttcttttctgtctatctaagttaacttgtaaatttttttgagtttagtcaatttgtaggagaggggacgccatacatcaaag

SEQ ID NO: 4523 - DNA, 711 bp, Zea mays
  Intron number 5 from transcript GRMZM2G135218_T01 (locus G RMZM2G135218) derived from phytozome v7.0 (chr-ID 2; pos 2 28028715 to 228029425)
tccaccggaaggtcgccttcctggtgccacccaaggtacaattgtaaaattcctgtgaagcttttgactcgatgttctatgagacatgagaaaaatgttttgtaataatatgttgttgttgtgtttacatctcgtcatttagcatttagcatctcagtggtagcagtacctaagtcttgttctacagatttgcatgcttcttggctgcctcaaccaccagagaaatttgacctatcacattatcctttgaccatttgttatatatatatattgttttttcatgtattacctaacactgtccagatatttgacctgcattttagcctgtaatttgatcactaaacgtacatgacaagacatgtatctgtacaccacaaggcattggtgagttaaaagtttggaactattaaagtgagatttaaattttgtcttcttgtagaatcagttactcaccttctacaatagagtgcagcttccgtactttttttgtgaagttctgaagcttgattatatcaaatttggaagtaacttaatgctatttgcctattttcggttcgttaccttaccgttcattgcaattcctcttagtgtgtccccattggaaattgatttggcagtccactgaaagttggtgtttccccttcctttctttatagttcaaagtccagtcattctttcagaaaagtaggaagaagaaaatccaaggtgaaa

SEQ ID NO: 4524 - DNA, 986 bp, Zea mays
  Intron number 4 from transcript GRMZM2G099466_T02 (locus G RMZM2G099466) derived from phytozome v7.0 (chr-ID 3; pos 9 066686 to 9067671)
gagagcgccctgggctagctgcatcagctgttgcggttcgtcctaaccctgaacatgttacttcccagtatgaactatgaagaaaatagatgtggatgtgtttccatgtacaagtgcaactattcatgttcataaagcatcatgtgtcctggtagtttgatatagcgatatgttttcacttgtgttgatttgtagttttccttgacagcgtgttggcaatttttctaataaattgctctaaatattctgtatcaaatctgggtgattaaaccaaaatttcccttaaaaactatactctatgctgtaggttttctcatatttgccagaaggtcctatatataccacggatgtgtgtagcttttgtttggctatttgaatatcaaatattgttgcttatatggtgcaatagaccttaggctatgtttggatcactaccagacattgccattcctttctttcctcgaacactcaagagagctgcatgccattttactaataggtaaaaaacggtctgattacatgatgattccatggttttggttagtgattcgttacaattgtgcccttggacctatagaaacacagccacgccttttcgccaaacaatgttctaagatgtggccaacaattccttcagcacacgttagtcaaagttctggcaaggaaatgggtctatgacaggtgataaccatacacccagctaagaaattgagcggtgcttaacagctggtgtcacaatgtttgaacttgaatcactggacttgttattgttctttgcattctttatttttgttctgatggacttgcgtttgcttgagatacgtcgcgattgcttgagatacatactcaggcatgtgctcgggggaaaaaaatcttgcttgcttcctgagtagccctaaaaactctggttggattccagtctaacatcctaactttgatcgttccttgcaggcactcatcttcacagtcctggcactcatcgctct

SEQ ID NO: 4525 - DNA, 747 bp, Zea mays
  Intron number 1 from transcript GRMZM2G031545_T01 (locus G RMZM2G031545) derived from phytozome v7.0 (chr-ID 7; pos 1 65385869 to 165386615 reverse strand)
tcttctccggcgaagaacccccagtcgcccaccaggtattggcaccctctttctcttccatgtctactgtgtgaaatcgagttccgaatctctaacctcgagctatttggctatttgatgcgtactaatttctactccgttttctagatccggccctgggtactagtgtttcgagatagcatctaatctgaattttttcgttagctgttagttatccgttctattgtgcagcaataccgatatgcagatttagctcgtagctctttatgttcctccgttgctgtcataacggttataattgcgattatatggcgagctttacaatcttagttattatgatactctgtctggtcgaatctactattaagtagaacatatggttttacaattctatgatctgtgatcctattattgtcctattagggctctgatcccaactcagtatcatgatttcaagaaatttggttgatgggatatgttttttctgtgcccataagttgttactcaagctttgaattaagctatgacatttcagaaacatagatttggtttggattttggttcagggtgcttgttagatgtaatatctgcatagttgtttaaggattatgctcacagtaacagtagcagcattttttctctgttcattgaacgtctgtgtaactgttgtcacgagttgacatttcaagttctaacactgctctcatatgtgccatcagatcacttgttaaactttgttgaggggtg

SEQ ID NO: 4526 - DNA, 957 bp, Zea mays
  Intron number 1 from transcript GRMZM2G114954_T02 (locus G RMZM2G114954) derived from phytozome v7.0 (chr-ID 8; pos 9 8598114 to 98599070 reverse strand)
gccatccgcttcttctcttcggttcagctctcgaggtacgcgtgcgcggatcccaatctttcttcctcatctttatactagtcgactactagacttgatgccaaacgattttcgtgtatttgcacggtcgcgccggaagctaaaacacaagtattctgttttgcaattattgcacgattccgtggtagaatggaaactgtttcaggttgccaatgaaattcgtgttggtggatttggacgctatgatttgtttgattgtctcatatcctcatcggtccgtctctggcatgttgcctctttctgagggctgaggaggtggtatatactccgcgcctcaggtccttgttttctaagatcacggctaaccttttcaattcgatttagttttttttttgtgtgttttggaaggaaacagtacatattaagcaagcaacgcgatcttgcaattagctttcttttcccagataaagaaacttgcgcctttcagggcacgaatctaagatcaaagcgatgtatttattatctcagggagggttaggatgagtaggccattcgtggtgggggtggcttcggcttaatattcggattcaaatccttgtattccagctgctctttaggttctgcggagctgtttatatggattaatgaatttttggagtttaactcacatttaactatcaagtatcaactacatattcctaaagatatagatatggatccaaattgattgttatgttcctacttgaattgacttgttattgtaagcttgccaatcctgcaatgtgtttccttgtttcattatggtcgcttgctaagaggtagggaagccttattgatctttttctgtcccacgatggcacgatatttaagttgcaccatgttttgtacatgctgatccgagtgcatttatttgtctttaaagataaagatgttataggcatttctgcagtttccagg

SEQ ID NO: 4527 - DNA, 864 bp, Zea mays
  Intron number 1 from transcript GRMZM2G071768_T01 (locus G RMZM2G071768) derived from phytozome v7.0 (chr-ID 2; pos 4 3188555 to 43189418)
ctcctcctcttcgtctccgagctccgtacgcgtcttgccttttccttgttctccccccttgctcctcgatctaggtacttgtacccgtttttgagatcggctggttaggtttgaccgcgtgggtggtgctagacggatgctggtatgccgacccccctgtcgcattacgattctggcgttcttcccacgatacgtcgagatctggtggtggagcgggtgggattgatcaagcgtgattgggttggccagagtgggattgagtgcatatttccgtatttcaaccgcgcaagatgttattttactgtactttgcaggattcaattcatttcacgattaactgcgaagctaatgagattctgctgttgctttcgtttacttttggttagtgaataaggcattgacctgtcatgttttattaacttgtagagaataacagctagaaatggtgattttgcatacgtaattactggttccatacgaaatttgagataaaaggctgtttctcttgtgcttgttgttttgttgccgaatgttagaggcattttcatcagagattcagaagcagatttactcactgtgacggaaaacttaagatttaagtttacctagtacccacacgtcttgttgaagtaaacgaggggctcttttgctctcattgtgttaataaaaggtttttggtgtgtagttatttgaaactttaggtttgctttctttcgggtttcttcactggatgaatagttcaccaacaagaaggatagctaaaggaatcattctacctatctactattttatactcagtcttttgctattcatgatcggtccttatttaccagttaatgtctctctatgcaggattatatctcc

SEQ ID NO: 4528 - DNA, 1067 bp, Zea mays
  Intron number 2 from transcript GRMZM5G842965_T01 (locus G RMZM5G842965) derived from phytozome v7.0 (chr-ID 8; pos 3 6140927 to 36141993 reverse strand)
accaagagagcagagcaggcacacagagggaggaggtaataactgccaccatctccgtgcttaatctctccgaatagcctgatcctacgtacgctagctgttccattgtctactacgaaagaacacatactatatgtgcgtatcagtagttatccgcccattcggaggtcagctccttggcttgctgtggatactacctgagagaaggtattcctaccatgggcagacattgcaggtcgtccagatgaaggtctctatgttttttctgttttgtttcaaaattacaaaatatgaatttcctattctcgctcgttcggtccatgctgcattcatggttgtttttccccctggcctgtactatatgtgtagaagaagcgggatagaaaacgatatggagaagaagaaaaccactggccgtgtttccgattcgtttgtcgtagagagaccaaatgccagtttggttctctcctttgttcgtcggaccggggaggaggaaccgaaattcgaacgttcgtcgctccgaatattccgcggcgaaacgtgcctccggtccgggtactttagacgacttggctaggtcaaccccgaggaactcactgagacttttattatatttgggcctcatatgtttcaaatgagccgctgccgaccaagatccttggtccacacgtagaagcccacggggcgaaaggccacacggttttttttttcttgtttgcatcatcaggttattaaagtctgcagtgttgattcagtcctattattattacttgacatgcgacgtcttcacttgagaaatcggcccggaatggtttttccaagaggtttgtgtgattttccagggttaattgctggaaacaacgacttggcctttttttggtttttcctctcgctgtcgacagcgtcgttggcgtagtcgtagtagtatatattagcacggtgggggttaaactattgccctgtggagatgcatgttaagatccgaactctactcaactcagattgtcgatctataattttcttgttttgcaggcacctctacagggcaagtacggaggcatttctcc

SEQ ID NO: 4529 - DNA, 537 bp, Zea mays
  Intron number 1 from transcript GRMZM2G008279_T02 (locus G RMZM2G008279) derived from phytozome v7.0 (chr-ID 4; pos 2 9895763 to 29896299)
caggtgcaggtgcattccgaatctccttccctttctccggattctattgttctttgtttcctcctattcgtttctgtagtgagaaatgtcttcggtaagatttggttggtggaaattcactgcatttacttattattgtctcccaatttcctcttcatagtcaggaactttctggttcagtggaaatgtggaattgtaccaatgtagagtctagaataagtgtgcccttatcctcccagttagcataatgtgggtacttcgtttgtcatgtatggggcatagtgcaatacaaatccttttgttaattaataatgattcagggatgcctcgttgtccatgtaacatccaaactgcccacacacacacatcaaattttggcatgataaccctgttcattaaatctgttttgtttgtaaatcacaaacaaatatgttaaccttttattgaagtgtgagatactcaatcatgttgtgttttttggttttctattttgagtgtataggtaaaatttagaattttaagagcataataccctgg

SEQ ID NO: 4530 - DNA, 785 bp, Zea mays
  Intron number 3 from transcript GRMZM2G498418_T01 (locus G RMZM2G498418) derived from phytozome v7.0 (chr-ID 3; pos 2 21503069 to 221503853)
cctctctcgaacaggttccctcaagatgtatgaggctcttttcatttcgaactggttctttcaccttcaacattttggttttgaattaatgatctctatagaagttgattttgtcataaacactcagataattgacttctacaccaacattcatcttaaggtatattgcgtgaaaattttgaggccatttaccaaatgagattagtgacaattttagggtcttcttatttaatcagtcagtcagttccttagttacagttaatatgaaaaatcccaggtaggtaattcaaacacgcctggacactcacacctattttatcggggtataaaatctgcagtcatatatgacaaggagcagcagtataggtttgtgaaactgtggtttactttgctaaggagtaccaacaataacagatatttgcctcaacttactgttcttgaagttgtagataaacttaacccgctcttgaagttgtaggtaaaggtaaaattgagacctcagacacaagtattgtgaaacacatctaccttagcagttgctgatcggctcgtttagttacttcatgcatgggatatgaataattgttcaacctgctgatggttgaagccttttgaataaagtattggacagctttccattttgaaactgtttaaattcatgtatttgccttttgtcaactttgtttcttttcaatcttcttgatggggggggaggggggggggggcttttatgtttctcatatttgtaactatcttatgtgcagcgccaaccataatcatagcgc

SEQ ID NO: 4531 - DNA, 896 bp, Zea mays
  Intron number 1 from transcript GRMZM2G157836_T05 (locus G RMZM2G157836) derived from phytozome v7.0 (chr-ID 4; pos 1 61397394 to 161398289)
cgcggtccatccatcgatccaattccaatctgcaggtgagcagctcggttagattcccaatcaacagctcgaatcgcctgctctcccatcctattgaatgaaactatgatatagaattggtttgcctagttattatctcgaattaatttgtaaagatctccactttggttcgatttgattgtttcttcaactagtggcatattggtctgcttcttacgtgattcaactagtggcatattggttcgatatgaatatggccatttgcagtttttctagtgtttgctaatgaacgcctctaaaggtggctgttgcacttgcagtaggattacatttgtgtgaaatcgaatggttggcgatctgttgttgactggttaagagtgctgccaaagttttagtttagatacctgctgctcggtgttcgccgtatcccatcgcgtgttagcgtctgccgactgtgttctgaatttgtgttcgttttgaaactgtgttctgaaaccgtgcaaactgtgttttaaaactgtgccgtaaaatagactttcctgtgaatggcggagcttagcagttttgatctagagctgagcggcggcagagcggggggagggagaacggcgaacagatttgataggggcaaaagtgtccggtcactagctgccaatataatcaaataaggttaagtttcaaataaccgcctaaatggcattttgtctgtaagacaacgtttgatagtggtctcttagcgaagcgtgttcccataatggcatttgagcgaatcctaagtttcataatggcataaatccaattttctcacggcagggtgtagtagttggtaattgctgtttcggttggttggttcttttgcagaagaagggatcaaggaacagcgaccagagaaaggc

SEQ ID NO: 4532 - DNA, 754 bp, Zea mays
  Intron number 2 from transcript GRMZM2G054380_T05 (locus G RMZM2G054380) derived from phytozome v7.0 (chr-ID 8; pos 1 60242749 to 160243502 reverse strand)
gcagaagctccgacaactatttctgaattacctgggtaaatgatccgaaacacatgaagttttttttttttttttgcacatgggactgttttaccattcatgatttgaaccctccccccaaaaaaatgtgttctaaaataaagcagctcatattgattatatgtgcatagaataatggaagactatcgtgttgtatcgccttggcctggagtgcgactatgtattctccctcaattccaaaataagttgttttagttttgtcctaagtcaaagttatataactttaatcaaatttatagaaaaatccataatgtaaacattaaaccagttttattaaatctgccatgaatcatgtcttgataatgtaattattttgtattttaaatattaatactattattatataaacttggccaaagttatagagatttaacttaaacaaaactaaaacgacctgtattgtgaaccaggatagttttcagttcaagtatccgtataacatgccagtctactggagataagagagaaaccatagctaaatatacctttaaatatttgcaacactagactgtactctatcaacatcaatggttgtggtagtttcacgctgtgctatgctaacatccatgtatgtattcttttgtcaccttagccttagtgatactgagattatgtttccttgaatgaaactaatcgtatgtcatgttttaatttgatagactggtttgtgacgatatctctggagggcaagaaa

SEQ ID NO: 4533 - DNA, 976 bp, Zea mays
  Intron number 1 from transcript GRMZM2G004590_T02 (locus G RMZM2G004590) derived from phytozome v7.0 (chr-ID 2; pos 6 484836 to 6485811 reverse strand)
ggatcctgccctccgttgcgccgcgcaatctgcaggtggtgagcagtccgatcgatcgcctctattgttgttattattagtaagtagttaaacgtaaaaaatcgctggttggttatgggcacaacgccaaaatcagattgtttgatttgactggagtagggtgatcgattagtagtaatttctatttgtcctgtggaacttcgcgggatgaaaggaggtgtgtacccgcaacgtgccaagagctgctgcctgctggtccgccacccgccccaggagtggcgtgacacgattcacgcacgtgacacgtgacggccgggccaagggacagcaaggagcgaaacgctgactgttcacatacggcatgtatggccgggtgcggcttcgcattgccccatggccatgggcctgtgttccttccagtgtcaatcatcatgtacaagaatccaatcaaatggacgcaaacctaatacaaatgcgactaaacccactctcccccgttcttccaaaaatagttgatgtgtttttgacgttttagatgtggtgtcaaaataacgagagagatattaagaaaaaaaccagatattaaaggaaaagagagatgtattagaagtaagaacgacaaacggaaactcaaatactgtaataccaactattttagtacgactaatactttctgtttcgtacaaggaattccaaagtagtgccagttgtcagcgcttgttcctgttcgtgtcattgtcagggctacctttcgtgagagaaaggtgatgttagggagcccctcagtaaaccactctttgggccacattacgtgttgttaccttgtgattactagttaacaagtatataaaaaacattattaacgccagtgttcagtttagataatatcactttgaatttagtttctatcaaacggttgagatatgatacgcatgataatggtttgcaggaacaggaaaggtccactactctgctg

SEQ ID NO: 4534 - DNA, 861 bp, Zea mays
  Intron number 2 from transcript GRMZM2G167982_T03 (locus G RMZM2G167982) derived from phytozome v7.0 (chr-ID 2; pos 1 51913499 to 151914359 reverse strand)
taagttcatcttctctacggaaatctgcattgagggtaatacttttgtaggttgcttgtactgttttgcaagaatcatcatctttcgtttctgttggatcttggatgatcaataactgaagcctccatttttaagtgtattttattgataatgttttatctgcatcacctagcaaatggttgctttgttttttgatttatgtgatcctcttatgctttttcctcttataaatatatgtagtatgtactgctctgtaaataaaaacactgaatgcctgtggtctgtccgtctgtgcacaatccatgctttctattcagcttaatgcaaatctggtatactctgttgttaacagccagctgactattatgccctcagcctagggtacttgtagctgttgcaactctgtttttctaagttctaatctaaaaaaattagaccaacctaggaggaataggtggcattttatgaagaagaaaataggcacacaaattcacatcgatgaggtcttgaacctggctggtttgggtatatacatccacacccttgaccaaccgatctagctcagcttcctcagctccgttcttctagaccatgtgcagatctgttataacaagtgttattcagtatgttccttgcttgcctttcaccttaaaaattagaataaatgatcgtcatatggttgttctatttttccattctactgatccttatttcctgggactgcatttttgttgggatgacattgtttcttgctattattgtgaacaaaggacacttcaagaaactgttatacatgacctgctaattagctatttaagtttttcaggctcttgcaaaggcactgacgacagatcaactctt

SEQ ID NO: 4535 - DNA, 897 bp, Zea mays
  Intron number 2 from transcript GRMZM2G113250_T01 (locus G RMZM2G113250) derived from phytozome v7.0 (chr-ID 1; pos 2 96263639 to 296264535 reverse strand)
tggaccgtaggttcagaacactgcccaagacattttgatgtcaattgttctgtttcaatatttaagctttgtactgttcttgattgccgatgcttctattcatgctgcagtatgtactacatggctatattcaccgatatttatcccatgtacgaatgaggcttattgttttttcaccttgcatttagtgtattggtttctctaggtattgtattatatatatatatataatctgttgactctatgttttttattgtaatatactagtgtgttattgttttcgatatttaagctcttattgtgctttacagctgatgttttttcttgctgcactatctattttaagcctaggccccatttggttagagggactaatctttagtcccgtttagtctctattttgtcaaacggaaggactaaagtagggactaattgactttagtctctagtccctcacatgagtgctaaaaggaactaaagggcacatttactccaattgcccttgcctagaaaactggcttcatacacaggaaacaagaaaaaaggtatttcggtctttatgtgttccatttaatgtatttagaatatgttcagtccctacaaccaaacaggggccctagttatgttcagatatttaccccatgtaggaaatggacttatccttttgtcatcttgtaattaatgtactggttctctaagtattgtattatacagtagctgttagctatatacactagattgtaatctactagtgtatctgttaacttttgatttggttgtctgttcctaatgttgtactagtcaatgatgcacatgttgaagttccacactgtttttatatgctactattaattctttgcaggcaagtctacacttacagattcccttgtggcagct

SEQ ID NO: 4536 - DNA, 325 bp, Zea mays
  Intron number 1 from transcript GRMZM2G025528_T01 (locus G RMZM2G025528) derived from phytozome v7.0 (chr-ID 3; pos 1 35172885 to 135173209)
gtggtggtcataggtaggttcgcatcatcgttagtaataatcatcacatgagagggaagggaaagggagggacctcaatgatcatgcacatttgcttcttctcccattaaaaatgagatataattcggagtctagcaacaccttgcctgctgacatttttcttttcaaatggaagcaaatcagcagtggttgtctgacagaccaagtttcgtttctgttctgtcagctttgaaatggaagaaaaagtctttgttttgatttccacgtcttccaattcttgtgttcttcaggcaccacgctgaactacttcctggacaaccgcatc

SEQ ID NO: 4537 - DNA, 881 bp, Zea mays
  Intron number 2 from transcript GRMZM2G107645_T04 (locus G RMZM2G107645) derived from phytozome v7.0 (chr-ID 1; pos 2 80465581 to 280466461)
ctgctggccgcttcaccgagcgcacgtccgccacggtaaaaaaaaaacacttcccgttttccttttgcttcacttttatttcccggttgtgcctacggctggattgccattcctcctactgttattaacctaaatcatgttaacctgaaccacaataaccgatgcaaagtctcatatgacagcaactgtgtacatacaaagttccagagaactaggcagctagaccatgagccgagtagttatatggttggtaattctgtgatattacttctattcaggtcatgaatggtagcaagaaagttttgagtaatggcctaacttgattttactggaatcagatatcgtgtatgacaggagtcatcaattgctggtacattgtgtgcaatggccaatggttacaagttacatcaaaggcagttgacattgaacaaaattcgataattgcaaatttttagtgccattaataagctttcaaaatgatattttggattttatggatctttgcattatctgattgcagcattaagtattctttagaaactcttaatgcatttcctaggagtataagttaagctgaaccaaatgtttatgtgaactgctaatcatgtgtcacacatgcagtgcgctctgcagtttatgactttattgccctgaacccatacatctatacacaaaacatagtgagaatgcatgacatatcttttaacatgacactgtctcagtctcaacttgtgatgatgccattatttattgccaagaacttgtgctgccattggcataccacaccctagagcatggtgtgtgtgtgtgtatgcaggtttccttctggtttgccattcttttgttagattgtgataaccatgaatcttatgtgttttagt

SEQ ID NO: 4538 - DNA, 764 bp, Zea mays
  Intron number 4 from transcript GRMZM2G095887_T01 (locus G RMZM2G095887) derived from phytozome v7.0 (chr-ID 6; pos 1 25825725 to 125826488 reverse strand)
agcttaagtttggacaaccagaaaaagtttctcaagttagtgcctcttctactctcactcgctaacaaatgctttagttgtattttttcgaaatgcgtaggagaactgcgcatcataacatattagagagaagagaacatcacatcctacaagaagggagaaacctgcaatgcaggaaccccaagataactcacacttaaagctaaaaaacaacctaggtacttgacccgaccacaccaagggcttcagctaagcctaaacttccaagatgtttgactccaactagaacccaacacaccatgaaagactgctcggttacgttgtatccacaaacaccatgctcctagaataatggcactattaatgctcttgtcgttatgagccctattgcaaacacttcacccgtcagcaaaagctgctatcttccatagcaggggtgagatgtccaagacaaaaaggggataaaatactgtgccaaaactgccatatatttaataaccattagttgtattttttgacactaacacatactacgttcttttttacatgtgatgtttgatgtcatatatttaaaaacccaggagtattcatgcctagtctcttgttagctcctctaccttgtgctgctgttttctctagagatctctttgtggcatgtagggtaccacatattaatcaccatgacttgtcgcagtgtaacaatgaaccgtttatttaatattctgtgtatgttgatgccaataaatggacaggtttgttactgg

SEQ ID NO: 4539 - DNA, 892 bp, Zea mays
  Intron number 1 from transcript GRMZM2G154397_T04 (locus G RMZM2G154397) derived from phytozome v7.0 (chr-ID 2; pos 3 2494159 to 32495050 reverse strand)
ggaatcaggggtttcacacatagcttcgtcgatttgtaagttttttctagccgattcctctctttttgtacgttttttgttattagattcgagatttgttggatgtgttggtttatgttgctgcctttctagatttctcggtgtgaatgtatgagggttggatccttaggcatgaaaacatagctacatggagttagctcgttttcttaagtcacgtggtggtcggcgttatacctgttgcttgatgcgttatccgtgctatcgctgttcagatttagataggtggatcggtcatttgttcgttgtacgtattttgttacttcaaaattgatgctaaccctgttaattgaaaattgatggcagtggatacgctccacctttgtttagatttggaaacatggttaggaaatatgtgttcatattaggaaacgtggataggaaatatggctcattaccctggtactcggaaaagtaaggaaaaactattaacctttttgtttaggttttgattcgtggacaagatctataaattcactgaaaagacgcatacgatttcttgtacaggtgatatcatgccatgtggaaagtaaatgaaatcatacaaggctgatttttgcttttgttcccatcagatctgtgatttagttttgttttcccaaacaggttatgtttggtcatgtactcatgtgaatgatatagatctgttgctctaattagttagaaacatttattttgggcatatatctttaatggcataactgtggtacgttgtgatggtttattttagctgtcgtgcctggatcatcaacatcttgttttatcttttatgagaagaatttttgttcgatttgatggatgtgttcaatattttggtcttccatgcaggaatttg

SEQ ID NO: 4540 - DNA, 1001 bp, Zea mays
  Intron number 1 from transcript GRMZM2G159145_T02 (locus G RMZM2G159145) derived from phytozome v7.0 (chr-ID 3; pos 1 3465333 to 13466333)
tccgcccctccgaatctccgattgccgccgtccaggtaacgactccaatccccccagagtccggactacagtctgatcagatccaccagtctgcgcttccattccacgcccagctcgcgcctccttgggccctgttccctttttcttcgcgcaaaaaacttcacggatttgcccatgttcttcgctcctagataagactgctccgcgatcccgcggaccggtggttccggttcgtcggagttccggatcccgtggaatacgcaggctggactagataccgcgcctgtcagagtcagactgtagttgccgtaccggcggaaacgctgaaattttggccatgggggcgatgacagagctcaaagtgtccggttcttgcttgtgatggtggagggctggaggcgatcaccgtagcacccgactcaaagcgctggtatcatctgacgttggagctatccgggtcctaccaccgcaccaactcggaccggggttttttttttcctgtttttggtgtgtcaaaatagttggtcagtccggtgatcccctcatcaccagcagatgttgggaggtcaggtggccatgggtgtaaagggttggatatattattgaactgcagtactgggccgtggcttcagcacgctgtagccgagggaagttccctgcacattaaattttagtctggtcacatcggatatttgaataaatacagtctgaactataaaactaattacacaggttggaactaaacggcgaaaaaaaaacttattaagcctaattactctataatttgcctacgtgatgttatagtagacatttgctaattattttttgtcttgcaatttagtcttcgtctatgaccgtatcttgagcagccttttgccgctgctgaccagcgccccacataggctgtgtccatttatcctttttttttcactcacagactcggtgtctgaaagagtctgatagagtttgcagttttggcaggtgccggccgacagttgaga

SEQ ID NO: 4541 - DNA, 546 bp, Zea mays
  Intron number 1 from transcript GRMZM2G016875_T02 (locus G RMZM2G016875) derived from phytozome v7.0 (chr-ID 1; pos 2 55260928 to 255261473)
taaaggtaattctagtgtggcttgttattccattgtaatgatttttgtgtgctccaggatataaaaaaaatcactaccaagttgtacatgctaaaaagttctacatgctggcttatgtagcaaaactaggaattggcatgttgggtgtgcattacaaggtacagaaactggttgtatttgtaatcaatagtgttcttttagtattaagagtgttctgtaatatagccttccttgcagaggcataggtatccatatttctatactattcttctttgccatcatgctgcattccttggaaaaggagtcaatattcatgaacctttcaaaaggttttctgttagctagcaagttacaattgataatatatgttctctgtaaggtatcctttgtgattgtctacaattatatcttgatgctttattgaattactgtttgtccttggatatccatgccggatttaagttccattctcctttaagattctttgattccttctcatgaaagaaaccatttccacccttgctgcagatcgtcaactctgttgtg

SEQ ID NO: 4542 - DNA, 922 bp, Zea mays
  Intron number 3 from transcript GRMZM2G451672_T02 (locus G RMZM2G451672) derived from phytozome v7.0 (chr-ID 7; pos 1 53576491 to 153577412 reverse strand)
ctgctgtgagcccattacttaaattgcacatacatgtatgtttactcgtgctatatttatcgaatattaaaatgtgatgattatagagggtaaaagaaaatcacttctataatgcatatgcttatgcaattagctgctaagtcagcaattccaagaaagctctaagtttagcatggagaaaatggaggaagagataatttcttgttactttgctaaatcatcttcttgtatggcacactattatctgacataagcttactttttgatgtatttttgttggatggcaaaaaggggcattcaaggtctcccataaagggaaggaaacagatagaatatttctggttattgtcacagcagatatactaaactgggcctgggtagtcagtcagacctttcgaatggctacaactacaagtgtgtatgcccaatgagagtttggtataagcttttctttgcctcagataagcagaaaatctgcatgccatttcattaagaagagtaacaagttacaaaaccaaaaagagagagaaaaacaaagaagcatccctgattcaaacggtcaaaccttagaacatgtgcaccacaaaaacaaaaacaaagaaacagccaaactgaactgtaaactggatgtcatttatttcaagagtctgaaaacatattttcaggcaaatctgtaaatgagaggtaaaagcaacacaggatataggaatgctgcattattattgctgtttctgctttgggaacaatacagtgtatgtgttgagtaaatcctcaaatttcatgttgccttcggctgttcgtcagctatatatatggctatgaaatttagggcgctggttggagataattatccagtctaaccatggagtcctacaaaattttggcaggtacttccagttgagttaactcgccttccacttct

SEQ ID NO: 4543 - DNA, 1025 bp, Zea mays
  Intron number 1 from transcript GRMZM2G147712_T01 (locus G RMZM2G147712) derived from phytozome v7.0 (chr-ID 4; pos 7 2846278 to 72847302)
ggggaagtctaaggaggacgtttccctccccaaatgtaagttccctgcctcggttacccctgtagaagccgtattctggctccttttattgtgttgaaatttgacgccattaaggggatgtcgtgtggatgggcgtgttcttcttggtctgaagaatctggttagctgggtttggtttgcgtaatcttgtgagatgatacgctaggaagcttgatttttgaagcgatgctgtgaggaaagttaggtttgtcccaagtgctattcaatttctgcgccaattcgtatgtacgatggttgtcctggggcttgtggcgaggtcctgatctttttggattgtggctagttgattttggcagccttgttgatagcaaactactatgatgcagcactatacagttcgtttcttgtggtatgcttgagtgctctagacggatccaatacaaggcttcaacatggcatgtacaggaccatgggagctcatcatttggtgctggtctaataagtttcctttgtctcttggcgtttcttagtatatggaatttgggcccctgtgccttacaaacaggactggatagactagtaacttagtgtagttttgatggtttctagcctgtgaactatggcactccagtcgttggaaacattacatcatgtaatggtttggtatatgaaatcgttctgctgtgaattctgactgtttgtgataacattggaaaaagtggctttgtttcataatttcatatgatttttcatgtatgaattatactggaattgtttgatgatttttattatataatagtattggattatctttgaattaattaatgttataccatgaaatgtgaatgaacaagtatatggagttacaactatactaatattatgttttgccaaattagtgccatgcgatttgaataaagttccttgaacctggatgggagcagatcaccagttgacgacattttgttttcagagttgtttaaaatcttgtacttattgactttctgcttcgcattttagcaaca

SEQ ID NO: 4544 - DNA, 750 bp, Zea mays
  Intron number 2 from transcript GRMZM2G025014_T01 (locus G RMZM2G025014) derived from phytozome v7.0 (chr-ID 2; pos 2 32642390 to 232643139)
agaaggaataccctttgtgcgacaggcgaacagctgtctctctctctgcagtgttatttggtttattatatgcagttgcaggggagaaaactaaggcatgttcactgcagctagaagcacagccgcagcagatgcagcaggcttcttatacagtatttgcagcttagaagttggagtggcagctgcagctagctgcagcaaacactcctaacaataatagtggagagagactttcatgctgtttaaatttaggtgatttttgggaattaacttgcagatttattaattattatataggtaaaaagtgtagtatcagttactaggagcaagaacttgccctgatgacacagttattttggtttttctcctaatatttaaccttttgagtaagtgtgcagattaggtcttaaaaagggattgcgattaagattttattgccagagcctgagctgtagaattttccatttacacacgtgactgtacagggggtaaacttgcaggaatattacttggtgttcctataagatacacatgctgtgaaccctgatttgttttagctgcttttgttcgtttttgtctacttagccttgcacactgaggacctttattgaggtattccttgatccccatggttctagataacaaaccatgagtttacatcattatcccctctatctcaccttatattgaacatggtttttgatactattcttctttgtgcttgaaggttgccggtctgcgagttgaatc

SEQ ID NO: 4545 - DNA, 821 bp, Zea mays
  Intron number 2 from transcript GRMZM5G852779_T01 (locus G RMZM5G852779) derived from phytozome v7.0 (chr-ID 8; pos 1 72134363 to 172135183 reverse strand)
cagaagaatcagaattcatcagttatccaatatattcaggtatagatgttttatgtccttccatgcagtaagtgcagtcatccttccatatatgacatttaggacaaaacgatttagttaaaaaaaataaactaattatagcttgtcctaaacatcatatatttgaaaacggagagagaattaatcaaaacttaagtgattggtgatttgtaatttgtacctttaaattttgtggagaggattgttggtggttcactaacctcattagattcagcaaatttgaccccatttatcttaacttttaaagctctgtgataaatattctgcttacatgcaaactaatactccctttgtcccaaaatataagtcatttcaagattcttgaagagtcaaagttttttcaaatttgaccaaatttatacaaatgaagtaataacatttacgatatcaaatgtataccattagattctccattaaatatattttcatactatatctattctgtgtcataaatctttatgattctcgctatacttttggtcgaattttaaaaactttgactctccaagaatcttggaatgacttatattttgggacggagggagtatcaaatactcaaactcaacaaaaaattatttataagtcagaataacttaaaggagtcttctctgacccatcgtcatcataagaattaaacactccctgattcagtatatcagattttctgattacatatggaatgtagcttactaagggacattcaaactaactgtaagcattcaaagatactaagtatctttaatatattcaggtacatcagg

SEQ ID NO: 4546 - DNA, 524 bp, Zea mays
  Intron number 1 from transcript GRMZM2G127139_T02 (locus G RMZM2G127139) derived from phytozome v7.0 (chr-ID 2; pos 4 4444145 to 44444668 reverse strand)
gtcaacggcatcgtcgacggcgtttctggctcctggtaagggaggcagggtcgttcccgccgcgtcagagcaaaattcttagcaccaagtcaccatgaatttgattgttttttacgctaccccgacaactttgacttcctttggccggtacttgtggaatttggcaactggcaagggttcattgtctgcggtatgggccaaatggtggttggctagtcgttatgatcgcctgtttcagttgaccgcagttcgcagatactatcgttaacacgcaattttgtttggtttatgaaatagaacaagttgatgcatcattatctagaatggtttgattcctgaaaccaaacacacccttaggcgctgatgtttttgtgcttattttacagtttttgtttgcgaatttccatgtcgtgtctatttgctggttagctttaagatagacattcctttgccggaggcagacatttgacagtgccaagttggattcaggtacatcaagtttgatacgtttactcctgcagctg

SEQ ID NO: 4547 - DNA, 451 bp, Zea mays
  Intron number 2 from transcript GRMZM5G863784_T04 (locus G RMZM5G863784) derived from phytozome v7.0 (chr-ID 3; pos 1 66252964 to 166253414 reverse strand)
gagaagctattggattcccactttgtgctttgcaggtgcaattttgccacttatttcttacaattcacttggatatagtagtaatatatgttccctaactgaaaatagtgtaggattaggtaccattgtcaactaacatgatctggtaatgtaaaacacacacacaaaaaacgtaaatagcttgtatcttggtatctgtgttacgcttactcatattatttgattggtttggtgagcatctgtgacatactcagtgacccattgatcatattgttttgtaaaaatctatgaagtaatgcatgttctgtattctgtaaagcttatgaagtaatattttttttatcttgaaaataataatactaaaggatgtgaggttacctttcttctatctcaaccgatgcaacaatttgctgaacatgtatttcctgcgaggtgaccaggcagcgtgaag

SEQ ID NO: 4548 - DNA, 947 bp, Zea mays
  Intron number 1 from transcript GRMZM2G025211_T01 (locus G RMZM2G025211) derived from phytozome v7.0 (chr-ID 8; pos 1 45047952 to 145048898)
atcctgtaagtccaaattcattcatctgcatgctaccttctttcaagctatttcttggtccaacctttgtcagacggggtgaagcttcttctacaagaggaacaacaactacctctctcctgcttggggtgtttggttgtatctaaccgaagtttactctctatcacatctaatgtttataaataataaattataaattataaaaaagtacttggtctcattctgttcttcattttttaggtttcagctaactactcaaacttgtatcatcccaaacataagctcaattgattccagtatttatgttttctttatggcatggttttaagcaaaataaaaaatgatttttttatccatatagcatacaaaaatgttaaattatgaatttcacaatgatagttcttggttttagcaggattcaaggatattcaattgctatacttacaattgttgtggctttatataacatcaaagcaacaagagaaatagtgttggtggtactaccaaatgcatgcagcatatcccctgtgcttctgtgtttaactgtttattcatttgttgtgtgtcaaacattttagttccctctcaagatatattctctctttgtcaagcactggcatccctggaagttcttaatttaacaaaataataccatggagaatgatgttgtagaaactccaatgctcgagatcgtgtgcttcttgccgcgtcgtgcgcctccgacgtgccaataggcgtcgccgtgctatcgacgactttggcgaatccctatgggtagcgaattctagaagggtgaagggtgcgggtggttggggtgtggctgaagaagattggtgcctatatagacatcatatattatttatgtagacttagtattttatcatattgacatataagcatacatacatataggtgctaacttgaactagctgaagaagattggcgcc

SEQ ID NO: 4549 - DNA, 1014 bp, Zea mays
  Intron number 1 from transcript GRMZM2G106683_T01 (locus G RMZM2G106683) derived from phytozome v7.0 (chr-ID 9; pos 2 0304306 to 20305319)
gcaggccgccgcgagaggcggccacgatccgtcaggtttctctccctctactttccgtctgtgtctgtgatgtcggggttggatatgcattgcaatggggggcgtgatggtgcggttggaactcataaccgtcccccatccgtgtgaaagcggtggtgtgggtgtcccacttgggagactggggcactgcgcatccggcagcttgtctggtgtgggtctataggcacccgactgtcagatggctttaaaacactaacagaatcgagtgtttataggctatggaacgctcaattctcatatcagatagaaaaaaataaccaaattatttctatggaagccaaattggaaggttgcagaggggaaccaaataaaacatgcatacaaacaaaaaatagaacagcaagaaacaaacagataactgttcatgcaatccaaatgatcattctcaataataaacaaccaatttacatcaatcggatacgcaacttacacacaaacacagatagtaaaacatgctatagtaagatgtaatacggaactactgggccaaagcagaccggacgtaatcaaatcgaagaagggattcacagattcaaataagagatggaattgtccggtgccttggatcgctgattgaggtgatgccagggatgagctagaatttcttcaatacatgatgcgtgtgttgactgttgaagactacagcccatcatgcatttagcttattaaaataatggtatcttttttataatggcttgattaatcattaagctggagttttgtagtggcttattttgtccatgctccatccaaaacagattcatacccatgcccttctctaatctgatcaggctattcttatcttgagttcttgactaacctcagtgtctatctgtttcattactcatattccataataaattgatgtatgtttctccaattttgcttatacatgcctattttcattatggagttaccgaggtatctgtaattttgtttgtcggccctgtgcag

SEQ ID NO: 4550 - DNA, 959 bp, Zea mays
  Intron number 9 from transcript GRMZM2G106683_T01 (locus G RMZM2G106683) derived from phytozome v7.0 (chr-ID 9; pos 2 0308203 to 20309161)
gaactagagacacaaggtgatttcttcttctacttaatcacttgcattcattttttcaagtttctcaattaatagtgttgctctctaaaacttctcatgaagtattgcccaaaaactatcttcccatggttctaatggttatttgaagtttggattgcaagtaggtgccttaatatgtattaataagatatttccacgttccactcttagttgcatttttattctttatatgaaaatggtctgttttactatcactgccctcttgacacgtaaacaaatttttgactcattttgctctcccaaactatttaatctgggccagttcaccccctaatgaaaatattctatttccttctccatgttcaaatactgatatacttttgtatcataaggtctgttggcatctatcattttgcaaatttgcaccagcaacagaacatgtacacggcgaagacaaatcattaggtggtgacttttttctcaccacggtaacactgaatttcattatggcagcaacaaagttacaatattcaagtttcattaggtggtgtttttactagtatttgaagagtttgagttgggcgacagtcgagatttttcggggggggggggggggggggggctgccaagtttcaggacagactaccatttgcttcatgcctgacgtagtcttaagcaattggttaacgaactgctgtggctgaagtgaaccattaatgatgtagagtttgagttattctgttttgtcacaaacaaccggatttacacacagtatctcgcccgctcctccaagtctccctctccctctctcataataagcctgtttctgaattctatttgtggtcgctttctttaatttgctgattgtcaccactggtttttagggcccaatatgactttgtttcacattgtaacatcctcaacaatgattttacttcttacagcaaacactactacgg

SEQ ID NO: 4551 - DNA, 700 bp, Zea mays
  Intron number 1 from transcript GRMZM2G566786_T03 (locus G RMZM2G566786) derived from phytozome v7.0 (chr-ID 8; pos 1 0075877 to 10076576 reverse strand)
ctggggagccacctttgaccaaagcaacaaattgggtatgactacaagctgttcgatacattactgtacaatggcaatatattgttaatctaaaataaccataatggaagaaatcgtaatgtcaaatgggaaggggagcatagaggctggactgtttttgatatagaagaagggtgtaagtggcaaacatattttgaaggcaagaaaataggaatacaaaattgtgactatattgtgtgaatcccaaaactgcattagaggacacaagtccccaaacattcatatctgttttttggactgcattgagttgttcatcactattccttttagttagaccgtgtctagcagttcacccatatagtcacccaaaacactgttttgtactgtagactgtatttttttttgcacagaggagtttgaatatgggtgtggggaatgggtaagctgctgaaggtagccttagcatgctagaaagacaattggttgacatgaacattgattgtttgaaactacaagaaacatctgcctatcagtgtcatgaaatttagttagcccacttgagttcaccccttttctgttggcaaaacttgcatttatcatttttttactcttgcacatcctgagcacatctatttactatttaaccgtttttacttcctttgcaggttagaaccattgacccttcatctgggaagcctgc

SEQ ID NO: 4552 - DNA, 942 bp, Zea mays
  Intron number 4 from transcript GRMZM5G896449_T01 (locus G RMZM5G896449) derived from phytozome v7.0 (chr-ID 4; pos 1 52850759 to 152851700)
ggaaggtgaaccattaagcaataagattagttctgattgagttaatggctacattgctctaatttgttgcttctcatcttttcatcctttgaaaatatgcagctgcttaatggcagtgattgaagaactaactcaatccctctaaaaagtagttgacaatcagaatgtgtcatttttggatgttgactggaaagagcttgcgattttgtgtttgtgactctctgagttattctctgaatatgtgcaagtataggttctgaatctgtttgtagataggtggaccatggtatggtatttagcaatgctactcattctacaagatttattttgtattgttcccagccatctatataccttttctttggatgattatgaaaagtcacaagtcaacttttatccatcattctagaatcataatattttctattgcttagtttgatacaagtagaagatttagtaacaaatagtagattcctaaattccattactttgcattgtttccagccatctataaaccttttctttggatgactatgcaaagtcacaagtcaatttttatccaatatacagtccaactttcaacacaaaaaacataaaggtagaagttgtgtttggtcctcacataaagtacatagataatgaaaagttgccagaataaataaatattgtacctttcggaagtggtgtgctattgcacttctcaataaactgaataattgatgttgccgcacgcaatcgttgaatattttgtatttgtacgtcgttgcaacacacgggcacgtaactatgacgacttatgaaaggggcgtcctattgtgtaaaattgacactctttcagtttgcaggaaaaagagtaatccatgcctattctagcattttgcttcgactgatttttgatttggttaataatttactttattcatgatgtgtatcaggttagcg

SEQ ID NO: 4553 - DNA, 900 bp, Zea mays
  Intron number 9 from transcript GRMZM2G048291_T03 (locus G RMZM2G048291) derived from phytozome v7.0 (chr-ID 4; pos 2 09843508 to 209844407)
actttataaggtaagcggtggctaatggctgtaatggttctcattggtatatgtttctttatcttctccaacattactgctttgatgcatttactgctttgaataaaaaagtttgaaattgtaactatgttttcttctttttaattttctgcccacattttcatctggtataagtgcaagccaacagtgccgccctatatcttaggaggattcctaacttagttccgtgcggatacatctatattaagctcaagtcaaagtcgatttgtttatcaacacaattcgcctccttttaggctgaaatttttttttcctcattatagtttgaacaagagggcctcgactaatcggacgactggacgattagtcgacctaatcgggtcggatgccctggtcgttccactaaaaccgactagaccgactaatcgcgattaatcgcgattagtcggacgacttgaaatcattgatcaggtccccctctatctctctctctgaatatgttaccaggattttttagtactatgatgttcttcctattctcatttgtcatcactgatcaactgtaccacccttgaaatgtctgaaatgtatgggtctacatctgtgatcaactgtaccacacttgaaatgtctaatgtctgaaataacaacaaaccttctttgtgtcaatatgtaaataatatcaaattagtactacaaactataataacataacgaaaatgcaatgatactttatctaaacagtagcaacaaatgtctgcttacatatttagcttgtcctcaaatggtttcacctaatatatttttctacccttactggcctttaatctctgtctactaatttgtttcatgcatgccgatgcagtgattccctcacggttgtgtccttcacaaaggaag

SEQ ID NO: 4554 - DNA, 684 bp, Zea mays
  Intron number 1 from transcript GRMZM2G380515_T04 (locus G RMZM2G380515) derived from phytozome v7.0 (chr-ID 8; pos 1 26082274 to 126082957 reverse strand)
ttcgtcaggcccttctccggacgagcactcacagggtataccgaccccttcttttccgtccctgctatacgaaaccggcatcccaaaccatgaacgtgatctattcagctatctcctatctgtcccggaacccggttcttatctagtaattacgactgcagtgtacatgcgttatacctgctaactttaattttttgggagcccttttactggtctgcccctggcaaagccagttttttttttgagtcgttgaatacctgcgattagaatttattatgggtagcaaaacaacgatgaacatgctgcgaatagtcttcattagtctttaggtcgctggtgatcaatggtcggtagggcagtgcatgccttaatttctggcttggattggagtattggaccgtgaagtgaggtagttgttggtgatggattgatcgtgtatagccatgaacgggtcactttttcttgttctgcacttgacaatgctagtttaatttgagttgttgaatagctcagattagaatcggttgggggaagcaaaacaccgatgcacaagctgtgaatagtctttattcctctactataggtcgcattgtagctgctgctgttttcccagtaatttcagctctaattccaggtgtcaacattcaaggtatcaaggaacgcaaacctccagattttgttacc

SEQ ID NO: 4555 - DNA, 871 bp, Zea mays
  Intron number 1 from transcript GRMZM5G839411_T02 (locus G RMZM5G839411) derived from phytozome v7.0 (chr-ID 3; pos 2 02931070 to 202931940)
gctatcacaacatcatctgaagctataggtaagaacctcctcactgcatttttgaagatcgacatctcaatttgcttctgctctacagttcgaattacttaaaattattcacgttttattcaagtttggcagacatatgatttaaaagtttttttttggtatccctacagtcttttgtttttgtcttaatctcaatgtcgtacaaaattaaacaggttatactcatcagcattggtccgaagatgttatagatctcttctgtctttctttctgtgagaactagatcttactaacttcaaataaacgaaagcggagtagctgaccaaatgataagtgcccttgaataaaaattaccattctaagatgatatatgattcaattctgggatgttctgtcaggcgactgtgctctttaaaaatatagcataaccaagcagtgagcacgtttgcttgtgtcggcctgtcgggcagaacgcagaagtaaatgttcatttgtaatgtgaaatactaatctagctgcataagtcctatctgtgtacgctgcagccataatatggtgaaaacacatggagctctccttcatttatttactgaaaagataataggcaggaaggtctacctatttgattgtacagaaaaagtttaaaagaaacaggcaggagggtgcttgtgtcttaagcattgtactgaattttctcaattaacctatgtttgaatgtatatttggacatttcttttttggtgtgcacctataaagcaagcagttcagcttatcttctgaggttttaacttaatgacagaattatcttctgaggttttaacttaatgacagaattagttgaacaatacttatctcatgtcatgtctcaaag

SEQ ID NO: 4556 - DNA, 747 bp, Zea mays
  Intron number 2 from transcript GRMZM2G142913_T01 (locus G RMZM2G142913) derived from phytozome v7.0 (chr-ID 3; pos 2 21219176 to 221219922)
ccttagaggtagaggcaaagaaaggtaatacgtgcccatgtactatcattatgtacatatttttgatatgtcaatcaataacctctgctctagaatcttctttctttggaggtgtcgagtcaatgctcttttggagaagtccacaaatcaccaagcaaagtagtctgatatttggtgtatgaaaatatcctatgccgtagaaaatgaaattgacgacaagatatccatctagtagttttagaaattgaattgattaatgtgtctccatttcatggtttgctccttttgacaatatttatttatgtcactaattcacattctgctgttcactaagaattcagactcaaaagcatgacatgtcgtgtttgaaaccattgaaggatcctccgaagaactgcaatgaagatcgtttgtacagaatgtcttaatatgtcctgtttaggagaagttactttgggcttatgaatgtgtaatcttttatttcatttagttgttgtgtatgaaacttctggtctatgcgctgtttggttctccgatgctttttttgcatgtaaatgttttgtgacatccatggaaagtgaccgatattagaaaccattccatgatcaagtgcatcactaattactttgttacagtggattgaaaatgaaagggcagaagcattgtctttcttggtgttcagacactcctgaatactgttgtttgtttccaggtgcaggaaaaaattctaaacctgcgaaggttttc

SEQ ID NO: 4557 - DNA, 815 bp, Zea mays
  Intron number 1 from transcript GRMZM5G815789_T01 (locus G RMZM5G815789) derived from phytozome v7.0 (chr-ID 6; pos 1 35638213 to 135639027)
gagagttttttcttagttcaagacacaaaacagtcttgatgcagacagctatagtaacctggtattacaaggaaaccaagaaaattacagagtactctccaaactaacaaagcaaggaggctaacaggccataatattttattttactacgacgggtataggtagcacagaggattatgattcatcaggcgtgttactaattgaattctttgacaaaatcagttaagtcactcatgatagtcatgaagttagccatcaactacacactgaatggaaaaaggaaagccaacacaactacagttatctcgatcctttgaactgtgcaggcaataattcaaatatatatatatataatatatattctcaaacaccaataaataaacatctccgagaagatcgatacctatgtaagattcttttttcatatacacgcaatgcacaagcttcctacaataacagtattctcaagacaagtaatcaataattcagtgagataatctgtgtttgttctcagaacaacattctgttcaacctaatcaataattcataatgttttttatagttaatgtccaagttagcaaaaacagacagcagtggtagactaaaactcgaattgtgataccatagggtaacacactttttctgtggtataaatgtgagagcaattttttacaacacacatggaattctctcataaatatatgtagcacagtccacaaatgcataagcaatgtgattcaacaattgtgtggggcaagtaaatcagcaagacaaagtactgaaacaagattaactgaccttaagctagaagcaaa

SEQ ID NO: 4558 - DNA, 919 bp, Zea mays
  Intron number 1 from transcript AC204633.3_FGT002 (locus A C204633.3_FG002) derived from phytozome v7.0 (chr-ID 6; po s 45242615 to 45243533 reverse strand)
aagaaacacgaagactgaatcacattttgtggttcgtacaaaccaaactattaaatggataatgttatcaatgtcagttgagccatagagtaagctaaaccaaggtttcagatttttaatatgtatgttctatggaatcaaaatgttcaattttttcacgagtctatgatgcagtgcacaattaaatactagtctatagtagtacattttcgccaaactaaacaacaatacttcgtgaaagtgtaaattcacagaaaatttgaggtcagcttagaagcaactacaacatggacagcaaaattctactgttaaaaagcacatcattcttttgtcttaaacaaactggcagtacataagctggtgatttcaactctattcttaaaataagcatgctctgtaggagtgcatttggtcatataggccatggcttgtatggatccagtagataaaaattgtgttagagttgtcatctatggaggtatgtgtatgcggtatctgtataccatagtttttaaggcgcccgtaaggcgacgcttaagcgtcgcctaagcagtaaggcgagggtgactcgccttgcctaagagctctccttagcccactttagttcgccttagcgtcacctaggcggtaaggtgatggtggctcgcctcatctcgccttaccgccttaaaaactatgtaagctgcagctagttacatgtttgataatacataaaattatgttcgagtagtcatctttgaagctatgtataatcaaaacttagcttcagctatttgtataatcaaaacttcaaagtatggcaacacagtaatatgaagatgcaagaaataataagtaagagtgctcaccgagggggtatgtgcagacagtgatggcttgacagtggtggccattgacaatgtgcaaacagggccaagcg

SEQ ID NO: 4559 - DNA, 990 bp, Zea mays
  Intron number 1 from transcript GRMZM2G065950_T01 (locus G RMZM2G065950) derived from phytozome v7.0 (chr-ID 6; pos 8 3837498 to 83838487 reverse strand)
tttcctcgtcgccgcctcccccttcaccggccgaggtaacagcagcgcgccggtgccccccccccccccccccccccccccctctctcctccctcgcttcccgccactcagatccgccccgctagtcgtgaattccggcgctagatctgtgcgcgccgcttctccggcgcgcggaaatggagatgatcgggctcggctgggctgcggtggattggggcgtgctcggttgggggtacatcggtggtttcgaaagggtttggaagcgttggtcggatgtgtagaatgggtcttggggagctttagttggcagagttttgggaaatcttatgtgatgcggcccacttaattgcgtatcgcgtgtatctgcatttgcatgttaatagctaatcgtctgaggactgggctgttatttgacttttcccaatttttatcggttagatttcatggtctaaaagcagtctgtaacttttcagtaggtaaaattttgaagcacaaatcattacatcagtgcctttttagtactcccatgcgactccagcaaatgcctatgaaagcagaagctgcagtcgccgttcacattaggcaattaacttaagtgggtagcatgtgtttaaggtttaagtactcatcacgatggactgctttcaccacatgtcttttaatcagctaggataagttgtccatctgtgtgctatcattgactcgttttcgcagtattcttatacctgaagctcaaagtgggctaatgttaaaaaagctgctctgtctctgcaaggatgctttatcatgttgctcaacctaacattggtaactattgaattgacaaatagagtgtgtttttatcgttcttgtcttgttcaacaaatgttttgtgttctccatatccacagttgatacaactccacatacatgcattcttccttcatgtattttgcactgaattgagctttcctcccctttgtacagttgctagagctgaatccgaggaag

SEQ ID NO: 4560 - DNA, 638 bp, Zea mays
  Intron number 2 from transcript GRMZM2G096169_T01 (locus G RMZM2G096169) derived from phytozome v7.0 (chr-ID 8; pos 1 62666631 to 162667268 reverse strand)
gagtccctcctttgcattctgtggcaagtgagatgcctcctgctacgttcagaatcttacatttgcattatagtgtaattaagataaaaccattacctgccaaatacttttatgtgactagttttctaacttatcccctgtcaaacaattggtatgcaagtacgcacaaactcctaggcatttttacaggtgatgatgtaccctaggtcaaccatcatcgttttatttcatttgagaccttgtctcaaaaaaatatattactgataagaaaaggaatggaaagtaattggatccttccatccatactcttacagagttacaggtaggatactatgagttaggtttgcttaaaagtctgtaattcatcaggatataaggctcctatttcagttcttttaggagttccagagactaatgctaagattagtagccttttcattttatgatcatgtttgacattaatctctactgaacacttcttaacaaggttttacccctagaatacgataaatgtaatatgaagggcaacttcaaacagttttgcatttctacattcaatgtatttgtagcacttgttgtcaggcaacatatatctgcttcgttgtcttaaagcatctgtttctcctttttacaggtag

SEQ ID NO: 4561 - DNA, 624 bp, Zea mays
  Intron number 2 from transcript GRMZM2G365644_T03 (locus G RMZM2G365644) derived from phytozome v7.0 (chr-ID 2; pos 1 95815195 to 195815818)
ataagaaaaataccaaggtatatcgtgtaaccccatccttgaatttcagattgcctttatttgtcatgaatattattttccttgttttcatgtttgagccagattcagcttgggatacaaaggatttggtcttagccacctgagattgtatgaactattatggtggcgtcgactgtggatattaactggtaatttaaattgtatgaactatttaataattagaaagctatatctatctaccgagggcaaattaaattgttagctgatatgggaaaaattccagccaaagaaactaggtagtgacttaatgtagtaccacattgtccaaatggtcttgcatattgtttttgttatcgttagtaattagtggattgtgaacctaaccaaacattagtaaacctattaatgtagtatatttcaacccaaagtcatcttctggttgctctcgtttttgaatatgtgctgaccattttattctcatcataatatatacttttgaacattaacaacttatttgcgagtgctgttttattgataccaattgtatgggtatagttcagcaaagcgttctgccctacactttgatgcttataaatctttttgcctcctctatcctctagattg

SEQ ID NO: 4562 - DNA, 783 bp, Zea mays
  Intron number 1 from transcript GRMZM5G879345_T01 (locus G RMZM5G879345) derived from phytozome v7.0 (chr-ID 7; pos 2 574706 to 2575488)
gtgttcaaagctctcaagcactcaattagattttggtaagcactagtcattgttagagtttgactgtgtacgtgtgtgctgggtcttgagcctggcctactcagccgtccaacccataataggcgtgttttttgtgttgggtcttgagcctggcctattcagtcggctggtggtgatcatgtctagtggatctctgcatgtagccatgtggtgacttctttccctggctctcctagtgtgtagtacatgcagacacttgtatatgtatattcattttcatggtaatcagagcctaggttaatcacgtgctctttttttttctttcacacccaacacaaaatctggtatacagagaatacatcagtttctaatctaacaatctgatttttgtgatcttcgtatcataagttcactaacagagaaattacatagtagatagtgatggctcactgttacaaatagcaaaagctcagaattcaacaaccaagggttgtacctatggaagtagccaatcagtagcaagtgtaagcaaataaataaataaaatcgataagaatagtaaggtaaatgtcccaaaagtcatacatgtgaatagaatattgactttcgcaatttagttttttttaatgtttttgcttcttgagcccaattgttcttatatattcccttgctctccttggagttttgacatgaagcatagaatacagactacagagtgagttttttcatagttcttacccttcttacagcgttgtctcctcaggagcaagagagaactcccaa

SEQ ID NO: 4563 - DNA, 946 bp, Zea mays
  Intron number 1 from transcript GRMZM2G091756_T01 (locus G RMZM2G091756) derived from phytozome v7.0 (chr-ID 3; pos 1 93302492 to 193303437)
cgaagggagagtaccgagggcgtattttccagtgagttgttcttccaaacgtttgagaatttttgatgtttcgttcatcttgtgtttgtttcttacaataacttgtgtaagaagaggcctgggcttatttttgaggaatctgatttactgctcgagtatgattatttaggaggtgattataaccggtaggaacctgcagtgcaatacaggtatgcctataaagcaggacagctccagctctaaaaaaatttggtggagttggtggagcggttcattagggtagtgtttggttgaggagccaagtagaacggagccgttccatccctaattctaggaacggagccgctctgttctgtgtttggtaagctggaacggagcggctctgttttttgtttggttgcagagtgaactggaacagagcggctccatcctttgtttggttgaagagtcactgaagtagaaattagcaggtacctgagtcgcgtgactgtgcgagcgggctgggaacggagcggctccgtccggttgattttttggagtggtatggttccggatttgaggagaatattctctaattggagccactccgttctagctactttgtaaccaacaacaacaaaactgggacataacactccgttctacttggctcttcaaccaaacactacccgttgttctagaaaatcgtggagctgtaagcctttagaagacatttaaataagtcattttgtttattatttagattcaaaatatttttaaagctgtttaaattgatattataaactacagcttcacactggagctgacctgcagccaacccaaacacccccttagatgttagaataggtggattgagggcaaattttgtttacttcttgtacctggataagagtatttcctggtatctccagttcttgatttcaactttgaaggcttgagctcaaag

SEQ ID NO: 4564 - DNA, 870 bp, Zea mays
  Intron number 1 from transcript GRMZM5G855860_T01 (locus G RMZM5G855860) derived from phytozome v7.0 (chr-ID 6; pos 1 35937008 to 135937877 reverse strand)
ggtcgagaaggtggtttcttgatccatttttattttcatcttatctaaaagtctctgggttttcttattagaatgtagattgctcaagtgataacttctagaatatttgttgggtcagttgcttattcgctcattcccttttaacttttatattaggttcatcaatatttatacgataggaactggcagagccacagaggtgtcggattgaaatagtttctaaagctcaaattagggaatttcgggataaaattagcccaaattagctatggttgactagctagttagagacttggcaaaaagattagcccgcctattagctatcttgttttgacgcactggatctaattggagctaaaattagctagctaacaattagcccatggtatttaaacatacccttaggttgtagtgttttaaacgtgtgctatttattaatgtgaatgcttaagctttttcatttcccagtacaagttacatgacttagtgcttatgcaagccagaaaggcagaaacgaagtactgaagttaaattgcttagctagatttgctatgtatctgattatagtataacagtataactacattgcacggagcatccttattattgctatggttacttcctctgttaagtatggtgagcctgtattgcccagtatatgctttgctgtcaacatgcctatgtaaatcaaattttctttgcactgtgattgacaagatgggtcattattgtcaattatgtaacatgtgggtttcttttagctctttgtcttcatatggagcgtatgttcgtccaatgccatatccaaatgaggtcggtttgcgaatggttataggtggcgctgcacgggaagcatctcttttgggattt

SEQ ID NO: 4565 - DNA, 935 bp, Zea mays
  Intron number 2 from transcript GRMZM2G065105_T04 (locus G RMZM2G065105) derived from phytozome v7.0 (chr-ID 6; pos 8 3931023 to 83931957)
cgagactgcaagaggttgctcaatgtcttattctcttccattccctctcagcactactatatatagcttttagcatcgcccccttcataaaacagagatggccgtaaggctaaacgcaggtaatgctgatggaatgagtatataagttgcattgtggtgctggtgtgcttacctcacactaagtgcctgtttgggagggctcccaaacttgctccggctccggctcttggaggagccctcccaaacggtttcaaaaaaatagctcccaacaaagagcaccgtggagctggagacatttttataaaaaggagccggagcaaaaaaaaatggctcctagcggctcctcctctcactcccctcctctcgcgtcaagaggagccgttttgccaaacgatttgttaaaaaaacactggctcctatagagatgttgttcttgaagagaagccagagccgaagtcatttttagaggagccggagccatgccaaaaggggcctaaaaccgctataagtttgctccaaacaagctgtttctgtatctcttgacaaatatactgcactaggtaggggtggaggacttgggtggtcagctgcacaagcctttaactaggcaatctgacttcaaatccccatgatgccactcccgctaggattttttttggtggtaggcatcggtcaggcatatcaaagtgagaacctggtccccaagcattctcattatgtggggggctaacctaacctctgtccggctgtgtataccttgttccactatttctgctgttcatgactattgcaatctccgtacttagaatcacactaatggggccaaactttttaagaaaaatggtgagttatatgagtaattttgtcaaagctgattctttttatgtgattattatccagactcatcaaagacttcgagcgagttagcaaagctg

SEQ ID NO: 4566 - DNA, 567 bp, Zea mays
  Intron number 3 from transcript GRMZM5G872443_T02 (locus G RMZM5G872443) derived from phytozome v7.0 (chr-ID 4; pos 1 2021347 to 12021913)
cgggtatgtacatcgttgttccaaaattcatgtgtttgatgccggattgcgtgtagctagctgttcatagtagggattagcgctgaaaaaaattaggggaaagcaaagtacactggtgacctcaagttcaatcaaatcaatatggcacatcagttaggctgtttgcttatcttagaaaatttatttttgttctttttactactaaagccttacttctctcttctgtgattaaagtggtgaccaacttggaagggcagttcatatgtcattgttttttactggaaacttttggtcaatctgtccaaggacgagaaaattctaataaacatatcagaatcacagaacaatagaaatatggactgtagtagtaacttttatttcctaccaaatatcggtttggatatttttattactactgcacccaagtaatactaattttctcttataagatacatactgatgcaagtcaataagtcacaagtaatcacatgggattttttattgtctgtttttatagaacttgcatgaaagctattaatatgcttatcctatatttttaacagaaaa

SEQ ID NO: 4567 - DNA, 872 bp, Zea mays
  Intron number 1 from transcript GRMZM2G538502_T01 (locus G RMZM2G538502) derived from phytozome v7.0 (chr-ID 4; pos 1 50882348 to 150883219 reverse strand)
acacaaatcactgctatttaaggttagtgacttaacatcctgcatcatgtttatgatttatctgataattatcttataatattagctagcaaaagagtatggggaaggatgctaataatttccattatatcatatgattatatccggaacattaacatatgatgttgtacaataatttggtgcttcatgcacaactattatcgttcctatacattcagtcattccattcttttagcttacctacaaagcaaaggaatggaactttaactgtgatttaagaaaatttcaattggtttctcggaacttccaatcaacatttttttatatcaatgctaaacattgtccaactcatgcttagaacttacaatttgagtgtaatcttttcagatgagattgcatataactgccattcaaactttgggattaagaatctaaatagtaggacaatgttttttcaaaccaacgttatattccagggtatgtaacttcaaactgtggctgttgactgctctttggtcagtgatggtggactgatatgataaggccataataatggctgcgcaagtgtgttaaattatcataatcattggcatctaacatgagtgcatacaagagaagatgtttgagaatgagaaagtcgaagaagggtgtttttatatgttattcatgtcattctgtacccatgccattgccatgcgaccatctttaaggtgcatttcaccaacatatattgttgtgttttttttctttcggattgcaaaaacaagaaaagattaatatatccacgattaagatttaaaagagatacttcatactttttgtaacaataaaatgcaggtgtctactttaccagcgggacaacacgtacatag

SEQ ID NO: 4568 - DNA, 967 bp, Zea mays
  Intron number 1 from transcript GRMZM2G133675_T02 (locus G RMZM2G133675) derived from phytozome v7.0 (chr-ID 4; pos 6 597128 to 6598094)
tcaaagctcggttctctgcggtgcagttgagaggggtaaaagttgactctgatttgttgaggtgtctgggtgtgagagtcggatgggttctgtgtgaaagctggtgtctctatagtagttcgaaaggttgagcaatttggtttagatactgtggcgagggagaaggaagatggtttcttggtcagggggggctttagcctgtagggttagggagtagtgctgttcatcttatctatgctctgtgtgctgttaaatatctgaattggattctttgtgtattttccaatgagaatagttagttgcattatttgctctcaatataagaaggacgataagcctttgatctaaaatataataattacttggatcaaattggctttagtttcttgatgggttgtatgacagcatgtgcagtttaagatttttgctgttgttgtgaggtaaagagaaagaatagctagcttgatatgacttcttggactgttcatagtgttcttgtgttgttggatttgaaaggctggctaatttggtaggttaatatagcaaccagtagttataacataatttttatttgcaagattagaaaattgtattgagttcttgatgcagattcaaatagactttttattgctggtttgatccttgtccatagtccacacataaagttgattttttatctaattatctgcacttcatgatctcaatcaaacatatggtgcttcttgttcatatttctttttccagcgaggttaaaagtttagctcgttgtggtattgtgatttgtgagcaattgatgcttccatggtacagcatcctaaggaactccatatttttatgtggactgtatttgtgttctaaattgtgataccttgcggctcagattagttgccctttgttgctacacatgtttttaactcttttgattcttaaatattcaattttgtgatgcagcaccaatattcttggc

SEQ ID NO: 4569 - DNA, 942 bp, Zea mays
  Intron number 1 from transcript GRMZM2G350319_T01 (locus G RMZM2G350319) derived from phytozome v7.0 (chr-ID 9; pos 2 4474354 to 24475295 reverse strand)
tgcggcggaacgcgctctaccgcccgtcgctcaaggttcagcccttcctttgtgtatctcacttcgtgatctcggtttgggccccgtgaagtcgtgtgctacgggtgttcctgttgttagatctgatcatgggagtaggatttgaacacgggacaaattctgtgagatgtttgctgatatgaatctgataatgaggtgtgtatgccaaattttgtctccggggctggaattcttaatacgattttggtagttggagtatgctaagaaatatttcatctgtttgctagattgccactggtggggaaaatgtaacaggaataggctcgaacactgggaataatactccagggcaccattgtttgttttatcattgcgaaatcagtacagtttcatgccactaagggcctaaggcagggtgttcaactattcatcactcatcagttgctcagccatgcaaaatagttctcagccatgtgaaattattactgttttctctgacttttgtatgtcatgtgtacttggaatcttaggtggacttctatagctggttattgaaagctaaaatctgttagatggcacaacacttggattagttcatattctttgttatgcaataagtcccattttgtttttcaatgaaggtgcacaactcgtggtgctggttgtttcattgctatggttagctattagctgtactgatggttatttatctgatattttatcaaatcacagacttaggcaccaatttctagctgttcacagtttgaatcagcccacccttttgctttcctctttgtactttgttttcccaatgaccaaggttgcatgctctgattttcttttccgcgtgattggttcgtttccccgtttgtgcagctgcacccgtggtgatttaaagcacacattgtttggtttccatctgtccgcgtacagcctgagcag

SEQ ID NO: 4570 - DNA, 627 bp, Zea mays
  Intron number 3 from transcript GRMZM2G356176_T01 (locus G RMZM2G356176) derived from phytozome v7.0 (chr-ID 3; pos 4 1328387 to 41329013 reverse strand)
accctttcatcaccacggattacgtatgccccttgatctactgcatttgttccatgcatgagtagatccggtgggtttgcggtgggtttagcatggatctgtaagccagcatgctcgacttggtcaatagtcgaatgttattttggcttcaattttttgctgggtctctccgtacacggtagttgttagaaaggctcttcatcaagtttcatctcgcctccatgacaacccatccaagtcacaacatcttcttgcatccagcttgactcaaccttatccagggagaacccaccttggtggttcgtctactgcaccttggcaccttgccaaatatgtgatcatgtgcttgactgcttgctaattcaacatgtgcttgctaattcatcatgtgcctgctaattcagatcactcctttttctttttatttattttagtttatttagagcaactaaaccagccagattattgtctgctaccaatatgtgccttttccccatgacaattatgagaccagttttgattgaatcaccttcatattttcatctaaatcattttttggtgtatctctctacctgtttgagtttgccgtcaggtacaggggaaatacggcagaatcaaaaaggaggt

SEQ ID NO: 4571 - DNA, 759 bp, Zea mays
  Intron number 2 from transcript GRMZM2G104375_T02 (locus G RMZM2G104375) derived from phytozome v7.0 (chr-ID 4; pos 2 00527860 to 200528618)
ctcctcaggtcataaggcaagttgcctacttcattgcttcctcatttttcttgtattccttttgttagggaggaatgttctggtgacacagccgatagactactgactgagtttttcctacagcacctcacagtcagtgtttttattactttgttgaagtcctagaattgatataggaacattatttcaaatgccactttctttttattcatagaattatttggctttctacatgaaaaattgtccaatgtttttgttttatgtcctaccattaaatgttctgttcattatattaaaaagataataggattttttgaggaaggccaagatggatttggactttgactgatgtagtttatcccatggtagccaggtctgtagtttgcaagaaatactattttacttttcttggcagtgactactattttttgtggaggttgtatattagattatatatgttcatgttatgaatgggttaggtacatacatgtagttttgattttgcgatgacagtggtactcttagataagtttgatttatttcagtggatcaatttataagtgtcatgctccttaatatgaatcaccaggcaattatacttccgtgttttctcaaccaggaaactgcatgaaacataaccagactaactataacacccatacatatattctgaacaagtattattgttctctttgttcattatctcgaattggacatgtttctaactcagagctttaatcatgtagtttgcagtgttat

SEQ ID NO: 4572 - DNA, 605 bp, Zea mays
  Intron number 3 from transcript GRMZM2G040276_T01 (locus G RMZM2G040276) derived from phytozome v7.0 (chr-ID 3; pos 1 6496694 to 16497298 reverse strand)
agaagtggtagtgtgctggtaaaaacttgcacaacctcttatttttaagaaacaaacgtatactacattccacgaaaactaatgttaatcttagagtgttcatatttatccaacctaagaaaatgacatactggaaacttacatttgcctttgagttaaaattttaaacaatacccgtcaacatgttcttctaagttttggtctatctattatcttcggatgaaagatcaatcctttgaaacttcatgtttgctacaccgcctttagtttatggccctgaaaatatttttctccattatatgacatcgggtctatcttttatgcctaaacttgacacttccttcagttttgactgtttttaatagagataaccccatttccatccatagaatagaaatacaagtgagaatgatattacatactaacttaaagtttcatgtttcattacctcctgaaatgttgccatagatgttgcctgtccactggtctagccagttcagcattaaagtactcctagcactgaactttttctttacgtgtcatctgttagaaacctttcatgcaaaacagggagcaactcgttcatctcttgaaggggattgcgg

SEQ ID NO: 4573 - DNA, 1011 bp, Zea mays
  Intron number 1 from transcript GRMZM2G419782_T01 (locus G RMZM2G419782) derived from phytozome v7.0 (chr-ID 4; pos 2 00853797 to 200854807 reverse strand)
atctccctcggcgtcaagctcggcgtccagtacaggtccgtgctagcaggatcgcacgcctccgtgatatattgagctcttgactgctttgcttttgtagagtagtttgcatgcttcaattgatggcgatgattccagactccgcgtgtttcatgtcgttaggtggtggcgttagttaccagtgtttgttggtgttagttacttagttatcagtgttcattggttgtgttcaagtatgcaattcagtataacatgactgatcgtaggggacatagtacgtagaccatgctacctaacttatgggtcaattaaccgatccagctgtctctacagacacctagcaaccttttctttatagagctcacatgcaatccgttgtcgcattcaaaaggattctaaggatgctttgccttacctgtattggtgccagtggttttcagtgacagggtttatgaaaacacagttcgagctcgttttcttctccattatttccccttcttttattgcgataaaactttttggtttgggtgtacgtatgatttcagtttcctttttgtgaatgaggtcatgcttagcatattatcataaagatgcgttgattattcaggacaatgatttggtcaactcaatcccttgcaaaaatgtacttgagcagttgaggatgcttttggagaaattcctgctgcggctgtttttcaggcattcaactcatcagacagatgataacaatcaattacttgccttgaaatcacaatcaatatggacacttcttatctcagctatatggttttgtttcttttgatgatgggcccagatccaaactctgtcgccatatattatcagttgtacatttcaacatattcgaatttgtggaaatgtccttctggattaaattttgtagccagctatgtactctctatctgatagaagtcttagtctctcatatagtattaactttacctccttgctaatgcagtctctggggtggttctgtcataaatctaggaacca

SEQ ID NO: 4574 - DNA, 669 bp, Zea mays
  Intron number 1 from transcript GRMZM5G824574_T01 (locus G RMZM5G824574) derived from phytozome v7.0 (chr-ID 9; pos 1 0131069 to 10131737 reverse strand)
gagcagagccgcctgaacttccgcctgtagtttgggtcagtccgccgtctccactgcttcgaacccatacccatcctcgcatcgcattgatccgggcgtagaacggctcttggaatatgtcgactctgcgacgtttgctttgattttcaagaaccactcaaacttgatcaatggcttctccttgctaccgaagaggctgttagttactgaatcttgatacaattttttttggcacatcgtgggctataaaattactacatggtcttggggatcatgggttctgggttcttgaattctttatcatttgcatttccttcgtcttatactcttatcagcggatagttcttgatgagattagacttgctcgtcttcccatttcgtactagctatcctcaacctgtcttggaattaatattgctaatcagttcaagaaactacaggcggaggttcaggaaactaattcctcaacctgtcttggaattaatattgctaatcagtgtagcctgcttgttttgctaatcagtgtattctatgtctgaacattttgttctgatcgtaacgagtattcagagttgccagtgtagtctgcttgttttggtttcctgaacactagtggtctgttccacggcaacagcctccagcggtgcccatcggtggcccgatccgccg

SEQ ID NO: 4575 - DNA, 513 bp, Zea mays
  Intron number 6 from transcript GRMZM2G094039_T01 (locus G RMZM2G094039) derived from phytozome v7.0 (chr-ID 8; pos 1 40505249 to 140505761)
tacgaggcattatagggcacctgaaataatattaggtaaattggttatttttgaagatttgattcagttttatcttgtttgagatatggactatgataattcagtgtgaagatttatgtgctcttaaatatgctcgatagagtaaaacagacatcgtccaaaatcttagcaaagtcttggcacatcctgattcatactcttatttactcctaaatgatgtgttttaatcaaatctgaaagaaacaggtggtacttcttcctctttgatggtttggtgttttctgcacatatttagttttacagttgatggttgagcgatatcgcactgtattgttgaaattgattgaactgagttctatgcttgtgtgcagaataagagttagatcttttatactatttcgttagtggccatgtcagctatcatgatagttgctaaaggtttcttctccaattctgtatgtcattagttctgatgttggatgtttcttttgcaggtttaggctggagttttcc

SEQ ID NO: 4576 - DNA, 1015 bp, Zea mays
  Intron number 1 from transcript GRMZM2G416992_T01 (locus G RMZM2G416992) derived from phytozome v7.0 (chr-ID 6; pos 8 4552149 to 84553163 reverse strand)
aggttctagggtaatctcagtgagccttacgccatgttttcttatgatgattttgcatgtcgaaaacacaaaacaatttgaagttgtgtaatcttcacatgactaggtcgatatttatccccaaactggtacctactacgttggttaaagttcggttatgcttggattcaaaataacacgatgagatctgctcttgtagataggctacgatttgttactgtctcattttttgctactagcttctaggaaacagcccacaagattggtttggtgatagccaaatctttaggcggtttcaaaccatggtcgcgtaaaagctcttgttgattctgctagagagaaatacttgagttctgaattagtgcaaatgcctgttcgtatatatctccaggatcacctgtaatcttctcctttttccttttttcttttcctccatacgttgagcaagattgtttttgtagttaatattcgtcttgttgtgaagggtgcggatatggcaagactctttgatcttgtgttatgatgcttctctacttgatacttactcatctctctcgtcatctatactttatggtgcacatcatcatcatatgttcatgtatgagagaataataccttttttatgtggattctgatttctgagtacatacgagagttggaaacctacaacgagaagatgtgaatgtgatgttgcatgtctgctagctagacctcatcttggaataggcacagatcaagcgcctccacctgagcgactggggattactaatgaagaatcaggtgtgtacatcgacaagtttatattcatataatatctttttatttttcataaatctgcttttgatgcatgaaaaatatgatagctgctctttgttcctattttttgaagccaagttaagcattattttgaatgaatctttatgtcacctttaagagattatatgttgcagcctaataatatacaatataaaggctaggtgtttttttgcttttagtttcgtttcaaaacaaagca

SEQ ID NO: 4577 - DNA, 255 bp, Zea mays
  Intron number 3 from transcript GRMZM2G384871_T03 (locus G RMZM2G384871) derived from phytozome v7.0 (chr-ID 8; pos 5 5612957 to 55613211)
gaaccaactggagtaattatcgtatcatctgataggtaatgaagactccatgctttgatgacattatttgtcttgtctaaaacatgcagtttgtggagtgctacagtagttcttttgctaaacaggaatatcaacgtctcttgattgatagttaaaatgaaaaatggtttgaagttgcgacaagaaagaataggactatgtttgctaacaatgtattggcatttttactttcagctctggtgtcataccatctgt

SEQ ID NO: 4578 - DNA, 724 bp, Zea mays
  Intron number 1 from transcript GRMZM2G180639_T01 (locus G RMZM2G180639) derived from phytozome v7.0 (chr-ID 6; pos 9 8072436 to 98073159)
accgcgccacaggccgctccaagggctacggattcgtgagcacgccttcctcctgttttttttctttctgttcctatgtgctatgctggtcgaggtgttggccaggtttgattctggagctgaatgtttgttgtattcgaatatggagacgaatgtgtgatactgattctgtatgcaaagatgaactttgtggtttgaattgggagcttttgtgatcatctgtggatgctgttgtggcggtggcaattggcagtggaggtgttagaatttgggagttttgcattccgtatgcaggaatcttgatgcagtggaggtgttagaatttgggagttttgcattccgtatgcaggaatcttgatgggtgttgacttattaccaataggattgagggaaatagttaaatttgttacctggagccagtgaaagatgctgtgataagagcatttctagggtttatgtgttcaggctttggaaacctagttcaattttgtgccatggaattggaaaagaaatttagcattatttcttgtatgaatcagggaactatttgaatttccatgggggtatggtgaaaaagaacaccttttttttttgtgtgtgtgtggggggggggggtccaaattcggttcagatatttcgcctttttcctacttttgatttgattcactttaatcatgtgtggaggtgtgtataggtaaccttccaggacccagagtcggcgagg

SEQ ID NO: 4579 - DNA, 524 bp, Zea mays
  Intron number 3 from transcript GRMZM2G162699_T05 (locus G RMZM2G162699) derived from phytozome v7.0 (chr-ID 6; pos 1 56440944 to 156441467 reverse strand)
tcacccttccatttcttcaacaggtaatgtttattctactgctttagcagaatgccagcatgtctttaactctttaagtatgcaccagaatttagtgcatgtaacctgtcgaacattttgatttgatgatgacaagaacatagtctgggcattcataatgttgacttatgcaatggtaaactccagatgttttaaaacttgatactgttccatatgcattatggagaaaacactaaacttttaatatctagagttttattaactctttgctttgcacgtcatcattacatcttccaaagcatatacatttgttgtgttgtgtttgttcccggtatgtctagtggcctggaaagcgttaactagatactgatgtttctaaaattgaaaacgcctggcatgcttttgttgactattttcttgtgctaccattattagaaaacagaataagagtgtcatatttatttgtatacatatgtgttttttgagcagtgtatcagttggtgctgttgcaaattgccttcctc

SEQ ID NO: 4580 - DNA, 703 bp, Zea mays
  Intron number 1 from transcript AC209860.3_FGT002 (locus A C209860.3_FG002) derived from phytozome v7.0 (chr-ID 8; po s 107445928 to 107446630)
ggaattgaggcgaacacagctccgaatttcccagggtagtcaaaatgacccatgatcattatagaaaacataagtattcacattctgagatataaaatagcaaaagattttgcactgttaaaaaatgagtattctctgtcagataatttcatattctaaaagggagcacggaggataagttggaactgaatttttctcatcagcatttagcattagttattttgtaaaataagttgaaaactgataatacttgttgtttggctaatgaacaaagcaaactacagaagtccgtgtggcaaaatatcaccataacactaatattatattgacaatataaatatgcaatattattatagatagactgactcaaatagaatgaactaatgtcgaacaaacattataacatcgtacatattatttctaaagaatcgatatataattttggatgatagacaaacatatcgacaatcgcacaaattccttgggaagatcttgctccttttgctggtcacttgaacaatgtgttttgttcccttctctgatcttttgctttttcttgtaattggtggttcacctgtcccttccttttctgttgaaatatacagtttcaataccatagttggattcactgattttttacctgtcaaaaaaggcactatagtttctgttattttcaattgttgttattgtcctgcagtgctct

SEQ ID NO: 4581 - DNA, 971 bp, Zea mays
  Intron number 1 from transcript AC200662.4_FGT001 (locus A C200662.4_FG001) derived from phytozome v7.0 (chr-ID 3; po s 206609463 to 206610433 reverse strand)
gtggtcagttgtttccaacggcctagctattgcaactagggttttggctccttggtttgagagcaattaactgatgcattcctcaaaccaaacaccatatatctgtatctggcatcctagataggttattctatgaatcatcttatttggttttaacctgtataggcttctactgcttttacaatatttttatctttatagattggagctgcagcagtccaatcagtcggttttaatccgaagagaacatgacttttaaattgtttttcttcttttatttaatgcgatgacgtgtagttctcctatcgaaaacaaaaaaatagggagaaatgtttcatccattctaaattataagtcaatataatttctttagaatcaaatcatctcacgtttgatcaaagttatataataaaataataacgtatataatatcaaatatccatggatgtggcgctcagttttgtatggtatcatatatgttattaatttattgtatagtgtactatataataaaaccatctcaagtttgacgaaaattatacggagttacaatgacttacgataaaatttttgaccagatttataatatatctaattgatatcgtaagtcttggtaattatcttctttttttgcaaaacttaagatggtctaaatgatttataatttagaatgaagggagtatttacatcctatgagaaatgactcgttactgttagtgggggtagaggtggtgtggggtgttttgtgtgtgttttttgaatttgtaactcttttttctccttataatacaatgatatatctctctgtttcatgcgcgcgtattccataaaagaaaggtctatcagaaagctgcaagggagttgtctttatagctctgtcaggattggttgataaaatgctaatagtttgacctcgttcaatgatcgttaaatgtcagtgatagtttcaccttatttattcaatgatcagg

SEQ ID NO: 4582 - DNA, 639 bp, Zea mays
  Intron number 2 from transcript GRMZM5G830771_T01 (locus G RMZM5G830771) derived from phytozome v7.0 (chr-ID 2; pos 1 3858905 to 13859543)
gcctggagtggttgtcaacaagaccaaggtttgcttttctgaaacgatctttctgtgcatatgctctaatacttgatgctcctgccagcgattctgcaaaatggtgtaggattggagccctttgaatttgtgataaacgagccaactctctcgctgttggtatgtagtagcgctgcatacatacaaaacatgaacacgttcagcattttgtgaaatgggtaccaccaaataaaaggaagctactagtgaatcttcctggaattcaaggtgcaaaaaagcaataggaaaaggctaattgtaaacagaagatcatttttaagagttcatacttgacagaggaaacagatcaccgtcaccggaacaaagatagcaaaaactggccatgcaacttgtgacataacaccaatggtccccagaatttgtatgattgaaaacacacaccagcctagcttgtttgctatttctagatctagaacactttggtcattagaggcctgttccatgcaaaaaataataattagtttaattgtgtgtacgcatgtgacaaatgatgagaatggtcataaagttaaataagcactaaccctgttcaaaattctaccagtaggtgtggaatcaaagaaggacattggggcacgc

SEQ ID NO: 4583 - DNA, 612 bp, Zea mays
  Intron number 1 from transcript GRMZM2G077780_T03 (locus G RMZM2G077780) derived from phytozome v7.0 (chr-ID 1; pos 3 284837 to 3285448 reverse strand)
acttgtaacaaagaggcaagctaccatttccagcattgtgagctataacatttgacatacattattaatttcctttctcatagtttctgagatgcttttggatgttgcaaacaggtgaattcatttcttttgaaacctgctcgctaaattaagaaaacatgattattctgcaaaaaaaaaaactgatgtgcaggatgctcctgattgtacattctgaatagccttctaacccgtaacccttaatctgtaatttgatatcaacactatgtttcagtttctactttgatgtatgctagtaactaaaccagttatgtggtagaaactgaatatatattcttgatcatacagttcttctatccttaagaaatcctagtattcactatttgttccatgttgaaagtggatttacagaactccattgatcaatcttctagtaacatgtataatttagatttgaaatgtcaaatgtgttctaaactctactccttaggcttccttgcttcctgttaggcatatttctctaattgcagatgcaccttttgagatttcggtttgtgtgatcatgcttgccaatatattgcagctaagcttatatgaggatcttgtggcagc

SEQ ID NO: 4584 - DNA, 831 bp, Zea mays
  Intron number 2 from transcript GRMZM2G040161_T01 (locus G RMZM2G040161) derived from phytozome v7.0 (chr-ID 9; pos 1 43894969 to 143895799)
ttcgatctcttcatcgagttcaccgggcttatcaggtgcacagtcgtcgtgttgcgtggacttcgcttcctatgtgtttggctgtaccggtttagctccagcatttttgtaagtggcaagtttaacgccagcatcaaattagtgctctcagcgtttctctgcagactgccgagtgcggtgtgacgtgtgagtatgggtgctttgttcagctaccttaagggtctgtttggatatacatggctagttaccggtttggataaaaattagctatgattgtccagctagttggcaaagaactagttgaagtaactaaaaaaatactccatatatctaccttcctgtttggatgcattagagctattttgagctaaaattagctagctaacagttacctcatggtatccaatcatacccttattgtgttgatcaaattcacaatgtttctcacgggattaacagctgctgtagagtgtttccatgtggtgcccataccaatgatcgaccgggcttgtcagatttatataattatactagtggctgaacagtattcagtgttgggctagtagcgtgaatgatttggtaccatgttgataaatttggccattattgcgatagttttctttactatgtgatgattaatttgtataatgagattacataccttgcatgtgtactgcataagctatatgcagttttatcattttatcaacactacatgcacattccttaaaagtggaacatcacatctgaacgttcttatagtccttgacacaacgtgctcccacttaaaccatgttcgctatgcagttggtgcaagggagcttctattgg

SEQ ID NO: 4585 - DNA, 994 bp, Zea mays
  Intron number 1 from transcript GRMZM2G310115_T03 (locus G RMZM2G310115) derived from phytozome v7.0 (chr-ID 8; pos 1 71389971 to 171390964)
acgctgattgcattggtactgttcttctcctggtaagtgctcatagcttgcaccttttgtttgctgtgactgtgagcaaccaattccaattttctcccctttcacccgtccgtctagttgtggatttgtgcgctgagtggtgccctgccaaatccatcaggttcttcagcctggaacatggatctagcaaacaagctggtgtacccaccccacaaaaaagaagtatttgctctccataattcgactttgagtctgacatggatattctgagtccagtttttgccatgctctaaccaattttttagatgtccttgtgctagataacagctatttgtattttttactttaaaggttgtggttttatcttctaaaatttgatgtaggcatgtagccatagtgtttctagttgtgaggctcacttctgtccctactccctagtccttaagatgccaatttcgtaaggtttaacgagattctccttccaacccaaaatacacgacgttttttacttttagacatcgtgtttgattgttcgccgtattcattttttatgaatattatttattttatcctgacttattttatgattagagatacttcaataatgacttatttattttcttatttgcacaaaaaactgaatactactacatggtcaaacatgatactaaaagtcaaaagcgtcatctattttggtagagggagtagatgctaggattagtggaatttacttcctgatataagtgttcagcttttggaatctgaactactgtgatgagagaagaattggaattggttcaagtttgaaatcttcactaactttagctgtgccttgttttatgtatccataaacgatataatactactgcgtacaagacatatctgtcaacacctgatttttctgtgatgtgcttgtagtttttcaagtttttggtatgtataaagtactgaggatatatatgttcctggtcaatttgtcatcagatcaccacac

SEQ ID NO: 4586 - DNA, 751 bp, Zea mays
  Intron number 1 from transcript AC191264.3_FGT003 (locus A C191264.3_FG003) derived from phytozome v7.0 (chr-ID 7; po s 150156778 to 150157528)
cctcctgcgcgtccgcgtcggttactgcctgactggtactactcgtcctgccatatcccgacctcctccaaatccaaattcaccgtcgagctgttgcttcgtcggattattgcttcgattggttcgctaatgtagctgcttcatcgaattattacttgttttgattggttcactctgttgcttcgtcgaatggttgctttgatttgttcgagtaggacttttgcagttagctattcggttcgagcgttgcattcctttgtgcttgatttattcttctaggatttggggttctaagaattagcctttggattatctctgtacgagcatcacattgtgctcgatttattcttctaggatttaggggttctcaaatctaattattactcgtacagagatatcatatatattttaagtattactttcctttatttatcgtaatgacagaatatggattttagatgtataattcaggggtttattttaaataatctttcaaaatggtagatctgattaatatcgatgcaaattcgcggtgttaaattgttttaagtatatgggttgtttttctgtatgtacagtgtgtgcacagggaaaaatacagtgactaccctgagttagatgtttaagggaaattactgtcatacattgcttttgatgtacgaagggtctttacactaattatgccatgttcatgtaaaacctgctttttgctgtgctgcaaattttggtggaggtccagcttttagatcac

SEQ ID NO: 4587 - DNA, 591 bp, Zea mays
  Intron number 1 from transcript GRMZM5G807064_T01 (locus G RMZM5G807064) derived from phytozome v7.0 (chr-ID 3; pos 1 68922073 to 168922663 reverse strand)
tttgcagtttgcactccagactgatttcacttcaggtgagcacgctcgtgccgtgcggtctctgactgaacacacctttctgtttcattctttcctctgctgccttcaaatcttctctgtgatagcccgaacggccggcgtccaatcgctcaaacccaaagctggatccctttgatttcttcttttcttcccccccggaatccgggtaaaggttttcaggtttcgtaaagaacataattttccttcttcctccttagacgccacgcggggaaagcttgaacgcaatcaatcatgcgtatatctttctttcggctcgttgttggtatccatattgctttttttccccttcagtaatctggcagctgcttttaaagaacagtgcagtaaccagcacacaggtattattatcaaaaaaaaacagtaactgtatttagaacgaatttattcgcctctgcttttgcttacctctcttgtgggcggttatttattttagcttcatcctcccgaacctaaaaccgcgctacggacgggacggtctttaatttccagctaacgttttccctttgcgcagcccagagcaggaggcagttg

SEQ ID NO: 4588 - DNA, 754 bp, Zea mays
  Intron number 1 from transcript GRMZM2G045944_T01 (locus G RMZM2G045944) derived from phytozome v7.0 (chr-ID 4; pos 8 0167043 to 80167796)
atcggcctctgcgaggggatcgtcactttcactaggttgccttcgctctcactcatttttattgtgcagttggtcgcaatttgaaggtcttgatctgctcgtgctcctcgccaacaacagcagcagcatcttctgcgtttaggaaaagaattgcacccagctttctagagggctacaacagcatctaagcttatagcatcacttcagtatttcaaatccgtagattgctcgagtatgcaagtttgggtgaatcgattttgttgcatgtgatccagcttaggttttttcaagcaagaacaattctggacttgattagtttttttggcagcgggccaatggcgttggttcctaagttcacctgtatgacagtggcagatctagaaacatctagccttttaatagtaataacatttgtaattttgtatagtggtttattttcacatagtgttcacagttcacatattcatgtagatctctagacaactgcaaatactaatggatgattactcagactgacatgggggttaacatcagtaattggggcccttcataagcaacatctcttttgtggtcacattatgacttccgtttgctctttgatagtgtattctccccaaattgccatccaagtatttcctgactctatacttttgataattcatttattgcctaatattgctgggttccacatcttatttctcaatgttagttatatgcagaatattttccccagaagaggattgcgaggttatag

SEQ ID NO: 4589 - DNA, 860 bp, Zea mays
  Intron number 1 from transcript GRMZM5G898314_T02 (locus G RMZM5G898314) derived from phytozome v7.0 (chr-ID 8; pos 1 63113482 to 163114341)
gagttctggggtaaccagttcgctctttttccctcgctactatccttgtctgcgcacttcgatttgcggctcggtttctcaaccactgctcccctctgatcggttgttattgactccgtcttatgcgtagtaggtggtttttgtttctagacagccctgatgtcagtctatacactgctttatgttactattgtaattgaactgaatttgcgatggagttggattcagctcgttgtgttgttggtagccgtctatcatgcaagtagtgttcttttttaattgggtaatgcacccgaagtaagttgtttgaatgtcactttctacgtttttcttatgaattttgatctagtatgtgtgggtctgttgtctgcgtgggcaggtaccatgggaattctatcccccctcccccctctagaatgattatattgtgttgatacatatatgtacacacatggtatgtcattggtgggcactgctgatgctatgtactgacctaaccattgatatagcgcactgtacttagtcactatctccaaatttggccaatcggttttgccatgtggaagatatggtcagatttctgtggctgtccgccctgtatggtgcaatttgttatgtgtcttagtgttgtaaaaataccatgagctgtaattgtgacatagctaacctatttataaagaaagcttggtatctgataggcacttgttggtattagctataattactgtttgtatttggtagaaagtgcattagctagttttctttgtatttatgtttctttgcccgcaatactaaattaaagaattgttttttataatcatataggtgaagaagtgaagccaggagccacggtttcttgc

SEQ ID NO: 4590 - DNA, 984 bp, Zea mays
  Intron number 2 from transcript GRMZM2G161832_T01 (locus G RMZM2G161832) derived from phytozome v7.0 (chr-ID 8; pos 5 6880493 to 56881476 reverse strand)
gtattggcattggcatttccccgcagggttagaagtacattgtagagatcttgtttcagtaatgccgcatttaataatgtgcccattttcatgatctgagtgttcatctgttcatccatctatcacctgtttcttgcttttttgttctttctgtaagctatcatggcatagtagtttatgcagctgtagatcactagcttggcagcgacagagttccttgtgagacctcagagaacctgttcccgtgtatctccatcatattgttgttccttccatgagtttaggtgtcccttggtccattctgcatcattttattatatgatcataagtagaagaaacatagggaaaagtgtaggaactgaagaaatgtctcttagattcttggtgccaaagctgaggacatgttgatattggggactgctttccactgacattgttctaattgttgaatgatttaattttgatctcagttttacttggcatctaaaatgtttgtgcagcaagttgtcgagaaaacctagtgtacgataggcgacacagaagaattctacgtgcatgggtgcattgatgttttcatgcatgtatattgtcgttttttgagcgatacaacattaattaattaatgactattttggcctgctataattttcgtttgtgctactgaaattatttgagcaggagatgtatttattgaatctattgtgtttcttccttctatatagttctttatttgaattgcgtgcaattttattccttgttacaacatacagacatacatggtatatactttttgaggctagaagctaacagatgctcaagggatcctttcaattaagattaaggtttctcttagacaacccatcagttagcgctaaattcactttcctagcacctagctcactgcaccagggaaaaatatatcttgatctagattttatatttagtttgcaaaattcacctcattcctttgtttttctcttgcag

SEQ ID NO: 4591 - DNA, 534 bp, Zea mays
  Intron number 5 from transcript GRMZM5G870572_T01 (locus G RMZM5G870572) derived from phytozome v7.0 (chr-ID 4; pos 3 3702471 to 33703004 reverse strand)
gtggagagacgggttaaactgttgcgagaagacaggtaatgtgggattatttgatatatacagactatttcttttggtctcagaaaaaatgaaattctggtgatagttcactattacgggcacaaatttgacctgctagaatttgttgagctcatttacattcttttgtgatttcagatatttggttgattagtgatatttaatatttcctttttgtaaagcatgagtttggttttccctatgctattgtagatagtttttcttctatctgttcttctcatataattctgatgatgtttctactctgttttttaattataccattgattttaatcactttgatcactgttattaatgttgaggaacatgctacatatttggtttttgaaagtccatagttttttagataaaacagtgcaaaaaaaatctgctcatacacaacaaaaggcaaaatgttcttgtgtttctcagttttgttgattaacatttccctttacagcgaattgcagaaattacataagaagtttgttcttg

SEQ ID NO: 4592 - DNA, 957 bp, Zea mays
  Intron number 2 from transcript GRMZM2G135062_T01 (locus G RMZM2G135062) derived from phytozome v7.0 (chr-ID 7; pos 1 1799439 to 11800395)
cattttgttgtcgaactgagccgaattaactccatgtaagtaccctatcaatgtggatttttttattactacagatcattgcaccttcatttttcttttgaaatgtattaatttttttaccatcagaaaagttccatagttttactgccagggcttatcctgcttctgcagaaggataattttttttctttcgagcatagtattttgatgaattttggcacgaaggataaattttttaccatcagaaaagttgcatactgttgcaccttcatttttcttttgaaggatatattttgatgaattttggcagaaggtgttgataagaaatcaatttgaagtttaattagcttcatgttttgcagggaacaagcggtatttagttgggttttggaaggaattttcgcattgaatttagcttattagtttgttttcttcagcttggcatcaactttaaacatctctgtggtagtgtggagtcttttatagtgccatctatttctggtctcatatataaccaaccatcccagttaaccctaagctactagtttaatcacttcactgtacaagtaaactacgccacaataaaaaatgttttttttcatgattcattttttttgaaagaaaagctgaggaaaacccccgcagcaaaaaaatattaaataaaaagatgcaagccagaaaacaaggttactggacgaaccagagaggcaaacgggagagagagagtgggagagaagggagaggaagaggagaatcagctatctagagtttagccatgatagaatctagatttctttgttgatctcttcagatgtacagtttttatcttttatatgcatactttattgttatcatctaaggaatgtcgtgtctcttttcttttgaggggattgctattctgatgctgctcatttgttgacagatttgctaaaagtaagagacagtacatagaagcac

SEQ ID NO: 4593 - DNA, 619 bp, Zea mays
  Intron number 4 from transcript GRMZM2G135062_T01 (locus G RMZM2G135062) derived from phytozome v7.0 (chr-ID 7; pos 1 1800736 to 11801354)
atctttcccatcaagtgcaggaatacttatctgaggtacatttgttacaagatttttttcattgatagaacatgagcaccctaagaaggtatctgattgatctcaatagatgatgtgtagttgctaggttacattactagaaaccttggtttgattttttttgcctgtcaactgtcaagcactcaaagattttacaacagtgttgtaactcgttctatcaagagctcttcctgttttagctgaattgaattaacaaacagtgaagcgaaagattttccaaaaaaaaagaaactaatagtcacatacttaatcaaaatcgtttccacattctgaatgttgtgttctagtgttcttcatcctcgactccaatacattgttttgagatatggttactcaatgctctgtttctcatagtttatctattcctgagtcaatttctggcgcctttatcatccatgtagatgtcctactgtgctttacttgggtgagttccaattgttttctggtggtgtacaaagttaatgtctgtattgatcattgtttctttgcactattaacttctttatgtattgccctttattcagactgttacaggcctgtgtgcagaccttgctcggct

SEQ ID NO: 4594 - DNA, 788 bp, Zea mays
  Intron number 2 from transcript GRMZM2G040920_T01 (locus G RMZM2G040920) derived from phytozome v7.0 (chr-ID 2; pos 1 1358799 to 11359586)
tgccatttgaaaggttgtgggaaaagttctttgaggtaaacatcccctgtttgttctgctggtagattcatgcattcatcatagcccttgcaaagtgaatggctttcataactgatattggccctttgcatatatgctatacagctaggatttcagtagaaccacctctgagattcaaacactaatattgtatagtagttttcttctaatacaactaggccttgacatgtgagtgtgtgtgggtgtctggtcgttcctcctttgcttgtggtgctggtgcatgtgtctctgtactgctctgctgctggttgtttgtaggctgttttgttttgctcttttttccctgcacacaactggctttgtatctcatatttttatccattcttagtacaataacgtgctgtgttttcgagaaaacaaaaatcgaattcgatacttctatatgaaggatgtaaattttagaatttaacaatcattcaagataacaaacaaggttgatcttatgtttcggttcagttcttttcttatttcaaatcgttcacaactactatagcctgaaggctgaagccactctttgtatgatgttgtaaaaagacctctattattgcattactaatcaggatcatttattgtaacttcattttgtaacagctataatttaatgctatgtcctgagcattaagtttaaaagtacaatatgggtattgtgaaggcctgctaatctattgtgtcatcatctttagctcaaagtcagtttctccatgacctactgtattttctgtagggcc

SEQ ID NO: 4595 - DNA, 919 bp, Zea mays
  Intron number 1 from transcript GRMZM2G077705_T01 (locus G RMZM2G077705) derived from phytozome v7.0 (chr-ID 2; pos 4 7613902 to 47614820)
ctcgcctactcgcatcaaaaagactacatagtataacctaaattaacatcacatcaaacatgcaaataaaatatacagtaaaaatctatacattaaaataagttcattggaactggaatcattaaatttggagttatatatttcaagttatgaatttcctaagatttaatgtgcttgaaatgggattaaatgataaattaattttctaactgttttcatgtcaaaacagagacactaaatggtagagaatattattacaaaattttagaaattgaaatggattaatttggagttcatatgaattttctatgaattatacaagttatagtaattatttttgcactaaaaatctatttctaattacttttctctgattttccaactttctggactaggcctcgaattccagaaaagtcaggggctagcgcagaaggttccctagacccagtgaacacctcactggacggtgggttatttttacgtaaaccgagggactcttatgcaatagtttctgggcgaacgggtatcggccgattgcaaccgttggatccacggccgacgcgccagattaaacctaagcttatgcgaaccggtacgcgccaggggccattcgatccaatcccgacggcctggatctaattactctacatctgatctccgccggatatcatcagatcgacggttctcacccaaaccggcgaaacgatcacctagcttctaatctgggccatccccagggagatcaacggccctcacctgtcttcaacctcccgtgccggagcacggcggcgcgcagaccagggcggcgagtacgacggcaacccgcccaggcgttaccccgcactaacctaagatacggatagcacaactcgaagctaacacgatggcggaacaggggacaagatgcataccgccggtg

SEQ ID NO: 4596 - DNA, 955 bp, Zea mays
  Intron number 1 from transcript GRMZM5G895394_T01 (locus G RMZM5G895394) derived from phytozome v7.0 (chr-ID 7; pos 1 36945762 to 136946716 reverse strand)
tccgctcccttccatcaaggcaagcagtcaggaaggtaagcaaacaagctatgctagatttgcaattttgcataactgataactgacaccttgaactctatgcggctatgcggcagtagttgtttataatgtagttgtttattagttgattttgtcatgtggtttttggccccctgaattccgtccgccactgttttagattaataacagaacacagacagcgacaatctttaaaacaaatataaacatagttcgtacataactcagattaaataacatggatacaaaaaatagtgtgagtatagctcgtacactagtcacctcaaacaacatgaacataaatcggtagttagattaaacgtgaacagagacactgaatcatgaggtgtgtatctttcgcaagaactagatttttggagacctctcgaacagcgcgtgtacgtagacgctgtgatggagaaactattgataacgcaacaaccaaaagagaaaaatactaattcaatactcacacgctatatattgctaattaatgttgcgcctttcatctttactcgtggaatccattagaagacatagatattggacctttgagatttattaaaatttctacatgtggtcttagggaaactagactatatagattgtaacaattgccaccatatctcagattctcagtgtaaaatatttttcttctactattattataaaagaaggataataaatcaagatacaaataatattgttattaattaactaaaatagaaaatagaaaatttactaacacattgtgagggggtgggactataggaacagtagattaaacaaaaataaaatatgcataaaatatttgagaatatataactgtaattgagtttctgtaatatataactgtaataaaatttctgtgtttcaaacagacatctgaccgggtcagacgatacagcccatatac

SEQ ID NO: 4597 - DNA, 608 bp, Zea mays; identical to SEQ ID NO: 4431
  Intron number 6 from transcript GRMZM2G135568_T04 (locus G RMZM2G135568) derived from phytozome v7.0 (chr-ID 4; pos 3 9602036 to 39602643 reverse strand)

SEQ ID NO: 4598 - DNA, 986 bp, Zea mays
  Intron number 1 from transcript GRMZM2G047474_T01 (locus G RMZM2G047474) derived from phytozome v7.0 (chr-ID 2; pos 3 376785 to 3377770)
acaaattccggtccctggctgctgactctgtggaggtaatcaaattatattgcagaatttgtagcgtccgtcaaacgttggatgcgtttgttctgtatctagtgtcatcagtagaatatgtgcgacattgttgttaccttgttagttcatagatcatacataagtgtagaaaaaagtttctattgttctgtttatacttgtttttttactgatcatgacttgtagcctaatatattctacagttattcattatctgttaagtctcgtttgtttcctttgatttagaggaattggaatcttactgatggaataggctatttttttagaatgtgacattccagcactttccagaattatcatataagcatatctcaaattcatgggttgatagatggaaattgattctataaatttaaatgctatttttccgatacacaacttatagcacactcttctacttgcttcgctataacataaatgtagtatataactatctctctcatatgatttaggataatatacaaatatattacatacataaatatagtttgaaatttgtctccagattgtcctgtttctgcaaagtatcagcaaattatgtaatgttatatcttggaccttttctttggtacttgatggaatgacagttcagaattacctctaaagaattctggtagaagttgtccagccacagattctacaatataatgatgatcgactaagtccactactgtgggagttggggtttacatacaaaaaaatgtgctctggaaacagttcctgcgctaggtttgaacaatgtgaaattgtgttgatgatattctcttctagataaatagatccttatttattttgccttttttaaggaaccatgcctatatttttttcttcaactgaaccttttttttgttatctcatgaattgactggagttcttactcgtcacaagcaggagagctctgtttcaactgttagcacaacctttga

SEQ ID NO: 4599 - DNA, 911 bp, Zea mays
  Intron number 7 from transcript GRMZM2G144873_T07 (locus G RMZM2G144873) derived from phytozome v7.0 (chr-ID 6; pos 4 800972 to 4801882 reverse strand)
aaatctggacctgttgttgctaagaagtaagagcaacttcaatagttctctaaatgactctctaaatcagtaatttagatagttagcacaaaaactcctctccaacagctctctaaattaacttcctaaatttagtcacttctcatctaaccctattcgtccctacatttgacaaccctttagcaagtcccgaaacaaaaaaacaggcacggatgctttcgaatttcttgtttttggacagtggacattcacttttgctttatgttggagggttgctaatttaatcgtgtattgctagctatatgctcttcacaatatttaacatttggcagattctagtgcctaggttatttatgtaatgaacgtgcccaggttatgcgatatagataatcagttttattctccgtctttgactagaatagagaatatatatactttcgtgtccaattaaactgctggaggatagaactgaaaatcgcttttaagttgtgacgtacaaaaaatcttctgggtctattttaatacacaatgtaaagtaatactaatacattggtcaatattgtgtccgcaaaaagatttcaaatttgatttactacctaaatataaggaactgttggagatcaaagtttttttactcctaaaccagaatttaaggagctacttttttttaaagaactactggagttgctctaacggtccatatttgcagactttcttttccacatattatgacttttatttacaaacgtagttcatctccacagcagctgagatcgcacttccacatttactcattataagggcctttcttactagcaaatcactaacaactaatttcatcttagcaacacttgttttcagatatgacataataaagttcctgtctaatgttaacagtgactccaagtatt

SEQ ID NO: 4600 - DNA, 138 bp, Zea mays
  Intron number 2 from transcript GRMZM5G843237_T01 (locus G RMZM5G843237) derived from phytozome v7.0 (chr-ID 2; pos 1 53031753 to 153031890)
gaaggagctaaacattccagtaatcaaggaaagtatatatatcttctcttttttcttggtgggttttttctggcattattagggtcgtttgaattatggattgtttggatcatgaacatatctaattaggcaaaggtg

SEQ ID NO: 4601 - DNA, 883 bp, Zea mays
  Intron number 1 from transcript GRMZM2G108699_T01 (locus G RMZM2G108699) derived from phytozome v7.0 (chr-ID 4; pos 1 73025475 to 173026357)
tgctaaagtttgcacagattttggtcccaactttggtgagatttcaaatgcctttggtgtttgcctcggccctttgattgcaatagtatgaactgttagtgtattctgagtgctaccatggtttaaacttccccacatccaagcttgctaaatcttatttcattccatgtcataagaagaccagtaaacccatgcccctaatgtacaccaatttaaccatgcaaaatctgtgaaaatttgagtttcacactcctaatgagtcattagctacaattttgtcctcccttatggtaatattttgcctggaccctgaccttaacctatgaacattaaggagcaactgacaagtaaataagcagtactgtatgttcccttcttttctgaacttgtcacagtgcctggggttttcctaatcggatgagcaaatatatgtttttcattgggaacttgatcttgtctttttagaacatcagagcagcctacgtgattttcctgtttatacaaattacagaggcagggaggaggcgaaaagcctaattatttaaactgttgtatctggacatttaggatgtggatttatagttagatgttgggtgcttattgacctagagcagatgagtatatatacctattcgtgacttcaggacttgaactacctataaacatgcagatattgtactaattcatgaatacggaaactgtttcttttcagggtattgattacctgaagtatgacaactgctacaatttgggaataaagcatcagaaaaggcaagacaactcatatatcttcccttagtgttgatcacagtttagaacacacacgaccttgacatgtgtactaaagtttgtttaatggtgttatatttgtagatatcctcct

SEQ ID NO: 4602 - DNA, 873 bp, Zea mays
  Intron number 1 from transcript GRMZM2G445854_T01 (locus G RMZM2G445854) derived from phytozome v7.0 (chr-ID 4; pos 5 955544 to 5956416)
ctggcaagggacacaaccattgagaaagaactgtaaggatgggcggacgggagcagacatgcagctgcattgaggagcggacgcgagagagtgattaaaacttttgacagaattctatccagtgcggctctgaatatgtattgaagtggtctatcatgccggttagtccatatataacgctaacactcgtataattaggggatgtttgaatgcactggagctaatagttagttgactaaaaattgctagtaaaattagctagctaacaaatatctagctaactattagctagactgtttggatgtattcagctaactttagcagctaattattagctctagttaattcaaacacccccttactcgcaatcggttcacattgcaatgacttgtggtgaagacagtgagaaccattggtggacaatgggtaatattgcgaagtaagtgctaaccattgtataggcctatgctcgccaccataagatagctagtgctcaacaaagtgtttgtcaagtgtcataatttgaattgatgtccatcttatgcacttttaccatgtcatgtacgtatactaatcaagataaaaaccacgctaaactttctttctagttgggttatagattgttaggtgatttgagttgtatatggtcagtgtaagattccatataagttgcttaaagcataataatgggtctcattcttgtttccttttgtccttcctttttgtttcgtatgtgtgtacctagctagctgagtacattgtttaaatggagagacaagaaaagtatgcatgttatatgttcaaataatgcttattttatttcgagaaaaaactaacccttttagtcatgtcttgttattattaggtcgcatc

SEQ ID NO: 4603 - DNA, 1008 bp, Zea mays
  Intron number 1 from transcript GRMZM2G174896_T02 (locus G RMZM2G174896) derived from phytozome v7.0 (chr-ID 1; pos 5 2154719 to 52155726 reverse strand)
gccgatcagcctgcgctcgggctcagcgctggaaggtgagagcatccagtgcctcggcccgcccgcccgccccgaatctggttcttgtgctggctctggctgtgcgctgcacgaactctgcatctgcctctttcgagacgcaattcccggaccgtgggctttggtttcggggctgcaaggccgctcgtcgttgcggcatttttcgtttcgcttgtcctgtgatgagagatgtgcatttccctttggcgggcttaccgttccctgctcgtctgtatgtgtgtatgtttgtgtgacctttccctcgacgccaggctcttctcccctcttgctgtttctttcagcagtacagacgcgcatctgtacaacgcctttcttcggtcctgggttatgattgatccgttaacagttggtcaccaagtgctggctgtttaatatgtactataagcttcttggtgccgctgcctctgcctatacgactttatgcgctgcctgcacaagtctcagccatctgtgggaacgtgtgtctctcacctacctttcatattgcactagctggattgaatcattctgctttggagagatgtccggtcattttttaaatcattttcatctcgcgtactagtttttttgtttttgtttttgcgagagagtaattttttttaatatttactgtctcctgtcccatttgctgtttctttacccagaaatttccaccagattcagtcaaacgaaactcatgtgctcttttttttctccctttcaaaagggtgtgtaaccgactaccgactcagataatataagtgcggtcacctatcacatgatatcatctcgcctctctcccttctctggtgttttattctcctttttccaaccacagcttgatgaacttctttttgggggtaactacagcttagtgaacatgaatgggtagttttacaactaacgcaacggctggttcactgaacaactgtaggtgttggaagagaatagcctgaaggttcacagtaa

SEQ ID NO: 4604 - DNA, 706 bp, Zea mays
  Intron number 2 from transcript GRMZM2G701269_T01 (locus G RMZM2G701269) derived from phytozome v7.0 (chr-ID 3; pos 1 731225 to 1731930)
agatacacagatcatacctttttttggtggatcaggtttgcattccattacttatccgtgccattgagattgcatggggtgcatcaaaatctttatacataagatgaatcagcaaaagtttgtccttctgtatattttcttggagaatgcaagttttttttagataattgaagaaatatccggcttcatcctctaaaagagaggaataggaccaaaattattataagttaaaccacaacaacgaccaaaccaagtttataaaacaaatctgactaacatctcaattcttcaaataaaagacaacccaaaggacacgaagaaatgcacaaccacgttctccaacttgtagtaatcaaaatgtctcttttttttccagaaatagtggtgcccgccgcatgcttttgcagaaaccttttgttggactagaaaaaacacactgagccattgtgcactcttgctgaaatttgtgggcatagtacttgttggcggataacttatcattttcttaagattcactactaatgtcctttcaagactatataacatttttaccatgatataatactattatatatcttttatgtataccagattataatttgatttgttgcttacattggtacaatgtaactcatttgttccttttcatattggatttctgcgatttctgagcttactgttttccctccatgcagaaattgtgcat

SEQ ID NO: 4605 - DNA, 858 bp, Zea mays
  Intron number 1 from transcript AC193489.3_FGT003 (locus A C193489.3_FG003) derived from phytozome v7.0 (chr-ID 1; po s 177042616 to 177043473)
ccgccaccgacctgctccgcgctgccgcagccaaggtcatccgcgctgctggaccaccgtagttcgcaccgggttgtgcagcttctcccacgacaaggacatatagcggatcaacagtgaaccaccagctttagcggtcgaaggagtacgcctgtattttatcggaccttatagcgttcgttgttggagaggatagagagcgtatgaaacggtaaacatatcagacaggatgttttaccgatcgttgctggagacagcctaagggatattttgctcaccttatgattcatttaatactttttgaatatttttagtctttagaaacaaacagggtaggaattaaactttagtctcctgactaaactttagtccctagactaaagaaaccaaacatccctatagtaacgagttgatgcatcggaattgaccacacacggcgacatcttgtttcttgttgttgcatgcatatgcatatacgtatatacgtttctaccctgatttctcgatggtatgacaaattttgtagtaggttgagttatagccttataggtcaattttgtattaatctgtataaactcatatgttctaagtgtatactccatcatgtaaaggattgaaccctacatataaaggcaatgacattggtcgatctttttatggagggtacaacattttcagtcacctcttattctttatatagtaatcaaagtcgttaattagactcaaaaaatctagtcaccgtaattctacggctacctccttagccgtaatttttttagtcagccatactattgccaagaagctcagcaagataaaccgtagcccatgaaagacgggttctgccctagtgcaagaagc

SEQ ID NO: 4606 - DNA, 1002 bp, Zea mays
  Intron number 2 from transcript GRMZM2G157616_T01 (locus G RMZM2G157616) derived from phytozome v7.0 (chr-ID 3; pos 2 23757205 to 223758206 reverse strand)
ccccattcgtccgaggtggatcacacgccgcgcgcggctgaggggctgaccccgtggtcccaccagtcggcgagaagccagagcgtgtggtggcgtttggttgcgggtggagggagagcttacgatgacggcccacatgacagaggcttgggcgcggacgagtggccgatggggtgggcccgcctgtcggcgcgcgttcacccccggttgggccgaggtggctaagcgggtagaatgggccgagggcaaggtgaggaagtcgacccaacaaactcttttcctttttcttttactttctattctcctttatcttattttcaaatttcaaactgaatttttaactcttgttttgaacttcaaatttccaagtggcaaaaataatcttaatgtgaataccactccttgtgttggcaataatattgtttatttatttttcttttcttcctattatttaatcatagaagaaaacaattgactttattacaatttcctttctttttactcattttctgttttctattctcatttgaatttaaattatgattcctttgtttttgataaaaaacactttcaaatgtctaaatctttttagctaacattattttattatgaccatttactttagaaagaggtgaattctaaagtttaattattcatcaaggttactttattttgattgttattattattattattattattttctaactgatttccttatatcacatgcttaggatttcaggtgttacactctatccagataccgtatatttaaaggctagtttgagaacctcattttttccaaaaaaattctatttttctagaaaattgagaaaatatgaatctcttggtgaaatagagctcccaaactagcgaaacctgagggcaaaatgtccggtgctgcttgataggatcaaactcggtcattatataatacagtccttgtttttctatcaaataaggcataaattcacagtttcggttaaaggagagctaactgtg

SEQ ID NO: 4607 - DNA, 871 bp, Zea mays
  Intron number 10 from transcript GRMZM2G098815_T01 (locus GRMZM2G098815) derived from phytozome v7.0 (chr-ID 3; pos 137527058 to 137527928)
tcaaaacataaaggtttgttctttgtttgattcatttttattgaagtttttttcaaagcctctcatctgggtatagctgtagcatctgttcatgcatgaatgcacgtccatgctacccacacatcgtgcacaactagacctacaactaaatacagatcagtagaccacgtccttccagagatcagcacttcagcaggaccacccatggttccgtgggcgatgggcaagtgttgcaatcccttttttgactccacacgagagaggctgctaacattattgggagcaagcccagcgatagatgcgaaagcgattcctgggaaacattattgggagcaagcccggcgagagatgcgaaagcgattcctgggaatcgaactcgtgctggtagtgtgcacactggcaatgctagccagcactagctcagttcattttgattgaagttgatcaagaagtattcttcaccatctttgtgtaatatcacgaagttaatagttaaataatttgggttttaatcatggtttttaaagcgggacaaggcgttggaccaccgcctggacgcctaggcgaggtaggcaggcaaggcgcctaggcgttggacctccgcctggacgccttaagaacagtggttttaatatattgtaattagcaaatgttttctagcagggaatcttaatcttgactgtgttctctatgggaatggatcactagtgtccctctagtttatagaatgttgtgcacttgtgcttcactcctttaatttccacgccttgtgttttgtttatcggttattttgagacaccgcgtgttaatgtgcagtatactgataaatgtttatttgaatgataattatttttttgtgcaggataaatac

SEQ ID NO: 4608 - DNA, 791 bp, Zea mays
  Intron number 1 from transcript GRMZM2G079817_T01 (locus G RMZM2G079817) derived from phytozome v7.0 (chr-ID 4; pos 1 40347767 to 140348557)
cctgcgggctcttcgtcgtcgacaagctccgcctggtacgaccacccttctcttccgttcctgctgtgcgaagctgagcatccaaaccctaactatcaaattagaagtgtatacatgtaaatacatgtattctgtctattaacttcgaattttttgccacaattattggctgcacacctatgtactttactgcattcacccctgctagtctgatgggttcagttgagcagtgacatcgtgagctttgctggtgcaactcattgatgtttcaagcaatgtatgtagaatattcggattagtaaattgagaacttatatgcttttgtagcttattgacgtttcaagcaatgtatgtcaaacatctagattagcagttgaagccccatgaacctgtgacagtagcataagagttttcttcttcttcttttgtttgaactcgccaaatcctatacatgctaatcagagtagatgatgtgttgcattcctatatagaaggttataataaaaaaaacttgtgaaatggctctcggcctatatctttgtttagtgaatcaaataatcaatgttagtattttagtggtagactttagtcgtcagcatacttagttttttttttctgttaccattgtactaatgttttgttcccccaagagaccggaagatacaatttaattggttcatattgttgggttattgttgttttttttgctgtgatatcttatgttatcaaggcaaggctagtaaatcatgttctactattacaggttgctgtgtgaagtccaaggttgtcac

SEQ ID NO: 4609 - DNA, 1020 bp, Zea mays
  Intron number 1 from transcript GRMZM2G133213_T01 (locus G RMZM2G133213) derived from phytozome v7.0 (chr-ID 3; pos 1 86233828 to 186234847)
cgccttcctcctccttcgatccaggaagcccaagggtatggacatgtgtgcaccctactagtctagcagttgtgcggtcgcgagatgcctctggttcgcgtaagatctggttgccaatgggctccgcgctttcatcagctccagtggaattagcgtgctagttcagttatctcggggaaatgactggggaaggggttccagcgcgtcgtcgcacacagtatagttcttttaattattatctggactccgtctgtagagtttctacttgcagcctccaaggcagtagttgttgggggcaaacatcaaatgaaaaggaaaacgagcagaagtttatgcccatggagttttgcttgtagatgtagtaggctgtcagtgtcaatcaaatatagttaagtttaacctgctttcactatctggcaagcatctgttctggctgactgctccatttctgagtggcaggggtggagttttgagtttattttccttgaaaatgtcttattatctctgattggagcatgttattgctagaaaaagactccctccgttccaaaatataagtcgctttgattttttttatacatagattttgttacgtatctagacataacctagccaaaacgacctgtaatttggaacggatggagtgtctgttgcctaactgttctaaccacaggatgtaacagatggtctctgttattacctgcgtggtacgaaatgtctgctactgttgctgtttttggttctgatgtgattttagtgaccgaaagccttattatgtgcaatatagttgtagtttcattgtttattcttgcttctgaaccgtctataagtattagttcttggcaggacatgataatttattcctggcatccattagattttttgtttatcacccaaaaaatatttgtgcttaagtttgcttctgcaattcaaggttaatgcgttatagctcaatttgattgttgtgctgttgttttggcattaggctgcttggatcctgagaacttcaggaagttcaaa

SEQ ID NO: 4610 - DNA, 702 bp, Zea mays
  Intron number 1 from transcript GRMZM2G103108_T01 (locus G RMZM2G103108) derived from phytozome v7.0 (chr-ID 6; pos 6 2134248 to 62134949)
ccggcctggccggtatcttcctcttgggcggcaaggtactgccctcagtccccattcctggatcacgtgctcgaccgaccccgtccgtgcacggtgcttgtttcggctgctccgtcggtttaatgatgtatgacgcgtggatctggttaatgcattcgtgggggatgtggttgatgtcacattcgaacatggatacctgattgtacctatctgcgaagagctacggtgcgtttagaaatcacgaactgcatactagattaggcatcttaaatgcggatggttaaatcactataatctagattagggtttggtttgttttttttttttttggtaatagcacaacagctgaccagcatgttctcaaatgcagcgttcgtcaatttgcgtaggacgaccatggatacatttagaaatcatgaactgcataatagattaggcatcctgaatcaccatattctaactggtccttgttatcgatctctacatagtttgctgaagaaatttgatgttattcctattcaacggactgggggttgtgataaagctgactttggatttaaataaccgattttagagttttttccctacaaataccatttggtagatccgttgatgcatcatgcatgagatcttgttctgacgcgttgcttcacatgcatgttggcaggagaaattcagtcagtatctgtgccgcgaaggcga

SEQ ID NO: 4611 - DNA, 959 bp, Zea mays
  Intron number 1 from transcript GRMZM2G126900_T01 (locus G RMZM2G126900) derived from phytozome v7.0 (chr-ID 9; pos 5 6422609 to 56423567)
gtgccggacgccaacgccttcggcaataccttcaggtgaaacagcctactgatttgctacggtgggttcttggggatccgtacgtcgacgccaaaactcaaaggccaggcgcaagcagagaagattggggcttatctagatatgcacatatttatataatggaattaaccaatacgtgttgaggtggattttaagatgaaaactaaagtaatttttactttaatctacgtcaacgtggattgataataaatagtacctcagatcagttcacttgtgtgcttctcgttccgagtcaaagacggaaacagacgcgtgacgtgacgcatttttccactcttgtgtttaatgataaagtaaccataaaaagacactcgggcaaatccacatttttacttggcaggataaaaattatttgtctgccaacaagcttgtcatcacaaaacacacacgaagtcggcggacgagaaaggcctttgctgcccgcttccactctgctggaccgctgcattgccgtacaggctccagcaaaattactgaggaatttgccaccgaaattactgaggaatttgccatcccaccgaaattattgttaagttttacgttccgagtgatacagttttgtttccaaaggcatctgaacaagcaggttgccaaatgaaggaacaacttggcatgtgcgcccccaaagatttatgggtgtccacgacagcggccccacaagcaccaacgatatttttgtggctactgtgactatgctaacacggtggatttatttatattatctttttaagttatacatagcgaacccggactaattttttcttccttgcactgagctgtgtggccttaatgtccttgggaaaaaataaaaaatgagaacgcaggagctgatgaacgaccgggaactcctgacccttggtgcagggactacgacgcggagtcggagcggaagcagacgg

SEQ ID NO: 4612 - DNA, 618 bp, Zea mays
  Intron number 2 from transcript GRMZM2G464539_T01 (locus G RMZM2G464539) derived from phytozome v7.0 (chr-ID 4; pos 4 3321899 to 43322516 reverse strand)
ccacgctgcgccgcagcgccgctccgcctccacgggtccgcgctgcagcctgtaggcagcagtacaggatctgcaggctggccacgaccgactgtggctgggcgcttgccgctggctgcctggtctagactctggtcgcctgcctctacacttctacaggctgcagctctgctcgactaatactctgctggtctgctgcctagtgcggtagtgcctgctccagcctccagtgctccgctaatccgcttgacgctagacactagcagtagcagccagtccctagtctgctgtctgcgctgcctctgcgtggtcggctgatagggtatttcagtatttgaattattgaatatagtctagtgctctactcgcagttcaattctaatttatttgattatacgtgtctaatccattagatttttcaatgtgcagatttttcaattttctaaatagcagtcttggatagaaacaaaaacaaggcaaagaatatggcccaaaaaagtatttctctatattatgtgaacactctactgttgtaatgtcttctatttatctaatacatgttatatgcttcgtgaaatgatagatttaaagagctatttcagtcaagcttcaagtgga

SEQ ID NO: 4613 - DNA, 1024 bp, Zea mays
  Intron number 1 from transcript AC233893.1_FGT002 (locus A C233893.1_FG002) derived from phytozome v7.0 (chr-ID 9; po s 146256369 to 146257392)
gtaactttgaagatcttgaaaacgtgattgcaaatgtaagatgttctacaacaatgcttagcatgatacacatgattttcttatctgaaccatgggcagtttgatttggtgtaaggttaataatcccacaacttgatgcgttgcaaactacacttgcgacatttatatatggtcattgtactttgaagtggtgatgctgggctgacatgaaaattttacttttaacagtcggaatactttaagttttcctgtaactggaagcggattggacagttttccaaaaatgtgctgtaagcctgtcaactagattaagttatactccctgtcctgaaatatatgggatccaaatttgacataagtcaaaccatgcaaagtttgaccaaattgatagagaacagtattaacatctgtcacatcaaagatgccgtaactattatccttcttttatgaaaatttagtcaaagttaatacagtttggcttaggataaacttggatcccttgtatttcaggaagtaggaagtagtgtttaatgccattttcttgcaagtgctgatgtaaattggtttattgcaagccattcagagaacttaagaaccgctagcaatctggtaccagtctgccacttactgtttggacattgtttgcagcttaaatagctactatggaaatttcaaatttataatactttgagaccacccattggaaaataattaagatcattggtgtcacaattaagaatgctgtgttgaccatatacattgttaaataatatatacgtctgtttagactctgtagtggctctgcatgtacccccctcacaaacactaagatgctactgtacaatctagtttaaacctgtgtattgacatttaactgatgcaacagttagtaggcagactcgtacttgatatctctgtcgaggtactgtagttccatcttttgtgatatggactaataaacattatcaccttcaaattgacaatgctgtttgttcaatgtgcagatatttccgaagaggggaaa

SEQ ID NO: 4614 - DNA, 438 bp, Zea mays
  Intron number 2 from transcript GRMZM2G030914_T01 (locus G RMZM2G030914) derived from phytozome v7.0 (chr-ID 9; pos 9 945167 to 9945604)
aaagggtcatgcagaggtgctaaaacaccttcaaacccttttgatgaagaaaacaacaccggtgccatttactgaaaaaattacaaatttgttgtgagacttttttttgattcttatctttacaaccactaaaaactactccctccattccaaatcctaagctgtctcttgaggttgtatagtggtgtgatcgagatcgttgtctttatgtttctggtgcaaataatgatttatgttgcaggtttgttgtatttattatgttcttaatgcaatgatgctcagctctcctctgcatttatttaagggaaaactttcagttctgatgtagtttatatgccatattcactgggccattggcataagtcacttgcactctttatttgatgctaactttcttcatttacaaactaggttccactcctgtttggatctgttgca

SEQ ID NO: 4615 - DNA, 1012 bp, Zea mays
  Intron number 1 from transcript GRMZM2G125527_T02 (locus G RMZM2G125527) derived from phytozome v7.0 (chr-ID 2; pos 2 03629530 to 203630541)
aacgctgcacaatccccttcgccgccgccaaggtaaccgccttcttccccgtctctctctgttgagtagatgagggttttcagattggtgcgtgggagtagatgactgttttcacttccatttctggatgtgatggctctctcgggtttaacttggtcggtggctgttatttatgtagatacttgtgattcttcgtccgttattttttcttgtgtgtggtagttggatttgtagcgttgcccctatatgttgttagatctgtggagcatgctgcatcacaaggaaatatgcgattcctagtgggacccatcctcggtgcttgtatttctttgtttttagattcagtctagaggatttatgttaaacttgaggtgtgcagcgcataactttgtttgttgaactgatgtgatgctgcaatggctgcttatactttctataagttctcttggatgcactgtcacaattgtacctgaactttggtgtgattcctggttatcttttgttcaaatgcgtaatgcttttgttgggtcttatgatggcatgaatctttgagacctgattattctcatgatgacaaactatacacaatcttctgaggacctatacgttctgatttgagtttcaatttcatttcccaacttatattgaacttgtctacgcatctgtttacgatttgatcttcagctactaagagcaaacaccaagagactacattcttcctaattaatatgaatagaaaaaataccctccaacagcttatctaaatggttatccaaatataaccatcttttattcctggtttctcgctagtcgaagatagaaaacgtgaactgctctctagagtgcaaacaagatatacaaagtgtttttattcaattgaccctcatagaaagtgttttttattcaattgactgctctctagagatggatatgaaatgttgttttaacatgtgcagtttgtttcacatgttatacaggtgaacgttcctaagaccaagaagacgtactgcaa

SEQ ID NO: 4616 - DNA, 1048 bp, Zea mays
  Intron number 3 from transcript GRMZM2G167872_T01 (locus G RMZM2G167872) derived from phytozome v7.0 (chr-ID 8; pos 1 56865910 to 156866957)
gcagcttcctccccaaagaccacccgctccgcaaggtgacgtgatttttctttctatccactcaacccccctccaaagtcacattctggccacgcttgtcagaccgttctttttagttttggttttcatcggtcagtcattaaacaaaaaggattgcagatacggtgcaaattgtgctgtttaactataataattgtgcctgtccttacagtacggctctcctgtagtacggtccttgtctcaagattgggataggtttggtgttagttggggagggattttctaatcaagcctcctttggttgatggcatgctcttgtcatgctcagttattgtcatgattattataacacactatggctcgactgcatatgctagttcaggaggccttgtgttgctattccctccaactctgtagattgtccagtaccgtttatttttctttccaccttccagatgttcgtatattgttcaaagtttcaagctatgccatgcttatgcgtgttggtctgttgctgcacgtccccttgcaaatataattaggaaaaaaacataccgtcttcaggaactatccttcccgattagaattttctaaacagtaagctgcttctgtagttctgttgatgccgcatcatttatgaatggcaaccctcaagggtcagtgtttgtttagctgccacctgccagctttgttttgattctgattattttcccagtaaggagtccgctctctgcattcagttatatgggaatggtttagttggcactctatggtgttcatctgcttttcttaagactattgattgtacccatctgattactaattggaactgtaatgcatcatcaatgttggataaaaggatggattctgaacctttccacaacttcgtgtggtatgctgtagaagaaacaatcgttttaaaccattttgcagtgctttacagcaggataagatattgatgtttttaggcatgccagaattatttggcgacatttgtccagtgctgatgtttgtgtctttttatctttcaaacaggaacctgaatttt

SEQ ID NO: 4617 - DNA, 840 bp, Zea mays
  Intron number 6 from transcript GRMZM2G534116_T02 (locus G RMZM2G534116) derived from phytozome v7.0 (chr-ID 6; pos 1 11151885 to 111152724)
gagcaacagacaattagcattgcgaaggtactgctgcttttaaaaatagccagtttctgtactattcacagttactagtgtgcactttaactcagcattactacttatttgtcttccaggctggattagttacaacactcagtacaaggactactgtctttggtgccacgaatccaaaagggcaatatgaccctaatgaaagtagtgcttttaaacatcaagcaattatatagcttgcttaattcagtaaaacgttgtcagaagtcagcactgtgttacatgcatatttacttctgggtttcactttcacccataacaagatggtgttattgagctattggctagttaatttcttaagattcactcggaggacttccataacatgtactttggggcaaaacattttcaatttgcttaacaatattaatttagcaaggcatccaaaaacactaagatttcatcattgtcccttgctaaagttcgtagatattttttgttcggaaacaatttttgtttcttattgaaaaatcctacagttgtatgaaatacttacatttttagaaagtaacaggtgtactgtgtacagagcgaattatagttttaaaaaccataatattgctaaaaccaccttttctgagtttctgcactcaggacctcctttttgccttttcttaaacatggttttgcactttttcacttctttgggtctgaaactacagtttcttgacaccatatcattttttcagaacattcaaaaaatgcccttttccattttgattgttatatctttgcttttccctttcaggtttgtctgtgaatacaacactttcaggaccactg

SEQ ID NO: 4618 - DNA, 398 bp, Zea mays
  Intron number 11 from transcript GRMZM2G534116_T02 (locus GRMZM2G534116) derived from phytozome v7.0 (chr-ID 6; pos 111153748 to 111154145)
aagaatgtatccttacatgtgattttgtagcctacttattcaagaatatcaatgatttgaatcatttcttcagtaaaaactataactcaatttgcttctatgttttccttttgtttttctgtgtccatgaaaatacttgtctatttctttggcatgcccgcagaatcaatgataacaggatgtacattagatgtctattctcagtgttaattttatgcggtaaaacatattcctggttgctctttgctaactgcctcgttgccatttgagatgcatccatcaggaaatgtatcattgtacagccggattatgtaaaccagcaagcagctttcctgtatgtttgtttttcttgacatgccatagataaaacacaggagaagaagattctcaagaaactc

SEQ ID NO: 4619 - DNA, 788 bp, Zea mays
  Intron number 3 from transcript GRMZM2G055905_T01 (locus G RMZM2G055905) derived from phytozome v7.0 (chr-ID 3; pos 2 06855808 to 206856595 reverse strand)
gaggttttcaccatcctgttgctactaaaagcgaggtatttagtcagtttcttgtttggcatactcagttgtttacttgattgttgcaatgtttcttctgcctagcttctattgtaatagctgcttcactgtttcgtcttgttagtgcaatagaacctccttaatgtttgatgcacaatcatttttattataacacaaccttgttttaggaaaatggttgctgctacataattaaccatagtagcttatttaaatagaattatgctaaatgacttgtattggttgattgccaattgactatccatatccttttgtgccttgttgactcactttttcataatacatttccttaattattggcttctgtgcggatcaaattatctttaagtttaccatgcagtgaaaacttaaataatgtatgctgttttgatttctgagaaatacagatgatatcctggagttgatctgaatatgtttaaccatggttggcactgtccacccaacatatgtggtagctgaatgagtttactatgttctaacatagaaacagaaatttcctaccctttttaggcagcatgaaccgcaagtgtggaacatccattctcatacattttcccaatgaaccaatgcagtgatgagatagttttgattctcatagttctcatcgttactatagtttccatcaagaatttttccaagaattgtcaccatctatggctaattcttgctgatggatgttccaattgtcattaggtatcctgcacacataacccttctgcgtggaaatc

SEQ ID NO: 4620 - DNA, 520 bp, Zea mays
  Intron number 1 from transcript GRMZM2G160842_T05 (locus G RMZM2G160842) derived from phytozome v7.0 (chr-ID 9; pos 1 5609087 to 15609606 reverse strand)
ccgccacctccttctcccggacttcggggtcgaaggtcagttgtttagtttcactcgtcacggcttgctgcctccaaagtctcattgtttactcctcactccgtccctcttgttctaacatttttagagctaactaaatttatataataaaataataataattaggaaactaaataaatatatttgatttttattaattatattttcatactacccctattttatgacataaatctttatgattatttatataattttggccaaacctatcattaattttggtcaaagttaaggtcatttgactcttcaacaaagttttttagtggaatgtattataatttggaacggaggaagcactgtcatatagttgcttgtctcttctgcttcagatgtgtcatcacaatcgcagcatattgctggggaaaacggtgcagttagcacgctcgtttcggctgatcctctgacctttgtcatctttctggcaggccagcggaagctgtcacagtcgtcgattttagtt

SEQ ID NO: 4621 - DNA, 428 bp, Zea mays
  Intron number 3 from transcript AC210292.3_FGT004 (locus A C210292.3_FG004) derived from phytozome v7.0 (chr-ID 9; po s 96262495 to 96262922)
acaggtgtcggcaaaacacaaagcattttgttacagagatttatttgtatcctactatttggttttcttaatactgtctaatttgattttgtatttgattttagtgtgttatatacatcatgatgatttttcttgtctgattcatgatgatttgtctcttacatgccttgtgttttaatgtaccatgttttaagagtgattctcgttagcgtagtttcatgttcagattttaagcagttttttgcgttacaaaagaacctgtctatttcacgcatacatgagtaggaaacatagaaagtattttttctgtagtgttcttcaaaatcttcaattgtatatttacacatgtttcatccaaattagggacataggtatcatcttatttgactgtctctttattctactaactacaccatcagatttatcga

SEQ ID NO: 4622 - DNA, 579 bp, Zea mays
  Intron number 2 from transcript GRMZM2G089351_T02 (locus G RMZM2G089351) derived from phytozome v7.0 (chr-ID 3; pos 2 17424201 to 217424779 reverse strand)
ctttcgacacggagctaatcccggatgtgaggccaatcatctgtcctctttattttttttttcatcggttgcttcttctgtttcggtgacctcgcttgtttgctataatttttattgttcgagaatgctgtcggcgtgctggatctgttgttgctaaagtgaacggggagggccatgggatcgggaaaacatcgctttaatttcgtttctgaattggtgatcggcttcaataacacacatttttctgagtcttctaggcgtgctgatattttgttggcgtacagaaactggaatgctaaacttatattttgttggagtcatgatcagttgttgagatgggacaccacattagtatgttgatttatcggtctgtttgaattgttaaacttaatctggtctttagttcagaagatgcatatacttttattcagtgatgatccttcattccttctttaatcctaccctttttcccatacaatatggtggtgtaggaaaaaatgccttattattccccatcgatagttcttaacaacttgagctaaaattcatatttcatctatacagtttcaagtaccaggg

SEQ ID NO: 4623 - DNA, 355 bp, Zea mays
  Intron number 3 from transcript GRMZM2G101693_T02 (locus G RMZM2G101693) derived from phytozome v7.0 (chr-ID 9; pos 9 7281735 to 97282089)
tcaccctttccaaccttattccaccagttgtagaggtaattaaactcacctttaccatgtttatagtagtataattagtttcttgagcttgtattcttgatataacttatatatttgaaaatgagtgctttatacactatttgaatgacctgaagtcaattgtttttttttatagtagttggtaacgctggtagtttggtaactgtttttttttttgacatttcgtcttctcaagataaatagttgcaaagcatactgtgtaatacagtctagcggtatggaatgattcattttgagtttgtctctgaaaatgtttttactttattgtgtatgtaggaaggtttctggtaccatc

SEQ ID NO: 4624 - DNA, 919 bp, Zea mays
  Intron number 3 from transcript GRMZM2G143443_T01 (locus G RMZM2G143443) derived from phytozome v7.0 (chr-ID 8; pos 1 40461845 to 140462763)
agtagtctccaaccaaaaggttaaaacttaatgccttcttcctcatagtcaaatctcctctaaatccctatgcacatacttttagatgtaaagacaattccagatactaaaaatgtaacatatgcttaccaaaatgttctatattgtgaacatgcgcaagtgcatggagtttgcactagtttatagctcattgaagaagcagtgcacctgcaccattaaaggggtgtttggtttctagggactaatgtttagtccctggattttattccattttagttccaaaattaccaaatatagaaactaaaactttattttagtttctatatttagcgatttatacactaaaaaggaataaaatgaagggactaaacattagtccctggaaaccaaacaccccctaaatgatgcaaatatgtgtgtggtctggcttgctgcagaatcctcattactactaaaggccccgcagagcttcgggcagctctagctccagttcttccatgcagtatagggacaagccgcttttagctctcctatcaaaatgaatagaagctggtgaagccattatttttagcttcattagctctagctcctctgcgtgctgtaggctgtagcaaggagccggagccatttaacggaacctaaatgttaacactatgaagaatagtcatatctttgtttgatttgcactcattacatcgtaagccaagttccctacaaattaattgacactgattttccatatgcatgttgaaatgtatctggccacgtttactactcacaaactataggtcacgaagtcagatagacgtggtgatacatatattttgtgttcttgtgttctactattgctttgctgtacctgtatactatattctgattgctgccttttggtgtcttggtagcgacgagagtctgtcag

SEQ ID NO: 4625 - DNA, 775 bp, Zea mays
  Intron number 1 from transcript GRMZM2G154218_T02 (locus G RMZM2G154218) derived from phytozome v7.0 (chr-ID 6; pos 1 36518216 to 136518990 reverse strand)
tctgcgcctccatttcggcctctgtcccttgcaaggtagctaatcctctgtcgctcgatctttgtccttgaggtgctcgatgagataggcagtggttcaaagctgtgctctgttgcctccccgtgcctgaagtgattcggtcttctgtttgcgattaattgtagctactgcgtctccattctcttagttttttgtggttttgtttgcttccgtgtttggatgacctgattcttacggatagttgcttctggatttgataaattacatacgcaccgtgccaccgtagttggacgacttcttaattgcgcttgcggtcgtgttacgtggtcttaataaagtcagatcgaatttttgaggtgtagagctgctgtagtttctatttgaccgatacttgtctttgtagttcatgcgcagtaagagttgtaacctcataatatgaccaaattcctgatctgctttatagagttgttgtgcctaattttgaattcgtcttactggctcaaaattatgtgcgcacacttattagtttgctctttattttctatgcctgctttatttttttatattacattgattgctctgtttaatatttgcttctttatttttacactgcttatgtgtatcaagcttttttcaagctcataactccggtgacaacgttagatctagtttctgatcccatctgataaattgtgtcgttactggtagtattaatatttactagtgtttctaatcgttgattcgtcttgttaacagttcaatctcacctccaacc

SEQ ID NO: 4626 - DNA, 821 bp, Zea mays
  Intron number 3 from transcript AC184133.3_FGT004 (locus A C184133.3_FG004) derived from phytozome v7.0 (chr-ID 9; po s 72666036 to 72666856)
aacctcaggaccaaggtatgattactaaaatgaccacataaaccaaaatgagcagccctcggatgcattcaaagtgtagagccaagctaatgtatggctgacatcaacctgcaggacccaagaacatgccctacaggccgctcaagtgccagtcctgctgcccaggattcttctgcccaggattgtttagatgcgcctcatccattagtacggaacagtccgagttgggcagattgtttagatgcgcctcatccattagtacggaacagtccgagttgagcagattgtaactcagcagattgttatccgtgcaagcaagaatttcccagactaaatggctagcttggatgagttgggcatgtttggccctttcaaatagcttagatggctgctaatttttaatgctaatgaatccaatatataattatatgtaccactcatatcaatagtgacagtttggtcgagtggtctaaggcgccagatttaggttcatagatggatagatggagtacatggccactaactacaaactgagcccacaaagcctagccatgtaccatttcatttgctagaaattaaataggttcatagtcactaactgtttttagtgtgcatcacttgctgttttcacttttttgctgaatctgtagtttgatttcagatagtttgattttctagtttgatagtcacttttttgctgaatctgtagtttgatttcagataggttcatagtcactatctcaattaaataggttcatagtcactgaatctgtagtttgatttcagatagtttctgtaatactcaatcattggcagaagag

SEQ ID NO: 4627 - DNA, 592 bp, Zea mays
  Intron number 1 from transcript GRMZM2G120132_T01 (locus G RMZM2G120132) derived from phytozome v7.0 (chr-ID 2; pos 1 10252417 to 110253008)
ctctccaaaacagcgccgaagctatcaactataaagcttcggtacagtgacatgtctcaatacgaaggggtgaaccgacttaaagatgaaatgacttaaagacccatgatattttgtgtcattattatagttcattgtaaagggcatgaatgtaattatatacaggctgtgaattgtgcctataaataggtgaacagtacctcagtactgttcacgtgctctccggtaatcacgcattgggcatttgtttttgcatcacgctgatatttttgcttttcttcgagccaaaggtacatttgtaattcgttatcatttctacagtaatgaaatagatatgagttaataatgataatcatatattcaaattattttatatattttttacccttcctcattatttgttgtgtttatgaaggtataacctttcataaccttcgtccgaaatccattatatcccgagggaaataatgcttcgaaggacgaaggaccctaatatttaacaatttctatgttgccttgttcttgattcatagcatttgagaacaagtccccaacatttgctatgcttcaggtctattcttcatcaggtgat

SEQ ID NO: 4628 - DNA, 640 bp, Zea mays
  Intron number 1 from transcript GRMZM2G325921_T01 (locus G RMZM2G325921) derived from phytozome v7.0 (chr-ID 7; pos 1 8931133 to 18931772 reverse strand)
ttgtcggtgaaactggaagcagaaagacaactcaggtattgtgcacactacagtactcatacaccttctcctaggcggctatgccctgctgatgtttgattttcttatttatatcctttgtagctaagggctaggagatagtgttataatcctttgcatagttaggatcaagcagggagtaaaatcatcatgtcaaagggtcgatataaccagacacaatactaattccaagagccagggtgccagcagtaatcacacatgtaggtagtttgaaggaatcatttgaatagtctggcatgatttagcaggtattttacccagtccaagaagaagaaaacttgataaaagaaagggtttcccttatgtttgttgaatcctgatctatgtgcttgcaagttgcaaaccatcctgatgctagttgttagttataattcgatgaccacctcacattagactatggttgtatcaagagatagtaaactacaagttggttattgtaggcatctatatatactctaaatagtacccaaccataaaagcattgttttagaagattttgacaccgattatagttcactttgggttgtaccttttttgcatgattcattctaccatgcttcaactgaggagcagtctaagc

SEQ ID NO: 4629 - DNA, 875 bp, Zea mays
  Intron number 2 from transcript GRMZM2G379499_T01 (locus G RMZM2G379499) derived from phytozome v7.0 (chr-ID 2; pos 2 03834774 to 203835648 reverse strand)
agcattcccatcgggttggactccacagaggtaatgcccctctccctccctcacatgtctgtctcctagccctagattagctaatccatcgggtggctcgagttatcggaggagcttgtgtacgctggactcatcgacgacacaagtatacgctggacccggagctgctgcagctggcgtagctcgcgccgggcgcacttcgtgagaactccatacctgtgcgcgtagtggcttgtacgattcatgtggaattgaatgcagcggttggtacttcatcagaccgtccaaggacctttaccatggtttccacccttttctttcaatattttttctattgatgctcaattaacaattactgcttctcttctctctgacccagagcttgataacaaagcatactcttgcttaatttgcataagaaacttgtgttccaagctctgtttggttactgtagtttacttaatacttttgtacataactaattaaaacaaatgagcacagcctgacttttgtttaatcaaaacatgtattatattttacgaatgagctcagttcataactgattaaaacaaatgaactctgtccataactgattaaaacaaatgagctctatttagtaactgtacctcctgcctattttggtggatgacttgttttctgtaatcaaaatatagcatgatgagaaggatgtctacaatagaagagggaaagggggaccagaagaataatcagaagattttacaaaaccagtatgacgttatatcattttgaaatatacagattccatagtcttcattgttgttcgatcatatgataaactactttcattatcattgttagaaacacaaaggcatagcaagtcagatcgagattga

SEQ ID NO: 4630 - DNA, 927 bp, Zea mays
  Intron number 1 from transcript GRMZM2G331811_T01 (locus G RMZM2G331811) derived from phytozome v7.0 (chr-ID 3; pos 5 7229047 to 57229973 reverse strand)
ttttcttcccagtttgctccgattttgattccgtaatcgccgcctgttcctctcgtcgtctcgtccctacctttcctctgattgcgtgggatctcaactcaatctctccttatatagttatatgtagctgttgagttcgttccggttttgtttgacgatagttgagtagacccctggcaatccacccttgcacggttcttttaggttttttgttcgtcatttgcagctgccattctgcctaaattgtttaagcgaacctcctccggggctctctttgttgaagttcgccacggtggcccatgtcagtgtgatgtaaggttggagttggagctgcaatgacataaaacatagaagccttgatgcatgattgaatacggtacatgttattatgtttgaaatacccgtgtagtttgattaagcgcgtatcagtaggtgacatacagtgcagatttgtacattttttttaacacataaaaggcaactagagaatatgttatagactcatagtgctctttgttacaatttctgttgaagcatcattctttcttggtcaaggtctcatggatgctgctacttcattttttttaataatgctcggcatatagtcataggccaccatgttcttcctgttgtttcgattttcgactaggatattttaaatgaaattccgtgtcttggtattaccatgctgttgttttgactttcgactgggatatttcaaacaaaattctgtctcttgctattaccattgtatgactgcctccttagaaaattggtgtagggttttaggtaaatgacacattcttggagaaccatattctggtgaccgtactatctttggcatgctaaaatttcgttgtgtttgccccagcattttcccatttttgagacaatgatgtacttacccgtgtttaactgcagaaaaca

SEQ ID NO: 4631 - DNA, 835 bp, Zea mays
  Intron number 1 from transcript GRMZM2G145814_T02 (locus G RMZM2G145814) derived from phytozome v7.0 (chr-ID 3; pos 1 53921731 to 153922565)
tctgctgtgcttccttgctgcttgctccgggagaggtgagagcagttactccccttttttctgtctcttggttccacaatgttctatcgagaggttatgctcttcgctgcgtttaaagaattatggtttgtttgggaccaaggggattgagaggctaaaatccattacaattcaatcaatttttaatggtaatgtattttagccccataaattccctccaatccccttcttccaaacaagtccttagaggtgtctgtttcacttaatttgggtagatttcctatgagagtgggagtatccgtgagaaaaaaaaagaagaaaccatatgcaaagaacagacgagatacttttagttcgcctgtttctcaggagcaccttaacgaactggaaaggcgtttcgatttcaaaaggttgattaaataaattagcggcaaattatcatgctacttagtacttactatgcagacacacgttctgccaatacttttacgctgctgcattttagtagtataaaattggccttgtccttgcatttcgattcttcaggttttctttttagtagtataaaatctgccttgcccctgcatttcgattattcagtattttaaacaaaaagttggagccgtgtcttgtcagtatggtttgtagcgtggtcatagtcagtttcactctaacaagcgacagatgcgtacagatttgattcaaagacatcaacatatacccacttaattcaaaatttctgtgcagttatatttatgtgtcatttttccatgttttacataccttcttttttctgctagttggtttgtctcaacgtattcattgtgttccatat

SEQ ID NO: 4632 - DNA, 580 bp, Zea mays
  Intron number 1 from transcript GRMZM2G452930_T01 (locus G RMZM2G452930) derived from phytozome v7.0 (chr-ID 2; pos 2 14300512 to 214301091)
caccaccgcatcccgtctctcgcgcacgcacagaggtgagtaccccctcccaagaccccgtctcctcgtcttcttgtcctcccggctttcggccttgctcctctcccgaaacctgacgagctggagggcgcatccgcggctccccgtcgcctgatccgagtcagctccaccgatggatcctccgtcagcagcggcggcctcaagtggtaaaactattgtcgaaacatgctcccgacctccgccccatgggttttgtttttgtttggtttgtggttctcccttgaccctgctcgaattgcgatgtgggcgcttcgagttagccttttagtaactatttttaccgtaaaatgtttcatactttattaatttacatatgtgaaaagatgttgctttagtttctgtgtttctcgagttggcctttttgtcccatctaatctaataccccactgaatcacctttgggtggtgttcgacgaattttttgtatgcaattcatgtggactctcgtattcttgctatggaatttgctcctttgatctggcacagatttacataaccacctcggatttaccctgaaactg

SEQ ID NO: 4633 - DNA, 778 bp, Zea mays
  Intron number 2 from transcript GRMZM2G127134_T02 (locus G RMZM2G127134) derived from phytozome v7.0 (chr-ID 2; pos 2 19117424 to 219118201)
ctcatctttggattcgtcgagctctcggtaacaggaaactaataattgcatataaactattcgttccttcttatgcttcaatcatcatccccatataaagaaaagctttagctaaaatgatgccatgccacctgcttggggggctcgtttaagaacggttgattgcattcctgtttgtttctgtgcaagagggccagcagcctgatgatgaacaggatcatggcatttaatttaatttaattaactctctctctctctctctctctctctctctctgctggttacgtactgttctttatttatttttttcctgtaagtaaagtggtacggtaaataggaagagaaaataataaaccgtccaacaaagaaaacaagcttggtactttaattaacggcctgaaacaaaaggaaaagatatacagtaacaaacagtttgcttgctcagtgagaaaacagtgctttgatctgtagagaggcaagcaagggagaaataaaggcaatgaaaggacaggaacaaatcatcactcccaatgccagccgtctagtgcgcctcttgagtgcgcgccccgaacgccaatccacttttttcctgcctcatctttggattcagtgcatcagaagaatggcaacagcaaaagctgctgcagtgcaccaactaacttaatctcctctgaatggcaattagtaataataatctctacatattgttaatatatatctacttacttatatggcactggcagggtttcatcctactggcggttcaggcgcacctgcc

SEQ ID NO: 4634 - DNA, 697 bp, Zea mays; identical to SEQ ID NO: 4394
  Intron number 1 from transcript GRMZM2G131262_T01 (locus G RMZM2G131262) derived from phytozome v7.0 (chr-ID 7; pos 1 63671623 to 163672319)

SEQ ID NO: 4635 - DNA, 733 bp, Zea mays
  Intron number 2 from transcript GRMZM2G170632_T01 (locus G RMZM2G170632) derived from phytozome v7.0 (chr-ID 8; pos 1 38670217 to 138670949 reverse strand)
ccgtgcaggggcacacccagtgcatctccgaggccgtgagttcctccgcacctctctctgagttccttgctcaatcctcactgtggtgtgaaatttactgttcgtctctgcaatttcaatgaaccgatatgcatctgacgtttttttgttgaaatgttgagcatgcggcttgcctatgaactgctgctgctttggattgtgggtgtttttttttgtttctcccctgttgctactttagtgtggctaggcaatgttgcttcgctactgtttgaaatgcatgcctgttcatttttgttgatatttcctctgtcttgaaatatttgggatccaagtttgccctaagttgaccatgtttatagagaagtgtattgacatatataatatctcataatatatccaatgatgctaatttgatgtcgtaaatattaattttcttttctgtaagtctgttcaaacttagcatcgtttgacttaggataaacttgacactcttacggtcatttcttgcaattgttggtaagctatatctagaagttagaatctgcaggttgatttgttccttttcatattaggattggtagtttcagtagaaggtttataaccatgaaggcttatgttagaatatgtggctattgttatatgtgcaaattatagtattcaatccagtgctcatttgtactgtatttgttttcattcaggagaagtacggtcctaagggacagaccaaaccatc

SEQ ID NO: 4636 - DNA, 538 bp, Zea mays
  Intron number 1 from transcript GRMZM2G307094_T01 (locus G RMZM2G307094) derived from phytozome v7.0 (chr-ID 4; pos 1 69417317 to 169417854)
gcgcgccctctcacgcagcctcccccagcgcccaggtccgcccctcttcccccctccccgcctcctggattgcgcgaaatagttttgaagatgaaccgaacaccacagaacgttagacgccaacctagtgatttgcttgcctgccattcgcgctgcacgaacagaattcctactcacgtttgataatatatgcagttatgtctgctttggggataacgccgtcgaatagatgacacttgctaaggtgtttatgggatttttttttctttttttcccgcgactgtgcctaagcactttttcattaagagaaaatgctttctgggataatcaaatttgttgtaggcagtagtccgaccgaaatttgctcagttatggacttatggtctacagaggatagttgcactactcgatctcacaaagtatgggtgttcagtaattagtttaacagtgattgttgtgaaaaacaaataatgtggcaaactcttgacaacagatgtcctacttcactggctgtggttgtttaccaaaccagtctgtc

SEQ ID NO: 4637 - DNA, 722 bp, Zea mays
  Intron number 3 from transcript GRMZM2G105652_T01 (locus G RMZM2G105652) derived from phytozome v7.0 (chr-ID 2; pos 2 32168058 to 232168779 reverse strand)
ggttccgtctccaattttccaggtacttactggaacggctcgtttgggtcttcctcatgcaaatacctgagattttagataattttcagattattaacatatgctattgtatacttctaattccctttccaaactaacatctcagtctataagataccaactttttgaggccactgtacatattttcattctattgcttggatcaaatcctttatgcattataaccagtcattttaacatgatcatatacctaaaagcggacgtttgggactaaattaattgagcatatggacacaagttaatgcttttgggaaccatgtgttcaattcactagaatggattgggtttcatgtagaattctgaaagaaaaacctatattacccactttaattttgataattcttctagttgatccctggaatatattataaaaatcatattagcacaattttaacagcccaaggctgcactatcaaaatttgagtgacatagtcacacacacacacaaaggtaaaaaagagagtcatatgatcttaccactttgataaataggccttctctgttgcttatatccttcatattggatgtaatttgttaaggtagcaggtttcatggcgaagattcttttgtcttctttttttctttttttgcatatggcaagtgtatcatagataatacttgtatttggatgaatgtcatctgctgtttattacaggaactgt

SEQ ID NO: 4638 - DNA, 564 bp, Zea mays
  Intron number 2 from transcript GRMZM2G453025_T01 (locus G RMZM2G453025) derived from phytozome v7.0 (chr-ID 2; pos 2 30382155 to 230382718 reverse strand)
tcggaatccacaggtaaaatcgaatctatgttgcttcaaaagttattctcttttgcatgttcatggctagaacaaggtctagtcaaaataagattgttcttttttgttccattttagttggagtttgggttttcaattctaggccagattagttggatttattaatttggtttctaaggtacaacagccataggatctcccaacaaggaggatcttgcaacaacgacattgattaagaattggatgttggaaattctggtttgacattgttacttctcttactcatgtttcatgtcccaatctgaggtgattggtgttggtaatcatgtaattttttcttcgtgattctattcttcctgtacgctttaggcatgacatgttgtgcactaacattttgattaacaatacaacacatggccatacatatggtattgttgcactattttttccgttgcaacgcacgggtattcaaccaggacacctcagattgggactgggaggaggacctggaggaggacgaggagatgatttcgtgctaccagggtcagaccccatctccaataa

SEQ ID NO: 4639 - DNA, 702 bp, Zea mays
  Intron number 2 from transcript GRMZM2G168888_T02 (locus G RMZM2G168888) derived from phytozome v7.0 (chr-ID 4; pos 2 36387486 to 236388187 reverse strand)
acagttctaagccgctgctttgggacctcaaacaataaaagtgtcccaccctttgcgattccatttcatataaacaatttaggagacgatcaactgtgactgaagcacaggcacgagtttagatttcaggtgaataaatcgcaatgactgaagaccgtttgcttgatgattcataggaaaaaatgcatggaaattatgaagcacatctgctctgttgctaggcgcatatttgcatcaggttgtgctataactataaagctgcgatagtttttttttgggggggtctaagtcaactgagttggaaatctgcaagatttgtagctgtcatgtatgagttggattggaaagctgtatttgcacatgtgcttaactgaaagtacatgataatgatatgcatgatccaagcggttgtttgcttgtgctgtcgtctggataactgtatacgcgtcattgcgtgtgttctgtgggcaaaggcggccgtatacctagtgacgcccgtaatgatatttactctctgttttaaattataaattattttgtttttttaagtcaaagcaaccaaatttatataataattaataaatatttgcgatattaaataaatagtattagttttttgttaactataaaaaatattttatattatatcttttgatgtcacaaatttttttatatttttatcaaagtggatatttaaaacgg

SEQ ID NO: 4640 - DNA, 887 bp, Zea mays
  Intron number 7 from transcript GRMZM2G367206_T02 (locus G RMZM2G367206) derived from phytozome v7.0 (chr-ID 2; pos 2 33480654 to 233481540 reverse strand)
gctcgccaagagccaatagcccatccaggttcgttaaactttaaagaaacaacctgtttcttcccaactattattttatccttatttatgtattgtttaatgccatagggtataatagtataagtttgtttttaggatccaatctgctcattgtaaatagtcagttggaagccattgctaattggttgtaatgcttacattattcaaactattattactgctcatggcctcatgggttaaaagaatagcaccaacaagtaaagaacatggtattaaatgttttatcatatctaatatagataaacctgtcattactataagctttaactatctctctttatgaacttctttttcttcgacttctgatgaaaactgtgaatcacatttgtgcttggtaacagaataatatgttttatcatatctaatctagataaacctgtcattactataagctttaactgtctctttatgaacttctttttcttcgacttctgatgaaaaatgtgaatcacatttgtgcctggtaacagaataatatgttgtgttcatccctttcatagtttacctggtttgattaaattcccaagttttattggtttcgtggatactggacacttaattgcatgattgattttgatcttcagatattatgttgatgattacatgtgcaagcaccagatcaccaccatacactgtggaagcaccagatcaccatgcattgcttatagatccagcaccttttccactgccatgataaaaatagaactgttttcctttgaatttgctctctaccttttgtaccattttgtgcaaagtcatgctactttagaagtggctcaaaactgttaactaacgtccatgactttaggtacccaagaagagaacga

SEQ ID NO: 4641 - DNA, 862 bp, Zea mays
  Intron number 5 from transcript GRMZM2G367206_T02 (locus G RMZM2G367206) derived from phytozome v7.0 (chr-ID 2; pos 2 33482011 to 233482872 reverse strand)
gggtggccatcataccaagcgttccttgccgaaaggtagtaacctaattccattagatttaatgtgtgggttacatatttgctacgtcaggtcagtttgagcgcatatatttctggcctgtgagcttgccatgcctagctaaagaaggaatgttgtgttggattttttctgctgctatttggtttattacattggcaatgcctttatggcatcacttaaaaataaataaaaattctgactgtcctagtgccttattcatgttatcattaatcttcactgtttatcgatgtggtgtgttttttactaaacaaactttatattatcttttgataccagtcggtgaaatgaaacactttcacatgaatgacaagttacctttttctatctgaaggcaactgttgataactttctatggcgtatgctacaatatctgctaatagtttgaagtttcatatgctatatttatttatagtttttaccataatgtataatttatttttttttagtattctgagatcatttcacctcaattttttgtcttcaattttgaagtatgtaatcatttcccttctctagcagataaagagagtaccaaaatgacaatttcagaacaaggaagaacttttcaagaagcggacaaagacgaacaaacagttactaccatcaatcgatcacaatcacatgatggaagtaaaccctcaaacaaagatggcaacagggctgatgaaagatctggaaattacaattcagaagataggtatgtctattaactacattaacagagcaaagtttgtactgttcaactttgagtgactagttactcttgagtggctaatgcacacccatttttataaacatagga

SEQ ID NO: 4642 - DNA, 810 bp, Zea mays
  Intron number 1 from transcript GRMZM5G822100_T01 (locus G RMZM5G822100) derived from phytozome v7.0 (chr-ID 1; pos 6 2558960 to 62559769)
gcgtcaagggattcgcgctggtaaggcttgctaataattcactccttcggcgcttagctggacgatttgatcacaaacttaaatttaataacaacatgttagtggtttgtccccaaataccccatcaggagctgtcaatttatttggatatgataagctcttctccagtttatttaattaaccaatcgctgtcaatcatgttaatttaattagaaaataaagtgatggcacatatgttatagttatttgtcacgtggtacatgaacgcattaaatcgagatctgcagggtagttctagtttgaaatttgaacagttggcttatttaaaaattttctttccgatttcgatcgacaggaggagcccgctatctaattttgtaccttggttgaagttcagactggtgcacaacttaagttagggattgtttgctttgtaaagactaattcttagcctctctttttattctattttagtctttaaattgttaaattgaaaaagtagagttttagtttccgcatttattaatttaaagataaataaaataaaatggaaacattaaaaattagtcctagaaacaacctctaaatggtactccctccgatttttttatatttgacttttgttagtatataattgaactaaccagcgtcaatccttaatatataactgaactaatcagcgtcaattaaaaaaatgaggtagtacagtataatatacttcgccatacttttaaaagagaacctctgaagcgatgaataccgaatacggatgcaggacctgatcgctggcggcacggactccacggcggt

SEQ ID NO: 4643 - DNA, 969 bp, Zea mays
  Intron number 1 from transcript GRMZM2G024733_T01 (locus G RMZM2G024733) derived from phytozome v7.0 (chr-ID 3; pos 3 9210919 to 39211887)
cctgccccgcctcgtctccccctgtccccgtctcggtacgtggtaccagcctcctcgtccctgttcctactcccgcttgccaaattctcgtctgttgctttgcttcgtcccgccggcgagattggttttgtcggtgctgccgggaccgggagtgtgcctgcgcgttcggttttaccgcattggggagattttcgggacgtgttcttcttggcgatgacgctctgacaggttaagcctgcccgggttggtgcgctcagtttgaattatccttcttttttttctttcgtttattttttttatttacaggaaggacgatgacgctaggccgtcccgtacggtttgttcaaaccacctcgaatctgaaaaatttgctattttgccactctcaattttggttgtctgttattatcctcgaatctggggctgggaccagtggcgttgatacatatttttgaaaaaaaagagaggcaacctcaccacttttcatgttccaacaaatctactagtatcagttaatccgtgtcgatccttcgttgccagagtcgattcggaggcgttgatacataggctgcagtcgattcggaggcgttgatacataggctgcagtttggaggatttgaattcaaaatgtgtcagttgttggtgcatcctttcagacactagtcctcctacccctgatggggaactgaggaccacgtgagagattcgtgcccgtccgtatattctgttttgaccccatttgttatttagcttagttgagcacgccagttgataatttatgcttcacttttctgaaaggttgaattgaagcagtttgttccattgttggttccatctttttgtgttgaatagagaaataaaaaaaaaagatacgtaatgcaaatttgactctagctgtttcctgtacagagagcagcatgataatgcttaataaagatacgcaatttgtgcctcaggtctgttgcaggt

SEQ ID NO: 4644 - DNA, 864 bp, Zea mays
  Intron number 1 from transcript GRMZM2G066341_T04 (locus G RMZM2G066341) derived from phytozome v7.0 (chr-ID 6; pos 1 30839050 to 130839913 reverse strand)
acccctgcgtttatcggtatgctgatgagatctcgacaaccttttgtcacgacagtgaattcaaactaatggttcttgttcatctgtaatgtgttttctctttgggaatcttcgtatgttctgcatatgattgtgctattttcatatattttgcatctgggtgtgctattgattggtagacaagcatcatgaactggatagatgactgattgaagagtctgatactctgatgatttatgactagttctgcattgcagttttccacacacgaagaaggtccgtgtaaataaaacatggagtaggtagcaatattgatactttgataataacttgttcatctgtcatgatccataatcacagaaagaaccaagaacactgaacaatttgctgaatgtcctttgcagtggtgtgagggcattctgccgtgggaactggaggaatcaggaagtccttgctgagcaggaagacaacattccagctgtgtccttcagctcggctggctcatcatcttccttcaacgatgaagtagtcatggctgaaatggttgtggtggctgcaccagttgacgtccactaccctgaatctggcaaaccagggtagctgatcaataatgtcaattgtcgcagttttcatcttcgccgccatcattattttgctggttttgtaagttaagttccagcatttggtagcattgatcattttatgagaattgaggctccatctagaatttgctgagatgtgatctctcagcctttagaacggagagcttccatgccttaagcattgtaattttgaaccgaggctattggcaatgcaggttccccaattttcatcctctcttttttggtttgttcctcagtggca

SEQ ID NO: 4645 - DNA, 404 bp, Zea mays
  Intron number 3 from transcript AC196278.2_FGT004 (locus A C196278.2_FG004) derived from phytozome v7.0 (chr-ID 4; po s 208421724 to 208422127 reverse strand)
gagggtatgtgttgcttgctgtctttggagttaccaaattcaattgaacgtgctgtatggttgtatattgcctttatcttctttggaaaatgaatttatagcgcctttatccatggtattttcttcatttgccagtaatggtttcattctctttgccttttgtatccacattttgaatttgtttacccttttacttgctatatgcggttaacatttgttttttttgctaaaactaaatgtcattattcctcaagaaaaaaatttaaaacaaacacacttattcctgaaaagaagttaaatacattttcttattgtagacaaaggacttggccgaaaattatctgattcttatttggaaataatttgcaggatttcatacgtgaagtggatcctgatatcataat

SEQ ID NO: 4646 - DNA, 996 bp, Zea mays
  Intron number 4 from transcript GRMZM2G320802_T04 (locus G RMZM2G320802) derived from phytozome v7.0 (chr-ID 6; pos 1 66463276 to 166464271)
tctccgttggcctcctcagcacctacagggtccaggtgtgctcgcgtcactcatgcttgtttctatagtgatttcgttgtgctgtttgttctgcttgccactggagagaagaccgatagcaatgtcatgagagttaagagtgaaaggtgagaggctatggctatgcaggtgctggtgctaaccaaggtactttgcaaagaaaatctctaatggaccatctaaaacgaactattctgcaaaaattgacataattgggcagtgtatatgcctaagcaataagcatgaatcatgttgtttgaaacggatggaaaagttgctataatatatatgtaacaaatacatactccttgttcaagagattgtaagcaagattgtaaactgtatccaacgcagaagcacctaatatggttacagagtattactgatgggcttacctgcagactgcagtaagttgcgatagttctttccaaagttgtgtgagatccaacttctccataactattattttgcttaatcagcacccccaaggatgtagcttactgttcctgtgaaaaactgagaaacataaacaattagtttactgcattatagtagacctgtaaacattgacgcaggccagcaggttacgacataaatgtaagggcatttgtaaaattgacagttggcacatgatgtttcataacctcagttttgctagctgtaggctgttagggaagtgatgcatcgatgcatcactactgtttattgattctgatgaaaagactggagtaaggatttgatacataactattaaaatcaagtcagcacaacgtatggatctatgcatcatataaggaataatgttaaaaataaatggcccaatttgtctgagacaaatttttggtgcatcactgattgagttatgctatatgcatggaattgaattgtatgtacaacatttatttgaattttctatcaaactatatcttgtactgatatcagtgctactactcaagg

SEQ ID NO: 4647 - DNA, 786 bp, Zea mays
  Intron number 2 from transcript GRMZM2G092475_T01 (locus G RMZM2G092475) derived from phytozome v7.0 (chr-ID 6; pos 1 65284302 to 165285087)
gcttgtcttcgcgcgtagcaacttcctcccgcttggtgagttaccagagtttgtcttggctgtttatgtaggtaatgcgatgcttgtctgcttttccaataaaataaaataaagtaaaaaaataaaaaaaaaatagagtgacgcttgtctcaactgtacagtatttaggcacaattgacaatggttcaatgcacttattatctccaaatccaaaatagcctttgcatctgtgtcattctgaattttgactatagaaagcagaaacacagtgtagtagcgatagatatgtttgtttctcaaatgcagaaaattctggtgtagatcaaggatgatgtgatgttaaaaaaatgaagtttctgtatagagatcatttctgtaattggttttcacgatattgctatgtagttgacaagatcatgcaaatgtctcctgttttgaacttatatgtggactgatgccaaatagtctctaggtgagttggttaggtggtctgagtagcactcaggttttgagtttgactgtatgcgagcgaatttcaggctagtgtgttggtggggcaggtgttttctcgacctatgcgaggacttctttttaatataatgtccagtgattatcttaccctcgcagattgagtttttttatatgtggactgatttgggtcttcttaatataatgcctagaggctattttacctccgcaggttgagttttttttaatatgtggactgatttgggtctttcccattgttaagctctcgttagtggggtgatatttggtctcctagat

SEQ ID NO: 4648 - DNA, 763 bp, Zea mays
  Intron number 1 from transcript GRMZM2G068479_T01 (locus G RMZM2G068479) derived from phytozome v7.0 (chr-ID 9; pos 1 34308770 to 134309532 reverse strand)
tcgtcggcgaaacgggaagcggaaagacaactcaggtaccgaaacggtacaatacctgtacgccgtctcttatgcgcggatatttgattttcttatttgtaccgtttctaggcaacaactaatatttaatcaagtcttatgtgtaaacgtgcaatcgtggttcctggtccgttagatcataatccaattgtagatataatcggggcttgttaggggtttttataaatctacatgagctggtggtggaaatgagctggtggtggaagagtttgtgttaaatgtgatatatggttggattataatgatctaacggaccgagagcctcgcttgcacgcttgcacataagatctgattgtaaactgttcggacatatgtattcgcttctttgcataactgaggaggccttgttattgttgggtttgtacgtgaagtgctgatggctttgttattatatgctcaacaccagcccaattaggtcaagctacaaaatagtttgattttcttagttctatctataatttatggccaaggttaggagatagatgttttaggggtcacccacgttggtcaaggaaaattggtctagtttatttgtgtaacaaaggaaaagttacaattattatgatctttttagattctatatagattgatttgaacgtgtttgtgattctcgtatgtcattattgctcaattaagttgcgatgattgatctgcattatgttgaacagattccacaatttgttcttgagactgaaggcttggg

SEQ ID NO: 4649 - DNA, 1040 bp, Zea mays
  Intron number 1 from transcript GRMZM2G305834_T01 (locus G RMZM2G305834) derived from phytozome v7.0 (chr-ID 3; pos 1 6612678 to 16613717)
cgctattcggcggcggcggcggcgacgacgagtagacagcggctgcctggcttggcttctgtgctgtgctgtgctacctcctgcgctacctacctaccttccttgctggaatgtttcagtagtttaggcaagattttctatttaattttgttaattaatgccaacaccgctgaacaagacactcgcatgtttgtgaaactggcttcgaacccctggaagaacaccagagcttacttaatttgtgctctccgttgtctccatagaccgacccatatgttacattctgcaaacggctgcctcgatgcgattttaaaatctgagctggatgctctgctcccgtttggaaacgcgaagcttctgcggttggtggctatacatgtccaaacgggccggcccggcagtgggcccgtgacccggcacggtcgtggcccggcacgaacacggcccggcccgactagaggcgtgcccgggctggcccggtccaatagccgtgccgggcttgggctggctgtcgggcccgcggtgcaggcacgggcccgacacggttaattggtaggcacggtaacggcccgtttgagggactgattttgtaacggtcagtctatttttagctataatacttatgatatgttattatatgagagcattctgacttgtgatatgtgtatctgaaattctttgtctaaatatgtatctaaattataaatataattaattaaatctaaaataaatttgaatattacctttaaattctgaattttggagtgtttttttgtgtttatgggaccgggcccgacccggcacgacaggcccgccgtgcctccggcccggcacggcccgtgtaagaataaccgtgccgggcctgggccacattagccagcccgcgggccggcccggcccggcacgataccaaaccgtgccgggcttggactgcagtctatcgtgccgggccaagccgtgcccgggccgggccggcccggcacggcccattggacatgtatattggtggctccgtcggcgaccggtggccatattcgatt

SEQ ID NO: 4650 - DNA, 783 bp, Zea mays
  Intron number 2 from transcript GRMZM2G136697_T01 (locus G RMZM2G136697) derived from phytozome v7.0 (chr-ID 4; pos 6 5741932 to 65742714 reverse strand)
cggcagcaagtactcccctattttcctcaaaagaggtgaagaatcttcatcgaaattcttatgtcttttgactttcaaaagatggccgctgtttcttcagtctgaaactacgagtcaaataatgttcgtcacatgtggtcaaagattagctgaaagccctacattttttgagctctggattctagacctttacataccctttatccgtcacggatcaggactacctggtgatcaggtagaattgttttttttaccttccattttcacattactgtgaaagaaaaccgtagagttctgctttttttgtacaatggaaacaaattccagacttttacactttcatgcatacggccttacaatttaaggaaaaatcaactccacaaacatctatgaagagataaaacattctgtgtgtggaaccataaccaaattaagctgccttaattctagcattggatcgttatccatggcttatgaagatctctatggtcacaacctctaaggattgacagatattgaggacttgttggcatgattcttcattctgcaacaatctccaaaatcgaagccaataagttctctgaaaataatctgactatattggtttatgattaaagacgatatcatttcgatagagccaaatagactaaaatattgcagcaactccaattaaaagtttttttatgtccagtttcttcgttggattctcaaacccccaaaatactggaaattctgtactcatcatcaatgtaatttatcttctttcctggcgcaggcagggcg

SEQ ID NO: 4651 - DNA, 868 bp, Zea mays
  Intron number 2 from transcript GRMZM2G416061_T03 (locus G RMZM2G416061) derived from phytozome v7.0 (chr-ID 4; pos 1 27703542 to 127704409 reverse strand)
taagaacggcaccgtcgtacacggaaccattaccggtatgacgtcatgcgaactttaccactgtgggaattagaggtgcggggcacctttaggtgtgcgggcttagaaagtagcttaatactgtgtttctggctgtaacctaggaacatgtgaccaacagagctactatatgatcttttattgccatcctgtttccgcttggtccaaatatggtgaattttattcatctatagtaaggcaatatattctagttattccttccatataacatgtgacttgcaacaccatgttgccgttttgggtaattcactttaatttttgcattgctgccagtattggctgttataaatctgatttgaagtgttggtgatttttatagtttctaatgtttggtttcaatgggtaatgttgctcctgcataccaaagttgtgcttaaactggataatttttaggcgatttctgtcgtccaatgtgaaatgaaagatttctagatgcaacctaaaccaaaattagtacagttttctgagtttcttctaagttaggcatcgtgaaaatggagggtggactgaacatttatttgtgcttcacagaccatgttttccctaacaaaaaagaccatgtttacttttcttgtagacatctttttcccctagggttcaactttcatgtttactggcttaatttaggatagtaattattttcaagtcctcatcatatgtttgaattttcaagaaattcattttatctacattgcctgctctagatagtatggtagggtatatgcattgtcctttatatattggagtaatcctacgtagcattaatagtcacagtgtaatgtttcttttataggttatccggtcgatt

SEQ ID NO: 4652 - DNA, 621 bp, Zea mays
  Intron number 1 from transcript AC233908.1_FGT001 (locus A C233908.1_FG001) derived from phytozome v7.0 (chr-ID 7; po s 23402524 to 23403144 reverse strand)
cttcgccgtgctgttcttctcgacttcatttgccggtttgtgcctgtagttctttcttactggagtttcttgagattgttttccatgcatgattcaagcctttgatattgagtactaaatgttctttttttaccctcgctctaaaacaaactccttccagccagctggtccttcctagtttacgtttaagctgtttgatttgaggaatgatctagtccatcgtcttctcgctcctcacttttttgtttggtttgtggaatggattgagttgatccatcatcacctcattccttatagttatttagttagtactaatatgaggaatggggtcatcccaccaaatttgaggaatggacccatgatgcaccaccatattttggatgaagtgattcctcaaaccaaacacccccgttaagtttgtacaagatacaagataagtagatcttggaaagcatatctggtgaaggaactaaataatataataggttccccccagcaatgtctagcaggcgtggatgtgtgattatcttttttttttgtggagaaagtagcttttgactctcttcatggttttcactgctgcgatggtttcttcttccagggagacagtacagtttcttg

SEQ ID NO: 4653 - DNA, 589 bp, Zea mays
  Intron number 3 from transcript GRMZM2G049547_T02 (locus G RMZM2G049547) derived from phytozome v7.0 (chr-ID 1; pos 2 86710332 to 286710920 reverse strand)
tggcttacggtgtcttgtctatccaactatttcatgtaatttgtaccctaaatatgttgagcatctttttgtccattaatttatatttgcttattagttccttttaacctgtaaagaagctacgtgaacagcatatgatcttttcgatcaattcaatgttaccatgtttgcttcaatgtgccaccaatagcgtatttttggtgaaatcgactttacaggttttatttgtcttggattagtgaattcccttattcagaattattttccaactggttccaatgttgaaagcattctttcttagaggtctttatatcaaactcaaatttgataagagtttttcttcagaaaggactttgtattgtttatagtctcacaaaggattaatttgaagcacactataaaaagcaataaccctacatgtaaatgaattgtactttggccaaggatcctttaaccttatgaaagttaacatggctgtagaaccgttttttttacgtggcctcttcttttggcacattttaattctacctaatatgccaacgttctgcatgcaggaaattgggcactttttggcagcatttccaaaaaa

SEQ ID NO: 4654 - DNA, 650 bp, Zea mays
  Intron number 2 from transcript GRMZM2G010017_T01 (locus G RMZM2G010017) derived from phytozome v7.0 (chr-ID 9; pos 1 51816608 to 151817257)
accacctcttcaaccatctcaggagtaaggactctcgatacgtcaaagttactctgatgattcttgctgtttagttttagaggcactggtgatgaagcaatgatgatcaagtcccaacttcttcttttttgtgctgctttgattatgggtcacatttctataactgttagcatgatgatgatgctgaccttgtctcaaaaagtgcatttgtacttattgccttcagaatacaaatgatagttggtttggcagatcggatgatcggatattggatggcagttggaattgtagtaaggttttcccagaaaaaagaaacacaattttatttaattatgtagcttggttctgatactgtcttgtgtgttacattacttaattctttttttaaagatatctgcttttatcgaaagcaattaaaggttttacagaaccaaagctggggtagccaacaaaagatagctatcctattacatccctcatcatcaaatttctcaaatatcggatgcattgccttccatgggaatgaactcaagccatctttgctctttgttttttttaaattacttattcttagttttcttaatctgtcagtgactcagtgtattaaaactatattttcttttccaggatttgcaactgagcacaagtcc

SEQ ID NO: 4655 - DNA, 515 bp, Zea mays
  Intron number 2 from transcript GRMZM2G027309_T02 (locus G RMZM2G027309) derived from phytozome v7.0 (chr-ID 6; pos 1 16581117 to 116581631)
aggcatctgttacactcatccacagaaacttccaggtataatcttctttctgaaagattatgcgattttcaggattaaggttcttaagtaaaagcttttatttcagataatatcaaatttgaaattctgcagtttacagctactgtcaagtgcttatctttgttagtaatttgttgtcccgtgggactcttttttgttgatcacaccctatgacctgcatttagcctaggaaaacttcaggcagggcaaattacttattttacttttcatttatggctagtttcatttccccctcaaacccctccaattccggagggtatttgagtttccaaactagcccttagttttttcacctcgtcgctatgcaacaattgacgacctgtacaactcttgaattgttaccgccttctttgaaacagacatttcacattctggttggaacactcttgctttgatactccacttgtttttcaacactcaggagtcttctctgtccatttcaggtgttaaacaaa

SEQ ID NO: 4656 - DNA, 1013 bp, Zea mays
  Intron number 1 from transcript GRMZM2G086484_T01 (locus G RMZM2G086484) derived from phytozome v7.0 (chr-ID 2; pos 1 6367466 to 16368478 reverse strand)
agcgcgcggccacctccgaccccgccgcacccgatgtgcgctcccttccatcctttcatctgaattgcgtttttccgcggcgatgtgtactgtttgttttgaggcaaccagtgttgcgaaaaagctgtggatcttacgttcttgcgggcgtggaaaaggttgttctgtttattagcttttggctgcggatgctgtttcgatctggttgattggcgaaaagtaacatgtagctggcaaaggttgtgttgtgtcttcgagttggatttgggggaacatttaggtcatcgcggtggagctggtcaaaaatcacgtgttcaaattcgtggtgtactgatactgtgcacttagaagctttagggcgttttaatgctcttcgctcgttttttcctgcagtatgtacggtattttgagtgatggaattcagaactagaggcctagagcccggcattactttcagctggaaacatagcaacatcataacatcacaggattgtcccttactcactctaaaatttaaactgctccctacattccaaattataagtcattctcgcttttcttgatacataatctagatatactgtaaaggttgtgtatctagaaaaagccagaacgatttatgatttcgaacggagggagttgttcttaatcgtgagtatccttgaatgtatgataactcaacactattgattggtctgacaaatacatggacataaccctaaagctttaaattgaaacctgactattgcttatcaatgctggcacattatctatacggttgttctgatccagtaactgggagtttgcctgctagcaatagcatccattggaatttttttttattctctgtgtttctcaaacatatataaaagttcttttttttctgttgctctatcttcctgtggaatctgcctctccgttattcatttttgttattacaatgcagttaccaagtaagagagtaatggacggaccctcttttgatgttcacagggcggagtcttcccatcagc

SEQ ID NO: 4657 - DNA, 996 bp, Zea mays
  Intron number 1 from transcript GRMZM2G075064_T01 (locus G RMZM2G075064) derived from phytozome v7.0 (chr-ID 6; pos 1 02318719 to 102319714 reverse strand)
gcctcacatgtaagtgttgtgctcgctgttcccaacagtttcccgcttccttcctgcatttgcattgagaacttccttttctggtatctaataatgggttccgtatctagtctaacccagcttccattggaataagaggctacaatgttgcacctgctgcttttctgcttctatttattttcattcacattttaacaacatctactatgtagttattatcctcacctttgcatttctctttagacaattcatcatttgtcatttataagtttaccttttttctctctcctggattatcctttaataggttaatcaatatgacctttgcattcctctttggacaattcatcatttgccatttataagtttgtttgtttctcttgcaccatccttttaataggttaatcaatgctatgatattctcatatgcttgagagctcgtgcagttatcatatcttttaacacttcgaaggtgttcttgtactttttaggttgttttgtctcctactagatcttagcctacatgacctttaagatgccagcaccattgtagctgcagttacttttcaggatgacatacttgatgttgatgttcattttacctgtgtattttgatcatggcacatgtctcgaaccttgctacatgttgctttactaagttgatatgtgtggccaagtatcccttgttggattgttgatcacggtggtagatgttgaattctgtagttaaacatggacaattttactttatataactattccatggctagttatgggaagtagatattgatgctacttttaactattctgataaactgaaatatctttcatttgtggtgtttctattattgtgttttgaaggcatttcatgttattttcttattcttcattcgcagtagatttacctagaatttgaaaatcattttcactaattcaatttgaccttgttggacattaatgtattgtgtttatttcagttgcctggccgcacatata

SEQ ID NO: 4658 - DNA, 826 bp, Zea mays
  Intron number 3 from transcript GRMZM2G007453_T04 (locus G RMZM2G007453) derived from phytozome v7.0 (chr-ID 2; pos 9 988641 to 9989466 reverse strand)
cattcgggctgcaagcttttgttacaaggtcagtaagctaagtcgcaatgcattcaagttgcaatcttttgctacatgtcagtaagtttcactgttggctccataaacaattcatgctttaactagatgctatatatgtattttagtgtaaaaatgaattatcaaaatctatgcgcctagtagaaaattaaaaaaacgacctacattttgggacggaggaagtagctattaatgtccaaatcaagagtcaccagctacaaaacgaacaccactggtcaatgatgatggtgcggcaacgccgcgccccgttctttctagttatatatactatagcttcaacctctctagttgctcgcatgttgtctctcactcgtgtttaggtttaacacaaccatcaacctaaaccacactctcttctaacttttttttttaattcttggtgcctactgtatgttgttaacaacgatacagtcaccaactcaccataagataaaacttcacttaaaaactaaatctggtttcatattttttgaagctttgaaacaaaattttcacatctttctaagattaatccagatttcaggaatttaactacatgattatttttggaaaaaaacatctgtagtccgaaaaaacagtccatacagggccaaattctacagcccaattaacctccaaggaccgaggctccaaccaaaagggccccgacccagtgtcaatgtaaaacgcgaggatattttccccttcaccattcccttctcatcccctacctctcttggtttcgctggtaggcggcagcccgactaaaggaacgcccgccgtcgcc

SEQ ID NO: 4659 - DNA, 995 bp, Zea mays
  Intron number 1 from transcript GRMZM2G101408_T03 (locus G RMZM2G101408) derived from phytozome v7.0 (chr-ID 2; pos 1 7797927 to 17798921 reverse strand)
agcatcctgagcgtcgcctcaagtcgacctttaaggtatattataattttaccaaattttgtttcttgtgctcttttactaaacaactttctggctatgtgaaatttcgtagtattgtaccacaattacaaataaaataggtgtctgatatactagtaatgtagatatatcaaattttcatatgattgagaaagatatgcgaggctgtgtagtgtgtaatcacagttaaaaatgatttggtccttgtgagttgaggagctaaatttaacaaccagcgtgctcccatacctgagcagctataaacctataagttttaaaaaaccttatgaacatatgaatggggacagtgggacacatacatggcagtctctgttaccatacctgtaacctgtaggagcgcttgaaaatagcacaatatcatcataattgatatgctatagcgaattgataatgctgtagtgttgcatgattttcttttactctgctattccaaatcgttcccatgtttcgggacattcctatatgcatagttccatttttaatccagttcctaattccatatggtactgcaatttataagaatgataaatttggaatattttccgcacaacacatattgtttgactaatagtattgctgctgagctatctcaaaccttggttgcactgctataacttaggagcaacgtgatcagcaatattattacatcttctgaaggaagaaacacatacaggataatgttatgtctatactctatacatagaaaatatcgaagtggcatataactcatctgaagaattcacaaccatggtcttctatattcactttcaatacagcatttgtgataattttcaataccttgacccctgtgtaattttgtgtgcttcagtagacatttagtttttctactgtttggtgtatatttggtgattgaatgcatttgtgctaattttatgacaggcatttgaagaggcagagctccctaagctgaagga

SEQ ID NO: 4660 - DNA, 723 bp, Zea mays
  Intron number 3 from transcript GRMZM2G147532_T06 (locus G RMZM2G147532) derived from phytozome v7.0 (chr-ID 1; pos 2 76295959 to 276296681 reverse strand)
aagttcagtacgatagtgcaaacagagagcatcaggtactccttaggttcctattgacgttgaattgtcctaatgcggttcatctaatgttacttatccatgttctattacgaactgtatgtgtgctattttcccacaattttctaatcaaaatattcagcacaaaaggatgacctcgtatatgggatattcaattgagtgtccatgaaatttgacaaaactagaaaattgaaaaaactagcaggcctgtagatctgagcaaatgatatgaagtacatgtaattactttctcaaaacgtagattagcttttttgcaaggactttagttgaaaattggaaaatctaacatgcatgtagatctgagcagacgatatgaagtacatgttgtttctttcacaaaatgtagatgagcttttttgcatggacttcagttgttatgttgctcctcgttaacactaaaacttaacctgctcgagttacaattatacatctcaatccagatcagccttttcattgttctggttctgctcatttatcctttctggtcacataaattcttgccatttaacaccagcactaaagaagatagggagagttcaatgcatgatgtttgatttgttgacactggaagaggcgactaattgaggccgttgtcattgccaccggtgtgcacacattctttgtcaaggctgcatatcttgtcgattcaacaaaccaagttgg

SEQ ID NO: 4661 - DNA, 541 bp, Zea mays
  Intron number 2 from transcript GRMZM2G152408_T02 (locus G RMZM2G152408) derived from phytozome v7.0 (chr-ID 1; pos 2 18196444 to 218196984)
gtaaggtagggacgatttttcttctagtgttctgaaattgtgacttgggggtgtttggtttttagggactaatttttagtccctccattttattccattttagtttccgtatttggtaatttagggactaaaatgaaataaaatggagggactaaaaattagtccctagaaaccaaacacctccttgattagacaagtacactgttgtttcccttggcgaatccatggacaaaatgtgaaactggaaatagtaattatgtttccacagagtgctgccttgatagaacgaaattgctgtggacagttataatccatctcacattttgttcttagatttgtgtcaacatgttgacagtatttctcagacaagaccttatctttccttttgattaatagttgctaagaagcagggccagtccctgtacactacaagtcacatatgctatcttattctgtaaaagtgttggctacattctcagaaacttacatttctgcttggtacacagtggtgaagaagcagggccagtcccagagttgccta

SEQ ID NO: 4662 - DNA, 988 bp, Zea mays
  Intron number 1 from transcript GRMZM2G147027_T01 (locus G RMZM2G147027) derived from phytozome v7.0 (chr-ID 4; pos 9 1477118 to 91478105 reverse strand)
caccacggacggggattctagcgcatcattagtcggtaagagatcgttcctagcgtttgcactcaccttcttcttgcgtagcacctattagattcgtgtattatgtgtccgggcgccgattcgggagtcaccggcgatggcgccgccgtaggtgggaggcgccgccgtactgggtggctagtgggagaagatgatgtaggatgaatcagtgaccgttagatctgtgaggagtggtgtggatctggtcaaagctaccggttcggggtgggtaatgctcgaccgttggatcgcggatgctgggatgggagcagatcgcatacatattaaatctcagcccttaaatgttgaatccttcggcccgaattgcacgctggttcactcaaaggctgggataagctgcgccctcggtttcggattggaatactctggttcgccaataccccttcgtcgtgtgaacattcaaaagagatcatgcgcttattagaaaataacccgcgtccatttcactgtgtaatgagtctagtgattcttgcaccgagatccctgcacttcctaataataatgcgcccagtccagaagattagaaaaatcagaaaataaatatagaaatggatttttaatgtagaaataagtgctagaattggtttaattcatagaaaaatcatttgaagtccaaattaatcctttcaaattcctataattttgtaatattattgtttatcatttggtaacactattttgacatgaaagccacattaaaatttatatcttaagtaatcttgtatcaaatgtataaaacctttggaaattcataacttaaaatgtataactccaaaattaatgattcatgttcctatgatcttattttaatatgtagattattaatatgtattttgtatacatgtttggtgtgatgttaattttgtttatacaatgtttgtttgtattgctacgactagcagtgaagtcacgaggatctaaagaatca

SEQ ID NO: 4663 - DNA, 842 bp, Zea mays
  Intron number 1 from transcript GRMZM2G111451_T01 (locus G RMZM2G111451) derived from phytozome v7.0 (chr-ID 4; pos 1 73802278 to 173803119)
gggcagccaacaagaaagtacggcatcgtaacctcctccctatccctccccatctttgctactggtaggggctgcgctagatttcagctcctggttgatgcatcatgccagctgccagcatatcatctggccgtagtttctgttagttggggcaagactacggtgcgcaaagaggatttcgttgctctgaagtggagtactttgtaccggctctactggttggttaaccggaatgggtggctcagttggccctgtttatcaggaactcctgttggcaccaacaaccaaatgttacttgagctagctattctacttcctagactgaagaatcatttcaacctggcaaaaattaagcgaaacagcctgaaggtggtaggtgaaatagcatagggcctgtttggaaggcaggaatcttacaaaaaaatagttaaatcttacaggaaaaacacaggaataaggaaagaaaccaaacaggcccttaaggccttgttcggttgcatagggtttggtctttggagagaattgaaggggtcaattttgactagcaagggatttaatcccctccaatctatttttatccactcctaaccaaagaagcctcctagccgaacgagccctaaagtagttctgtttttgcacatttagaacagcagcgtggaattatgtttccctacatcctgctcaggcgctaatgttgaaggccaactgttttctttctgcatcagcaatgcacgacataaacactgtttacatattctcatgcaacgattaggattcagattgttaatccagagttccgataaacaggcgagcgccggattactgccatcaaagccataaaa

SEQ ID NO: 4664 - DNA, 917 bp, Zea mays
  Intron number 2 from transcript GRMZM2G408768_T01 (locus G RMZM2G408768) derived from phytozome v7.0 (chr-ID 2; pos 2 24905435 to 224906351)
aagggtgactaccacaggtataccattatcgctagcagatctcgctttttattctgcgtatccgcatgtagagtctagactatgcgatctatttatggagtggcgaaggagggaggagtccataccatgggaattgtgttttggagaagttaacttgagatctgtgcgtagatgttttgtatggtagcaggggcatgaggctccctgtaaaaacctcctccaaccgtgtatacagtgtgcgtagtactcaaaaggttttctataaaaggtccctgtatgtatagggagaagaatcttctctatatagggggagtgatatgctctcccgtgatattataataatgtgtattatggtattataaatattgtttgcttctaattcaaagaaaaaagataaataaatgttaatctgtagtgtatagaggaagctggattgtagtgtataggtggaatggttggagacaaaacatagtgggagaataagggagtttagtgtagtaaaatatattaaaaaatacagataaggggagatgtataggggaaatggttggagatggcatgagttcttattatcaattgtgtctaaatttaatgtgtggtctttttgtttgaattttttgttatttgtggccgaaagttcaaaagataaaaaggggaaaggggttgtgtaggctgtgacgttttttagtgaggttgttgtccttttatttatgttgcacgttgaagttgtttatctatgaatttgcctgtatgatgcacgatgctgtgctgtctcctgtaatgcatggttgaaagatgtgaaattgtttcatggtttttttaccccctaccctacagcacgtatatcttgttatctgatttctccacatgatgatttggcaggtaccttgctgagttcaagtctggtgcagagagga

SEQ ID NO: 4665 - DNA, 1054 bp, Zea mays
  Intron number 2 from transcript GRMZM2G171921_T01 (locus G RMZM2G171921) derived from phytozome v7.0 (chr-ID 4; pos 8 0537062 to 80538115 reverse strand)
tggggtgggagaggctcctttgccggattggccaggtatgaggaaatggctaggcatttcgtttttaggagtttgagcagctgcgtttgtggagtttgtgagattccttttcagaacatcatcagggttctcaaatatgtgttctgaatatcaggatattagctgtttggtactttggtttgctggcaatgacattcctacatgtttaatgtctccactgtcattgctgtaacctataggaatttcgagtgctttacaactcctaacaacagttctcaacgtttgttcttctcctaaggtcgctacataggaactcaacaatttttttaagtgatggtaaattggaacaagctgcatagcaactgaattgttttcatgtgatgatgcatcgtaagtttgtaactgtattaagttcagatgggcttgtaccctgatgtttcatgtattagcagtttgatcttaagcagtagtgaagctagagcaaatccgaaggggatgcacttgagagcttgcctcataggtgcacagattttgtgacatagggggtgccagggtggaaatatggtgacaatttggctcttatcacgtttttttcatgggtgcggcagcacccaacacagtgattatagatttgcctctgatcttaagtatagttcattgttgggctcagtttatcaaatcttctgtagaattattgtaaattgtcaactagttactttgaatcgatctcagactgtcagtgaacccttttacacaatccgtttgccttttagcttgactactccagtttcctcattgctgatgcaatagtttttgtattatcaatatcaatgtgcgatgagcagctttgttttagtaatttagtttctttatattcgactttgtgtgtttaaagatactcactagatccaactcatgttacatgtttgtctgttttcttgcaagttcacagttcggagctatgtcaacctcccctttgcatatttaaacatatctaaagcttgccatctttaccgcaggttaccattgtactgttgtagcttggcagttggtt

SEQ ID NO: 4666 - DNA, 716 bp, Zea mays
  Intron number 6 from transcript GRMZM2G098079_T07 (locus G RMZM2G098079) derived from phytozome v7.0 (chr-ID 9; pos 1 19302429 to 119303144)
gtagtggcatcgtaagtcatatcctatttgtatctccctatttttagtccacatatgtacatgtttgggcctaaccctcatggtaaataccagctgtgccttatcccccccccctctgcatacacaccacctttctataaattgttcatgcagtaataaacatgtttgaattcctaacaacagtgacggaaaggccttgtggcacagggcatttgcctggcctcgctgccgtcaaactttgcacttcgcgcagccaaaacaactctgtgtgtgcatggtctatggacttacgagcatgttagccatgcttaggctttgagatccgttggtctgacacttaaaagatatatgagtatatgactttattagcttggtccactgaacagaacttttgccaggaaacatgaagtaactatcacctttagtatattttattaatgtgtttgacatacacaattgcctttatttttcctactataaatgtcaagcaagaaacatctatgatttttttattctttgcagcttttatttggattagttctgaccttttgtctagaaattatttgcttattattttcagtgttgaattgaacctatgctgccatgtacaatttggaatgtagtactactaattttgaaagttccaaagttgcaatgtaatctgaaatcatcttcccattttaatgatattaagaatttaacacgtggtctaacag

SEQ ID NO: 4667 - DNA, 421 bp, Zea mays
  Intron number 2 from transcript GRMZM5G856738_T01 (locus G RMZM5G856738) derived from phytozome v7.0 (chr-ID 3; pos 2 17701816 to 217702236 reverse strand)
cccaaaagaacgcctgactgctgctgaaattttgagtaaggctactggtcttcccttgctttgtatgtctagttgtgttttcacgtttcatactacggttacggtattttcatgtgtagagaataaacactcatgtagtaatttagtagcaattgggtgcaatcattcctcctaatttattccaaattttgtgctgtttgattattcatctgattgaaaatacatgttgatttaagattcctgctgattaatcttcttttaactttgaccattattagtagataaagaagacatatatgatgatacaaagatagatgttattagattaaccatggaaagcaccttcaatgtctttaatcttctttatattcattcacatatgttgtttgtcagtctgattttgtgagcatgcagaccaccc

SEQ ID NO: 4668 - DNA, 621 bp, Zea mays
  Intron number 1 from transcript GRMZM2G087662_T01 (locus G RMZM2G087662) derived from phytozome v7.0 (chr-ID 2; pos 2 04077526 to 204078146)
cgagattcgcatcttcgggactggcggcatcttccgtgagttctgcttctgccatgcttcgtatatacacaccaaaaaaaaaaaaaacttgccagatttttcaattttaacagctttgcttctagagaacacaaccttaggtttgccatgtcacctaaatttgtgccagctgatgagtgaccagtattaaaatttggagaatggtatggtgacacaataacctaagttagtgaaatattgctatgcaaattagaagaacatgtgcttcaggatcagactagctaatgtgtgtgagtgtgttcagacttgttatagtttgtgttaaattccttttagctttgtgctgccaacctttgtgcatttctcgaatccaacgttcagaattcatattccatttttaaattgaatacatgagtttgatctgtttcttatcatgtgccactaatttatctgtgtatggacttgaaaattcaacaaagctccatttatcgggaaaaaaaacattcaagtgtttcaacccaaacaaacatagtataatttaagaaataatgttcatttacatatgcgttggctgaggtccttgtgtgtctcatttcagaacggaacatactgatacaagcc

SEQ ID NO: 4669 - DNA, 719 bp, Zea mays
  Intron number 1 from transcript GRMZM2G382413_T01 (locus G RMZM2G382413) derived from phytozome v7.0 (chr-ID 7; pos 1 54065847 to 154066565)
cggacggtgtgcccaagagcaagttcaagatcaaggtctgttttttctaccttcatatgtctgtcttctctttcattatgtatccgtcaattttgattctggtgtgacgatggctacattgagcgttgagcttccctggtgccaatgctaattagataaattttcaccatatattgctatcaaattatatacgttttcttagcagtgcaccaccataaatttagagttggctttgcctagtgttggtgtaatgcaagatggagaatctgttggttcattgctgcaataagccaataactcatctttcatctgctctgtaaattgctggcttgataaagaagggatgtttttgcagtactactagcatcaatcttcgtccttgtcttaatagtatcccattccatgccttatcagcaccaaatagatgagcccactcaatacattcagttctttcataactcttttgtagccaaatctctgctacagaatccaagtttctcagtttatataatagtttcaattaggtcagatcgaagacaaagagttttggtgcaagcttacttactcctatatcaatattgatagcatttttacatgtgctgttgaggacttgatgtcacacttgttcttttgtctacaaaaacacaatcatttcttgttccaaacaactatatcttatctactccatttcaggctggcaaaacattaagtgctcggaa

SEQ ID NO: 4670 - DNA, 663 bp, Zea mays
  Intron number 1 from transcript GRMZM2G156227_T02 (locus G RMZM2G156227) derived from phytozome v7.0 (chr-ID 2; pos 1 2105891 to 12106553 reverse strand)
gtggtaagtttattgcttaaagtgtcctgtaggttttgttgagtgttgttcatttcattttttttgaggactaattcatgctagctactgatatatctttgaattgtcactgtgctggaagaaaagctcactttgtgctgtatggtttccacttgcctattattgtttcccaataacttttgtcttgcctagattcattctatagtagtttttaatctagcaatcatattattgtgtattgcacgtttcttggacctaagtgaagcaatattgtttgaaagagatgcaaatcagtgtgaaactgcgaataacatttagtttttttgttattcaatgttatagaattagtttcaatttcaacatttcctgtgaatctgtgattatttttgtttagcttgccgtacggcatgaaatttcacttttattggaagcgtcacggtttcaattgttgtattcatagactacagttcaaagcttttttatccaatgccttgtcgcttcccaatttatcaagtgtggtgtcatttacatttcaatccttcccgagttcagactgtcattggcatttcttttacgtttcttaatacaaacatattttatgttttgatgaagttatcttccttcgcagctgagttatttgtgaacggtgaaatcgttcagcga

SEQ ID NO: 4671 - DNA, 437 bp, Zea mays
  Intron number 1 from transcript GRMZM2G005357_T01 (locus G RMZM2G005357) derived from phytozome v7.0 (chr-ID 4; pos 2 30213025 to 230213461 reverse strand)
gttcattctcgtatggatctttctaacctgttattcttagcttatacagatgtgttggaatgcatcaaatgcaaactacattaattaaagtggaaaatgataactagaaatgttgacattttgatctctcctggaagaattcaataaaaatataaaatatttgaacatactgccgacttattccactatacttcagcctgatacacaatttagtgtacacacaaatggcattctgctctgctgtagaactataggactcaacctatctgatgaataatattgaagttcataatgctctattaattttagttccctccagatatgccctgaccttaatatttccgttaggtcttggtaaatactctgaagctgttttgacattttttgattgtttattggcagtggacaggtagtttcagcacggacattctcaaata

SEQ ID NO: 4672 - DNA, 603 bp, Zea mays
  Intron number 1 from transcript GRMZM2G579041_T01 (locus G RMZM2G579041) derived from phytozome v7.0 (chr-ID 8; pos 1 59929901 to 159930503)
ggatccaacaccaaatacggagatacagttgacaggtgcgtatgttagctgttgtggcatgctggtctgattttaggccaccgtctgcgcctggtttcaactttcaagtcatagatcggtgcttattctgacgcctctcctacagcagggctcctctcttccacgatgcgaaggtgacttgtaggtcctcttctctcccttagattgcactcaaaactagactctaattcctatgtaccggaaatagtataatttcaaatttcataattactgaagtttttttatcacactttaatatttgtcaacaggtgtacttagcaatggtgcaaatcatgcccatccacgagatcttggcctcatcgccgattgagaagatgacgttgcaaatatttcagacttgtagagccctcgagcacctccatctcttgttcagttgcttatattagtcatatgttccctatgtttaaatttgatagtagattgaggcaacatataaacttcaggtcaaaataagaagagataaaggaagaacaatcaaatgagaaaccttttcagtcagtatagaatgacatcttttttctttcagttcaggttcagcgacac

SEQ ID NO: 4673 - DNA, 974 bp, Zea mays
  Intron number 1 from transcript GRMZM2G090524_T01 (locus G RMZM2G090524) derived from phytozome v7.0 (chr-ID 2; pos 2 08549848 to 208550821 reverse strand)
gggtggtctttttgtgctccggtatgagaggaaggaaaacaaaatcttagtctaacctaccatgttgatatgagcttacaggagaataatctcttcgatatgaatgactggagagcaatttggaggcataatgcttaagccgttcaagagaagatttgatgccttcaaatgaaataggttatgctggtacatcaaaagacgtattttatgctctttctaatctttatccagtagacctatgtgcttaattttagagatgataagggtggtgcgggccgaagatctgtcatactcctaggggccaattatagcttacacttatgttgttattagttttgaatgctgaacatacatggagatgggtagctcagctcagcttggatataacttggtttctatccaaactaatactttgctccgtagggaatgcatctggcaacggaaattgttgtcaagctccagtagcagaaaggatcatcttcaattattgtaatcctgctccttaataatacattcttggatcttgctctgggcttaaaaaatctgcatcaccaaattgttcctcgttgcgaacaattatgtaatacagaaccttagaaactggaaatgtttattccatttcggtaatttgggaatgatctgtgttaaaatcctttttaagtgtcataccacgcactatttttctgttcctcaactctattgatcccataacctatttctgttaactggttactaaggacatgtacaatcccataaccaaattggtgggtatgcaatgcgtcaatgaaaaaaccatttcttcagtcctgtaatgttgttccgattgcgtcaatgaaaaaactgtaatttttgaccggggagatggtagcactagcatgtggggattaaagttcctaaatgttcagtactgtcctaaacacttgttctatcttttttgagtggaagtccgacgtccgagaggggctcgccattgg

SEQ ID NO: 4674 - DNA, 721 bp, Zea mays
  Intron number 3 from transcript GRMZM2G136522_T01 (locus G RMZM2G136522) derived from phytozome v7.0 (chr-ID 7; pos 1 70856148 to 170856868)
gcagcccgtttgttattcgtagcagcgaccgtgaggtacacgccgttgtgctattcctcgtgcatgtccgtcctctataatctgttttcgagtttgaattttcattctgcacaaggtggtgttgcgtacttgcgtgtgctgtttgtttggcattcaatggatggtactaacataatttaacaaattaactacggataagatccactgatgataaacaaaaaacataggagctttcatatagggggagaaaatgtaaggatgcatgtctacaagagcaagcttttgaactgtaggccagtccagtgtttatgggctcgtttggtttcctccccgccgaagctgcctggctcaggcagttctcccaaacattggatttcgaacgcctggggctgggatggtttgcctggcaggcaattgcctgtgagggttccaaccaaataagccctatgtggtttacttgattataggtcttacactactgtctggtcttatggtctttagttcttctgatacctgtctcttgtttgtagtttttacaatatgtatccacctggtactcctgtttttaaatatgtgacctttaaggcaagctaatttgttcttttttaactaattaagtttccctaaacatcacatatttaaaaacagatggagtataatgaacgcaaactattttagacattttcttctctgcattaatctcagggcatatgtaggtgaa

SEQ ID NO: 4675 - DNA, 418 bp, Zea mays
  Intron number 1 from transcript GRMZM2G065598_T02 (locus G RMZM2G065598) derived from phytozome v7.0 (chr-ID 3; pos 1 79418662 to 179419079 reverse strand)
cgttgagcagcttgttctacccgccggcgcccgcggtacgtttcttgacgcccctctcatgttcgatgctatgtctcgttgtgaggctcgagctcgacgtggaatttttttctttgactttattgtttacgatgatgcagatgggtttcttcgcgtacaggcgcgttcctagttgtataccatagttttcccttttccatttttgttaagtttggtgtgtttcgaatgtggatacgctcctttttcataagtatgtgctattatcgtagagtagcgtttctaaacacgattatagaggattattttagagtgatggtgatatgaaatccctaaaaaggtttatttcaaaacatttctttgttgttggtatatattagtgaaaatctttcttcttttttccctttcgttttcaaggcaa

SEQ ID NO: 4676 - DNA, 856 bp, Zea mays
  Intron number 1 from transcript GRMZM2G107362_T02 (locus G RMZM2G107362) derived from phytozome v7.0 (chr-ID 4; pos 2 31476139 to 231476994)
cctcgaggcccagcgcaacgacctcaactcccgaggtgacatttcttctcgattaagcccccaaaccctagaatcgatgtgcccttcccgcgccgcgttttggcttggtgaatcctcgatcacgttgatggaaaccctacctttagctgggtgtgaatcttggtcaaatgcacgggctttaggctgtagttgcctggataattgggtttcgacgcctggctgttcctcaacctgaagtgtcttagccaaactatctaatcagtgtgttagattgactgaagaatagctccagttgaatatgccttagatatttagttgcttgagcagcaggctgacttgggctgttcagtttgaattgtggatggtattgtcatagatgtaactgttgttttgctgtgtttggatcttgattttgggagtgaattatgtgtaagttgtgcaggctatctgttacttgtctgtgtttgcgtatgctatctttcaattttattcttccacattcttgtggggttgttaggacaatatttcaagcatgtttcagtattcctgaggttatccattattattcaatgcctgtgtttctttgacatgattgtggtattgtggctgcgaatcgtacactgaatttgcctctggttgaacatttgcgatgtgaaaattatcttaatgaccactctgcgcccccctttgcctagtggagtaatactcattcgcatgattgcaccatgatgcttttctttatgatttattaaattcctgctgtctctgtttcaggagtagcacattcttgtacatgtattgttttctgattaccatactctaaatttggccttgcaatgttgttttttcagttaga

SEQ ID NO: 4677 - DNA, 749 bp, Zea mays
  Intron number 1 from transcript GRMZM2G106613_T02 (locus G RMZM2G106613) derived from phytozome v7.0 (chr-ID 3; pos 1 54669255 to 154670003 reverse strand)
gcctcaccggcgtcaaccccctcgcccaggaggtgagcaactcccgtcttcaatgcttgccttgttctattcatctattgagcttctcccgttgcatgatgtgagctggccaatttctggtgaagtatatatatgcgattgggcgtgggtaaaaccacaggttcctaataatggtgatatatgatctgtctaactttaggctgtgcttcatcatagttcctacatactgcggcgctccatggtgggaactggaaatttattcgtattcctgaaattaggaaagttcttctaatatttagattatgaatgcttgtgttactacggaatacaattaacagaaatctatttgtttactgcagcattgttgaaaaaagctgttctgaaccttccttactgcaattgttaaatcatcgttaacttcatcacgtcgcacgctgttttgtatacatcgttgcaatgttattgtgtttatgtattatggatcatgaatatcgaaagaatatacttttgagtggatgctggatattaaggttcaagattgtgggcacacgttttttctgcttccatgttttgcttgcccgccctctttctgtactattagctttctatagtgtttgaacaccctgcttgtccatgagtcgtcatcaccattttcagctaaattatttctattcatccgttgacttatgtagtatatttggtttgttcttgcaggctgccggtgcattgtctatcaagataggtcagtt

SEQ ID NO: 4678 - DNA, 744 bp, Zea mays
  Intron number 1 from transcript GRMZM2G430675_T01 (locus G RMZM2G430675) derived from phytozome v7.0 (chr-ID 1; pos 2 36918205 to 236918948 reverse strand)
cttcctctcattcttaggagcagagcaggactggggttaacgccaccgcaatcggcctctttgcgaagttattcctgttgtcaatggacaccatggtgtccaatcgggagtttgtatgtgcaccagctgtttaggattaaaagaagaggaactcccagggcgaatgcttgaggggtttgcactttgcaggatttattcatcttcatttcgccgtagaaacatggaggggattaggccctcagcaaaagtatgtaattggtttcggatttttgtttatgctgagttgctggttaccaggaagacacccatactcagctttcattaaaaacgctgatagaagattctaccctctttcaactagtactaccgttttttcttttactgctcccttcatccaacttataatgcactttggctttttttttttctaactgtgtttatacgaaatgcactaatgtttgtaacatcgaactagttccatttgattctctagcttgtaagttctctaaatatttacttgaacgttaatatactttttctaaaaagtggatcaaaatctagaggtttgatttaggacaaagctaaagtgaaccgtaatttcgaatgtagggagtattatggaacatgcctagtattgtgcatatttttcattacagactgaattgagctacactcctgtctgttaggattcttatagcagatgttcatgaatatttcataatgacggttatctgtgcagggcaa

SEQ ID NO: 4679 - DNA, 962 bp, Zea mays
  Intron number 2 from transcript GRMZM2G018782_T01 (locus G RMZM2G018782) derived from phytozome v7.0 (chr-ID 3; pos 4 7593021 to 47593982)
cagctcactgcggataaaatcaaggtacgtatacctagggcctagggcgatgatgctcaaaagttgcacaccttggaatcaaggttttatgtagcaggctgtccaggtctctagagctaaatattgttttgctgctattacttggatagcctgctatggaactagttgagcaaagttgcaaaggtaataatcaatgtttcaaatagccgggtacagcctcatttactgctagtttggaagacacaatactagagaagattggaggggttaaaatcctttttcttattcaattttaaatgtgaaggagattttagccctccaatctcctccagtattttatctcccaaactagtccttagtgtctaggaagactggggcaaagctaatccttgtttggagctaaacatttctctgctattaactaggtttagcccactaaatccgctaaatagcatctcacttagctagcccgctaatcaagcaagggtcagaggaccaaataaacatggctatcaaaatagttgagcgcaaagataattgtgtgtgacctgatgtacttgtgataagtatcatgtatgaactgatgtgttcgtgagactatcacttattagttggtatttataatatctatatcatcttttaggttttggtttgtatatttctaattgtttatgtttaataatacacgttttttgttcagcctccagatggctttagcctgtcatatatagcttttcttagcctctagaaaaactagtctctaaagttcatacctcactgtttataacactacttagaatatattcagtgtagagtgtacatgttcaaacgttctgtatatatgcacaacaatttgaattattgttgccaactatagttggttcctgggtgtgttagtgtgtggatgataccttgactcttgggtcttgcagagtactgaaattgggggtgcaattgcggca

SEQ ID NO: 4680 - DNA, 472 bp, Zea mays
  Intron number 3 from transcript GRMZM2G019597_T01 (locus G RMZM2G019597) derived from phytozome v7.0 (chr-ID 4; pos 2 38954963 to 238955434 reverse strand)
gagctcagggacaaggtaatcctattattttgccttttatttctcccttgatttatttggacgccttgtagcttaaagttactggtagtattatgaagataaacaatgcgtttgacatgcttttgaatataaaaatgttaaaatcttagaaataaatcaaatttgaccacatgcttatcatgtaacattacgagtttatatgccaatcatctgcaacatgttccagtttggtttgtgatacgaatttagtattctgtgacaccaactttctttcttacataattattatttgcttcagctttgcagtaaatgtgtggttaaaatttagtctgctgtagatttctacttagaaaacgatgtggttttagaaagttgttttgttcagaaatttcaaatagcctagtttaggatccactgggaaatatctgttactcattttgcttgtcatttgtgatggtacaggtaacggagt

SEQ ID NO: 4681 - DNA, 854 bp, Zea mays
  Intron number 1 from transcript GRMZM2G345828_T01 (locus G RMZM2G345828) derived from phytozome v7.0 (chr-ID 9; pos 1 28951242 to 128952095 reverse strand)
agaaaccggtaaatgaagcggaaaatcactgagcccatgattatgatagagaagaggttcaaggtgatgagaacactccagcctaatccactgacagaagatgagaacaccaagatgctaaatgacaagacaagtaatttattatgctgaacttgggaggagacttctactgactgaaggcatgggaatcatacggaaagcagcgaaatcgggtgattaagccgtcagtgcggtgggcagtgacaataagctgacaggggttgccttttagaggcgagggttatcctgcagaggttagcaatgcagtcggcatctgcagtattcattgtgctggctgtgaccatatatgtacataagcatggaggatgatccatgaccagcacacatagaaataattttgtgtaaagagggtaatctgtactgatcatagttttggtgttgataattaaagcaaaggaacagggctgaaaaatagcagccgtggggttgaaacgtgtttgatcatgtctgaccgtaatgagatatttcattagcgcgtatatatgtgcatcttataaacaggggcatgtcgcatggtttgtttttgtcgaaacagacttatgcatctgccaaacggcgaattgaattataaggtggttgattaacattgcgtggaaacatgtttacaccgtgggtaacttagcgatccttgcccaagtagatgcttggtggaaattggttgcttacgtaagcttgtattgcataaaaggagagagggggtacgcttgcatgagccagcgcaatttagtgtggtttggctgagctgtattactctgctacatttgtttggctgggtgcattaggagttgggctgc

SEQ ID NO: 4682 - DNA, 732 bp, Zea mays
  Intron number 2 from transcript GRMZM2G017845_T02 (locus G RMZM2G017845) derived from phytozome v7.0 (chr-ID 6; pos 5 2743125 to 52743856)
atcggaagaggagcaaagaaaggaaaaggcaataggttggtatgctttcttattaatttatgctgcgacattcatccaggttcacttatgttgcctgtgatatgacattgtcaaggtacttcgtgttttagagaagcacctatgtctcatattaactggtacttaaaatgccctttgaagccaatccacagcatatgatgatagtatgatcatcgaaaatctttgttctaggatagttaacttattgctgttcattgtttttgatcttgtctaattttgatcaagaaagccgttccttttccatctttaagtggaaatagttcattctagatttctatggatttcttaggtaaatggaaacataagattacaaaaggatctactcataaggaaaccaggagttatcttatagttaattgtttcttactgcatccttgcttctatattcttttaaagacggattcaagaatgttttcttcaatttctgtggttaaatgtaacaattactaactaaatattcttatggacttcaaccaagaccatgtaagaaaagtgcatccctgaattgagcattagtgtgttacatagtagtgtattgtgttcaaaattttctctaagactattgttactcagtttacttcatgtctttagtgctgttagttttcttatgaattcatgcagttaatgtgtgacactttctggtttaatttgtttttacttctagataaggat

SEQ ID NO: 4683 - DNA, 849 bp, Zea mays
  Intron number 1 from transcript GRMZM2G005659_T03 (locus G RMZM2G005659) derived from phytozome v7.0 (chr-ID 2; pos 4 7165889 to 47166737)
aacgcgattgggtaagattctgcgcctttttgttgctttgagcttcgaattttgtgacatggtgttcggatatcagggttgatgagcgcgagcgatttgttagtagggcccattgtggatggatcacacgcgattagtgcgatcggtatgctgcgattattagggattaagacgagtgattcgtgctgctgtctacttaccttgtagataattcagttgttgtcccaaagttatggttgaggaattcaatccaaagacaagtcgattactgtattggacagtttcatttctccaactccaagtttgttgtattaaaactgagttgaagatctggtttaagcattcgatgaaaggtgatccccagatatcttatattccttaccagtgattccattcagttcatctctcatgagctatgaataagtggacttctacttttgcaggattaacgcatggaccgaggaaacgcaatgacaagcctgatagcctagaactgatgaaagggatggtctttgcaacatgtattattatccatcccatctttgtttaatagcggcagctgctttatacaattattcctacttatgctagattgtgagacattgtatatcaatgtattcatattgattccgttgcaacgcattgcaagacgtgtggcggcccagctgatcagcgagatgcattgcaagatatacagggacactgtcttaggggagctgaaccgcccacgagcctgtgcctgttttcctcaaggacacaaggtgttttttcttcttctgaatcttcctctatctgtcagttctgttttcttttcctacatttgttggactaatctctgatgcagctcaa

SEQ ID NO: 4684 - DNA, 564 bp, Zea mays
  Intron number 1 from transcript GRMZM2G128295_T01 (locus G RMZM2G128295) derived from phytozome v7.0 (chr-ID 2; pos 5 5551137 to 55551700)
ggctgcaggcggaggagacaagggagctacggacggtgagttgcctcccgttcgatccgtggccgcaataccctgctcaaactgcatcgatccgtggccacattttgatctggtctccaatgcgtgattcgacagataaacaagtggggcgagatgatgtacgagaagatcaagaagctagataaggagctggccaggtacaaggagcagatctgcaagacccacccggcccatcccaggaggtcgtcaaggcctgtgccatccgactcctcaagcacaagcgcatgtcaattaaagttcaatctttactctatctctgctacaacactgagtgtattgttatttgtgctcttgttctagcttagtgaagccttcgaatgtaggttttgctttgtgattttggtatttgtgtaatgcagattttttttgtaaaatggattgttatggctacaaaactgttaggagcttgtcacttccttgcaatgtatacatgcttggtcaaatattatttgagtttcttgacaagtctgttttaatctcactcctgctatctctgccccaggt

SEQ ID NO: 4685 - DNA, 307 bp, Zea mays
  Intron number 2 from transcript GRMZM2G066169_T01 (locus G RMZM2G066169) derived from phytozome v7.0 (chr-ID 2; pos 5 766331 to 5766637)
tggcgccagacactaagagatatagaggaaaggtgtgtttgatttctgcaaataggaaacagtgttgttatggtctaaaaaacagaaataatactgtaaggctacaaatggcatctggtgaagtaacccaattcattgatatttgcaatgatccaatgaactgtatatatttttaagtcccagttcagtgaaatggtcactcactctgttactttcttctcagcacaggttttcttttttgtctgttgatattaatagttaagtatgcattgacagggaaagagcacagttgaagtcgaaggacgaa

SEQ ID NO: 4686 - DNA, 589 bp, Zea mays
  Intron number 2 from transcript GRMZM2G056145_T02 (locus G RMZM2G056145) derived from phytozome v7.0 (chr-ID 8; pos 6 804768 to 6805356)
tgctgcgcaagccaaggccgcaggtggggcttcaggtgatggttctttccagacatgtattaagatttctaaacttgatttccttactaggtgatccattgttgaacataacggaaaggaattcaaaacgttttaagtctagtgttgaactagtaatggataggaactatgctgttgttctcgcctatagattcgtaatttttaaattcagacagattaacatgcttagttagttcataaataaatctagcatctaacctgtatcattattgcagtattacaactgttgctttgtgctgctaatggttgtttgctgttgttttttttctttgtgttccatggataactacatatctcacacctggctaagatggtaactctacatagcaaatttagttgtgagctctgcaaatttgtttcttttaatttaagctgcttactgagcattccattaccatagtttgcagcagctgaaattgttttagcatacatctctaaattgaaattttgattagcagtttgtttttcttatcccagtcttgttgctcacttgcatattttatctttgcaggctcagtacacaaagctg

SEQ ID NO: 4687 - DNA, 1014 bp, Zea mays
  Intron number 1 from transcript GRMZM2G161493_T01 (locus G RMZM2G161493) derived from phytozome v7.0 (chr-ID 6; pos 8 6773586 to 86774599)
tgcggcggaacctgcagctgctttcgcccgacgaggtcagcgacgcctgctagtctgttatatgtgcggaagaggtcgcgcgcccttctgttgctgttgcctgttgatttgctcgtgctagtagtagatgcgacgctcgaatcgcgccgatctcacgtctcgttccgctcgccgcgggttccaaattccgtggcttcgtcggacgcgatgctccgccccgcgcgtgtgtgtgtggacgctcagccgtctgatttgatttgatttgacttggcagtttgttcgcatcccgcgtaggcgattattactgattagattggatgagtttaggggtagggcctgatgatcagatgacggacgagcggacggtacgccaactacctcggctcactgtcatatttgaactcccctcacgtggcgacggtgcccgtccggtgggggcgaagtggacccgcctccaccgctacaatttaccctcatgacacagcaattttagaataaacggagttgaattctgtggttctcgtgatggtgactactggttcctaaaatagtgctagtgtcgtactgctgtgtttaaaattcagccaccctctgctcctgccacaggcccacaatgcgattagggagcatggttctcgacttctcgtattcatttggtacatctgtacattcctctgttctcagttgtgaacagtgtttttgttagtaaaataaataatgtggtcctctgggcgaacaatttaagttctactacactttttcacatgttcagcaagatggtcctcaactgatgtacatctaacttggcccccggtcaagaatcacggaagtacctatgggccctgggtttggctgaatgattgctcaccattatttcataacaaagtgtatctagtctctttggtgctacatgtcttgttaagtttgttcaattgatggattgaaacacctgtttttgttttctcctgctacaacgctcttgttgcctggtgattctaggttgagctagcaaaa

SEQ ID NO: 4688 - DNA, 307 bp, Zea mays
  Intron number 5 from transcript GRMZM5G811926_T01 (locus G RMZM5G811926) derived from phytozome v7.0 (chr-ID 3; pos 1 13556086 to 113556392)
ctttggaaggccaagttgaggatctaaatctaaaggtaacgatgtggtaactcttttttttttgtcattgagttatttgaatttctcttcgtatttggtgggtaatgatgcggtagttcgtttctgaattgaactggttaaatctttatattggtgtggagtcttctttctttgcctggtttatatatccactttgaagtctggaagtcaatttcatatagtatctccctgttttcatgcgaccgattcctttacaattgcgacgtatgcagtgcaaactagtgcgtgaaaaggcccgcctgtgcga

SEQ ID NO: 4689 - DNA, 479 bp, Zea mays
  Intron number 3 from transcript GRMZM2G113216_T04 (locus G RMZM2G113216) derived from phytozome v7.0 (chr-ID 6; pos 1 62924374 to 162924852 reverse strand)
gcacgagttgattgtgcatcaaaggtatagtagctccagtgaatagtgattttttgttttcaatttctttgatctaaacaactaagaactttgaaagggttttttttctgtgatcgaatctaactgttaacttgataatgttattccttatagaattatttaatcttctgttccccttttattatatctaaaacaatagaaagaaattctctctctctctctctctctagcattaatagggtttgtttgaatggaattctgtcaggctggcattgcctggccaggcagccttttccagccaccatccaaacatactagtgctgaatttgatttagtttagtttcagtgttatgtcagaagacgatgaagctggtaaataatgaaaacatgttgtggtttgcattggcatgcagtgatgccttatttcttttgaatgttcgacagcacaggtgaacgtggatctttgcaacaaattctct

SEQ ID NO: 4690 - DNA, 951 bp, Zea mays
  Intron number 1 from transcript AC197333.2_FGT001 (locus A C197333.2_FG001) derived from phytozome v7.0 (chr-ID 8; po s 33066324 to 33067274)
gcaagtcgcttgtcgtcgccgccgtcgtgggcggggtatgagtctgagtccccttacctccgttgctccagtttctgaattatgggtgttcaatgaagtgccggaagagataaaactgactggtagtgggctggatataggtgggttattaaacattaaacttgtacataaagaaggcaatgctattatcaggcaacacttggaaagcttgcctatggagacatttgactctgtgagtacaaattgctctttttagagatattccgcacaatgtttattcaataaaagaaatagttgatgaaccagtcagtaacccctatgttccaaaatggaggttgacatgcaatttagaatggacataattttcataatcttgagctccaatataatcttgtgttgcatttatgtgaaatagtctgtttagtacatgtacaagttgcattcaaattttatgcttgatatgtatcaggtttctgaaaatataactttggagactactggtaaagattggtctatttacatagaattcaaacattaatgtcatgttcatgccgtgatctatatttctaaaaagaaaacgaaagggaggcaagagcaaccccatatattattagaagaaaaagagtcaacccagttttatggtgaaaccggaccagaaaccgaacaaccgctctgcctagagtgccgccaagacccactgctagaggaccagtccaaattacttagaaaaagaactttgccattgtcagcttgaaaaatactacctatgatttgctttcattgttgatttgcttctgtagtagtatctcaatgctagctttggaaccatagatttgaattcttgcagattagtcagtagatgactccattgtacatcctgattcacgttctttggctacacttcttattcattacattcaggtaggtatagacacagtgtttacttgcaca

SEQ ID NO: 4691 - DNA, 237 bp, Zea mays
  Intron number 5 from transcript GRMZM2G009808_T01 (locus G RMZM2G009808) derived from phytozome v7.0 (chr-ID 9; pos 1 51767974 to 151768210 reverse strand)
cttggccaggtgaagtacattttgatatctaaaaagtctggttcgggtactgtggaacatttgttttcttcatgtttatttaatgataagaacaaatgttcgcaaacttgagcttcagagatattatgcacaagtactgttctctatgctatggcctattttttggttgatctgcttcactgcttcagtaacatacatacatacacatcgattgttctttgtttctttatgcagcca

SEQ ID NO: 4692 - DNA, 778 bp, Zea mays
  Intron number 1 from transcript GRMZM2G079658_T03 (locus G RMZM2G079658) derived from phytozome v7.0 (chr-ID 2; pos 6 4605701 to 64606478)
ggcctggaacgtactacaccgcctccgcagcagaggtgcgtcctccaccccaatgtccctgctagtgtttgctttgttgtcctgccaaatcctgaaatgccactgctgaggttggatttcagtccggtgtcctgcgactgaactagtggatcgagtacttagttacaggtcaaatgtcagaacaaatgcagacaggatttaatactcaactcagcctcatataaagcaaatataatagttgcattttacttaattagaattgaaactatcttttatctatactgcaacagaatccatctattttttatttgaataaatttgagtagtttggataaaatcatatttcagaatgaaagatgtaaggcatactttgttttgtgaagatataaatgtgactagaggagaaacggttaattggatatgaaaaatgcaaaaccatatttgtatcctgttcggtactagtagtcgattaatatagctaatcagatatgaatgtgatttcaattccattgtacttttctccatctgttaattaggtgcttgagtatcctttgttgttgctaggggtggtaatggatcacgatccaaatgtttcttcacgattcgttcgagcccttaattaattttagctcaaaaataaatagaaatacagcctgatccaaatacgatctgatccttaaattttatagcgtaaaatttagatcccattaccacccagttgttgctggttcattgcattacttgcttggttgatatgtttcactttttttggcaggat

SEQ ID NO: 4693 - DNA, 812 bp, Zea mays
  Intron number 1 from transcript GRMZM2G110785_T01 (locus G RMZM2G110785) derived from phytozome v7.0 (chr-ID 4; pos 2 31138426 to 231139237)
tcatcagctcagatctagcagcttcgccttctcaggtaagggctctgctcacatcttcatatccctgctactaggttttcttcgtttatcctcgctcggattcttgcagatctcgctcaccttgtagatctcgctcagattcgtttgttctcgccagacgcgcccacttcgcaaccgccgctgtgcctatgctaccgcatgggcctctgcgcctgggaggcttgcggctgccaggcttaagtcacggggcagcaggagttcagattttttttaggcctctgaaacaaggctagcgcatattagcatcgagagtcaggagagtacgaatgggaagtaccgtcataaaattatctttgctactagcaataggaagcaccgtcataaaattaactctggtaataaaatcgattggatatatattgtttctaggaaactaggaaggatcccgtgtagaaagtgtggatagctagcctttttcatcggatcatttggttttttcttgaaatatttctttcaaaacagtctcacttttttcttaagttgtattggtgctccctaagatcgaaagcaggaatactacttttctgtaaaatcacaaaaatgcacacatttgggacctttcctaagctgtgtcttcgagcaaccaaaaagctgatgttagtttattttcattttttttgagagaagaaaattctttgcttgatgcttaatcagagatgaaaatattgatcattttttacatgtgtgctgatcatttttttactggactgctgtcaggtataattggagtgctgtcataagtggagtgttgt

SEQ ID NO: 4694 - DNA, 954 bp, Zea mays
  Intron number 1 from transcript GRMZM2G111511_T04 (locus G RMZM2G111511) derived from phytozome v7.0 (chr-ID 8; pos 1 72462867 to 172463820 reverse strand)
agtccacgctgctcaaggttcttcctctgaactaggagtaggtcgagaaggcaacatctcgtgtttttcactcccacttcattcgtgcaggcctgagaattgaaattggaactgaatttatgagactggtgattgccttaagagattggtttagcacatctgttatcttcattcaatagtaaaacgtggaatgcaccctgtttccgccaattttgaaacgtagaaaatagttttctgctgtgtagtggctaattcacttggtagatatgaggtagactggcagatactgtcaattatgtctgacattgtttggttttttttcgattggaaatgtaagtaggatgcggtatggatagaatcaagatccagcccatcaacctcgtgagtcgcgagtacagttttttggggagaatgggtagttgaacttcatgaaaatgttcagacaagtcgttgtaccgttttggggacccaaaattctcaggaaaggtttcgataacttgtgaatgtgcatatcattttctatagaaagtccacattaaaagccaataagaaaatctaataaaacctttgttacagatgtcacaaatgtcaattctgcatctcttttgaggtatggtgcatcatcacaaagcaataaagggttgagtcctggagtacaaatggcagtacacagagttaatttgcacccattgtttttggaccagaatatagtttctgttaattataaaaaagatctagtggctgttacattcatgtggaagaaacaaacatgaattggttttatctacttatgcttgtaaagttgttagctacatgcattgtgctcatttctgattactaggtaacaaaactttgagaatttatttgtccatttcttatcactgtcactgggaataaatgtcaacgccgtgttttttaggttttagcaggttttcagaatccaacggccggtac

SEQ ID NO: 4695 - DNA, 974 bp, Zea mays
  Intron number 1 from transcript GRMZM2G166572_T01 (locus G RMZM2G166572) derived from phytozome v7.0 (chr-ID 6; pos 2 2664788 to 22665761)
acagcttcgtcagaggaatcagcacttcagcggaggtgagctcaaggcccccttgcgtcgttttatctcgctcttgatccttgtcgcttccaagaaccgcccttgggcctgcccggccttcatggaccattctgaaagcttgcatgcatgtcgtcgtcatgttcttgcctggtcgtcgtgcttttgtaatttcattcatggtcaaggagcagctgctccaaaaatctagtgttgtaaagaaagaaatcagcttttcggagttcccttcaggatcagttaagacacgaaggcatacttttgtttggaaacataatgaagcagaattatgatacagatatcatcttcccctggttccttccagaattctacctgcgagaatttttagacgttagtacactataagcgtgtattttttttttgcataaatatgtggagagaaatttctgcttctgtaccattgtggtcgtccgggatccaattacagcgcaaagacagttatattattttacgttgctacagatctgtatctgttactttttttttccattaagatcacggtggtatccattcacgtactcctaaccaaacagcacatatatgtcagtggaggacaacgtgaaagtgcagactgccaaacctatggacaagcatataactcaattgcaggtgtacaagcacataggacaaattctcatttgatgtttagattgcatataactacaacaatgtagcaccacatttattatgatatctttggatactcatcattcaacttattactacaataaattaaatgcgccatcccctatccgacagggaagagctcttcaaatcaaagatgaatagaaaaattcagtaacttattcagttgaccgctagaaactgttaccatcgcaggcaaatgtgctagcatctcacatccgtttctacttgttgcagacacacagtccaggccatcgaactgatacttgtgt

SEQ ID NO: 4696 - DNA, 606 bp, Zea mays
  Intron number 1 from transcript AC205035.3_FGT004 (locus A C205035.3_FG004) derived from phytozome v7.0 (chr-ID 6; po s 128778764 to 128779369 reverse strand)
gtgttcgagcgtcgtgagcagtttctgtctaaagggtaaggtatgatctgtgtttgtgatcttaatctctgtttgtgatcttggggaaacctggttttccatggacgattcagtagcggtgtgcatgaaagatttgagatgcccttgctctgcttgcctggccagccgacatcccagtcttgcgttgctcgcccggccagccgacatcccagtcttgcgctgtagatcgatgtgcccgtgcctgacagtggctagcgcctctattcttaattaatttgtttttcctttttctgattggacgtttatatttagatgaatatggctttcacttcttcaaaaaacacattaggagatttggtgtgggcggtctgtaaagtacagagagatgtgaaacatgggcatcctaaacacctttagaagcttcccccctcttcacatagtactgaacaacaagtagagtcttggaaaacttcaaactgcttccttactgctgtcaaaaaatgctcaaagtatgttatctttccttatttattatgtgtgcatgagctcattgatatttttttggtactttctgcagggataacaaactacacaaattggtcttta

SEQ ID NO: 4697 - DNA, 594 bp, Zea mays
  Intron number 1 from transcript GRMZM2G342719_T01 (locus G RMZM2G342719) derived from phytozome v7.0 (chr-ID 3; pos 2 19107048 to 219107641)
ggggtgagtctgagtatttacctaagtagataattttggtattgggtattgaattgaatgattaatctattggatccctctcgtccatgtttttttttgctattgggaatgatttgagtaatttgttggagatgcactatacgtgttcagatatggctacatgcataataacttgaaagtgtttttattctaaaaaataactatacgttgattaataatttgttgagatcaaattagtatccttaactccaaatagcttggtcttctgtgaagttgacctatggccttccgttcgtgcttaaggcaggtaatcgtgtagaaagctttattttttcctagggttagatcatagaacattattgctctactgctactatttcttttgcactacgttccatctacatctaaagatttctgtcatgagtcactgtatcacatgaaaataaatgtgacgacgttcctatactttgactggcagatggtgtttctgagtgatgatgaaggtgcatctggtgaaacatgttatttgccttcatagcgtttgacattttcaaaaaagtgtaaattggaaagtcttgcaggtttctttggtga

SEQ ID NO: 4698 - DNA, 752 bp, Zea mays
  Intron number 2 from transcript GRMZM2G151893_T02 (locus G RMZM2G151893) derived from phytozome v7.0 (chr-ID 9; pos 1 40219181 to 140219932 reverse strand)
cactggacttggtgcggacacgtcttgctgcccaggtaagatactgttaccagttctggataaagttctgtaaaaactattctaaaatgttcaggtgtaaaataatttggattgttaagattgtaattcacttgaaatgttggtacacgagttaatttccttgtagaagattatagtcactgttttaactagagtgaggttacagcctgtgccttttcctgtaagtttttgccaacaaaaaaagaatagtttgagcttatgatttagttatgtacttatcactgtttggtgtcggtaaataggtgtttgcaattcaattagggtgtgtttggtttggtgcccatatatgcccaagttagccaaaccaaaatatggttactttgaataattttggtccctatttgttggtgccaaaatttggattggtagtcttctacttcgataccttagctaattttgggttggctaaatgctggtctgtgaatctggtgtacaacatttgtgttgtccaggaggtagcaaatttggtagaaaatgtatgctgaacaatatatttgtccatagcaacctgcatcctcttcaaaccactttttgcattattttttttaattgaatatcctttaagcatttgaactatagattaaactaacaaagttccgcattgttaagctaggctttgcagcaccgatgattgatcttttttcccactgaatggttgcagacaaatactgcctactacaggggcatatctc

SEQ ID NO: 4699 - DNA, 589 bp, Zea mays
  Intron number 3 from transcript GRMZM2G174489_T01 (locus G RMZM2G174489) derived from phytozome v7.0 (chr-ID 4; pos 2 06365327 to 206365915)
tggaaagaaagcgcctagaatctgaggtactatggaataaaatttcacgcccaggctgtgctgtgaaagttttcttctctagggtgtttgagaactgccttttactagttatgtgcaagcgcatgtgcgcatactactgaacactgatacaaaccagttattttgtttgtttgtttaagtttagctgcaacatttaagttgtggcttactttgatacaaactaattattttgtttgtttgtataagtttagttgcaacatttaagttgtgccttactgccttcctattcttatgatctttatctacttttattgtaactctagaaaccctctgatctctacaattgtcttagtgcaaccaatcttatgggatatcattcacctatttttttgtattttttggagagctattttgcaatcagttcatgaagatttgagtagtcattcaaatttcttttttactttaatctactattgattctgtggacgtttttgagttaatagtatcatcataatattcattatcctgaataagctaattttcccaattggcaattcaaatctggtacttccagctggagcttgcccta

SEQ ID NO: 4700 - DNA, 603 bp, Zea mays
  Intron number 4 from transcript AC193625.3_FGT007 (locus A C193625.3_FG007) derived from phytozome v7.0 (chr-ID 4; po s 12145289 to 12145891)
agagtttccttgactgttgggctcaccttgcccaggtacattctactatttccaacactgtgcatgtacacgttttttcttcttgtcttatatgcctcttgtcttatatgtctgtactttgtacacatattttctttcaccataaagcacatgaaagccacaaaagaaccccacaaatatgcataaatcattgtcttaatgactctctacaagcaatcttagttgggtgagaggctaccgacctataatggtaggaagaacctgtacacagctggcccattgtcgttttcttcacatgaatttcatatcagtttccttgacgatgatgctggttgtggtttttagaggtctgcttgttgatacatatggttttggtagaatcatctaaaatgggctcgtcttcaggtaaaactttttgattcggtcctattagattggtgttgatagtacgacttctatagggacattaatgaatcattttcagtggcacaatgataccatgaaacttagtttatttacccttttttgctctatttacttttggtccattttattttgttgtacctcactttattttgaattttcaggaaataactcttgacc

SEQ ID NO: 4701 - DNA, 492 bp, Zea mays
  Intron number 1 from transcript GRMZM2G319125_T01 (locus G RMZM2G319125) derived from phytozome v7.0 (chr-ID 7; pos 7 7016257 to 77016748 reverse strand)
gacttgtgtaagcttcaagttcaatgccaaaaaattagtaatacacatggcttaaaatgctttgcatcacacaacctacaacaacaccttttgacacagacaattgtgttttctaaaagactgaaagtaattattattcagtggtcactaagagtatgtagtccctaataaaagaatttgtttaatggtggcagattattccagcaattactggcacttctggccacacatcaaatgtcactgggcctttatcgtttggtagcaacagtaggaagaacaccaatagtatccaactcactaggtgctcaagttcttgttttttcattcatatttggaggcttcatcatatcaaaaggttagatttatttagcactcaatagtattactaatacaaaatcagcagttcctatgtactgttttgtgggcatacatgcagtttacatgttttttatgtgctccaaattcaaactgacaactagataacctccaatc

SEQ ID NO: 4702 - DNA, 564 bp, Zea mays
  Intron number 2 from transcript GRMZM2G055175_T01 (locus G RMZM2G055175) derived from phytozome v7.0 (chr-ID 9; pos 6 0348994 to 60349557 reverse strand)
tgcaccagacatctcaaatttttagttggagttaggtacttcacttttattttagttttcccttttaattttcaagcttattttttaatccaacactacaagaaactcaaaacttcaattgtgaataggtttacctttggtctccaaacaaccgttaggcatctcaaaactttagttagagttgggttacttaactttatttaattttccttttaactcaagcttccttttcaatccaacattatacagcaaaggtattgctaaaaaatgttgaatttatacataccaaagtgttgtatgtgccttcggatgtagtccgtgtcttcatcagatttctctactcttcacggtatggatgctatctactcattcgtgtagatagttcactgtcctctaattctctaaagatcagatttcagcccaaacagtttacagtgactgaagctgatgaaaacagtgcagattcttcttcttcttctgatgacttttgatgtgtgcgtgcatctttcagtgagaaacagacgcacatatttatttgtttggtgaaggtttgagcaggaacag

SEQ ID NO: 4703 - DNA, 852 bp, Zea mays
  Intron number 3 from transcript AC204292.4_FGT004 (locus A C204292.4_FG004) derived from phytozome v7.0 (chr-ID 6; po s 137016831 to 137017682)
ataagtcaaggtaagcttataccaattaaccttcccaatgcagatccacagttgagttctttcatcctatgtacccacacccatgtactgtacactgtccgttcataaacagtgtggttgccagttactctatcggtttgtaagccagagtttggatccgaacaacgaagggagaggagtattgcagttcagaaccggtttaatgtcagtgatctgggtatgtccattctagttacacatcttacatgatttcataatgtaagatgtccttttctcaacttctacagtattggagaataaacttttgaactttcatactttgttggtaaaggccatagaagtatatcaccatgaatccatccccttctttttgtgaatcttttactattatttttataaggccattctagatgcttttacctatgttactggtaacaatgatgaatgttttgttgtgtgctttaaaatgaccgacgataggtgcttatgaacataaggagtatttagcaatttaatattatgttttttagtagattgtccacattccattgtgattggtgaaaactggtttaatgccagtgatcagggtatgcccatttcagttacacatcttatgtgatttcatactgtaagatgtccttttctgaactattacagtattggagttttttttttgaattttcatattttgttggtgaagaccatagaagcatatcaacatgaacccatccccttttttgtgaatctttactattatttttataaggccattctagatgcttttacctatgttactggtaacaactatgaatgttttgctgcgtgctttaaaatgacagaaggcaggtgctt

SEQ ID NO: 4704 - DNA, 609 bp, Zea mays
  Intron number 2 from transcript GRMZM2G334791_T01 (locus G RMZM2G334791) derived from phytozome v7.0 (chr-ID 8; pos 1 66184612 to 166185220 reverse strand)
ccctgcgccatcctaacattattcgcttcaaggaggttcgtcattgtggactgaaacggttaattgcccgcttgatcatttcctttcgctttttatttttgtcactgggtgtttgatgccgttttagtgttattagggagcagcttcaaagggtgacggataaaggactttttaatatatattgcagcttataattcgggactgattcctcttaactgcatatagtgggggaatcttttgattgctgctgtttgattcggtgctaacttttgctgttttttctctgttctttgccccttccttttaggctattgcccttgtgtttcttacgtatccgatatgcgttttagtgtcagggatgcatccgttttagacactcgttaggctgtatgctttctgtctcagattgttcacacaagtctcaaagctataaggtgcagtcttctatttgaattgttgtgagttttaaatggacgaggaaaacagattatgcctccactcttttgcttcagtagtagcttttctcctccttttttctttttctgaatcacatggttttaattgttttgggaaaaacttctgcaggtgatacttacaccaacacatctt

SEQ ID NO: 4705 - DNA, 968 bp, Zea mays
  Intron number 1 from transcript GRMZM2G112158_T01 (locus G RMZM2G112158) derived from phytozome v7.0 (chr-ID 3; pos 2 0579143 to 20580110)
cttctgcacaggcgagtgcggctaattgttccaaggtactacttaattcctgtctcaacatttatcgtacctcatttgcgtgtgcagatcagctgacttcagtgtaattcaaagccggaacagataaaagtgtgtctttgccgatgatgttaaatagagtaattcctgattattgatgtcaagtggttgtgttagtaattggaatattgttggagtatgtttccctttatctttccattttatcatctgtcagtgctcgtgactttatggtctctaaatttcttagatagttcatgtcgtaccatgaaatgtgtgtctgtaaaattggtcaaccatattgttcatgtcttcaactctatttcgaagtcacaaactgatcacttggagttttggacgtgaagcaacgacaggcatcaatgcctacttaatatataaaactgcttgcttgttgcatgctgttacagcacctaagacctaagtacatacttgcttccttttcttatttgcatgctaggtcccatggaccccgttttgttttgggtttccctacacattgtccccggacttacagatgacaaatatgatgtgttctatgagtcacgtcgaaagaaagaaatgtactttagcatttcactgtacataagtccatcgatttcacattatactcttctacctaacaaagcccaaaattgagctacacatctttttgatattagtatgttaatgttagtcaattgttatcaggcagcgatgtctgattatagatctcaaaataagactgtcatttccccttagttcagttagtatagttgcttaaattcagcaagtctgaatacttcaacaaggcacaataagggaggttcaacacgtaagttagtataggaccatgtgtaatctatttaacagagaaaataggcataaaaacgactagcctgcagtcgtgcggatatttgaatataagtgttcag

SEQ ID NO: 4706 - DNA, 726 bp, Zea mays
  Intron number 1 from transcript GRMZM2G425635_T01 (locus G RMZM2G425635) derived from phytozome v7.0 (chr-ID 3; pos 2 04692744 to 204693469)
ttcattgagctcgtcgtcggtgacaaaatcaaaaggtaagttctccaaccacttcccccatcttattcgattcacttggtgatgggtttgttttgggttaaggttagggttcttcttcccccaccatccttacctctctaagttctctaatccgctttagttctaggttcttttgtgggttagggttagggatctacttagaacgagggggagcaatcgtacaccctcgcgggggtgaggggacgaacgaagggcgctgttggagagcacctaaacatggcttagggcctgtttgacaataatattttttaaaaccatggttttacaatattatatcttgcaatgggacaacagtgtaattttggctagctcaaaaaatacagtagtttttgtcaaactgaaggtattattcacactgtaatataatgtgggaaacatgattaattaacattgtgtttacacatttggcagaatacaaacttgtggagaaaaaacagtttcaggggaacagagaataaatacgtaaaaacgaatgaatacatacactaattaacgtgactggatcgggccgggtagatgtgcagctaattaaactgctgataggctgtatcttgtgttgcatgttagaagccagcgaacttagacatgatggcattgacttggtcctcgcccgtgaggaacgtcttggtgagcacctccatgggcatggcaggcttagtggagaac

SEQ ID NO: 4707 - DNA, 846 bp, Zea mays
  Intron number 2 from transcript GRMZM2G063517_T01 (locus G RMZM2G063517) derived from phytozome v7.0 (chr-ID 7; pos 1 29439336 to 129440181)
cgaggtaattcctctctgaattatgaaggtgtattcataagttttgctttattgtttgttaggttgttttgactaagtgaacgaggaagcactttgcttaataaccaatattggacaccacactcttgattacttctgcatagaagtgtatgcattgtgttcggtacttttccgtgactctcacacctctgctttcagttgacaatctgaaaatttcctagcagttcttctgtattcaattgcatgttcaggctgtaatatcatctatgtactgttaaactgtgataactatacatactgccttatcttcctcagtcctgctcttgaaagttgaaccaaatttgcctgatcttgcttcattataaaatgaatgttgatgttgtatatcctgttcccaagaatattgttccattattggcctgattcaatcatatagataaaaccattttgttcaattaactttggacttgatccccatgttgccctagacacttttcctcttacttttttaaaggattatgctatctctattctggttggtttgctgtttacatgctatgaatatggactatggttcatcaacatttttttttgtgcacattgacacttgttcaccttgtaacatgctcatcttgcaagaacctaaacagtcatccatgtagttggacataataattgtacttgtatgaaataccttggcagttttaccagaaccccctacttttatgctttgcaacatttgagattaattactttgcctatttaggtggttcaatactctattttagcatgctaaacctttctttgccagctgtcaattttttcaagatatctgctcgcaattgg

SEQ ID NO: 4708 - DNA, 705 bp, Zea mays
  Intron number 1 from transcript GRMZM2G083470_T02 (locus G RMZM2G083470) derived from phytozome v7.0 (chr-ID 6; pos 1 54352670 to 154353374 reverse strand)
acgacaggtacaaggagaaggtcatactcaagaaggtaagcagcgcccggccccggtgctgaaattgctgtggtgtcgactgtcgagctacaatcctggaaaaactaaaaatccccataacagtgacttccaactttttacatcccatcttcaaaacatctctctccccttctttaaaaagcagctaaacttcctatcaaatacgttttcctaaaaataacctacatgaaacaattaattgtagttctattaaaagccatatcatttctactcaatcaaatagcttaacatagagcagttgcaccaactaaaattcagattttaggcttgaaagacaatctattgagccaaatatcaaacacattgatacactacaaagttggttcaatgacaaaagtgccaaatgaacctagtcatatatggcaactaaaacacaagcatcatatggtttcatcagtattgcaaaaaacaacatttgggattaccttatcaacatcttttaaatatattatcttttgttaggtaatccttttttgtaaaaaccaaagaaaatgagaaacgtttagtctccgtagatcacactttctttcttggcagtgttatcctgatttttttttaaaaaaaacactatagatagagtgaactgtgaaaacaccattttgtgcaaatcccataaatgttatcattataattcagatcaaggtc

SEQ ID NO: 4709 - DNA, 861 bp, Zea mays
  Intron number 1 from transcript GRMZM2G461189_T01 (locus G RMZM2G461189) derived from phytozome v7.0 (chr-ID 9; pos 6 8216379 to 68217239 reverse strand)
acattagctcacgtaaatacggtagaacaagtttagataacatgcatagccactaaagttttttttgagagtcgatgaaccagttgtgcaggccgtgctgggcttaaaggaccggaatttaagacccggtccagatctaccttcgggctatattaacacattttatattatttcgtgctggatcgtgcttttagcttctatttttgattctgctcttgctgccaaaaagtccagcccatatttcagcatagactgtagtagtcggcccaaatagcctgccaagcccacctgcgatgttaaacgaaaggactgccctaacctcgtgcagtcgtgctcgcttgtttcacttgctcgccttcacccctcgccgccaccgccgccgccgccgtcgccgtcgcaagcgacgatgctcgacatcaacttgttcagcaccgacaagggcggcaacctggaccttattcgcgagtcctagcgcagtcggtttgcctccgtcgagctcgtcgacgaggtcatcgccctcaacaaggcatggcacgaaagtcctagcgcagtcggttcgcgagtcctagcgtagtcggttcgcctctgtccactctcctcgttacccggcccccgtctcctccctcacaggctggtctctgactctgaggcgtcctcatgttgcagggcagttcgagctggataagatccggcaggagctcaacgctaccagcaagaagatcggcaagctcaaagccgacgttctgtctagaattgcgaagcgctcgtcatccctttttcttctcggggttctgagtttcatgtgagtgactgtggcgtgtttctttgcagagcaagcaagaagaggaagcgaagaagctc

SEQ ID NO: 4710 - DNA, 988 bp, Zea mays
  Intron number 1 from transcript GRMZM5G898269_T01 (locus G RMZM5G898269) derived from phytozome v7.0 (chr-ID 3; pos 8 274643 to 8275630 reverse strand)
gcgtattgcgacgcggtctggtaccgcctcttcaggtcgtgactccaacgcttccctcttgtgtgattcagaatctgggattcatcatccgctggtacatcccgttgcgcgtttgccttcgactagggcaaaatttagggagcaatggattatcggtgattgctatttggactttggagatggggcagggttgaaccttgtgaagacttttgttactttccggggtcatatgctagttctggtggcagctgggcataggaaagtaggaaggcacaaacaaggaggggaggacaattatttgtgtttcttaattttagttatttggaccggcgtttattctagggctatccaatttgcagttcgtaaaatgtagtgggacaaatctttcaattctacgatattttggatttcagggattgtactattgcatctgtagagggtcatccttgtgaaacttgcgatttattcattgattgccagaacaagatcagtttttttttcagcactgaccaagtgaccatgcatttgagtgccctgttgcgaagtgcctatatgttagggatagggaatgacaacggcagtgctgttttccatgataaattaggatgctgaagcttcaaattagcagtgaacaatgtcaaatggattatgtaattctgtccagggattgagatgttgtttttaatgactatgcacatggtttacttttaatgctaagatacatgaaatttgatagtgacatatattaacaagaaaaccattgggggtccaatggtccatcattcgtagcaaatcaacctatctataccactttagattttatatcctcattttttgtgtctcttgttgggtctcatatgtaggctgtagcctaccccaacttgcttgggaatggaaggctttcttgttgctgataaaaaaacaatgttcatcttatagcctacttatatttgtttcatataattatttattaaacattcagggatca

SEQ ID NO: 4711 - DNA, 1064 bp, Zea mays
  Intron number 1 from transcript GRMZM2G043843_T01 (locus G RMZM2G043843) derived from phytozome v7.0 (chr-ID 3; pos 2 30536762 to 230537825 reverse strand)
tcttccgcgacaaggcctacctccaccccgagaaggtcgcatttctcgagcgttacatcactttgtcactgcatcgtcataggttcttcgtccgcagccacctcgttccgaattcgaattcgaaactgcttgctgctcccgtaacggtttattccagattccaaaattcgggtgaacctctttttgttatcctgtttcaaattgggtctacacccttgctagtcagttaaaatccgaactcgtttcgtagaaatccgtcttttatgaaaataaacccccaccaaattttccagagcaatgccctgtttcagtcttcttaaatatagttatgttattggagactaaccggcaaaagtgaaatgacatattcctttgtgtgaaatggggttttagcatcagttagcagatggctgagcaaaatagtaaaattgggaataatcaagaagggggtcgtaagtcaaggcgcgctcatggaatcctcagtaacgtaaggacgcggttaggaatcctcggtagagtgaggatgcaggtagctggaaagtatcaagattgtacatgggattggagcaacgtgcagattcacataactgccacatcacatgctctttgatttggtaccttccggtcctccacagctactgtctgttcttcacctactctgatcggaacaaacaaagaccatagcatgcatgcgctgtagaaagcatccacctggaattaaggtattaatttatcctttgaagtgtggacagcacattgacaaaggctaaaatgtttagtatctgaaaaggattgcctcgtcagggtgagatttttcttcttcttctttcccgtttctttcagctgttgcctgtaggaaggtctcaatttcactattattgacagcgaaaacaatgaatatccagccaatttgcttgcagtcaaagttcatttcccccctcaattacgtgcaaaacgagcaaaaggagtcatgatgcaatctctctgactgaatcttgcttgcattgattaattactgaccgatttcaggtggtggacctggttagaagggccgtgccactcgc

SEQ ID NO: 4712 - DNA, 428 bp, Zea mays
  Intron number 2 from transcript GRMZM2G393428_T01 (locus G RMZM2G393428) derived from phytozome v7.0 (chr-ID 6; pos 1 16131417 to 116131844 reverse strand)
atctcaaagctctaagcctgcaagccttgggttaggtactgtcttctcaactctacaaactggattacctaattttcataacatctcaaatggtgtcatagttttaatcaacatttcacttgatttgacgatttccccctaagagaacacacaagacttgcttataactcattttttaacaatatatattacatattactgctgaagcaacaaatgtaggttcaattttgaacagcacacactttgtactacttgagttgcaaatttgctttaaaagcctaagaaacctatcatcaacattatatcaacactttatcatatctgttacgttagtcctattacctctgcttttcttagccactaaatttgatgttaggcatttcacttttattctgaacattggtattcttctttcttacggggttcac

SEQ ID NO: 4713 - DNA, 920 bp, Zea mays
  Intron number 3 from transcript GRMZM2G147532_T02 (locus G RMZM2G147532) derived from phytozome v7.0 (chr-ID 1; pos 2 76295762 to 276296681 reverse strand)
aagttcagtacgatagtgcaaacagagagcatcaggtactccttaggttcctattgacgttgaattgtcctaatgcggttcatctaatgttacttatccatgttctattacgaactgtatgtgtgctattttcccacaattttctaatcaaaatattcagcacaaaaggatgacctcgtatatgggatattcaattgagtgtccatgaaatttgacaaaactagaaaattgaaaaaactagcaggcctgtagatctgagcaaatgatatgaagtacatgtaattactttctcaaaacgtagattagcttttttgcaaggactttagttgaaaattggaaaatctaacatgcatgtagatctgagcagacgatatgaagtacatgttgtttctttcacaaaatgtagatgagcttttttgcatggacttcagttgttatgttgctcctcgttaacactaaaacttaacctgctcgagttacaattatacatctcaatccagatcagccttttcattgttctggttctgctcatttatcctttctggtcacataaattcttgccatttaacaccagcactaaagaagatagggagagttcaatgcatgatgtttgatttgttgacactggaagaggcgactaattgaggccgttgtcattgccaccggtgtgcacacattctttgtcaaggctgcatatcttgtcgattcaacaaaccaagttggtcattttcagaatgcaagctaagtgtgacgccgccacagaagaccatgcccactgtatctatactttatactaatttttaacgtccaaaggacaccagatgtttcaatgttaacgatgttgttgttatacactgatgttttgttcttatttgcttgcaactttttgcagctgttcgtgctatcggtttggaaagaac

SEQ ID NO: 4714 - DNA, 988 bp, Zea mays
  Intron number 2 from transcript GRMZM2G176636_T01 (locus G RMZM2G176636) derived from phytozome v7.0 (chr-ID 1; pos 2 26365978 to 226366965)
aacacaaatcagtgaagagttcgttgcgctagagatggaggatggataggtggtagatttcaatatggatttgataccattgttttcccttacaatctttgtacggaacaagaaaaatgacattgtatgtggatactaatgtaattcaagaatttatttctaaataataaatatatttgtttatagtttgtgtatgggtttggtataatatataaatttttcagctacattgattacatttgtattcaaattaaattattgtaattataatatttattgcctggttcatttcttgctacacatggaagtgttactatagtcctcggatatccgttgtagcatggcaacgcttaactcttggttttaccaacgcatgtataagtgttgttatagatccttgcaacgacagtatatgcaacacataattatatgttggtatagaccttagcaacacttatatgatctttttgcaacacatatatgcattgctaaaggggtggttgttttgtagtgtcatttctcttggagaatcagcttaactactaaattttagatcatatcagcttaacttctgttgaactagacgagccggtcaaacttcgtacataaaagtcaaacgaattataaattgagacgaagggattataaattttgcattcagccaaacaaagctaattatcatagagctagtgatactatatacttcctctatctttgaattaatcaaatttgaagttaaaatttgaagttatcttattggttgaatatataagaaaagcgttaacatttatcataacatcagatgcatcataaagtatattttcataatatactaatttgatgtcacgagtatttataatttttctataaacttagttaagcataaaatttttgacttaagataactctagtaattaatttatacataaatagagataataacgtataaaagtagtctcaatatactattagaaaaagcaagcaagaa

SEQ ID NO: 4715 - DNA, 809 bp, Zea mays
  Intron number 1 from transcript GRMZM2G126795_T02 (locus G RMZM2G126795) derived from phytozome v7.0 (chr-ID 4; pos 1 77647384 to 177648192)
aggcccagctctacccaaactttctccttgacaaggttggctgcctattctacttgcctcagctacccttctagaattcatgccatgtgctacaaacctcaaaatggcctttgctgaatgtcatttatgtgttgcctggtgtggtcgtggtgtggcaaaaatagtagacgttgcatgcaattccgaattctaggggatcgaaatgaaattctattcgatgggacgacatttgcgctgccacattactctgatctcgatgtggtttgtattgtatgggatgacgctgtcattgggcttgtcactttctctttctaccccttatttacaccgcattattagaagtttggggtaacttctgcagtacatgttccttagtgtccttgtcgaccagttgatttcatcaaacatctgagtctgttcttgctgactgacctttcagaattagtttcacaacatttggtgctccatgtctgttatgtagtatgtactacctccattttcttttatttgatgctgattagttcaattttatactaagaaacatcaaatataaaaaatcggagggagtaataactatgccgtccaccgctatttgttcatgaagctaagttagtatgatatgcacttatgcccgcgacttttagaacactatactcagggtctcaggcccttactggaacacacatctctgttcttgtctattgtttatttagaaccgattgcagatatggcttgctaaatttcttacattacatccacatcctgtctatataggttctgaagaaaatatcagcccgacaaatcgcaaa

SEQ ID NO: 4716 - DNA, 862 bp, Zea mays
  Intron number 2 from transcript GRMZM2G027857_T02 (locus G RMZM2G027857) derived from phytozome v7.0 (chr-ID 8; pos 1 60923365 to 160924226 reverse strand)
gttccacctgaaaaaacactgaagcttccccacaagtaagactttttgcaaattcattgctctcataatcctcatgtttgtatgcccttactagtcgtgttattcatgccatagttattgagaccaactggacatcaaacttgggaggtccatggtttgattgggctattggaccactgcctcaaagtagttaaatatcatatacctttttctttttcccctccaactatgcaggagagctttgtgccatttcattaagaagaataagagatacaaaagggagggaaataagaaaaccctcccagacacccccatgggatttagccaatacaatacagcattctagaaaataaactagggaaacacaaccagccgcttcaaactacctagtacctaggagtccaggaccaaccacctaatatattgcatatgtttcgtgcctttcaagagtgaaacagtagcagtggtgctggtgcgtgagaaagcctcctgggcgtaggttatcaaatcccatggcacatatctttttgttaatttgttaagcgtactgccctgccgaacgtttcccaccaccacaccacacacaccaagtttgtgcaattgaagctgcacgccatgcccacatgtggctcagaagctggtttttcttctgtcttgaagccatacagttcggctgttttggagcgtatgctgtggttccttaagcgaagaaggcgagaccctgcagtagttgctgtcgaatacatgcaagagctctgttatcataatggtagatagtaaattggaaagtttcttgtgtattaacgcattccatgttacctgcattgtttgttagttaagaacattggatttcacaggatcg

SEQ ID NO: 4717 - DNA, 994 bp, Zea mays
  Intron number 3 from transcript GRMZM5G890561_T02 (locus G RMZM5G890561) derived from phytozome v7.0 (chr-ID 2; pos 1 76469258 to 176470251 reverse strand)
tacccgagcagcatctaaggttaggtatgatccacagacgtctgttattctctatttgtttggctggttgatcttgaatttgttgtttgctatcaaatgagatggcaacgaattctgcttagtttgcactcgacattgctgtagaggctagatctttaggttgtaaacgcatcatagtttgtggttacggttgtttgttaggattaggaggcacattgagtctgtagcagcaaatagtccctattcagctgagaatcatggtagtttggctattgtggtttgttgtgctcatgttgatactggcctgaattcggtgagcttattatagctggctgagggagtaattaactttagtgaagaacgcaagttaaaaacttttcactgttcttcactctagtcaaggaaaatgacatggtcctcatcaatcaacaagtaatattgtaagagagaactgctggaaaattaacagcgagggataggaatagcgtaacatgctagaaatgtctgcatttgtcgaaactctaaaaaaatgcttacccttattagggatgaagggaagtatatacagttgttccaactaatgtttaccaccatttgattttatcagttcctttgcattggagctcctcaatgctgttttgcatcagttctttaattgtgctgtcactgtatattgcatatagtgatgcctattttgagcaattgagacttggcagttttattgcttccatttatatttatattgggcagcttttcttgccatataagtgcactgatatttggtaatgttcattgccttcgtggtacaatacaatggctgtaaacataccgtgtcttgtttagaacattgggcatcggtctcccaacacgaaattcgaatccaatgcttaaccctttcaaaacaattccatgtgcatagcctgcaatgccttcgcttatgctattatctggctttatgtctgcaggtttttgttggagtaaaggtggactctaa

SEQ ID NO: 4718 - DNA, 916 bp, Zea mays
  Intron number 1 from transcript GRMZM5G892991_T01 (locus G RMZM5G892991) derived from phytozome v7.0 (chr-ID 1; pos 7 5628271 to 75629186)
cgccgtcaccgccgcgctgctgccgctaccgcacggtaaagcgctatcctttgattacttcccctcctggctactactacaccggtctcatggcgtgtgtttttatatgcttaatgccactccttgttagtgctgttgctttcttgatcgatgtgtgcggtgtgctgctacttcctatagctctaatggttttttaatggccgatagtgagggtgcttagatactagtaccaaagaatatagtttctcctcttaatgtttgatccctaatggcttgtcatgccgaggtaatgcggcacagtgacttttaggtgcaattctactgtagtaccagatagccaaacaagtcctgccattttgtacccttggtggcttgtgatttcatggattcatgcttagaactacgcatcattgtttttttccttctcttgcactgttttttctctctcgcgaatttggactgaaactgttcttgggaaaaaggagagcgcaagaatgtttaatgagacacagacaaagttctatttgcggtactgtggctgacgcctttcctgttttgacggttagtcccctttcccctcctcagaagggggcatatggctatggccgtctctttactagggaggatttgtgatccactaatgcgccagtggtctttctttcccattgagacagacatgttccatttttttggactctttgtgttttgctgtacactttctgcattacttgttctaaagtgagaattttcagggcaaacgtgtgcctcctttttgacctggcaatattttattttatatatggtgcaaatcacctaacgatgtggttgctcaaatttgtctttttctttgcacggctctgacgataccaatttattaacagataccgagctgattcagcacaagtgcttcattcac

SEQ ID NO: 4719 - DNA, 975 bp, Zea mays
  Intron number 1 from transcript AC203535.4_FGT004 (locus A C203535.4_FG004) derived from phytozome v7.0 (chr-ID 3; po s 157586538 to 157587512 reverse strand)
acaccgagggcctcctcaacgccaagctcacgcaggtgcgtctcgactcgaactcacggctcacgccaatgccgccggcctgcgccgctcagcgttacctgtcatggatatataccgtataaaagaattatacgcagagtcgcagacaaacaatacaattacaaccatggtcagcaaaggttaggttaacaaggatgacaaccaaatccgttgaaccattcttgtttcaaacaagttacaaacctattaagtctagttaattttttcttgcgaaaatgcttttgggaaaatagagttgtcaaactagcccttaataaacttccctagttgcttctagagtttcaaaataagttagaaaaggtaatcattccattggtcccaaaatactttttgtttttttaaaaaaggtaaccttgtttgaagcccaccttgataaaccagccacatagaaccctttttttttgtggcaacccgttcgttcttccacaatttcatcagtcttgaattactaatttccctaaaggtcaacctcctatacatagatcttgttgtataactacctagcacccagatgaatttgtcctccccttcagtgagcctaaaattgtccaacatgtccatccatctctcccattccaacatatcactttctcccaaaaaatcttcataaaagttacattccaaccatctcctttcccagcagccactaactaaacaatctctatccttacagatattggaaaacactcaatccttatcttctgctgacatgtctgaacttagtttctgctgacatatctgaacttagtttctgctggcatgtctgaagcgtcatgggtagggatttaatagctttcttgcgtatggacttagatgagataatttcattctccttcacggagatgtaaccttgcatctttttttttttttggtgtttcaggacgggtgcattgtttgtccatcaacagacagcac

SEQ ID NO: 4720 - DNA, 902 bp, Zea mays
  Intron number 8 from transcript GRMZM2G104410_T01 (locus G RMZM2G104410) derived from phytozome v7.0 (chr-ID 2; pos 2 05488468 to 205489369)
gaagacctggaagtagataactttaatccgagaaggtattttctaattggattacatgatactagccctatattgtcaaacttaccattgcctagcaacaacaacaaaagagccctgcttatttgacttttaaatcaggctactagtaaaaaaactcgacctgcggagataagataacccctagacattgcattaagaagacttctcatgcaggtcgagaaaacctacgaactcttgctccacccgtacacaacgacaccgtagcccatggagaatgaccatgactgagctgggccttaggcagtggcagacccagctgctacactagagtgtgccaagaaaaatatcaaaaaaaacaaagatcatcaagactcgaaccttgactgccaagttcaaaagatagtacttacatcgctatactaactaccattatatgatcttatggtgtgtcgtgtcccatatggatcacccgccgctgggtccgcccctggccttaggcatgtgagtttatgtgggatagatgaggataaccttggcctaaaattcgcttccatatggtctaaccctcctcaagctacctaatcaactcggttagaagccctttcgctcagaagctactagtataaaatgatagttttttggatgtttctgctgccagtgtcaggtatgtgctaggtgctaggcggcaaacagtttcttgaaagtatccaccttaagttcttgttccagataggagaaacttgtgaagaaatgtcatattatgctaaccttctccacacaaaaacacatgcactcacacacaaaatgagtttgtttgatcttttcattttttgacaccaatttagctaatgcattgattactttcaggtacttaaatatagttagatcagaaggactggaga

SEQ ID NO: 4721 - DNA, 888 bp, Zea mays
  Intron number 4 from transcript GRMZM5G852185_T04 (locus G RMZM5G852185) derived from phytozome v7.0 (chr-ID 6; pos 4 893019 to 4893906 reverse strand)
aagcgtaccaagaagctcccacccacctggaagtagtaagtcaaccagatcccattccttgcctgctcttgctagcagtgcctgattgcctgaaccatggatttgtgaattgatagctatctaagtgatgtttttttctgtgagagcccatatgtgccaattgcagcttaggagctgtcttagatcagttagtggtgtgtgtagatgctatgctcgtagtctaatcagttgaaattaaataaacattattggctgttatatattcaggttgaaggtttaggcttgcgtttttgttacacttcaatttgagatggtagtctttgtgtaggcatgtttagtgtgggtgtgtgttagtgggaatggcactattttgatgtttataacactggtatgctgataatggggtgttcattctgaatactgaacactgacaaagctgaacttgactttgtttcaaatactgctggtggcagcgagtgtccttgtttccattgaatgtagttgatgtcgaggagggctagttttacacttaaatcattagtcgagttcatgtgcatgtggcgaattgaatacaaaaattagtgaatttgcagaattatttttacggcaaaccttaaaactaagagtttcattaagtttcactctagctaatttgctgaccagcgaatgttttcttcatcgaaactgttagtacgttataggctgaactttgtccataagatcaattcagttgaccctaaaccctagcacctactgcacatcatttgtcatctatttgttgttatatatttgaactccttgttttgaagcttcttgcacattgctgaacctgttttacttgttttttgtgcagcgagtcaaccacggcgagcactctggtggcctaag

SEQ ID NO: 4722 - DNA, 385 bp, Zea mays
  Intron number 1 from transcript GRMZM2G402837_T01 (locus G RMZM2G402837) derived from phytozome v7.0 (chr-ID 2; pos 1 5000299 to 15000683)
aagagctgaggtttatgtatgaacaatatactaagcaccatccgttcattgagtaataacccacttatgtgtgcatgtgatgatacatgttccacaatcatgcttgcatatagtaatgctggccaatgtcttctgcaattctgcaatcgggaaaatgtacctgtatatatcttgcatttcttaaatagggagaaattaaatcttgatgttttgaatgttgtgcatcatgttttttttcgttttgtatgcaagactaatatacttcacctagtagtataaacagtacaagaaaattatacctggtcatttgtcttagttaagaccacaagatttttttgctggaagcctggaacatgacattgctatacaatacttcttttgcagc

SEQ ID NO: 4723 - DNA, 747 bp, Zea mays
  Intron number 1 from transcript GRMZM2G341405_T08 (locus G RMZM2G341405) derived from phytozome v7.0 (chr-ID 2; pos 1 82522443 to 182523189)
acgagtcctcacacctcaccgccaggacgtcgtaggtacaattctcatcccaacccagttcaattaatctgtttaggtccactttgaccactgcttattattatgttacaatcaatttgtatcatctatctcaatgtatctgtgtgtgactcgatttgagttcttatctgaagcatgtccagtgttgctcttacaacttaaattgaagtcttttctgatctcttttactatgctttgttctcaaattttagttggtagtgccctaactccggtctctacgaacaatttgcaccagcagtgttgctcctgaaacagagacaatagggtgatcatcaatataatttcacattgcaaatgtttaactagaggcaaattctgtttatgatttctatacagcaacaataatttcacaatgcaaatgctatgtttattatgtattgtttgcatttttcagtacactgctatagtttgtttaattattggatctcttaaatttccatacagcaacaataatctctacatccctctctccatcttgttatgtaattatgagttcattagatgtcattgatctaaaataatttctatccattatgaacttatttttaatgaaccttgctccttcttcgttgctcacaacagggtccatgtacttggcacatgatatacatatacgagatggtcctaaaaactaacaaaggtcttcttttggtggcagataattttggttttcttgtgattctcttt

SEQ ID NO: 4724 - DNA, 652 bp, Zea mays
  Intron number 1 from transcript GRMZM5G842484_T01 (locus G RMZM5G842484) derived from phytozome v7.0 (chr-ID 6; pos 1 27890223 to 127890874 reverse strand)
tcaacaacatctccctcggcggccgtggcggcggtgtgagttgtcgtcgatcctgttcattgtcgatcgccctaatattcagtagatggcgattcaagcaatcatttcgttagggtttggcttcttctatataatatataatcctgtggcgtttgattgcctagctagatatcacaagttagggtttattcgggtggtatgtttggaattttgagaaattttgtgggaacaaacagactccttaattgaatggaacaaccaataggcgttgcctaaacaattctgcattatatcttaacctgctcaacattctagttttatttcttcagtctattctgagaagtcatttttatcctatatatatatatatatagttgcattccctcagtcgtcccattatgttcaccggcttgttgttgaactttgttttttcaatcttttgcggccggttagaattatgcatctagcttgcaacgagcttcgtttttttcactacaaagacgggggaataatgtagttcaaatccgataaactcgattcattttatttatgattgctatattgcaattgagatcgatgagattcttgtggtgatgtgacggcttgtgtcgttatagcaccctgggcagttcaaactttactcaggaggctt

SEQ ID NO: 4725 - DNA, 979 bp, Zea mays
  Intron number 1 from transcript GRMZM2G386971_T01 (locus G RMZM2G386971) derived from phytozome v7.0 (chr-ID 7; pos 1 43013590 to 143014568 reverse strand)
cggtcgcgcccacgcccacgtccacgtagcctccggtccgatttgcatctcctcttcagagcccccgttttatttttgtgtcgacgcgaggtgtttaattctgcgtcgcttgtgcgatgagtgcctaaattgagtggagcttggtgggatttgtctggattttgggcttgatgcgctccagccgtactctgacgcgacttttatttagtacccgctgcgctgttgcttgattttttcgtttggatggaaactgtgtcggtggaacattggtgctctaaggaaacgaacctagtcactctcgggattgcaggaattattatcccctggcgctcaggtattatcggattgcacgaactgttattccttatatgttgctgttgctaagttgtaggtgtatataggataagtgggtagcgataggttaacgttgtcgaaattgaagtgcatgcatacaacagtgagctaacaaaactataatgcaactgtataatggatggtcataagcatgctgaacaacgacggcattgccattgttggctgaaatgtagtattatctatgaaaaacaatgcatatggttccacattattttgttgttaggtgtaagaacaatgtactactccctctgttccaaaatgtctgtcgatttagtttgctcctaagtcaaggctctctaaccttgaccaagtttatagaaaaaatacatcaaaatctacagcattaaattagtttaattaagatcatcataaaatatgtcttggcagtctataaatttgatggtctatattttaatatctttttatctgaatttgctcaaagttagagagatttgacttaggaccaaactaaaacggcatacattttggaatgaagggaatacatttttgtgaattaaaacactgcactttctgaatgcattgtttcacctgaaataggtaagcattgacatattctgtttgcctgcagatcgcaagggtaaga

SEQ ID NO: 4726 - DNA, 699 bp, Zea mays
  Intron number 1 from transcript GRMZM2G104400_T01 (locus G RMZM2G104400) derived from phytozome v7.0 (chr-ID 8; pos 1 02537962 to 102538660 reverse strand)
ccccatcggcctgctggcttctccccggcttccccgtaagcccctacgatcaaccttagccttcatattctgcatgtttctgttcgaattatggactttctaggccgattaggttgggattggtgtcgatctggggtttcgatgcaagcgcggggattgtggacacggttggtttgggttgagaactttctgggttctgggctgaggactggggcattaattcgtcgattgtgcgattagcggtggtggactgtggatccgattggtttcgtactcgaccgatcgggggttgttggttggttgtgtagcgttgacctgtacggcagacttgtatctagcctgatgtctatttggggatgaattggaaattcgatttacggctgaaactccgggtcttcaatggttgatttcctgttgtatgatacgatgaatatgaatatgcccgtaaaagtttgattagatggtggattatacggatctgtctgctgatgtgacaattgttgcctttacggttgaaacttgtgtgggtagtttgagctttagaatcatctgtctactggcatgtcgtttttttttgtttgaactttgaagtggaatatacttattgtaccatatagtaccatagagcgtatatgatccttctgtgtattaacctatccggtgttttcttttcattcaggatactgatcctcatcactc

SEQ ID NO: 4727 - DNA, 487 bp, Zea mays
  Intron number 1 from transcript GRMZM2G173710_T02 (locus G RMZM2G173710) derived from phytozome v7.0 (chr-ID 8; pos 1 24487795 to 124488281 reverse strand)
aggcagcgtccttgaaaaagaacctctttgatcaggtttatgttggcattttggtccagtcaatagtgtgtttcctgtttgttcaagtgttgcagtatacctaccaatatactgtgtaccacatgaactactcactttggaggctgtgcaactctactcctcaatcctttctttgtataattactttgtgttattttctgttcagcatttagcagggattacaaaagagtcttgtggaaattgtttacatcatttcatattagttgacagaaagctaagaacctgaaaaaatgttgaattaagtgtgtcaactttatttatatagaattttactaaatgtgagtgtggacctttattaagcaaactgatgctaaggttttcatggccacatttgtttttttaatcaaattctgctatctgccttactttaatatgtgctgttaaaatgtttgctgattttccatattgtaatgacagggatacttgg

SEQ ID NO: 4728 - DNA, 401 bp, Zea mays
  Intron number 3 from transcript GRMZM2G061812_T01 (locus G RMZM2G061812) derived from phytozome v7.0 (chr-ID 1; pos 1 3380317 to 13380717 reverse strand)
agaagtcggaccaaaccaacactataaacctctaggtatattaaatatacagtttggattaggattatggattcctataatatttctttatgctagaattttactctgtctttctttagcatgataaactcctatgattgaccgagagcttaataatgttttggtctaaaaaactcacaatcaatgactttgatcggattggtaatagtaagcaatattatcaggtttcacctttttacaaggagaacaaggacacataagagggctagatggcaggggcgtcttcatgttttatttcatcaaaaacacttcacatgttttcttttgagttgctcaattttctcaagttaattcgcaccttcctagcccaacttgcccagatccgagcggtggtggcagcc

SEQ ID NO: 4729 - DNA, 1008 bp, Zea mays
  Intron number 2 from transcript GRMZM2G147791_T01 (locus G RMZM2G147791) derived from phytozome v7.0 (chr-ID 3; pos 5 4176115 to 54177122 reverse strand)
aacccaagcgccaccgccagacctccaccaagggggtaagataatttgctcctgacgttcctcacccgtcgtcccattcgattgattgtgcagctgcgtcactggcggtcattggttcatgcgagaatcatgtaaccgccgacttcaattgttgttacggttaggtgaaatccatctaggttgaatcatgtagctgccgactttaatggttgttcgggataggtgaaatccatccaggttgtgaagttggttcctggatgctaatttgttttcggcatcgtccgttctattgccgtgttacggtgctagtagtggctcatgctcgcggcactagctaaagctgttagtcgttcctaggatgaaagatgtctaagccctttgcgacgtctcttagcgtggtaatgtgaagtcctctgatgttctaagccaacggtaatcagatattaaaaggatttggtgcatagttttttttatatccaagcccacttaagttctatctaacccattgattcgaagggttatcattactttgctataatttgtttctacttgtcttttgaaaacatatttagttcccgtttgcttctatggtgtgtatgaattcttgcagctagtatttttcttgtctttaaataatctcaatatgcttttggtccagttgaccagtctagtattttactagtctcccttggagacaactccgaagttgtatttgattttcatctccagagttctcctgatgaggttgaggttgttgctatgatgaggcataacaccttttgagagcagattattgctctatgaacttgggaaatgttcagatttcctcctgagcggttacctgagcaactgcacaaccttgattcctgttgcgtttcatttaggatcctatttgtattgagatgaaacacaactgttactgttgccaaattttcatctccacagcatcttgagatgcatattgtttcttgctcttaaactgaccttttgctttgaccatgtttgcag

SEQ ID NO: 4730 - DNA, 919 bp, Zea mays; identical to SEQ ID NO: 4522
  Intron number 3 from transcript GRMZM5G897073_T04 (locus G RMZM5G897073) derived from phytozome v7.0 (chr-ID 9; pos 2 7542005 to 27542923 reverse strand)

SEQ ID NO: 4731 - DNA, 485 bp, Zea mays
  Intron number 1 from transcript GRMZM2G077375_T01 (locus G RMZM2G077375) derived from phytozome v7.0 (chr-ID 3; pos 2 08537387 to 208537871)
cgctcgcgcgccaccctcgcttctgcagcgtccaggtacgtacggtgtcaccatccactcccgttcacggtttcgtgcgctctacgtggttgtcatgaatgaacgaggaagaactggtgttagacggtagtacaacgcagcccgtgaaaaggaacggtagaaaagggccgaaaatgggatgcgtgcaccgattccttcaactaaatgatcttaggacctgtttgccatttatatatataggtatcggaggcgatgcaattgaactggatttaataacaaaataagctttggtatttgttagaaatcaaatgtctaaaaaaaagatatgaccgctctattattctccacttctcaaccaaacaccctaaacttgtatgggagttcgcaacatgattgggcatatgtttttttttgttcttcgttgcttcttggttgttttggagcgagaaccactacaccacaaatggttgcgttgcaggtggtaa

SEQ ID NO: 4732 - DNA, 988 bp, Zea mays
  Intron number 1 from transcript GRMZM2G425751_T01 (locus G RMZM2G425751) derived from phytozome v7.0 (chr-ID 3; pos 3 0504078 to 30505065 reverse strand)
acaatctcatcttgtctttaaatccgtcctctaaggtagtaaggcagggtcgagctccttcaaaaacacacctgtttcgctgcttccaaatactccaagccccaaggattaccatactattaaacccctttcttttgctcttgggaatcttggatgaagcctttctccaccattcagcaaaaactgaatctcttctcttaggacccacagaagagagaccaattggagttaaaatattatgccaaaactgtcttgtgaagacgcaattagatagaatatgctgcacagttttgtcttcttggtcacatagaacacaattttcaggatgatcaagcccccctttttttaagtctgtctgctgtccaacatttgttatttgtgggagtgtaacaatgcaactgttggtagtctcattaacaaaggattggactctcttattacattgggagcttggacaatttggaatcacagaaacaagtgtgtctttgatcgtttagcccccagtttggcacaggtgcttaggcaagcaggggaggagtgtgatttatgggtggcttagccaagggtatctcaggtgctgaatggggtggttagtcggttgtagctctggttgtgtgaatgagtgtgtttaggttccttagtttttggcctgcttgatggggtttgtattagagtttgagtttgtccttttctccttaatataaagatgcgcagttatcctgcgcgttcgagaaaaaaacatgttcttttgtagatggagcagaagtttttgaatacccacacttcgaaaaaagggttaagaacccttaacaaagccacacacccataccacttacatttcatatttgtttcagaattttataaattgcaggaagattggattcaattttagttctaggaggcatcaattctagtattctttgtactgtgattcctattaatattttttttatcaaacagggtattctgtcaacagcacgggggctca

SEQ ID NO: 4733 - DNA, 1041 bp, Zea mays
  Intron number 5 from transcript GRMZM2G154532_T03 (locus G RMZM2G154532) derived from phytozome v7.0 (chr-ID 3; pos 8 2057724 to 82058764)
tttctgcagtggtaaacttatcaaagacatttgagctaaatatgtttctgtacttagtgtttgacacttttcttttattatagtttgatttcattttgttcagtatcaataatgttatacagagtagtttatggggtggtgatataataccaagaggtttccactccgaatgtgggagtaagctaaaagattttttaaagtaaagatgacatgagccctgcctttctatttagagggaaagagagtttaaagcaacagattctgaagcaagtaaaagaggcccgcacaaaggcctccaaacagcccaccaggggcagcacaaccaccacactcgagataacagcagaaaagcaaaatataatttacaccaaaacaaacacccatctccttagctcagtgccttcctttatcttcatagccacttgctgttcttttgagaggatccacacatgacataaatggtcaaaccgtggctgttgcttctcatgaagagttgatggttgacaaattgttcacatgctgtattagataggccagcacttgacacaaaacatgttttgcaaaggggcataggtacagatttagttcagactcaagtggccaactgcacaaaatgttattgttagctcattgtgtcttctatcactgtattcggccttggcccatgtatctgaatatatattagtacatcccctgcccaattagggttagggtttctattctcccaacacgtgttctgtttgtgcatgtccattgtacctgaattatgaagcacttcttaactactacctccatttttatttatttgacgtcagttagttcaattttatagtaatcggcgacaaataaaaataaatggaggaagtatgtagcaagacttagctaagtcagaatgtatttggttacatgaagtagctaagtcagaatgtatttggttacatgaagtatccgaacatgcattgataattcttgaggtatcactaagatgcgagaaaaattattgcaggtatcttgtgtcggaggttttggatcaaattcatt

SEQ ID NO: 4734 - DNA, 894 bp, Zea mays
  Intron number 1 from transcript GRMZM2G115000_T02 (locus G RMZM2G115000) derived from phytozome v7.0 (chr-ID 3; pos 1 66431988 to 166432881)
ctcctcctacacgcgcgcgcccggcctccttcaaggttggctctgaagacaaagcccaagctccctgcgctgctgcgcaagcggccgaccttcctgccggcggtactccctgtgctggatcctctgtctagtgttgcagctgccagcgcttctcatcctcactctaccggagtggagatccgtccgggcgtgggttgattccttcttttcggggtgagtgattctagcttgtttgggtggatgctccgagaggtcgttttcttggaactcatcctttgctgtggccatgagcaatcaaatcgcgcattaagacgacatggatttgtgttctccgtcgcgctagccgctaggcccgacgcatctcgttcacccagttgtggctcggctaggttcttcagctcgcaagaccgttctcactctgcccccaccccaaaaaaatatcggttcataacagctcccatggcccacgctaagtccatccctgaacctgccgacatcatgtttttcttcttcttttttatttctgggcacaagactagtcaaatgctgctcactgggtgcattggcgccttaggtttgttcaaaatgtgtggttttggtaaagaaaaaaattattgggctccaaggggctggaaatctcaaaatttgcagaggggacgtccttttcagtgggttgtttacgggagccaaagtttatttttcgtgaacagtgtattgcgggcttgccagttggttttaactcttccatttctactaatagtatctggacatttgatttgccccattctacaatgtccagacccgttctttccttttagcctaagaaaaggccttgccaaatgttcagagtgaaatgctaatgttatctgtttttcttgtgattattgtagtcag

SEQ ID NO: 4735 - DNA, 369 bp, Zea mays
  Intron number 2 from transcript GRMZM2G115000_T02 (locus G RMZM2G115000) derived from phytozome v7.0 (chr-ID 3; pos 1 66432955 to 166433323)
ccaaggtatcatctttacacggaatatgtctggtattcctgttaatctgttgtttgcctaacttttgtaagtacatcataaaagcctgttatgtttattgatcaatgagagccaccttttcttttccatattatttaggtggtatttgtttcaatggttagtattatcacaatgctttgatttctataaggttcctttttctttaaaaactagtttgtactgtattgggcaaacattatacttgtactgtaataagttactgggaccttatagctttccgttttggggtttgcttaatttcgcagtgaatctgatttttttcttgtttatgcagttgcacgcaggaatttgtagagcatttcatccttc

SEQ ID NO: 4736 - DNA, 535 bp, Zea mays
  Intron number 3 from transcript GRMZM2G371660_T01 (locus G RMZM2G371660) derived from phytozome v7.0 (chr-ID 2; pos 1 73435949 to 173436483 reverse strand)
tacatccacaagcattagcttcctcttctcaggtaaatgtaacatcggaattcagttgttaattggactccttgattgtgtattactttttgaagttattttttgttttttaatattataatatagttggaattttcaaacaacaacttcaaaaacttatttctactatagtatctgtagaaatattaatgttacaatatttagtacttcagaaatcaaacaagcacattttcatatgtccaacttaaatgatcctaaatacgctggtggggaaatattacagaggctgactgcctgtttccaaaattaccatatatctttaaatggagtatttcaaaacataaaacaaaaacatttctcggttgatctgaaacaatcttctgtgcccttagagtccgaaacaaaattaccatatatcatttctcggttgatctgaaacaaaaacatatcatgtgaccaactccacactctaaagtatatatatgcttcaacaaactcagtacttcaacacacctggggattctctaagaagtca

SEQ ID NO: 4737 - DNA, 996 bp, Zea mays
  Intron number 2 from transcript GRMZM2G154896_T01 (locus G RMZM2G154896) derived from phytozome v7.0 (chr-ID 8; pos 5 597782 to 5598777)
gaagtccgcttcatccgttcgccgcctcaaggacggtaaggctagccgaatgcttgatcttattccttgtctgtttcactgtagtagctgcagggttttgagggtgggatcgagaccgtgatttatccaggcgccgcagttttgctagggttttgcctccatagccgagcgcccgagccttgccgcgccccgattccatggtcgggggagggaattcctagcccatatcccgaccgtatgattggcgctaccatcttcgcggaaggaagaggtggggcggggttgggcgtagagaagccaatcggcgcggattggagtatattaatgaatgagcgcaggttgttgaacattgaaactcgccaggttttgcggagtttgccgcctgggatttttctatcgagatctacaaatcggtgcctaggatttatgttttttgaccctaatcttagtatcttacacgcggggtatggataaactgtcttacaaagtgttctaatgtttggtcttagccgtgtacagtacaaaagactgatactcgccagcagattgtgtgtgctgactcatgtgtcttacatgctttttcctaggccacctactgtactttgacaagcatgtgttcttgtagaaaatgtcttgcagtcatttcacagtaattatgttggcagaaattctgaatgccatttcttgagaatttttaggcattacaaatcttatggtatcacatccataatgaccaaaatgattgtctcaggctgaatgtgtaatattataacctactcacaagtcacaaatcacattgccaaccaaaactccaatgcatatattccagtagagatcctctccaagtacttgttcatcattctgtaatctttgatatgttgtttttggtgatagtgactagaagccgtgtggaatttatttgcttcactctttgctagatgattgtactgaattgcattgaatgatctgaaatttctgaatcctcactttgcagag

SEQ ID NO: 4738 - DNA, 721 bp, Zea mays
  Intron number 2 from transcript GRMZM2G172244_T02 (locus G RMZM2G172244) derived from phytozome v7.0 (chr-ID 1; pos 7 3381038 to 73381758 reverse strand)
tgcaaaatcctgggcttggtcatctttcttcagaggtgagatgcgccacttgcgttttttttcttctatagttcaccataattgtacgaggacttgtcatatattactgggcagagttaattgaagacgttttctttcccttgattgttctataaatctgtttagttttacatttgttggtcaatcagttatctgcacaaacatctaacttaggggcaacgactgtttgttgtgcaaacaagtctcaggtgcaagcaagtgagcgagcctcgtgggcctatatatcgtgatcctgagcatcagttttctgcacaaacatctaactttagaagggaatcagtttctctctgagtaaaagtatatctggaagatgggttcgttacatacttaataaagttgttaccaggattccatgtcagatccagatatgttttgctattttcaatctgtttgcacttacagtacctaataaagtttaatagagtttattctgtaaaaactatatcttctctgttttgccctttggagaactgtatccttaccaactgttggtggtagatccatacagacattggtattttcagaacttttctatagatacttaaaattagtttgatttgcattgtctctcttgttcctttgtacaatgtgtgttgaaaacttgaaataatgcttgatacctgattaaatccttgtatagtttctctttccaacaatcaag

SEQ ID NO: 4739 - DNA, 813 bp, Zea mays
  Intron number 1 from transcript GRMZM2G116327_T01 (locus G RMZM2G116327) derived from phytozome v7.0 (chr-ID 9; pos 1 13704949 to 113705761)
caaacatcgagactgggtaggtgtggcgtcgtgctgatcttcctcccaccttacttgaccatggaacctttagagctaaaaggcaccaggcactgattatattaggttacttgttaattaacaattagcatcgcgattagactagaccagttggttactaacaatcaaacaattggtatcgagatgtcaaaggcagtcacctttagtgggatcgatactgttcttttagtctattcaattcagtagcagtctaatcagaagacgccacttgtttccctcgcttcaacggcgctgtcacgggttcagacgtgtttctatttttcttcttttccagccttacttttgattaaactaattatttgtttctggtcttcgttacgtgtactttctcgctcctacaatttttttcgcgtgtgccatatgtgttcccggaaaagtttcctgtccctttcgggtactccggatggttcccattttttttctttcataaaagttctattttgaagcttggagaacagtgatgtacatgtactgtgagctatttgatttgactgaaggaaaaaaaatgttgctgcagtctcctcgatcttcagagctgtgatgtgatttgtccagatacctacaaaaacgtaccaaatcctatctttttgtcctacccattgtttggttcccgtgcttccagaatttatatggactgtggattttaatggaagaaaagaaaggaaaaatatgaatcataaactactgactcatgtcataacattgactttttgtgtagggttgttatctgtctttgtagcagaagaaacagtc

SEQ ID NO: 4740 - DNA, 966 bp, Zea mays
  Intron number 4 from transcript GRMZM2G131167_T02 (locus G RMZM2G131167) derived from phytozome v7.0 (chr-ID 7; pos 1 63689388 to 163690353 reverse strand)
gcaaggtaggtcattcatgtccattgttttgttctataccatcgttgaattgtctcacttccaaaggtaattcttctaaactgaccatctgaattccaatgctcacatcccttgttacacaggaaaaatttcagagtccaaactatttgttcaatttatctccacttcatgcagactgaaattcctagagaaataatctacgctataactcaaaggaataatcaactgctaacaattgttttttcagccaggcacaatattggaatatttattgttccttggttgaaagcactgattgatatggtgacatactgacatatatacaaataatggcctcgaccaaaattttccagggttcctgtatgacagccacagagtcttttttttttgctgccatttgggtatgaattaaaatgtattattgcagtgaatgctaggttatttgtccttagtgtttgatgcaacaatccagttggtaatctgtaagcactagaaggattacagaacagagcagcaagtgagagaaatcattttccaaatacttgaattgcttgtacagagttaatatgtgcctatgatctttagtttgacttaaaatgattgggcctgtttggagagctgctgctttccaggaattcttggagctggaggtagggatttgtcgatgtgctatgttgcgttgttcccaatttgttaattagactaaaaaagctttataccaatttgttttagccttacaagtagcctcccggatcggacccttggcctggaatttgcaaaaggaaaatgctatttctctttttcatatcgcaagtgatttaaagttattttttactttgaagttgtagatacttgtctctaatgagcatgttgtttcatgaaacataaataatttgcttgtttgcaaatcattgaaacaatttcatctgatacaggaacttcaaggacgaaatataagggtgaacc

SEQ ID NO: 4741 - DNA, 997 bp, Zea mays
  Intron number 3 from transcript GRMZM2G025671_T02 (locus G RMZM2G025671) derived from phytozome v7.0 (chr-ID 4; pos 1 69510306 to 169511302 reverse strand)
ctggtaaattgatcttaaacttgcacctactttattagtacttttagtgtgacatcttttgttcaactagtcgtttggttactttagacacagagtgaaaaactataggcgcatttgtatttctttttgaacaaaccatttgtgtataagaaatgtctcaaaagatacatgcatatagtagtgatatgcatttcttttgtatgtgcagtgatcatttttctacaagtttgcatattctatgacgtggtttattgattggtagatgagatagcaaatagatctgcgactcgccctcccttggaggctctgactctgagctgcacttctttgatctattttctgcttaatctctactgatacaagggtgtcccttttatagagacaacttgacccctaagcaaatatcctaaccgaatctatcttatctctaaactctaccctaatcttacctctaactcactctatcctaatggatctgctcagtccaataggcccagcccatctgcccccatcaactgcccataacattctatcatgctatctgttttttatttttttccaacatgtttttgacatgtataaatatcagtgctcagactaaaatgggcacaaacgcacccagatgcattcttacttggcattgtataacttatatttccagacattgaatatgctagtatttttcattggtttccacattctgtcttatgttgagattcattcagaagataattaaatattttatattttcccgacattggaaccattagtgttaggttgttgaccttagaatgtttcttaatccgatttctgcacaataacatggataaatctattgtcacacttcactatagttactacatgcttatctctttttgtagagtgttagattacctgaaatgctatggtttgtatacccagcatcaaaccattttacaatataactaaaccttgataaatctgtctgattaccttaccgcagctcccagtaagcata

SEQ ID NO: 4742 - DNA, 853 bp, Zea mays
  Intron number 2 from transcript GRMZM2G160136_T01 (locus G RMZM2G160136) derived from phytozome v7.0 (chr-ID 3; pos 4 7232581 to 47233433 reverse strand)
tttgcaagcaaccaaatatactctcagagaagaaggtttgccttgccttgaatacttcttgacttatgtcatattgagcatttgagctattgagaaacatactaatacagacattgttgatcttgcacttgcatgcctctatgtaataggctaaactaagcagcattgtacaggatactggtacttttgcacttgcactgtctcttcttgctaggtagagtcctaccccatagtctggaactagaagaattctgattttccttttaggaatcaatgtctatttgagctttgtttggttagaaatgcattgtagaaaaatttagatggtgagatttttatctttgttctcatttttgttcattgtagtataatttttttagaggttgttctcatttatctataactttttatttttttacgaaaagtcggtgcatgctgattatgcaccaagaaacatcctttcgcagccccattaatcatctccatagcagccatcgacaaaaaacagtccttgaaaatttagaaccttccttcaattaagaaatatgtccgttactgaaatggagatcattcagtcagtcagaccagcagtggttaattgtactctactgttagatgctaaacttgggtcctaatacagatattcagtaactatagttgtagtagatggccaaatattgatttgatttctctatatgcttgcatgcattgattaaaaaagaaaagaaaaaacaaatgctctgcattctagcatttcctcaactcatgtgggaatagtttttgggttctggtgacaccatgttcatatatgtgtgactatgcaaatgattgtccaccttataggcataacagt

SEQ ID NO: 4743 - DNA, 443 bp, Zea mays
  Intron number 4 from transcript GRMZM2G152127_T01 (locus G RMZM2G152127) derived from phytozome v7.0 (chr-ID 3; pos 2 08467991 to 208468433)
caggtgcacttattgtactagcaagcaatatccggaacccaactagaaacataggatgatattgtgtattcagcagacactgaataaaagaaaagacaattagcctcgttgctacaagccctactgatacaactttcttgttccaccaaagaaaaagatggccagagcatttaacttttcataacgtgctggaatttattggaaagcaaaattcttctttagtacatagtttttgacttggtcaattgtttggtcattttggggagaacgtctctggagaagtctgtgtaaatttctgtcgatgtggatgccaggattctactatctaacgaatatatttctgaatccttttgtttattgactatatcacaactttcacaatgctaccccccccttttaccatgttgcttatgcactccattgcttaatcgttcaggcctgca

SEQ ID NO: 4744 - DNA, 711 bp, Zea mays
  Intron number 1 from transcript AC208559.3_FGT003 (locus A C208559.3_FG003) derived from phytozome v7.0 (chr-ID 4; po s 125110161 to 125110871 reverse strand)
aggtgagaaaagaaggatgtcatatattgtaactaggtgaacgcccatgcgcttctacggaatgaacatgttatgataagatatattaaaatttttaaaaaaaatatttttcattttatctttttgttatcgtcttttaaagttcttcattttgtttccttgtaacaaacctatttggtgcacctatacgtgcttgtactcagatgcaatacatgatattatgtattataaatttctacttgttatttttctaccttagcacaagtcggttgctgatcattgtccaattttgattaatttaggttacaagagcagtggtcgataaacattgcatcttaatgtacatgatggatttgttcgatgtgtaagacttatgtaaaaattcttaactttaaaagatgacaacttacagaagtgctaaaacctagcgagagcaacgcataacaataataagttactggagctcaaaagaaaaactgcgagggactgcgtcttcttgcaagcggtgagcttcacgatctcttcaagcaagtacttggactcagctgcgaagtcgaccggtgcttcacccgtacttggactcagctgcgaagtcgaccggtgcttcaccccttacggtgattctctgcctcttctcgttcatgtattcatctagcgtcacgctgacgcggaacaggtgaggaacctaggtgacttccttgagcttgagaa

SEQ ID NO: 4745 - DNA, 984 bp, Zea mays
  Intron number 1 from transcript GRMZM2G327459_T01 (locus G RMZM2G327459) derived from phytozome v7.0 (chr-ID 2; pos 1 79449707 to 179450690)
gatcctgtaagagccacctccccctccacaacaactcatcatggaccagcgcgagagcaggaaatcgccaccggggagcccgccccaccactaagcgtcaaagaagcagcaacaaaaacacagtcggagagcccaccgacaactagcaagacgagtagcacgagcagcagggaaaaatcgccgcccccggagagcccgacggctgccagcaacaaaaggagcacaagaaatggggggggggggggagagctcgtcggcaaatagcagcatcgccgtgggaagctccgctcgaccatctatctcacgccttcgagaaggggatggggaaagtgaagaggcgcgatacccaaaaactcaaaacagtgaactcctactatgccaatatggcccactggtcagcggcaaaaacaaacaacacatatcagacaactaaaaaatgaccaccggcaaaatccaacggcgcacacaccgcgcacaagaaacaaaagaaacacgcgcgtgactgatagctttgacgtattaaaacactattttataatgtatactgtactgtatgaaaaatggagtttgaatggatataaaatgaataagctattatataatgtatactatactgtctgaaaatggagtttgaatggatataaaatgaataagctattagagatagctttatagagtgttttgtccactgactatatagctttatagagtgttttggtccactgactaaagtttttaaatatttgaatatcaattataaatattaaatatagatttaataaattcatttcatttttttagattttgtctgtgtaattaatttttaataaagaccaattcaaacattcgttggcacaaccgaagaaacaaacgattccgttgcaagcaagcaagctggcctggagcgcctctattccgcttttctgccacttcattctttcctcggtagcttcgtccctggctccccgcggcgacagcctccag

SEQ ID NO: 4746 - DNA, 836 bp, Zea mays
  Intron number 2 from transcript GRMZM2G162175_T03 (locus G RMZM2G162175) derived from phytozome v7.0 (chr-ID 3; pos 1 95648619 to 195649454)
tgaagaggcgcttgagagagtccgtgcactgttaggtgagtcaaatttgtttatattctggaatgattggtattgtttacaattgtctagttgtgtttttcatagtgagcttgaaatcaaatattaaattgtttatatttattttaatctttattctggaatgatatcttgttaaattgaaagtcaacctgtttgtgaccaccatgttatatttttgctggtgatttgtttctggtgaacaagacaattcatgatcttttcttttatatgttacttcataaacagtgtcgtttgcatgttctagatcagtaactttcaattgctggcattggtcaattagtttaattaatttgtttgttggtgggtcagactgaaattcatggtgatgttccaacccactgtgaataactgataacacaattgaacttgaactgagtgctgccagctttaggtacggggaattgcgttcatagttttgaatctctcgccaaacagacaatagagttttttcaaaatatgtggttcaggtgttaatcttttgatgggtttatttatgtttttccgctgtaagtagttctgtatactcagtactaaatgtttatttgatatatgatagcaacaggaggattcaatacagctgaattcactccaaaaggaagcaacatcttggtttattaatttcattaaggtgtttgtcttgcatgaatgatatacaattgtgttctggcactgctgcgctaaactttatttcagttctaacattgagttctgattggttctatgagataagaacattggcatacttaaaaatatgacccctgttcctttttgcagat

SEQ ID NO: 4747 - DNA, 942 bp, Zea mays
  Intron number 2 from transcript GRMZM2G048045_T01 (locus G RMZM2G048045) derived from phytozome v7.0 (chr-ID 4; pos 1 63307476 to 163308417)
gacaaccagtgtgtatccttttctttttgtcatatattgagtcttcaaaacttttttgagataggctgataggcaggtagaacgttatcgtctggtagctacaagtttgcatcatttgaatgctgatttagcatatctcttacatatcctacatcaactacttgcaacagtagcacagcacgaagcaaatcagttagatatttatttgccgcatgatgcaccaatgttacattgttaccccacatgctacttgtaccagtagcactatatgcttttctcatgtgcaaatattattgtctaggtagcatgtagttccgctgatgtagtgatgtacaccaatgttctagtttttcatactgcatgtacttgatagcttcacacgttgtctgttttctttaatatagagtgatgtcctcatacggttgcaaaatgtatgtctgctgaaaattgcaattacccaaattatggattcactactatttactattacctctctctaaattgctcctctctatccttaatatctgttggctttggtatgtgatgattattttgtcttggtgtctgagcccttggtaaattgctttcattttggttggtatttgtaagcaaaatagtatataagatgatggttgtgtccttggttcattccatgactataatatctatcttctagctttacagacacgatttcatatgagtttggtttctttctattgcaccacccctctgccttcccatgcaaatgaattttgagattcaacttgctgtttgacttggaagctatgatgccattgcaataaaatcaatgttatattgtttattgtgcacttcattgcatccacgatcctggcatgatgtaccatttgtgatacaacttggtcaagttgcttatacagccacttatattgctctaagtgattgtatttttttctctttaga

SEQ ID NO: 4748 - DNA, 587 bp, Zea mays
  Intron number 1 from transcript GRMZM2G066480_T01 (locus G RMZM2G066480) derived from phytozome v7.0 (chr-ID 4; pos 1 01836060 to 101836646 reverse strand)
gaggacgcacggcgtgtgtttccttgccctcggttgtaaggctgcaccaaatctgggccatgttttcacttgtctgagtactgctgcatttcatagcagtttccttatactttagttcaagtaaccttgtactagttcttattgtttctgtagttagcagatgtatagttcctctgatttttgtaactagatattcatagcagtttccatatacattattttacatagcatcctgttaggtgtttttcagaaactgcattgcagacacattgtccatagttgtgggatacttggagctagtggtagtaatgtcaacttttacatgacttgtttttatacgatgtctaaatacttgcagacacattgtactttgtttgaagttttagagatgttagtaaaacaattttttcctcattgagttgggctctgtttcagactccaagtgttttattaaatcaagtctgttgataaattcttttctatgttggccattgtatggattaatgctatgttttactaaactccatttacatttctagaccaactaattacacatgataagtttttattttggtatggcagcggac

SEQ ID NO: 4749 - DNA, 946 bp, Zea mays
  Intron number 1 from transcript GRMZM2G145451_T07 (locus G RMZM2G145451) derived from phytozome v7.0 (chr-ID 9; pos 1 38321398 to 138322343 reverse strand)
ggctgcgttgtttctacccagtcgtctgcaaacaagtaagctcttaccctttcccctttttcctgtttgtgtgctcgtggtatagggttacggttggggttctgggaaaaaacagtgatggttctctcttcactgtcttcctctcgttttctaatggatgaatgtgaggcttttggaggatttgttcgggttcacccctaaaacgatggtttagacacatcaagggttaaggttcgggcaccaacctcgctttggtaccattgttggatcattataagatcttgtacataaaatctagctactagatacctaagaactcataggtatacattcggggttggatgctgacaccattagggtgatgtagcttctctctgaggcgtcgaggtagggtggtggtctttttcttcactaaccgcgtaggagatagatcgagacttgctagaggtgtacgagagaggaggctatggtgaacctatctgttaatatacgcaggtgtgaaagttggagtccagatcgatctcttgaccaaaccggatgagatcaacctaagggcctgttcgcttctcccggaatgaaccaggattcgttccagctcatcaaaatttatataaattagagaagtaatccggctaggaactattccagagcttcaatccgtgagaaccgaacagggcctaagggcctgttcgtttactccggaacggttccattgcaaccgttccggttggaatgatatgtttatttgtactagtattgattagttggaatagttcctagccacaatccgacccaaccgaacagggcctaatagatagttctagaaaattatagatatggaaaggtgtatgacatgctactaaattttcttttaaacaaatacttctatttatttctcaaggatctaattgatcctcaaatgtcttttgatctaggattagcagga

SEQ ID NO: 4750 - DNA, 1033 bp, Zea mays
  Intron number 2 from transcript GRMZM2G155532_T04 (locus G RMZM2G155532) derived from phytozome v7.0 (chr-ID 3; pos 1 70457790 to 170458822)
ctctcttttcttgcctccccgctttcttttccgtggtgagtttaaattccggctttgatggcattttttaacggatctgacggcttctgatgattaccgacagtttggcccttttttccgcttctctttcctatattttttcctccccttcccactgtcactgatgcagcgaagcttggtatagcatgacctgaattcagcttgtgtagacgaggagccaagtttcttcttcttttcctttgctccaaacagatcgctaattgtgttcgtgttttgttctggtagggccgaaagttgctggattctgcatatgcaatcccgtgatgaattcttaacttcgagaacctcagtttcagttcagcgatagaaaatagacactttcgatttcggtgttctagctgattcttcgagccacaggaactttcttttctttattgttcgtttcactttagtctgttttctgttttacttggctgtacatgttgttatcctttcttttgggttgcaactcgttcgagttgttggcatgtcaatgaattgttgagaagaagactaccgttcccggcctgatgcctgtatctgcctatctggtttcgtgcttagggtccacctgcagcttggaaatgttggaatcttgtgtctgaaaccttgacccaaaagaaaaggacagatgctgagactgagggcttgatgcttcaaatagaattgacttgatgaaatttatcatgttattaggttccaccttccagtagttggaaattctttaatgttactgatctagaaccgtgctctctttaccacttcccaggtgtggtgttgtgcagaagtttgagaaccatgttggctattatttgtagacttaaccgatgtgctcctaaatcttaagacgcaccaaacggctcttttgagtttcctttttttgttttttttttgtcattttattagattaaatttcagctttgctgttatgcctcaattttaaatgtcctggcaaacgttttcagggtttgctagcggagtccatccaactata

SEQ ID NO: 4751 - DNA, 943 bp, Zea mays
  Intron number 1 from transcript GRMZM2G147193_T01 (locus G RMZM2G147193) derived from phytozome v7.0 (chr-ID 8; pos 1 60611187 to 160612129 reverse strand)
gaaaaggaaccagagtcgagtctgaagttgtttaggtcaggtttggatctcctttatcttcctccgttggctttttcctgtatcatattcatcaagtacattttagtatcctttcttcccgatttcccaaaggttcgcagatcatatcccactactttttaactcaaatttcgcttttttctaggttattagcgcttccatggcgactttttccctctcaacccctgctttttccagaagaaatcaggcctaccttctttttccactgcctcattcaattaatgttttttttgcgctacagactatagccatgtacatgaaacgaaaatcgtgctgagctgaattaaaaaaagttattaatgtatctatgaatctgaaaaccctaagggcttgttcgtttctgtcggattagtgggtcggaacgattcctgaccggattgcttctctaatttatataaactttgattatctggaacgattccgggtgcaatccgacggaaacgaacaaggcctaatgaatttgtagtattctgtttgatcgtctacgcacacttattggctttagcagctagcgatgtacattattctactcttccccataaatacaaatcgtactgattgtttgcgctgcaaccaggagtacatgaatcaaaaacactgttaaatctatgtctatcttttgtatatatacacaatctacagtatatatccatatgtttggttaactgcatgagatcaatcaggctcttcacatgcattgaccagacctcatcctatgtttacttgtctgtacggaacaaacagagcctagatgtgctggtgcaatcatagccaaatttaaattatacatcttttcttgcatccacagagacgcgatccaagcgggtatccaaccagtcaggctgcagctagccaggcgctagacgctcatacaaccaatcac

SEQ ID NO: 4752 - DNA, 749 bp, Zea mays
  Intron number 1 from transcript GRMZM2G133555_T01 (locus G RMZM2G133555) derived from phytozome v7.0 (chr-ID 1; pos 2 34056357 to 234057105)
ctcgacgaccatccctttgctgtaaatctctttgcactaacattatttggccattgtttgtgtccctagaattgtttgagagttccaagcctttgcggaggacctttgcattgttttgcccatgcctcttttctcgatcaagattccttttattggtttgcatgcatgctttgatcttgctagctagaccgatgtgtatgtggtgcaagcaattattgtttggtgcctatcctacaaaagcaaggggaaaaaaaagacacaagatcaagaagacatcttgcagcttttggacccctgcagtaccaagagaatatattcctcgaattggttgtttcctctcttcttggtctcgatggactttatatccatttggctggcgattttgattattggggctgttttctttctaaattctctaatcctaacagtgacattcgccagcatacataccagtgtcctgttctgccatgcttatacaactgtacggcatttgattccctaagaagaaaagactataaaagagtcactgaaacattttcacacagattatcagcagccgttttcattttaagatcggcgcaaataaaattgtacgacagtttttagaactatacgatgattagaatttttatcctggaggtttgcaatacacagttctttttcttgatgaaagctccttttgttttgttttttcgtttgaaatggatgttgcatgctgacaagttagtttgcttctgaattttagcagg

SEQ ID NO: 4753 - DNA, 881 bp, Zea mays
  Intron number 1 from transcript GRMZM2G017616_T02 (locus G RMZM2G017616) derived from phytozome v7.0 (chr-ID 1; pos 1 6575547 to 16576427)
cgcgctcgagctcattagcaccaagatccaccccagtaagcacgccggcccttgctccctgtcctcgtccaatccactagtctctctctctctctctctctctctctctctctctctctctctctgagttgacctgcctgctcttgacaagtctcctctgcctctattttttgcttcctttggatagtcgttagagctttaacgtgcaaagcttttgccttttggggcatctccgcctgttcttgactgaccgccccgatcggaaggtggcaccggcaatcaggaagatgctaactagatgcacatgatcaacagatctttctgcggatcttcaataatggagacatgataacaaaggcttgtcccggcgttcgcgtgtgcgattctctgcattagtatattcgctctgcatttttcaacaaattgtttaatccgaacaaacaagggacgaactaaataactggagccgttcaactttttaaccgttggcatctttcgcttgaccatgttttcttcaagaagagaacaaatggatcagattttcttcctacctcccaggctcccagtcccagccttgaaagcactgcaaagcaaaacagtatagcctccctttagcagtagtagccccgcctgatcactgctctgaataattcaagctcaaatgagtcactaaactcatcactatgcaatactgacgaaacatgttttccccgcctctccattaccaccatgtggtcgccacccaaagctgatacaatcgctttccatgtctccaaatttgacttctcttctcaagatcgtcctaaccttcccgttcccgggtcgtgccacgtgaatcattggcagggaccaagaagccgttgcacagcggtcaggcatcg

SEQ ID NO: 4754 - DNA, 432 bp, Zea mays
  Intron number 2 from transcript GRMZM2G315850_T01 (locus G RMZM2G315850) derived from phytozome v7.0 (chr-ID 3; pos 2 02556116 to 202556547)
ctgactttgataagtgtaagttgtctcctcggctgtaaacatgtaactgttaaatttctccctcaagtttctaaacttttccattaagctttctaatttccaataatcaatctattaccatgagttctaaatttggcatcaatttaatattttataccaatgaaaccttatattcactccatcccaaaatataattcgtgttagattaaaaatacattcattaattaatctagaatgtagtttgtatgcatgtctgcgttcattattgttgtaatgaatatggacagaaaaaagagggctagaaagaactatattttgtggcggagggagtatcttttggggactccaatagaagaaggcttatatcatatatgatttgtggttgtttctatcttatttgatgtttattcaaactaacagatcgatcagtgg

SEQ ID NO: 4755 - DNA, 984 bp, Zea mays
  Intron number 2 from transcript GRMZM2G040975_T04 (locus G RMZM2G040975) derived from phytozome v7.0 (chr-ID 6; pos 6 4089902 to 64090885)
tttcaggtgccactgctgcagtagtgcctaagaaggtaatagtttgtggacttctagctgcatgtgggtgtgttatctggaattccgtgttatcttgtatcggacttttgtttcatagcttaaatatttgttaccttctgaattttgatgccttcatctaggttctttcactgtttggcatgtacgcttatataatgtaatgtgacgtacctagattgttttgagtgcaattaaaacaggtctgtactatatgatttttttctcattgcctaactaaccctatattcggtgataggttgtcatggtgcaatggtctacttgttaggctatgttgaggtgggggtgaggcgtcctcttgtgctcctggggtacaagttttttcagttttcaaatagttacaagtattttggatttgattcagttctgctattttggatttgatatccagtatttggcagctacttcaatttcaatgtaatgattcttaagttcaactcctattatttggcttcaattacttaagtaaccttgggtaggatatgtaggaattttgcttcgtttttttgcttcttggggtgtcagttctgtggtctgtcatttttgaaacagttttgagccttattgggcaggagttgtcatcactaaattagtctaattaatatgccactttaccttctcagattttggcggccacattttctcatgtttacttttttagtaaagaaaaaggagcatggaaactaatgattgttctttgcattaccacaatatgacctttatttttgtcatctttttatagggtctgattttaaaagagaactctcggttagctgtgtacactgtgtatggattctttttgacatgacattatttatatacaggattacaagtgttttttatgctgaattatcttttcttgttttatctatgttttgttgatgtcaattctctgtccaggagctactaataaacctcaagagttgg

SEQ ID NO: 4756 - DNA, 786 bp, Zea mays
  Intron number 1 from transcript GRMZM2G342910_T01 (locus G RMZM2G342910) derived from phytozome v7.0 (chr-ID 8; pos 2 4804200 to 24804985 reverse strand)
gcggagcaggttagaatcctttttagataaaggagttgtcaccatgcttcagagctattagcttggataaaggtgttgtcaccattaatcttcaggtccttaatcttctgtaaatctgacagaggagatgcccacagacgcctacctatcatcaaatttctagttgatgcaggattttttgctttctgtgtacttcagtaaccaccttcatcacattgtttacaaaccaggcaaataatgtcagttagaactactatacgcttcaggttcattttaacagccaagctacagtgcatcaggcgccacacaaactaccttatgctttcaggggataagtaagtttcaaaatcttcatccataaattccaattggttcgccatcacttactctccatacaatgtcatccttctgttttcaacgcaaagaataacatgaggctgacatgtttaaaatagctactaataatatgtaattgctttaaaaaagagcaaggaacgcctttggtacaagccaatggattaaaaaagctaagaaattcagaacacattgatacaccaaagtatattgaaaaactaatccagaaaatttataaatatataaaaaaggcgcgctgagcgcgctttagacactagtatccatgaaagacagatacgagcatctagccatgctaaacatgattccatgaaacacaaatatgagtagccgaagtgttgaataattattttttgcacaatttatgaacaagatacatctaacacatgtgtttttaaatttttgtgtttgtag

SEQ ID NO: 4757 - DNA, 1032 bp, Zea mays
  Intron number 2 from transcript GRMZM2G084806_T01 (locus G RMZM2G084806) derived from phytozome v7.0 (chr-ID 6; pos 1 41275772 to 141276803)
gtctctgtctccgaagctaggtgagatcttctttcagctaatcctgagccggaccggttgtccgattctagttttctttgagcattccagattcggacagttctcctaaaaaatagggttttttaagctgatgctctcggattttctggtgtgcttatttttacctttagtcgtgtttttttctcagtttatataagtactggtttggaagtattcccgaggatagtgaaattagctcaatttctcctgtgaattcctgagggaatttaattttctaaactaacctaagtgtttttagctcaaacattggtgtttagctaccgaacagggatggcattaggccccgctcttttttttcttaatctctactatataaagtatgacttctcacttttttaccattatcttgcgtcacacgataaaattatacacaagtgaaggtttaatcattggttatttactctttattctcacatataaccaacaaaacatatattttttatgttttatattctataatcaaacataatataaacaaaagtctatataaaaggcgtatcaaggcatctaactatgctagctgaaaagccaataccgattcagctttgacttctttcatgtagcagatgacacatcttcagcgccatgcctttcagttttcacctggaaacagcgaatagaaaaaatcaatgcggatcacctgtatattcggcacacctatatatctacccttcatgcatggatcacatttcacaaactgtacgtagtaccaaccaacaactacactactgtcgatagaaacaaggatgggcttggaatcatccatccatccattggttgtcaggaattgacagctgaaccaacgacacacaccaaggcaccaagcagcctcatccctcagatgatgatgacacatcgacgcttctcagattgttctgcgcctcttgtgctcacactcctttttgcctccgctcaattattgccttattggcagcaggacaacccaccacggtgaccggaccaggaaattcc

SEQ ID NO: 4758 - DNA, 584 bp, Zea mays
  Intron number 1 from transcript GRMZM2G101974_T01 (locus G RMZM2G101974) derived from phytozome v7.0 (chr-ID 9; pos 3 167048 to 3167631)
cgcgtgcccgagctgtgcagaaacttcaggtgagcacccctgcgcttccgtttctattttctttgtttgtgccaaaatcgagtgtttgttttgaactcagctcgttggatcagtgttggatgtgaattatgttaaaaatttggcgacgggtgcatggaatagtggaatcaccgacttctgagccattatgaagaggtgtatgtggctgcgattgcattatttctccgtgatctagaacattgttaaacttttgtttgagggcttctgtggccatatattatttctaataacttcagcatgttcattttatgaaactgatactgctttccttagcttacaatttgaacacctgtttgggtagggggagaattgtggtggcagcagggatgggtagatccaaattcttttgaagcttgttcattatttcttgtttttctggtttcctgtttctacaacttcatttatctggtatgtagctaggctagctagttatttttaccctaatctacctggaaactagttggtaactttttgctttggtgaggctcttccctgcagtgcagttgcttggtgtggaaaactga

SEQ ID NO: 4759 - DNA, 956 bp, Zea mays
  Intron number 1 from transcript GRMZM2G081790_T01 (locus G RMZM2G081790) derived from phytozome v7.0 (chr-ID 2; pos 1 98576645 to 198577600 reverse strand)
cggtggtatgtacggctccacctcctcctccttcttccatacctgctctgcacatcgcaattttgttttggactagagcaaccaaggctaagtatcttgctccactgcctactgtaacatgaccgtcaaaagatcccttcgtccattccactagccattgcttgctcgttccatacgttttcttctcttgtaactagttcatttcgctctttggtttggttaccagatgagaagccggtggagccgtagtatgtggaacggattggacatcaaacagctgtggaaacagacggttcgcttttcagagagccagacataccatatcgtcgtgctttcgaactccgaacaccagtacagagagctccatgcacacgacgaccgtgccatataagatgtcgtcgtgtacatggagctttatactgatgggtattcggagtttggaccacaatgataatatgtctgactctgaaaaacgaacggtttgtttccacatccatcgcatgtccaattcgccccacatacagtctctttggtttagttggaatatggattactaatagggtgtttggtttaaggaatgagttagtccatcatcttctcactcctcactaattttgtttggtttgtggaatggaatgagttgatccatcaccacctcattcctcatagttagttagttagtactaatatgaggaatgagctcatcccaccaaatttgagaaatgaactcatgatgcaccacctcaatttgaatggagtgattcctcaaaccaaacaccccataaataagtgaccatgaactatgtggaatcaacttattctattctatagatgaaacaaaaaaaaagtgagagacgactagatgatggatcggctcgttctctaaaccaaacacgtcacaagtgactaacaataagtttgattgggcaggtgcaagagtgctgaggccagagaag

SEQ ID NO: 4760 - DNA, 596 bp, Zea mays
  Intron number 2 from transcript GRMZM2G044697_T08 (locus G RMZM2G044697) derived from phytozome v7.0 (chr-ID 3; pos 1 9250578 to 19251173)
gcgacgaggaggtacatactagctttcccctccttcagcttcttgaaatcggcagcctcgtatgagcaatgtatcgcattacattttgaagtgccaagtatcacatttccgcgcaaccaaatcatttgcatggttgataagtcaaggctcggatttgctcatttgcaactcacacatgacccattgagtttttctctaagagtatagaaacgcacctcttaataaaatctagaatcaaacacgaagccagaatcttgcagtaattcggggattaaatgattgatctttctttccaggataagaaagagtttggagatgatgcttcatcaccttcagtttataatgttgcagaagcaaatgggccgggagaaaatgactcgagtttagacaatgtacacttcttgcttacagcttgtcaaatcgagcctgcattatattaatatattatatattatggaaaatatgcttccttttgtgctggtcttgatttgccctgtgcttaaagcagcgtacttccattctgcccgttagtccttgctgtatgaatttgtaactgaattatatatttagctttcccatgactcgccagaagaaag

SEQ ID NO: 4761 - DNA, 1007 bp, Zea mays
  Intron number 1 from transcript GRMZM5G873420_T01 (locus G RMZM5G873420) derived from phytozome v7.0 (chr-ID 3; pos 1 89604452 to 189605458 reverse strand)
gcttgcaacagaagatagggaagctgtggtacgtagatgcggtcgaacgccgtcggtagcaaattgaacggatggaagaaaaacgatatacgtgtacgccctgagacgcgagatttgttcttcgttatattatctctatattctctacctctaccacttaaaaccaccagttcaaactacgctgagtacacaacatgattcatcgcacgtattcttgcccctgctaaatgcacccagcgttttatctccagaaaaatcctactgtcaaaaaacaacgtcccatatcaattcatttgtctactctctctgctaaaacacatctaacggttattcttaatgccgtcgccgtgactgcgtctcccgcccgaggttgacctccgtatcctgtctggggttggtcacaagcgagtcgtgattgcgtctcacgcccggtgtggcttcagacgagtcgtaactatgtctcccgcccgatggtggccttgtgcgagtcgtatctataatccactaaatccaccaaataaattgcaaccagcttaacacaccatcaaagccaacggttcggatcgcttgataactctcctcccttaaatacgttaacatcttcccacacattgtcaacatcgtcgtcgactcttcccctccgcaggatcgtaacgttagcacggactatatgctagtaaaaggaaaattcacgtgttaagatagattgaaatagaaattaaagtaatatttacttcaatccatatctaacatacgtggattcatatgaacatacgaacatcaaacaaggctaaactcatcaaatcccagacctgtttaactagtctgcacttaaaaagaggtgcctccatcctcatgacgtctccagcagaccaagcattttgtatcaatttagggggggtgtttgattttttatgtattaatttttagtccatctattttatttcatttcagttcctaaattgcaaaatacagaaactaaaattaattttttattttacaggggc

SEQ ID NO: 4762 - DNA, 922 bp, Zea mays
  Intron number 1 from transcript GRMZM2G114688_T01 (locus G RMZM2G114688) derived from phytozome v7.0 (chr-ID 7; pos 1 61258616 to 161259537 reverse strand)
gaggaaaacgaggttagtgcattgggactacgaaaaccccctttacgctcccttgccgtttgcacctcagttcttgcggcggttcttggagaatctggaacaacaggagaggttttagtcggtttttgggttttggaagcggattcctgaagacatggcgattcttggtgggggatatggtgggttgtctcatcttttctttgttgcggaagcttgtgggcgatttgacacgcttcacggagtaggtttctgtgagctttgattcgcttcttggaaactgcggttcttgataattggttccttcaggcatgtcagatatttcgttggcgaatagaattgctgattctgctagtcaggaccaaatccgttagtttgttcgttcaaatatttggagattggaatacgaagtggggaaatgcgagttgttggaaaagaacagtccttaagggtatgttctggcatgctcgagattttggtgggtctgatggagattagagttgcgattgacaattctgctagtaaataccaaatcccctgtttgaatttggaattgcaaaatgggtaaaagacgaattcactgttgttccgcattgctgccgtggcactgctttactcctttcgacttctggcaaagaatcgccaacacttgctaactaaggccaaatatgtttggagttcgttaagtttggaatcacgaaatggggggtgggggggtacagatttaggcagatgctacttcatttctagtagagaatgatgcaatattttcgttctcacgtgcactactaacccccattgctgccgtggtactggtttacatcgtgttcattcaacttttcacaaaactcgcctacttttgcatttccttaatcttgctgtgcaatgagtcccagtaccttgttcttgttgaaggaaacaaaaa

SEQ ID NO: 4763 - DNA, 920 bp, Zea mays
  Intron number 1 from transcript GRMZM2G451378_T01 (locus G RMZM2G451378) derived from phytozome v7.0 (chr-ID 1; pos 2 11276483 to 211277402 reverse strand)
tccttccttttctccggaaaggcgcccccaggaaggtgcgtacatcgaacgagtctctttaatccgtatttacctttctatggtttgtacacaacgtgaattttggcctcttgtggtgttcttgcgtccgaattgaccctcgaacaaacgctcgacttcttgctggtctggtgctttgatttggttacggaatactgtattttgacgcttcttgagtcttcacttgtactcacaacatattttttatggtgtaaatgaatgagcggtctcacagttgcgcctgccgcttaatactatcttgctaagatatgggataaaatccctcaggtgacacctccttttgattgtacataacatgaatcaagcaacatattgtgtttcgcttgtactagcaaccgcttgtttccccatttgcaggatcatattttttttgttctttcttttagttttacacgtcctagtatatagtggtagaacatatgaaacacttcgtggacgcaaatattcagtaatatacctccatttcgctttggatcttgcgatcttttgaatttagagaatactgtttctcctgttagaattataatgagtgaattgtccactccttttatcagcttaaacttttggggttgtactactactttggtacatgtaacttaatatgatatcaaagtcagagacctcgagttcgaatcctaattagcgtaattaaataaaataattattgattgcttctatatccacattagaaactcaaaagaggcttgatgtgagggggtgttagaatataatataagtgaattgtttaactcctcccatcaattcaaggtttttggttgaactggttggtgtatgtaacttaatcggctttacatagttcatccgataatttggtaattgcattgtctatatagaaaggg

SEQ ID NO: 4764 - DNA, 839 bp, Zea mays
  Intron number 1 from transcript GRMZM2G075104_T01 (locus G RMZM2G075104) derived from phytozome v7.0 (chr-ID 9; pos 1 24150790 to 124151628)
tcgggtgggtgctatttatcgtactctttcttgtgatccattgtcacagtcacagctaccatatatgtttgtttatatttgcaaaactcgcatttgggatattgtgccctgccctggtgttgttggtgttttctctcactcggtatgactgaacccaagaacccataaataaattatataagagattgagctagggtacaagaatttggtcaagcaagccttctcttactgctaatagtatgcagaagtatcgaactttgaatattgcttttgtggcaagaaactgaactatgaattattaagtactgcttctaaataatctttgtgcactgtttcagttaagctgtgaaccttcaattctgtcactgcactttcggtacccccatgctagcttgaggattaggctataaacttctctttcctaggtcaggagagttggacaagaaggttgatctttcttcctgctacttaggtattaaatttagtaaggttacttctttgctgaaaggcttatttaggatcttcaaaatctactccctcagttccaaattttaagatgttctggcttttctagatatattgcttttactatgtatctagacataatttatgtctaagcacatagcaaaatcaatgcatttagaaaaagttaagacatcttatattatgaaatagagggagtagctcttaatttaccatgtatttgggtgtttgatacctatcttttgactactgcaagactatgtgctcccaatcttggccgactatttactttttgtgcaaataatcatatagatttatgttttcctttgactgtttaaaattttggtcaggcaaca

SEQ ID NO: 4765 - DNA, 408 bp, Zea mays
  Intron number 3 from transcript GRMZM2G395236_T01 (locus G RMZM2G395236) derived from phytozome v7.0 (chr-ID 2; pos 2 17648429 to 217648836)
gcctgctcggattctcccaggtaaaaatggaaatcataagttacttttactgagtacatgtgagttgaatgtcctaccttttctggaatttgtttttttttcctgagtttcttcattgtatgataacatctgcatgcaaactagaattgtggtccaatcttacatatgaaacgcaatgaacttaagtttttgagctgatgtaaactttaattattttcttaatttctctgtcgaaggtgcacgtccgagcacttgcataggaaagccagtagaaacagattggattgtgacctttattttttaatcagatctttcaacctgtgttgagcataaagtggagtcttacagcttatgcatccattcctcttttcagggcgcaacacttttggcccttttggtaggctacca

SEQ ID NO: 4766 - DNA, 970 bp, Zea mays
  Intron number 2 from transcript GRMZM2G144451_T03 (locus G RMZM2G144451) derived from phytozome v7.0 (chr-ID 4; pos 1 97150343 to 197151312)
gccacggctcgacttccgtctgcggactactactcgtaaaggccttctcacttgctccccctttctcgtgctctgtgtttatgcaaatgtccctcagggtcgtgctactgcatcgggaactgcctagctggttccgggttcacgaattaagcggtgctggtgactcctacgtgcgcttctttatatgcacgcgtgtgcccaattgtgggtgcttaattgatactggcaactgacgagggtagtctctaacgtacatgactactttgagatgttttaggtcttgcagtttcttgtttgcttttccttgtagctcgctcagagtttgggaaaccacattgcatgtgtccaggaccaatgtggcaatgtgtccaaggccaagacgtttctgccagatgtcttatgtgctttgtaaactaatgaggattagttttcgaattgttgacaatataatttctgtttttcgacagttatgtgaggattgcttggtctttctggtttgacagttttaacagcacattgcagtgaattttcatctctgcaagttcatatggctacacaagttgtcaatagtacaaaacaagaataccttccctgcaacctgtgtttatgtaaaaactcaaaactcatgttagttcccctaggactacaaaacaagcttttatcccatggaaggcaataaggcatctcaattcatattttccaacctatccattttcttcctaacaaattggcaatggatccttgcgttgattgaaaaaatagacccctacttagtgattgttattaataatgcatcttttcaacagtttgttagtttttttacaacttcatttttatctaatgcctttagttgtgaattgtgtattctacttgtcaaatgaagctgttccttggtcactgtgaaaaccatgaaagtttacaccaaatgttctttttattactctgcatagagagctaaagaccctggagc

SEQ ID NO: 4767 - DNA, 761 bp, Zea mays
  Intron number 5 from transcript GRMZM2G468479_T01 (locus G RMZM2G468479) derived from phytozome v7.0 (chr-ID 3; pos 6 090259 to 6091019)
cttcggttagcttatctcggttacttgttcgaattactatttttttggatatgcagaatgaccctcaatttctttcatttattatttgatcaagtgaacatttgttccatatgaagctacgatgctaagctcgttataatgaagatcagcacacctgatcatcattgttccaacatatccatgccaattttatattaaataagaatagccatacagtctctttgtttcatgatttaagcttgcttggcttggtgcagttctccaaagctatcattaaacatttttttaccattctctcgtcataatatgttgttcacaacaataaaatcatgatcatagtaaagtactttgaaatatgaatgcaacagtaaccattatcataacactatctacataacattagagtaataatcagtcaaatgtcaccaactttaaattttaaatgtgtttgccccaaaagaaagcgaggctgtactctagtgatgatgatgtttataacatcaaataacgtccaacctagagccgcttgggtcattttgacataattgggagttcttaggctcagaagcacaatttcatacaaataggtgaatcataaaacacgatgagatgaaaatgcaatgtgggatagacaagacaaaagaagtgaattggccttttttcgtacaaaacatggtttcatccaaataaaattggccttttttcgttgtctgacttgagatgcttgaaatggcaggagaaaaccacgagtcatagaggat

SEQ ID NO: 4768 - DNA, 812 bp, Zea mays
  Intron number 1 from transcript GRMZM2G344167_T01 (locus G RMZM2G344167) derived from phytozome v7.0 (chr-ID 1; pos 2 41339432 to 241340243 reverse strand)
ggtccgaacacctgcagcgagggctaaaccaaagaggagaagccccctacctgactagtacccaagggtcccactccgtgacatcacatcaatcgtaaaggtggtgacctatttccctagactgtatttggatgttccataaatttctttaatattctgtatgttctgtgctaatattatgccataaacttcaccatgctagaactaatattgtgtaacaatgatttaattgaggatgacagtagcatgaaattgcaggctaagcaagtcttttatgcttaatccagtgattaacataaaaattgttgtagttcaaatggattagcaatgattttgttaggccaatcagcacccttttgttttatttgattggattttgctgttctcagtttatgcagtcagcaatatgaatgtgcttaaaaccagagaaaggtctaatgctcccctctttcaaaatttaagttgctttagttttgacctaagccaaactcttctaactttgctcaagtttatagaaaaaatatttaacatatacaatttacgatactgaatgaatgcgttatttaagacttattttttttctcgaacaacgcaggagaactgcgcgtcatttcatttaaggaagaaaagaggtacaagggtcaagagtgacccgaaacataataaaggtaaaaaaatatcctgtcactttaccccagccaccaagtattatgaaaaagaaaacaagaataaatatcaaagaagaaaaggggatacttcaatgtcttctgttgctaacttgatgcatcttcaatttgtccagagagtcctca

SEQ ID NO: 4769 - DNA, 789 bp, Zea mays
  Intron number 1 from transcript GRMZM2G455906_T01 (locus G RMZM2G455906) derived from phytozome v7.0 (chr-ID 4; pos 3 9258169 to 39258957 reverse strand)
tgataacaagaacaaagtaagtgtatgtttaatttgtttcttttggtccctggatttggctatccagaattaataatatgtccttgtttatagcacatatattggaagtgtcattttggtgtcctattaggtgaagtcaaaggaaaacgagagttggacttagacgttcgaacatccaatgacaagagaggctggcgacgtgcttcgtgttcttgttgtgcctacatgattcatccttgtcattttgtttgccttgccctccgttaatttgctggactttataaaaagaagaagaaaaagcaaatgtatagcgacgttgtggcaccgtcggccacacgatgcatacatgcatgaactgaaccgaactgtattgcatgggcttgatgagtgatcgatggagcagcacaccaaacgcttgaactaaccgctaacaacctgcatctacgtacgtactcctgcatgcatgagatagtaggaaggagccggtactccagcaagcatcatcgtctacgctgatctgcctggcctgtccggcctgtcctgctgtgtgtgagggagacgtacaggtactgtttgttcctgcagatatatagatccaactgcctctgctttcagagctagctagcttgccagcgttggttttgtcccgcatctgatccatccatcgtccgttgctgatcatcagctcgtatatatatacagtagctagcagcagttggctagtaggtatactatacctctccatttgcattagttgccaacctcctcatcattacaacaacaacaaca

SEQ ID NO: 4770 - DNA, 598 bp, Zea mays
  Intron number 1 from transcript GRMZM2G035526_T02 (locus G RMZM2G035526) derived from phytozome v7.0 (chr-ID 6; pos 1 37861875 to 137862472 reverse strand)
cagatcatcagcctcggtgactccctctgccgcagtctcttcttttcccctgattgtttttttcttcttctcgaggtctttggcagccagatcagtgcgtcgggagccctgtagttcttgggttttttgtgaggtttttgtcatgcgagtctagtacgattttaaggagcgggacaagtctttttttcgatttccagtgtttttttggcagtaagatcgggggaagagactgtccagattcttgaactcttaaattattcccctgaagaatcataagaatgtgaagagaacagtagtggaattggttgtggcaactttagagaactggattgtgtgtttttcttcatctttgttatcatctggactctggagcttatgctctcttgaagaattgcttaggttttttgttggttgccctagacgctagttgttgctaatagcaattcaggtttgtgaaatcttgacattcaataggggtagcgtgtacgtatatcagtttgcaagactgagagtttcctgcagtttgatatttgactgttaattgcaacatgagtctcatgaaaaaggttttaactttcgattgtttctcctttcaggt

SEQ ID NO: 4771 - DNA, 786 bp, Zea mays
  Intron number 2 from transcript GRMZM2G019307_T02 (locus G RMZM2G019307) derived from phytozome v7.0 (chr-ID 4; pos 6 6924080 to 66924865)
atagacctgtgattcttgtaaatcctcgcctaaaggttttgcccccaaaactctatttgtcatttcccgtttattggggtacctatgatcattgctatcatgcttagtctgatgaaatcttaactgcacaagtgtgtctgtttggttggatattggggtagtagttctaaaagttcaaactaattctgagagagcctcattgttgaaacaggttggattgtttgacaatgaacttatgccgactatttaatgctttcatctgatgaaactgagctaaaattatgtttctctttcaagggtacttatctggagatgctaatcatcttagcttagatgtaaatagaagatcatcaagactctttcttctatatttttttctaaggcctgcacataacccaagatttggacaaatatctctgacttacactaagagtttgtagattacaccatacaaaatttcatatcactggatgcttatctgaaaaactttaatttgatgtgaatgtcacagtaatggtcatgtgacatttgtttcctgggcacgagagaattctgtatctcattccattaaggaaaaatgtgaagataggggtcgtatcagatcaaactatgcgttacaaaaagaaaaggagggagtaatattttatgttttctcagtttcaactcttattggcttgaagtcccatatttgtggattatacttaaatgcttgcctttctaatgtataaacaaataatactacattactgagtgctaattaagttcccaaatttgtatttccaggat

SEQ ID NO: 4772 - DNA, 974 bp, Zea mays
  Intron number 2 from transcript GRMZM2G300849_T01 (locus G RMZM2G300849) derived from phytozome v7.0 (chr-ID 4; pos 1 3728170 to 13729143 reverse strand)
tctgctattgttcagtgtgcagaggattggaacaggtgaagttagattcatgtttgctcctattttggcattatgatttgttaaattgggctccattggaatatacaatattgttaagtatgacatgtctattgtgagagcattcaatcaagtgtatatatatttgtttttcgagacaaacgacattaaggcatggtcagctcttcgtggttgtgtcttgtgcatcacaggtgcctcctttttacgataatagcaatcgtctcttattttaatgccttttgaagcaaggggcaatcttatagtgcaataattgtttcttcttaataagtagtatttgtgaactgttataattaatactaccatgaatgctttatcaaaactaaataataacatgactgatgaaaataccctttcccctgccattccttttttctaacttgtatcattgtgtcctgaacaaagccatttctgccacttttctggtttaaaatattgtttttcttggttattcatgaaaactcgacactaaaattctatatataccattaagtgcactaactatattttacaactgtaggaactgaagcaaagtttggtgatttgggctatttcactgtcaaatcagtacaacttaacacattattattacttagtactccctctgtttttcaatatttgtccatagaacaacatgtgtgctaagtttttgtgttcctcgacgtgcttttgggttccatgtagcatttgctaccatcgtattcccctgcctgctaattgcttacatggggcaagctgctttttatgaaaaacccacttgttgtagaaagaatattctatgattctgtaccaggtaaagtttttttgccctcgagaattctaaatgttttttgcattcaatttttaagtctaaattttgaatatgcaatgcatgggttttattttggccagtatttgtgattgctacccttgcacct

SEQ ID NO: 4773 - DNA, 754 bp, Zea mays
  Intron number 4 from transcript GRMZM2G442324_T01 (locus G RMZM2G442324) derived from phytozome v7.0 (chr-ID 1; pos 4 133996 to 4134749)
ctacatatttcatcatgtaagtctgtatgattttaatgaagctacctattatggtttttgatgctgcacgattttcctttatttttctgtttttgtgtgaaaatatttcgtaatcacaatgattggttggtccatgagcttccttttttcagcgacacacaccagtatatcatatatgtccctttctcatgtctctgtggctagatttatgcttatgactcatggtttaacagacataactttgaaactatttttgttgtgtgtatgtgtgtgtgtgctactgtgctttagcagggtccttatcccttttctttttcttaaaataatgatacccagctctcctgcatgttcaagatttttttgccttgtcaatttgtgtcctggtgttggcgtttgtcacacgtgaagtgactctatcctactaccttcctgggatgggagcagcctcaatgctatgtgatctggtgatgcacatgatatgtgaggattgtaggagatagtttatgtgagggggaggaactagttagtatgcttcagacccaaatagaatttgataaagagctattccatcatggttaatccatgttcacagtatgaaatcaaaatgatgaacccaaatctcatttttgaagattgcgtgccaatgtctggattggatttcaatacgtgctggatggtactcatattgttaacatttgttttcggtttcaattttgcagctagcaagagaattaggggtgattctgcagaaaca

SEQ ID NO: 4774 - DNA, 694 bp, Zea mays
  Intron number 2 from transcript GRMZM2G017634_T03 (locus G RMZM2G017634) derived from phytozome v7.0 (chr-ID 7; pos 2 0196318 to 20197011)
ctatctggtatgtcttcggcagccaccatctttcagcttatttaccccagttttttttttcatttggtacattgtgaatctggcacctagaaatggatgtgataatctctatacttgtatggttataattgactgattttttgagtgggtttatttattcatctttcaccatagcataattattttttttcaagactataataattgatctgccaatgacttatcatgcaacggctacctatttgggtctcgacttctattatctcactagagtcattactatgattatttgaaacttagaactttggagcacgagttctttggtactccatcaagtgaagttttagtatgtgcgtgatcatatattctaaccattgctttcatatagttaggaacagatttagtttatacttacaaaatattatgtatagatttatctcactaattgtgcaaagtttaataatgttgctacagtatcgattaatggctagctatgagtttggcatcatgtatcaacatcaaaagcattacttattgtgactgcctgactgggaagtgcatatgtgttctattggacaagtgtagagaaatttgcttgtacaattctttttaggcatgccaagttgccaacattcttctagtgtcagtctgttttctaactttgtcttctaattatacaggactattaatcctg

SEQ ID NO: 4775 - DNA, 632 bp, Zea mays
  Intron number 3 from transcript GRMZM2G174716_T03 (locus G RMZM2G174716) derived from phytozome v7.0 (chr-ID 6; pos 3 9868259 to 39868890 reverse strand)
tgcggacttgggtaaagcacttggaaggtttgtgcacctattcttgtgttagcgttattttctctctcttttctttctgtgtgtgcagtctgcataaatgaacatcagcatgtaatgagctctaagtgatatagtgtaatgagccctatgtgtcttgggtctatgcttatgcaccctgcttatacttgctgtgtcaaagatttaacccagtgtaccatcttggccatttggcatacatagtaatagtactcgcttggaaattaccctttctaacatgcccaaaagtttgatattttatatttcacaagtattatcatgtatttggactggaagttctgtttttttttgaataaaaactaacttagctatttaatgaagttggctagtttcatgtgtttgttgcactgaacccaaacacttgtttatcctctgtttctggatgtagtttaagatagtactcttgtcgtttgatcgtagaatgacccccatactccttttcctccattttcattccaattactgttcttgtccatcgacatctcttttgtgttaatatatattccggtgaccaaattcagtctatacattttcctgcagctgtgctcatttaactgccttgcggagagactcga

SEQ ID NO: 4776 - DNA, 963 bp, Zea mays
  Intron number 2 from transcript GRMZM2G041050_T02 (locus G RMZM2G041050) derived from phytozome v7.0 (chr-ID 1; pos 1 62586172 to 162587134)
agagggagtgagggaaaaggcgagagcgtagaaaggtgagagcttttttcttttcttttttcatccgattgctcctcgcactcgcacagtcgcgcatcttttccgcccccacctcaatctctctggattctctcgaagtttcttccttttcgagaggtgggagagaagagacgcccgcagcggcacgagcttctgaattcctgtttttttgttcctggttttttgcttttgtttctgttcttgttcttgtgtgcgggtttggtttggtttccgtgcgccttttctctttattctagtgcgccgatgacgtgaggcgccgggttttcaatacttgcatccttttcgctgcatttgtttagcgggagttcttcgaacaagcagcgctgccgctgcttgcgcgaatctttggagtgaagctccccgtcacatcagtcctcttcttccccggtcgtcgtcctatgcttgtccctgtctcggcaattctgggatactaaagaggaatcggtgaaggtccggtcttcgattccccgagatttgcatctgaatcttcttcttcttcttctcttttgcctccatggagtctcttgctgcgtgccactccatcgagcgagtctagcgcgcgcgacacagtagcagcagcaaaggtgaactcttgcgtcctttttgctgagcaatcttcggaaaacatgttcccagtttccccccctttctcgatgaatgaggaagaaaaggtggcaagctttgagtgctgctctcgccatcggtttctttgctggtttctcccccctcgcgaatcgcttgaaattacagcatctttttatttgccgttactacgccaccctgaaatccgagtgattaataggaagcttccaggaaagaggtggagcttcttaggtttataattcgattcctctttctctcgttgcagcagtccggtcggagaagcggaagttcgcgttgctt

SEQ ID NO: 4777 - DNA, 713 bp, Zea mays
  Intron number 2 from transcript GRMZM2G366532_T02 (locus G RMZM2G366532) derived from phytozome v7.0 (chr-ID 9; pos 1 39511437 to 139512149)
aatcccaccaacaccgtcttcggtatgcccatgttcttcccctgaataattctagttccatagtttcagtttcctcttatttaatattttagaaataaaaacaatcgccacggctttcgctgatacttgcctctcagcagtcattgagtcatgctctgctcccactctatttttgcggcagctcatgaatcacttgttgcatgttctagatatatctagatcacaatttcacaataattttgagttgtaaaacctttttttttttgctgtttatcgtttcaattacattagtttgctatgtaagtttgtcttgaaatagcaactcctttttttttacctttgttcattcaacagatcattacaaaatatttataggatttttagttgtaaaatattaatagtaccctttacatgtatgtcagatgattattttttgttattgtttatgaaagggttatttgatcatcgtttagctatagaaaaatcatgaatcatctttagttaattttctttttactgtactagtcactggtgtaagattattgtctgacgtggtgtaagattattgtctgaattttcagaccactgagatactgcaactcctacactattacactcataatttttttctccaaatgggaggaaagtagcacagaaatcggtaattatccatcaactgtattgcctaaccgctctgtgtttcttccatgaag

SEQ ID NO: 4778 - DNA, 368 bp, Zea mays
  Intron number 4 from transcript GRMZM2G077258_T02 (locus G RMZM2G077258) derived from phytozome v7.0 (chr-ID 4; pos 1 63395853 to 163396220 reverse strand)
tattttccaggcatccagatttgttccctgaagaggtgtgttttgtcaacattggtactgctgtactctttgtgtacacatatgagtacaacaatacttatccagcttcaatcctttgcaaagagcatatattcaaaaaatttctaatcttgaggttatattaattatatctgaagatgaagattatattagttttttagttgagtatcaatataatgttgtgtggattgagtcacatgtttgtaactgcatattttaatttgattacactatgaatgtcgattatgataatttactactaattcatttgtattttaacatgatcactcatttttcttattttaggtgtataacatagagacatttct

SEQ ID NO: 4779 - DNA, 325 bp, Zea mays
  Intron number 3 from transcript GRMZM5G804946_T01 (locus G RMZM5G804946) derived from phytozome v7.0 (chr-ID 4; pos 2 20040888 to 220041212 reverse strand)
actacaaattaacaaaggaagaatttctctccaaggtatatcaacttaatacatggcctttgtttattttccatgcactaagtttacaaataacaacaggatatatgctaagttcatgtatttgttggatctgttatttatttttatgtgtccaccaactttcgttcttcttatgttttactatatagttgttcttgctttgcttccaatataatcatgtcattaattttaactttcttcttgaatttttctaacatgggtaagatatttgtaaagtcaacagctttgattacttttgcaaatacagttatctgacaaaagctgg

SEQ ID NO: 4780 - DNA, 844 bp, Zea mays
  Intron number 2 from transcript GRMZM2G146750_T02 (locus G RMZM2G146750) derived from phytozome v7.0 (chr-ID 6; pos 1 23678468 to 123679311)
tgccctcctaggtgtgagccctgccatgtttgttttgtggatcccacatacttaataatattaaattgagtggtctcatttattacatcgctggacattgacaagtgcatttttggtctcgagtttgcggcattttgcttcaatcctcaagttttgatcaatgtgggggcagtcctttgtgttgtccattcttcttgtttatgtttcagttcattctcagttcattggatcgagttccctgaccaacctaacagcactagagctataattaatgtgtcttttgacttgccgttgtcataaacaggtcccaaccctttcactaatgtaaagaattgatcatcatacaaggtctgatcaacttcattgtcatcaatttctaaatgtcccaatatacatattttttttcctgaaaatactgctcacaaagcataagtttatttgtcgctgactctgtcttatgttaaccctgatatataatgtatattttctctaaaatcaaaatgcacatgttatctctttttcataagtcttcttaaagtagtatgttggaaagggtcattgtcgttcagtgcatatatgctactatttttttggatagcaaattattgcttgtcctgggcttcatgacagcgatgctgataagaccatagtgaaatcattccatgcctcttcttgatagctacctgacttttctggtccctggcattttgcatctgaattctagtcctgctgcttgccatccttatttctacggtttgtctgctctttcttagacaatttgctagtaattgccatgttttatagtgcaggcaagagtgcaagaccaactctgttggctagagta

SEQ ID NO: 4781 - DNA, 748 bp, Zea mays
  Intron number 4 from transcript GRMZM2G008061_T02 (locus G RMZM2G008061) derived from phytozome v7.0 (chr-ID 7; pos 3 193005 to 3193752 reverse strand)
tattggacgaacttgtcaatatcgacccgaacacggtaacgaccgacttaagaggcctagaatctaatccataaattagattttatttataatttatttattatttttatgattaagttatgtaattttatttataaattatatatttttaattattatgtttgagttatgtatgaattatgtaattagatgtatttgtattgcaataaaacgtcgtgtttcatgtcaactaaaagtctataaaagaaaagctgatgtggtgatgaggtgactataggctgacggtaaagaccgtgcacttgagtgttgtggtagataaggtttgacgatggttgatatagaccggtcggtagctgatgtggcggtaaatatcacccgaaaggattggaatcaaccttagcctattcactgtacagccgttaggtgtgttgttattactcagttgcttcttacagatgaacataaacttctggaaaaaacaacagtttgtatggactattgacttgggaaaatgttagtatgaagcagccaaggtcatacatggcagcaagcaatatttcctcatcaacttttcttttcccagggagaactctaagcagaagaaaactttgatatgaccatataaagaaccatcttgcaagttggtgtcactatattagtcacatttcgttcatttcgtttgcatgctgattcgtttcaactaatcctgagccaacagtactgatttctgtaggaacgcatacggcac

SEQ ID NO: 4782 - DNA, 450 bp, Zea mays
  Intron number 1 from transcript GRMZM2G107757_T02 (locus G RMZM2G107757) derived from phytozome v7.0 (chr-ID 8; pos 1 43677591 to 143678040)
aggtgacctttctgtcttctttatttatttgctgtcgtatgattaccttggcttatacttacatcaaggtgtttttttgggcacgtattgatgtttgcttattttggctgcctaaatataattcccacccttctacttaagtgtcttggaactctcacattttgttaacttcatctcaacttatgggatgcttaagttcttctcatgacatttgtatgttccatctatttatgatcagttagtacaataggctgaccattctttgatttgctcatgaagttctaacgttttacctattaggaagggaccagtatcgttaactctttacatatgttttgccaactaggaaactatgctcttgttatagctggcaatttggcacatgtaatgcctatgctagtaaacgagaaagttctaaaagctcacattatttatatttagactcttgat

SEQ ID NO: 4783 - DNA, 516 bp, Zea mays
  Intron number 1 from transcript GRMZM2G054811_T02 (locus G RMZM2G054811) derived from phytozome v7.0 (chr-ID 3; pos 1 91193980 to 191194495 reverse strand)
gagctggtccaacgttggcggaagcgtcatcccgggtaagatctgtggctttgttccatgtgtggcgttaaggcgctgtgaggtgttgtggatcggattgatttcatgtcgagctaatttaagggtgtttgttttaccattctaaatgaggtggtgcaatcagtccatttctcaaatttggtggagtgattctattcctggtactaatttggtggaacgacttcatttgctgtactaattattagtccgcgaggctgaattattagcttgcaaggaatgaattattaacttgtaaggattgaagcgatgatgaatagcgcattctattccacaaatcaaacaaaataagaggagtgagaagatgatggactaactcattcctcaaaccaaacagcctgttagcttttggtttaggctctagctgatgactggtgctgttggtctgttttctttttatctcatgtatctacttattttgcagaacttcgagctaaacacaaaacagacttgcagaat

SEQ ID NO: 4784 - DNA, 536 bp, Zea mays
  Intron number 6 from transcript GRMZM2G108849_T02 (locus G RMZM2G108849) derived from phytozome v7.0 (chr-ID 7; pos 1 52774514 to 152775049)
aggtataggtctattcgtgtaattttcttctttccatcacttgaatttctctgtatgcttcagcagcaatcctactagttctaagacttttatgatcctacatcaaacaagtgatatactgcatatctcaaactgattttgtggaaactgaatggcagatgaattactaacgcatgatatgttgagttagtctatgcagcactgacttcattttgctaaatgttataatgattaattagagtgtaaatttgaacaacctagtcttggtacgagcaatttataatcttcagctgtttctgtatggttgtaagagttatcccaacatggtataaatacaccatcatgaaagttacactctaataagttgatctcaacatttggtttgatttacagtttgcaaaataagttgatctccttttgtattcagagtatagctgataaccatcatgaaaaaatcagcatggtatacaaagatgcgattaactttgctctatgttgcagtgtgatccatacttcgacccggtcggttgcaagca

SEQ ID NO: 4785 - DNA, 640 bp, Zea mays
  Intron number 5 from transcript GRMZM2G091155_T03 (locus G RMZM2G091155) derived from phytozome v7.0 (chr-ID 4; pos 8 1703544 to 81704183 reverse strand)
actccccagacaaagcttgcaacctggcaaagcaggttggaatcacatctacttttctactacatatgtacattcattgtaccgtgtttagggtgagggttgtttgtgcatttgaagcttgggcagaaagaaaatatccaaaaatgccttttaactgtaaattgtaggatacttgccctaaattgttcagtatatcaggagctttttaatgtttatatggcaaacttctgcccttttaggttcacatgcaatttgactgctagatatcttgatccctgtgtatgaggtcagatagtttctgattagtaatggtactatgatatgatgatagtttctgattagtaatgctacctctgatatgatgagctgctgatcttccattagttgttttgtgccattctgctctgttattgctagactcttgtttgttattatcggcctcttaaagaggattctccctgttctgttggattataaagatgattatgatattgtgtgttgagtatctaacttatttaatttgtggttactggtaggcatttgagttggttgcctgataatttaactttttatattgtgcattgtgtgccattggaactttgataattgataatgattggctaatctttgcaggcgtttg

SEQ ID NO: 4786 - DNA, 495 bp, Zea mays
  Intron number 7 from transcript GRMZM2G064023_T01 (locus G RMZM2G064023) derived from phytozome v7.0 (chr-ID 4; pos 2 33822423 to 233822917)
tgctttgggaaacatccctacttgacccagaggaggtaatcttgcatgcatcctcttcatgatgctatgttagcatagtccatagtgtactattagcttgtgcccattctatcaaaaatatgtacacagttccaaatttaatcaagtattacacaaaatctatagaagatacatgaaaatttctaaggatttactatagcacacaaatttgccgtagttgaaggtgataattgtttttgaggcattttattttagcatgatagctgcatttcttgtttctttgttgggattgattttgagcttgtcaaacctgaatgtctggattcacatcactcatcatctttgttgttggatgtaataatctagtattctagtttcaacattaacatatttatgaacttcaaagtgaagcaacgaatcacagcattcattcactaataaccacttcttttctatccagggtattcgttttaggggtctctcgattccagagtg

SEQ ID NO: 4787 - DNA, 1031 bp, Zea mays
  Intron number 1 from transcript GRMZM5G894729_T01 (locus G RMZM5G894729) derived from phytozome v7.0 (chr-ID 6; pos 1 5269098 to 15270128 reverse strand)
ccaaaggggaggcagcctcgacacttatacccagagtaaggagaggccgttccagggtgctcggctggcgaggatcttttgtgaattcgttttacgatccaccagagtttgttacggtcttgcggagttcgttacgatcctgagctaggagacgatgacgctgacgaaacggggccacaaatcagctgggatcgtcccacgcgcgagcgcgacggggcactgaagtgcgggccccaccggtcggcgatctgtgtggggctgtgggctggcgcgggatagggtaagtgggccggtggagagtttgcttaagtggttcggggtaggttctagcccgagaatcaacaggcttgtttctttcccttttctatttctgttttcccatttcattttctatttgaaattcaaaattcaaaattcaaatttgcacacagatgcaacaatacaaaatatcaagcatgtatgcaaggtttatttttatattaatcatttattcatttgaataggtacttctcattatttagttcatgaaagaaataattaaataaacaaactaaaaaatctttcccattgtttttatatttcaaactcaaattccagtgttagaattcaaatctaaatttgattcatctaatttttttccgtgtatttatcttaggagactaacctaaaaggtgagaaaatccttattaaagacactctaaattttaaatcttcagaaaaaccttctaagtcaccataataggattttgaggtgttacagaaaccgcaagtataaatgcatatttattttctgttttcttaagactaccttcaatagaaataatttattttactgcggtggtgttaagcaaataaccagcaaaaatatatttacaatggggaaaaaaattctttgcatccgtgatgcaaacaaaatcctttgcagcccctcacattcaccacctgaaggcccacaaaaacagatcaaaatttataacttaaccccttggtaatttgtttttcttctattcatgtgggtcttcaggtggtgg

SEQ ID NO: 4788 - DNA, 460 bp, Zea mays
  Intron number 3 from transcript GRMZM2G304617_T01 (locus G RMZM2G304617) derived from phytozome v7.0 (chr-ID 1; pos 2 42772397 to 242772856)
ttttgctcggttgttgatagtggtagggacccaaggtctgcttcgtcaagtgcggtccctagagcggccgcaaaggctacagaggaacaattacgatatgtgagttttagtttacttcgatttatatttttttgatgcgagatttgttgtgtgtgcgatcattggtgttttgatttaccgtatatttcttttctatcttgttaatgtgcaaacgtggtttacttttattatttcgtttttttccttttttaatcattttaggtgtttgtccccattgtgtatcgggcacactgggtggtatattgcatcaacatggttcataagcaaatcgacattctagatcctcagaaatgagaggagtcagacaaagatctatccacgctagattttgcttaaatgctcaacaaaggttatctgatctatagactgtacatagacgtgaagttccctgacatagcac

SEQ ID NO: 4789 - DNA, 1070 bp, Zea mays
  Intron number 3 from transcript GRMZM2G163550_T01 (locus G RMZM2G163550) derived from phytozome v7.0 (chr-ID 10; pos 8275949 to 8277018)
ctaggaagaaaaagtagagttgtgagaacacagaggtactcacaaactttcctcctccttttttttgagcatctctatataggctctagatctgagcatttgtgggtcaatagtttggaatttttttggtggcgagggctaaattccagtgcctgaaggagcgaagttgggcctttgtttttgggccaggcacatgcctagtcaagccacccgttctatcttagttgaaaaaattaaaagaaatagtagtttaatatgggttcagatcttggcgtgcttatcattatccaggacttttacagaaagaacatctcaacagtactgcccaaatcaggcctctacttttctttttataggtagtcattaaccacttactttcaggtgctgtttggtttggtcatttttttccgttatccattgacccattcacgaaatagattgtgttgtttcgtgtttggttagaacagcttatattgtgttgtccatatttttttattctgaaattttttataaacataaatagatcgaaccaatttctagtgatattgaaggaatcggtatagattttgatggcatcggagaaatttgctttaaatagaactaatggcgttagcttcaaactaacggtaatgacattcaagatattaaaatttaaatttgatgctattaaaagaaagttataatttctgatgatattgaagagattgatataagtttggatggtattcaagggattttaaattatgatggtattcaagagattaaaaaatttatggaatttaaaaaatccgatccatatttttgttgttgggtgtgaaaaggctacaaggatcgatggcatatctgatatctccggtgggagtgggaagcagaggttaggcaggcacccacctcacgatacgaccttacgtttgttcttgaaccgatatatgatcatctatgtctcattgacttgaccgaatcactaataagcagcagtagtcggcatcaatccaactctgatcctgcaattggttcaccatgcttcttcttcaggtcatccttcttggactcctatccctgcacgcgcc

SEQ ID NO: 4790 - DNA, 915 bp, Zea mays
  Intron number 1 from transcript GRMZM2G155323_T02 (locus G RMZM2G155323) derived from phytozome v7.0 (chr-ID 1; pos 2 67956666 to 267957580)
tcaacctctggatcaagcgcgaggacctgcagccggtaatcgacaacgttgcgcagccaatcgtttccttacgccgtcaccttttcttggttatggacctggatatttgcgtacttttattccaaaaaaaaacagcaccatttcttggagatgctggggtctcgatgtttcagcttctacttgtgttagtgggatagatttgcactcgccaatgaccttgttcagtgtcatatcttgggaatttgggggtttaccttggtactgtcgtgttgttcaccgggtttcaacaggatgcttggactcgcagaatcacggggataggtactcagacattccctttaattctccaccttggctttgataggttgttgtcacgctttcttcgaggaggatagacgttgcatgatattttgcacttttgactcgttatttattatcgctgatactaggagtactgaaacctcgaggtggctgttttttttggtagcttacagtctgaaaacttgattccataagtctatagtagctttagtttctttagaatctcaaagctcaacacgctaggcttgtgaactgcagtatgattgagggtcttgataatttgtacctggtctgctatacttgtttttttccctgtgttactagctacagcaaaaaccataatgaagggacgttatttgcatgttctttcgagaagaaggaacacttatacccgtatcaaatataatacgctttttatacataataataaagttcctaatttaattttgtttgactgtatttagtgtctatatgtgctaaactccaaattcatgggaaactacaattccacttctaagtttttattactttcctcagattttgtttgattggtgtacaggtattctcgttcaagttgcggggagcatacaacat

SEQ ID NO: 4791 - DNA, 984 bp, Zea mays
  Intron number 3 from transcript GRMZM2G155314_T01 (locus G RMZM2G155314) derived from phytozome v7.0 (chr-ID 1; pos 1 69986777 to 169987760)
gagagtaccctgcagcagtatacttctataccgtaaatgcttgagcgtatctaataaactatatacctgtttggaactatgcacagtgtagcccgggtagccattcagttgtttccgtgaaagatggaggttgatagtatatgttactttctccatagtctctttgtactgcattctgcgtggtttaccaagagtttatcttgagttaccactgtttgctaaatacgatactatactattttttggtttgctcagaccagttgaaaactgactgaaaaggtccactttgggtctctgtactgttgcgttgttcctatttagacaatatacttaacaacccgttatttttagcttgcacttagtaccatttctaataagtttgccacctgtcccgagggtagaatacataaaaactggttatacttccaaactagctttactgatgtttaattcattttatatgtgataaaaaacagcaacaacatttaaattgatggaaaattcggtatgctcctgaagatatttaaaagctacattaaggatttttgttgcaccacacttattatttaattttggagtttgtagtaggaatagaataataggaaatcaacatgttgttcaaaagttttgaatttataatgtgggtaacatgtgctaactagaattacttgagttaaacatatgctcaggagtatccaaggaaagcttactatgttttggctagtgttttattaaaagaacaaattctgcaatcctcaagagggcatttttagacctcatttggactggctttgtgggaacggtgttaaaatagtcagtgcaggtatcaaaagtgggcttttgcctttaaatgttgtaagggagtatgctccacagaagcagttcgatgaactgtaataaatttgcgttaaaaaagcactataataaatccagagaagctggattctttctgactggaaatgcaggtactagagaacgaccttg

SEQ ID NO: 4792 - DNA, 128 bp, Zea mays
  Intron number 2 from transcript AC211327.4_FGT006 (locus A C211327.4_FG006) derived from phytozome v7.0 (chr-ID 5; po s 52506776 to 52506903 reverse strand)
caattagaaaggttttttcttcgcaatattattctcttttgatgtattctcctaactgtgtttacataatttattgtttgtgtttgtacttaggcgtgtgccagcttggaagagggctaccttcctct

SEQ ID NO: 4793 - DNA, 627 bp, Zea mays
  Intron number 2 from transcript GRMZM5G872118_T02 (locus G RMZM5G872118) derived from phytozome v7.0 (chr-ID 1; pos 3 5991557 to 35992183 reverse strand)
ccctgactccatctgctacgggctacacggcacccgtattcatctctccccattccccttacagcagttgttggttccttccaagtttcacgcttgggaaaaatattgttatgttattctcatttctaaattctaacggaagtcactagtgtttttttttcaatgcacaagatgaatggtaatcttataaatcataagagggtttctcatctgttggaattatgtcacctctctttggcgccaccatcccgagcaataccagtcaccagatcaacatttccattgttatacacagcattttttggaaacaaaatgtacgtataaaagtaaaactgtataacctgttgtataacctgttgaatcaggagcttcctttttatgctactgaattattttagattcagtaaaaaagggctagattagtcactttgatctttttggtagatacggtgtatagtttcagtgagataatgtgttctttgcaccagttcaccacctgtgtctttacttttttgctatatagaacacaagataagtttgaaattatatattatcataagaagattttagcttattttgctgttttcttcctttttctattatgttagcaatatcttgcgagaggga

SEQ ID NO: 4794 - DNA, 628 bp, Zea mays
  Intron number 3 from transcript GRMZM2G060485_T01 (locus G RMZM2G060485) derived from phytozome v7.0 (chr-ID 5; pos 9 3238799 to 93239426 reverse strand)
acatcacaagggagaacgttgcaagtcatctgcaggtgtgatttccgttcttacatagttatgtttgccctcatatttatgtttctatataatgcccatcacatgtttattatctgacatctttggaacttatgattacatcaactgtaagcttcaacactatgtatcttgaaagaggattcttggattcttgttgcattttttgtttctttgtggcttggcctttataaggggttgtagatgttttagcctactgaggcatctctgccgttgaggcataactttgagttcttattttccttacttcaatggaaggcatagctcctaccattttctttaaaaaaacacatgaactacattttcttttgttttcaccatatctaggaacttctcaaaacctatcagcatttcttcacatgcttgttatacttctgaaagaaacataaagtgatatcagcaagcatattgatcaggttttacagttcatgtcctttgaaagacagcaaatttcgttgatcacttgggcaactttttatttttgcttggttgcaattagaaacacatttaataaatccttctttgatggtttgcagaagtatcggctgtatctgaaaagactcagcgcaga

SEQ ID NO: 4795 - DNA, 486 bp, Zea mays
  Intron number 1 from transcript GRMZM2G406850_T01 (locus G RMZM2G406850) derived from phytozome v7.0 (chr-ID 10; pos 126565852 to 126566337)
tgtcagaagaagtgaggtatgttgacatgcacctcattcttatagctaattgatgcacattatgtggtccctatgttttaagatcaactgagatcaattccccgcattaaagacaacttagccatatgttgtgcatgattaagtctagtaaataagcatctaagcaccacacacgctgcgcctactttcttcaataaataatggcggacctaatttcaccagaaagtggattgggcactgtatttttcaaagaaaacaaacaactgataaagacatttagttttatttaactatgaagctatcatatatcacatatattcaaacattggcataattgatgtttttgagttgagaccagaatcaatccgaaagtactagtagtttcactattttcttagtaaccttactatttgcactatttatttatctttgttattaccctcttttttaaaaattacactctgcttgtgaaggttgtgtatagta

SEQ ID NO: 4796 - DNA, 1052 bp, Zea mays
  Intron number 3 from transcript GRMZM2G119249_T04 (locus G RMZM2G119249) derived from phytozome v7.0 (chr-ID 1; pos 1 51023813 to 151024864)
tggcgatttcaggaaaacgccaatctatattgttggtatgcttgtcagcttcctttggaattttttttccaggggatagggggattaaaaggcctcagcaaaccaatcgttagccacaacaatcaaatctagacacattttaaatttcgtaacacaacaaactaaccgacattaatcttagcagcccaaaagtaagaaaactgctcgtaaaaaatgggcttgttcttgatccaaccaacattttttagccaaccttaggcatagcccaggtcttggttatgacaatctttcgggaatagatatcaatatgtgatgtgatctttgctgtcattataattgttgtaatggacatcggacagaatattttaagttgccaagatacaaatgtcaggtcagtatgcatccaaacagcacaagagaaaacaactgatattggtgtgaggacactgtggaattctaaaactcatcagtttctttgaccaccacaatttacagcaaagaatttcttctggatgagagtacgagacagaagacaagttgccaaacattttctagttgagtatccaataccttctgccgtcatggtgttcccacagttatggttgatcaccaatagaatattgatttgttgttgtctagctaagtaattgtagtcccagacccagcctacaattttctgccagcctacaatagaatatggtgtttcctacagaccttgcaaatttggtcgacattacaatccttgacagtgcctatccattgtgaccactttgttctgcagaaggatccacagttgtttttgaacttgcatttgttttcaacctatgtcatccaccatccaagcttctttttgttgaccaaccaaacaattgtgcctcttaagctgatttctcagtagtttccatgagcagatgagctccaggatgtcttcttttcatgtgttaaatttgtgccttggataggggaccaaaggttaaaaaaatgcagacaccgactgggttgttcctttatgcacaggtacggattgcacagccaagcgcaacatcgccaag

SEQ ID NO: 4797 - DNA, 696 bp, Zea mays
  Intron number 3 from transcript GRMZM2G470438_T04 (locus G RMZM2G470438) derived from phytozome v7.0 (chr-ID 1; pos 1 3600670 to 13601365)
gaacgttacttccaacatacaacattgggcagcaggtttgctgtagttatatttcacactgcacattttttttggttaagtcattttcttactaagattttattgtgcatgacggttaacaaaaactggttaaagactgcagataaattcataatatgaattgaaaatatggccctttctctgtattaataagttaatattactaatgatgtatatctaaaaatatgcaatatgtgcagccgtgtgtaatttgttgcaatatgtatggagttactcaatattaggccgaaccattcacgtctcgtaaaatgaagcggtgctccagcagaatgcgagcaggagagagaacgcgtgaatatgtggcacgaaggaagggagcgtggatgatgtgtagccacatacacagtctactggatgtgctacagtgtattttgattgcgcaaattgccgatgcaaactcagatacggcagctgctggaaatagccttagttgggtctattgtggacctctatttttcttcttaatataatgacgcctcgtgcgcgttcgagaaacatagttgcttgatttatcttagagatgacattgatatccaactttttgtatcctttattaaccaaatacaaaactaacttgacctatcaattcaaaatcatgcagtttgttccgacaactttaacacttgattctggagt

SEQ ID NO: 4798 - DNA, 618 bp, Zea mays
  Intron number 5 from transcript GRMZM2G470438_T04 (locus G RMZM2G470438) derived from phytozome v7.0 (chr-ID 1; pos 1 3601643 to 13602260)
aaaacacacgtttctccccgacaaatcttgtatgtagatgccatgtaactatcttatttgatctttttttcatctacagtcttcactatggaatgcttgcttcttgaaaaaaataaagttatgctaaaaaagaataaacacagacctgcattcttgttttggctagcatactgtagcatagtatccagatcactagagccatgtatgcctccattaaatcctctttttttgtgcggaaagtactcttatccttatgagagttctactatttgatgtccaaaagcaatttttatttttttgtttatgtaagagatgcatactttccacggtatacttgcattttaatctaataatgacgtttgttctgcccccccctccattgatatagtttctgatgatccactttgttgtgaattcgcaaataacaatgagctagagcctatggcttagaagtaagatcgtgattattccacattatataagattaattattccaattcatgagtaatattgccaacttttgagttcatttgtcttcttgaaacataatctttttcttttttaataatgaaacaaacttacgattttttgggaaaaatgtagggtgaggcattggtg

SEQ ID NO: 4799 - DNA, 743 bp, Zea mays
  Intron number 1 from transcript GRMZM2G554609_T01 (locus G RMZM2G554609) derived from phytozome v7.0 (chr-ID 5; pos 1 38421056 to 138421798)
tgcattcttcacaagttcgtcaggtagttgacatgacatggaaagatcaacttaatttttagacgtatataattcagggaaccttttaggcaacttcacactcaactggctgttagctaatttgttttctttgttgaggaaatactcctgaactctgcatgaacaatgataatgatgtcactaagtttcccatgttcttccatgtaggcacattccaagctaatgaaacatgatgtcactgccgaaggtagctggtggcggctttagaatgccacagtttacatcttaaccaggcagtagaatcagaacactctgatcagctactggctgctgtcacatgtgctcatacgcttttgccttagtttattacatgtcaagaacaccaacataaagaaaacctgccctcgattagcattattcagtagagagagttgtggagaaataaaattaatttgtttgttggcgcaactaattagacccgttttcattaacaataatactaacatgtttttgttgtaccctagcaaaatagaaggtcatgtgtatgctgcatccgctaattgaactgaatgatggaatcatgtaaataacaagtaaaaatattgtatactgctccagtcaaggttgtgcaagtgatagtttaagattttacaaggtcattttttggtttgtagttagcttcaaagttctgtgatctaacttcttcagtgaactatcggagcttgcggtgttaaagagggcta

SEQ ID NO: 4800 - DNA, 962 bp, Zea mays
  Intron number 1 from transcript GRMZM2G125300_T01 (locus G RMZM2G125300) derived from phytozome v7.0 (chr-ID 5; pos 1 566996 to 1567957 reverse strand)
acacgctcgtgctggaatatagtgcgattttatgttcctgctacgttgcgactgctcatagaatatatgccaattttcatcttcctgctatgtccgtgtatcatgttttttgaaaaataatatctccatatccgcatccttctgataccgcccatatccatgcatacatatggtttgcttgctatatgcaagcgcctcgaacccggattgctatattttgatgatttcgtgtctctcatttgatctttttttaaagaataagttggtgccgtgattgtagatctaagatcaacgtggttgcaacctgtgttcaactaagacacatcgttcccagtttacttttttcttagcttttgtgcttgcaatcctgtgaagtgtgacgtaactaatggaatagtgtatcctgacaaataatgcatggtgaaacgttttttatccagattccttgaatcctctaaattgtgtttgtttattgttagaaatgaacttcatctaccaaacaggattcgaacatgcctttctttaccatgtttcgtgcaactatgcactgctaacatatcagtaccatggtttgcacctgctagaatatcagtttattaccgttttggtgcaatcgtgactgaggtggatggggttattgaacaacgtatttgaatatttgatgttttagctgcatggaagtattcattccaatccttctgttgaattgcaaagaattgcttaaatttgagatctgtatagttctgttttagttatgccttttcatttgagcctgaattagacttcagttgtttgcatagttatagttataaatatagaatagcttgcttgtccatcaattttgaattgttacagtactgaatgagtcctcagagtgcatagtgttgttctctttttatgtgcctgatagttggtcctcttgtatttcagttgctcttgcggtagttcccccaactgtcacc

SEQ ID NO: 4801 - DNA, 741 bp, Zea mays
  Intron number 1 from transcript GRMZM5G822829_T01 (locus G RMZM5G822829) derived from phytozome v7.0 (chr-ID 10; pos 138467871 to 138468611)
cttctgcagcagcgcttggagaagaagttgtcaaggtggaggagtcattggccagggatttgggaatccgttgtgagctcgtcgaccacactgaagcctagcctgctgactggtaggtggtagcctcctctgtagtaaccggggcctaatcttccggccgggttctggctgagacggacggctcctctgtagtaacgtcggcggctgccgtgtggagccagatcatagcagacgtccatggctgcaaccgcaagccccctccctctctccgcactggggttcacgaaaccactcaaaccagtgtccctgaggccgcgggtcacaaaccacgacggatgatctcaaaaccgtgttgagggatgggtgcagtcgagaaggtcatcaaataaaagaaaacatatctggtgcacatagaagatttatgtacatggtgcacatattaaatcatcaccgctcattttagatctaacgtctttagttgtttggtatattttgctaagcacatcctctaatgtggtggtgtgtattggtggaaggtgctatttgtaaattgaatgatcaacaagaaacgttatatctaaaatgagtggtgatgatttaatatgtgcatcatatgcattaatctttcatgtgcatcagatatgtccaccaaataaaagacagatgtggcctaactcacgacgagagtaaaatatggtcgttgcagggtgctgacgtggacggacgggttctacaacggcg

SEQ ID NO: 4802 - DNA, 949 bp, Zea mays
  Intron number 3 from transcript GRMZM2G064171_T03 (locus G RMZM2G064171) derived from phytozome v7.0 (chr-ID 5; pos 1 23682769 to 123683717)
agtatactttcccttaccatctttatttgttagtttaatttgtaattgggaagtattagtggaaagaggatgagacgctatcatctatgtactctgcaaatgcatctgacattatatgggctgcttcatataatttgaattgctccattcttgccgacaatatattgcaaggtacatgtctaggagctatttaaactacgtcgacctcactaattataagcattgaaaaagcaacaattgctacagtgcacttaaacttgcagctcattattatctggctaagatgatgggccaacttagtttatttgatctaaaaattgtgagtcttatgttctgaactcaaacttgtgacaatttattttattttcgcagtctattatacgtggtaatttgcaatatgcttctttaagtgcactcagaaggcatccacttgatctcggtaatcaagcattcctccaccgagctgtggaagggtgagtctagacttaatgtgttttctaaaactaatttaccaccttgtattttggaccttgtttattttacaagttctcaactattcaattcaagggattgaatcattatttatggtttcttgtcattatataaatgtgaaaagacttatattgatgtgacttctgaacgagttactgatttaatccatttcttctcatgtcatatttctgtattcagctatttatcaagatgaacagtatgatcaaacatctacctgttatatgaaaattcaatccatgtctgccaaaaattacatatatatgaatgtgctgtttcatattcattttcttctcatttgacttgatacaaggcggcagtacatgtactgaatgcataaccacttttgctaaaaagttatgcatatataatattattatgtagatgtattaaaaaataaagatgacacaaaattgtgttgcagattaaatacaggaac

SEQ ID NO: 4803 - DNA, 474 bp, Zea mays
  Intron number 1 from transcript GRMZM2G352830_T01 (locus G RMZM2G352830) derived from phytozome v7.0 (chr-ID 5; pos 8 8844895 to 88845368)
tccattaagagaattgtctagcaacacccttgaaggtatatctactaataaaatgcaatatttgatctctcaccaaggttttaaaaaggaaaataacgatgttcatattgtgtagatgaatgtccagaggtacctgtcagcgacagaagcataattgatttaactaaatcgtgtgataacactcaaggtgaatatgtttgtttaccatgtattgacaatggagattattgatgggtaatatatgatggttcaggaggtcgaactgatgcgagacaatgtaagagacaaagagaaagagcatgatatgcggcgatgagtgttgaaaaaaaaaacgaattgaagaaccgtcgtcagtcacgcaaaaaagagaacgttgttcaccatgagtattcaaaaggtaaattaaggctgcttgtgcgtcactcttctttaaagtaatgcttttcttatgtgttatcgagttactttgtgtag

SEQ ID NO: 4804 - DNA, 577 bp, Zea mays
  Intron number 1 from transcript GRMZM2G007810_T02 (locus G RMZM2G007810) derived from phytozome v7.0 (chr-ID 5; pos 1 5697038 to 15697614)
caaggagctcaacgtgccggagctggtcgcgatcggtgcggtttcttcttcctttgaatggaacccgactgccgacgcgctcgccagacgccaggtcgcctgcacacgcggcacacccgcacaaacacctagaacgtcggtccgcgatacacacgcccgaacgcacaacgataggttttagttcgttgggccaacactcccaaaccatcaatctataaatcatacttgctcgcccacaaatcacaatgtgagactattctcaacaatctttcctatgcttgctcaaccatataaatcatggttgttcacccacaactcataatgggttttaggtctattgggaatagtccactcctttgaaaagataaattactctactaagtttgtgcaaagataaattatcaaaattctaccaatgtacagtgatataggttacttcaatgcttcttgttcttcaaagtgaaaacttcgatgggctgaatcagattctatagtaatagagttttccaatcatttcacttcatggtgaacctatatgttctgtcaggggttggttccacagttggagcaggagtat

SEQ ID NO: 4805 - DNA, 808 bp, Zea mays
  Intron number 1 from transcript AC210532.3_FGT002 (locus A C210532.3_FG002) derived from phytozome v7.0 (chr-ID 1; po s 198545656 to 198546463 reverse strand)
tgaactacctccggaaggagaggttctgcctttagggggacctgtgtgagtcgaattcgcgggcagaggaggctggggcgaccctgagggcgacaaacgcttgcctggaggcggcggacctggagtcgaattcgcttcctaatgatctaattcattagaaaggaaaattatgttcaactagatttaatgtatcattttagttatgtgggcacctaattaagctatattagagatccctatctagcatagacatatttaatatgaaatacttgaatataaaatcttaataaacttttataaaaaatatataattatattttaatgttattgagaaacatatggtctacattttattttaaatttctattttatttgggttccaaaatatacattttataataacaactataacatggtcctacacataaatgaaggtagactacgagggatagccaataatttactctttttatatagatgttattataaataactatttcttttttattataaaatataaagcctataattcttaatttgaagattacatataaatcgattatatcaaacatggctctaattaatttacaaaaataagtaaattgttgtaacttataaatttacattaattactacactaacgaatactattcaatttatttggacgcgtatttttttaaaagaaatcaatggcacagggattagtacactattaaccatagcgtctagaaagtagcaggcgaataaaatacatgttatcttctacctctcgattttgatgagcaggggagcagagaacagtggccac

SEQ ID NO: 4806 - DNA, 676 bp, Zea mays
  Intron number 3 from transcript GRMZM2G070351_T01 (locus G RMZM2G070351) derived from phytozome v7.0 (chr-ID 5; pos 2 13635649 to 213636324)
tttggcctcttcagctgctggccttgcctgtttcggtaaagtttcttctgctatcatcataatctgattgtttcgctatgttctcaacataatttgtcatgacttctggctatccttacaatgatttgactgtttgttggtctgttgtattagcaaaaactacaacatgaaaatgttttaaaagttcacagcaattttactagtgttgttttcgtgtggccaatctgattctttttaccaatttggagcccaagttggaaattgtgactgcagatgcatcaaaacgacttattaggagcagatgtagtatttttctagtttctttttttttcattttgttctcctgtgactgacattaaaacatgaaaaatatatttagggacagatagagattgcgaatgtaagttttctccctttattttcactaaaaacatggaaaatagtactattcgagtattactaacttttggtcactggtatctttccccattactataatagctacttggcatgcttctctggtagaaaacaacagttcgttggaaattcataacttctattcaaggccaaataacggttcacgatttcttagttctccataaagatttgtgatcatgtatcaccacataagcatttgttattgaatgttgctgcagttttcacccttggaaagctg

SEQ ID NO: 4807 - DNA, 787 bp, Zea mays
  Intron number 1 from transcript GRMZM2G175054_T01 (locus G RMZM2G175054) derived from phytozome v7.0 (chr-ID 1; pos 8 3325876 to 83326662)
ctgttctccccgccctcacctccatcgacctctccgtgagctttagcctccccttctcacccaccgcccgccaaacaggttcctttcccttcctcccccactaacccccactctagggtttcggttcggacgctcgcccgccgtaggcctttgccccgtcgaacgccatcctcagcaggattctcgcggggaatggcgcggtccgcagcctcaccgtcaactgcagcatcctcgacgactccgccgcctccgtcatcgccaggggtagcctgcacaatctcttgctgctcaagtgctccttctcgatgagcttctttgtggctcttggtggggcatgccacgatttaatatgtgcttcttcagcactttttggttcatgtttttttgtatgcacatggatgcaagttatgaaattgaactatacaagtaacggtctggagtttgggctattgctttcaagccatagtgattgacaagtccaagcattctttaacccaagtttgaatttagatcgttgaagctggagatggcggtttgtccatacactctatatccttgcctagcacctgtctacgtgggatgtgttcacttggaggtgagagatttttccgatatggatatgatattcttcctcacctagaaacatggcaattttgtagaaataatttgtttgctttcattgtctttcgatttccaagctttacatggaactgcatatgattaactgtagcctttgaataatgttattgatcatttggttgcttggtctaagcagtatttttttcca

SEQ ID NO: 4808 - DNA, 788 bp, Zea mays
  Intron number 1 from transcript GRMZM2G087719_T01 (locus G RMZM2G087719) derived from phytozome v7.0 (chr-ID 5; pos 1 22480701 to 122481488)
ccacgcacgcctcctccgcttccgcctcgctcagggttagggtttcctctgctccccatctcattcttgttttttcatgttggatttgttagagaaggcttgatctatgcctgttggggcccgattcggcgtcccgggatcgattggtgcggttttattgacggggtgggggcaagaggttgcggtggtgttgattcgttggatacggggatttcggggactcgcatgttcgtgggttgatttggccttcgcacttcggttggtggtttctctcggttcttctgtgtggggaaaagaaaacgcgtttcttctctttcttatttttaaagttttaaaaactgtacaatggttgtttatcactttgtcttgtttaaaatcattagatttgtcgttccattttgcctgatttctcaaaaagtttatagcactgttagtagctagtgatttaaatgctctatcatggtggaaatcgtgtgcatctggttgagaacggtggattcgttaaattaacatccctgatttgcctgatttctcaaaaagtgtatagcagatttgatgcacgttgttctcgatttacatccctgagaatcttttttcccttgttttgtagagattcggatttgattatattaccctgattcgtttaaaaggatgggttgagctgtatttgcgcaacatattttgcgacagtgacttctcttcctaaaaattagggtcttgttccgtctaccacgatccattcttgctaagacggcattgaatgtttaatgtgcagcttatagtcagtg

SEQ ID NO: 4809 - DNA, 128 bp, Zea mays
  Intron number 1 from transcript GRMZM5G852073_T01 (locus G RMZM5G852073) derived from phytozome v7.0 (chr-ID 5; pos 1 51995108 to 151995235 reverse strand)
caattagaaaggtattttcttcacaatattattctcttttgatgtattctcctaaccgtgtttacataatttattgtttgtgtttgtacttaggcgtgtgccagcttggaagagggctaccttcctcc

SEQ ID NO: 4810 - DNA, 699 bp, Zea mays
  Intron number 1 from transcript GRMZM2G000749_T01 (locus G RMZM2G000749) derived from phytozome v7.0 (chr-ID 1; pos 1 2099706 to 12100404)
gcagcgaagacggcacccgacgtgttcacccgctggtcagtgatacactatcctgttgccacttctctatgttttggcgagttctaacggaatggaggagctataaactcattgatcgatgtgtaagacatggaaatggcttgggtaaaatagtaacacttgttgaatcaaatactactgttgccgttccccatcgtttggtgtgtttaaactggatgtgttgggcagatggtgcccaaagtttatgagacacggaatgagtacaaataatctgattgctgtatttacggggggtaaaatttcaacagaacatcggaagatggttttaggatagcatgtgatcgagtgtataaatggaagaggaaatgtgtaacacatttttgcaaggatattacctgcttttgacaaacaacagtgaatcataggcatgttgatatgggagaattagtatgcatgttggtattttcaaagatgaaggtagtcttttcatgcacaacgatatgtaccatactaacaggtgaaaataaaatcagtgtggtgtttttcttttaaaaaacataggcctgctctaagtctagtgtttatcttctgtatatttttgtcagtgtcatgatttccttgcatccgtatccatttatgagttttcacttgttttttgttgcaggaaaacctgcctgttgaacagttcgttgacagaaa

SEQ ID NO: 4811 - DNA, 844 bp, Zea mays
  Intron number 1 from transcript GRMZM2G013324_T02 (locus G RMZM2G013324) derived from phytozome v7.0 (chr-ID 5; pos 1 79010764 to 179011607)
gaagaccctgagcggtaaaactcgattcgctgcgccctcacttcgtttcttgaaaagttcatgtgtgtgcgtgtgtgtgtgtggtctgatctggtcgattttgctgccactcttcgcttaaagatcagccttctcgcctgcaaattgcaattttggttctgtcctacagcttggcctggatcttcaggataagcatgaactggctgcgcatttatttctgtgttttttctgcagcaaaatggtttctttagggcttctgcagcaaaatagttttgctggtctttagcaccgtttgggagactaagacgatggactagcttatttatcaaaccaaacaccctgtaaatttctgattggaagcttggggccagccatgatgcttaccttttagcatttcgctaaaaaaaagcacggcagcctttccagccaagtggcattttggttgggatgcaatagcaacatctttcatattagttcactgtttacatcaccgtgcgcccaagtacaagactacgcataaccacttccttagtgagatgcactcgtaaatcattagcagctggcgtctactattctctgctttggcacatgggaattgcttgttttgagaatgggatgggagtggatcagttcgatgggggtggtgctttgaactaacggtgataatttcacatggtcatgcgtgtttaccagttttatgtccgtccggtaattttggttttgtagtttctgccgtagcgctcagggttattccagtacttttgttcatcctcatgaccctaacagtaacaatcatctcattgttccaggcaaggctccagtaatcgttgctaagggcgggttc

SEQ ID NO: 4812 - DNA, 1041 bp, Zea mays
  Intron number 1 from transcript GRMZM2G497630_T01 (locus G RMZM2G497630) derived from phytozome v7.0 (chr-ID 5; pos 1 59198232 to 159199272 reverse strand)
gaggtcctcgaccaggaccatctcgacggtttgcattcagcttaactgaagaaatggtcaaacagtgaacatataggccactcataaattcaatggcaaaatattgatctagctcaacacctccaagatataacaaaaataaaatgacaaaacagaacgacattgcatcagtacactcatgttaaaaaaatataaaagaagccttgtggctgcatgtacaatgaaatctctatctcattataaataattgtatcatggaccaagcccctaatgcatgactgcttgtctcactaatacaatttacagtctctgaaaaattctaatgtagaaaaaatacactggaagcctttgtgcatatacaatgggacctcagacatcattatgaatatagaacatgcctctaatgagcaacagcttgactgaacaatacaatctacagacttagggagaaacattttcatttactaacaggggacaagtccttgttatagatgggctagctacttgtgctataatagaaagtatcagcccagggtaattcattatcacaaagcatatcaacaatataatagttattcctcaaagaaaacattgaatagttatggttgtacgaaggaagcaatttaaccagagatataaaatatcaacaatggtaaccataccattttacacccatgatcaatgtcccacttgaaggttgtctgctctcctggagcaggtgtggcattaaacttcaagtccatacctggatatataatcggtctgaaaacaatgacacgggcaatattaagaaagaccaaaacaaaagaaaaacaagtagtgaaagctcaaaaaaagacaacaagaagcgtgggacaaagagaacaaaaacttggactgagaaagtacgtaaaacaaaaaatgagcagtcatccgaaggataagattcaccctcctctatttgttggaatatgcttgacaagctttgcaagatcatatgacttgagccgacatacctgaacaacagttgcgctaaggaaggaattcgacagcactccaggc

SEQ ID NO: 4813 - DNA, 960 bp, Zea mays
  Intron number 1 from transcript GRMZM5G883855_T01 (locus G RMZM5G883855) derived from phytozome v7.0 (chr-ID 5; pos 1 6092087 to 16093046)
agaagcagcagcagcagcaagtaaataccacacaggtgagtagtggcctaattgctctggcatatgtatgcgtcgtgggtattcttctgcgatctatttctaaccgcgccctgctggtagcagtgtgtgttcatccggtctctcattcttcttcgttctgatccgggccatttttctccatctggttcgttcccttctctcaatttgatgcgaaaagggcgtgacctaaaacccgcttgatcaaaacgaactgttgtacgggtgtactgcactgctgctataggtgtctgatgctgttgggttttttgctagagaggctccgggcacgaggaagccgcgcacgcggaccacttcctaccgcgctgcgcgattccgcggcagtgccaaaaagctcgctggttctatacttcgatcgcaaaagcagctcgtttttcctttccgatctctgctgccttgtcgctgtttcctcgggcctcgcttgcttttgcttcgatcgatccgtgcggttgcggcttgccgctagcagcagaaagcagcttgcaggttcttcgtacaagcgacttttgccacataacgcgctgctgctagacgagacgagatgaggcgcgctctcttttccccttgaagcgttcaacctcagactcagtttggtgacttttgttgcctgccttttggtgctttggtttgggaactagagttttgaatgttttttcttcgaacttacaatttataaatctcgccagtttggtcggaaaatgccagtgcgcattattattagttcatctatatgcgggtcaatttggatgggtttcgaaaatttgttatcatttcgatcatcgaagggtctctgtccttcttgcttaactctttttgaactatatatatatacttgtcttgatcggtgggtttgtttgcccgtttgcttttgcaggagacccaaaaaaaactctgaggacccgc

SEQ ID NO: 4814 - DNA, 936 bp, Zea mays
  Intron number 2 from transcript GRMZM2G068171_T01 (locus G RMZM2G068171) derived from phytozome v7.0 (chr-ID 1; pos 2 58431177 to 258432112)
aagattctttccctgccagtgaccattaaaagaaaggaatatgtagagtcagaaattggtaatctatctgtgtttgtgtagttcttttccctgcatatgaccttgatgtttttagtttgtaaaatgaagcctagctgctattattcccttgttagtagtaatgcatacatcatcatactaattttcattccagacttccagttagacatgtatcatatgcatgcttgtatgagggacacatttcttggtcagttttttcagaaacatgagaggattagtttcttctttaattgtgtacacttggattgcaattttatgtctcagtgattgttttcttaataataaaatcaatacaattcatagacaatgctacttgctttgtctgttagaggtgacatccaaattatttcatgttcactggtccaacagatttgggaagcttcagggtattggttatgtaatgtgatgttttactataaagcctagatgctgttttcaaaaacatgatagttttttcagaaatacttgtttttcagtttgtccaaaacttctgtaatgtgatgttttactatgaaatgtactgtgatgcatcaaaagaaaattagtaagatgaggtatgcaatactgttgtgatttctactccattttctccaatttcttcttgttcattgtccaaaactactggatactggtttaagcatgtgttatcttgatgttctggtgctagggacatgttaaatcattgaacattaagaccgacccgccatatttgctttcggcgagcgacgcgtgcctgtccacggccacgattcgggtctccccgccatggttctgcagtattgccaaacaaataaacactgattgcatttttcttcatttcatgctaccattgtctttccagggagcaacaattgtggaccaaattgtgaacataac

SEQ ID NO: 4815 - DNA, 829 bp, Zea mays
  Intron number 1 from transcript GRMZM2G383555_T01 (locus G RMZM2G383555) derived from phytozome v7.0 (chr-ID 1; pos 2 41771208 to 241772036)
aatcaaaaggtttaaagaacaccttgcgggtggttttgtggatacattaatgtgttcttagaccacaacagagattagaaaagaaacgaaagcatatttagacaagaataagaaatacatgcctattttctttgatgatgatgattttcatgagcagcaggggcagaaggataccacatatgttgcgaaagggcctctagttgagtttgttaggtggtttgagtagcactcctcaggtcctgggttcaactcctcgtgggagcgaatttcaggctgtggttaaaaaaatcccatcgtctgtcccccgccaaagcacaggtctaaggctcggtcccggtcccggtcttttctcacatgggctacagtgccactgtgtatgggtggggcaggggttcgggggttttctcgacctgcgtgagaaagtcttcttcttaatataatgtccggggactgtcttaccccttgcaggtcaagtttttttggataccgcatatgttcaccaacctagctcggaggcagccgctaaaaggaagagacttgcattttagtggattggtggcgttcgtatggtggccgggcatatgaactacaaagatttgcgaagcttgtggttggcctttgtggttcatcatctagtcgtgagaggaattggagtacatttgaatttgtaggtccaacatagctactttggttatgcttaaatctgtttctcgctacttatatagcttgccatttctatttctaacatttatagatgcatacaaagaagagaaaccgactcttgcacacgaggttgaatgacttggtctatgtttcatacaattgaaag

SEQ ID NO: 4816 - DNA, 977 bp, Zea mays
  Intron number 3 from transcript GRMZM2G094705_T01 (locus G RMZM2G094705) derived from phytozome v7.0 (chr-ID 5; pos 1 91119067 to 191120043)
caagtgtttctgccaaatcgaccgcagggggcaaggtgtggttgtattatccacttatgttttttcatgtcctgtgattgtagtgttttggacacaacgccttggctactttgaagatgctcgagccctgaagtaggatagagtagatatccacttgcgtttgtaaggtgatagatgcctagaaattggaaatgaaagcaactgtagctattagctaggtaacaagatattgaattgttcatgttatgtttcacttgtctattttatgctcttatccacactatcacgctggttttgttaccagttgaatcaagtaagagtattatgtggtggtggtatatattacttaatgaaatactcaatactcaaggaattcctacaatttttagatcatcaaataaactccacttctacagtgactgcttcagcgttttggtctctacagaattgctacaaaaaaaactatcaatattcattttctatggttaatttgcttgaaatattttcttacacaccacaaacgatatgcaccaatttctgtggcacatcacagcttttcacttggcaaatacaatggtagacgctctatgtatcaatttcgtaatactatgcagtattaactttttatgatatccaacttttgttcttacttcactttcatgtaatattcagtaaactatctgtttcatttttcaaagaacctgtttattaacatctggctcccattttcttgtccttccatttaatggtatgaaagcaaacagatacctgtgctttttgtttactctttggagttgcacataattttttaatggacatcaattcacatgtatatcggtccccaattcaaataaatatcaatttatttgaatctcttttttaccttgagaatattcctgactcaatgttggatctatgttttttatccctgaatttgtgtaggatttgagcaagaaggtatactttacaaagcagac

SEQ ID NO: 4817 - DNA, 456 bp, Zea mays
  Intron number 2 from transcript AC205703.4_FGT005 (locus A C205703.4_FG005) derived from phytozome v7.0 (chr-ID 5; po s 181194416 to 181194871)
agataaggtcttagttctactttctatttgttattgttttcggccttttcattcttccttataactatatgtgttaacaagtgagtagcaattgtactaaatgagacattactttcatccggtactctacttaaaatattttgtctgtttgttatcttggttagcttttgttacacatcataaacagttcatgttaacaataaaatacactgtatgtggtcacaagaaagacaagaaatacacaattaattaatacttgagaactcactttaaaaagaaatgatatgggggagtgtcccatgtaaattgaagttcagtattcttttaaattttgatctgattgctaatatttaaaaaccattgtagtgattttcttttaattgaggaattccgtatggcataaaataattaatttccccagattgctacaaattcctggtgcaatatttgctgctg

SEQ ID NO: 4818 - DNA, 872 bp, Zea mays
  Intron number 1 from transcript GRMZM2G139512_T02 (locus G RMZM2G139512) derived from phytozome v7.0 (chr-ID 10; pos 106435620 to 106436491 reverse strand)
acgactcctgcggcgggggcgccgctggactcaaggtaaccgcgcagcagttctagttcctttactcaacgaaggagggggcccagactgcagatttagttgatagctagcgagcggttactggttagggtcagttggtagattcagcagtccatggaccagtcggcttttctactggcacttgtcttctccctgttccccttgttggaaattcagccagctgacctcagatccagattccaccacgctacagatagttcggcctttctagatatattctgactggttactggtaacctaacgtcgtagatacctctagacttctagagtgtgtcacggtcagctagtctttgctgccgagaagaccactgctgatttccacttggtgtctactgcagattttttttttaatcttgcccagaagtggtcatcaggtcagacgaacgaaattaatctactggcactggggttgctcaattagctgaccgagtgctgaccggttctgaatttggaactttctaactgatgaatgcttttttacacacacaagcatgttcgattgggtttaatccgtaccgacttctacgttatttttgtctgattgtaattgcagtagtctaaatagactgctttgattcgaagagaacaggctcaggaaaactatctgattaggggaatctggtcctttgctctgccacttcattctgttgctagttgctaaatagtccgagtcagcaagattttagatttccattttgttttctggttgaaaatacactaggccgaaaaatactcgttatgttttgagaatcgttcctttgtcttcttgcaaagaaaccagtcgacggagtttcaaattcctctcatgcagc

SEQ ID NO: 4819 - DNA, 708 bp, Zea mays
  Intron number 2 from transcript GRMZM2G160565_T02 (locus G RMZM2G160565) derived from phytozome v7.0 (chr-ID 5; pos 1 96553308 to 196554015)
gcgcactctctgaaactcaggtatgtcatcaatcatagcttaggataaactctttattaaaattattctcctaaaaaaataaacatgttccctctttatgtttttatgaaaacttttatttagtccctataatatacaaccataaactagagatataatcaaataaaagagaagagttttaccgattaccgatcttactatgatggtgatattacatggtcggagcttttctggcagctgcagctagctataggattttgtttcgatgtagtagcagccgcagcccaaacggttggattaaagtgtttctatatctgacattgcattgaccgcctccatccccttctatatctgacatcttatgcactatttctataatttattgaattttagtcagcattgcattgcccgcctcagctccatccccttctatatctgacattgtaaaatggctattactgctgtctttcaatgttagctgcgtatactgcgtaattaggtcgatcccaaagtaggctcaggacaattaactatagaatgaagtaaagtttctgcaaccttttttttgtactagacatttctaaaaggtcatcccttattgtgttctagaatgcattaaaacctgctgataagagctcacaatataattgctatgcaattgaactaatgaggctgtgtatgatggttatgtagagctggtaccaggaa

SEQ ID NO: 4820 - DNA, 831 bp, Zea mays
  Intron number 2 from transcript GRMZM2G080930_T01 (locus G RMZM2G080930) derived from phytozome v7.0 (chr-ID 5; pos 2 13036909 to 213037739 reverse strand)
agttccgcgtgtttggagttctgcgaaggtcactttttttcaaactttattcaggttttgtatagatacatttcatagttttttcatgttgtccctcgagccttgaatgattggcaagttaactaagaaccttgtcattcatatggtgatgaaacccaagagaatagttttatgatgttctggtgatttatttacgagctcacaaacttattagagagggtcatagactcatagttcagagctaactttgatttcaacttgctcatattcttcactggatgtttgtgtggccaacatcctatccagtctgttaaacttgtttcatttaccgtgatatttgacttttcaagggattcaggttcccatctaaaaattattgattgcagtggtgtaaaactttgcaaacttgatcgtccaactatttgtctgcagaggtgctttgaaatgtttatatccattgtgcattctcatccaactctgttttatttcaagatttttttggatcttttagatggaggtatgcagaatgtttttaaggcgtcgcctaggtgtccaggcgctcggctaaacctagccgccttgcctgcctaggcgtcgcctaggtgctaaggcgctccgagtgtttgcttgctcgcttaggcgccttaagaacattgccagtcatccatatcttcatgttggatctagtgagacagataggttttacttgttgcgtcctttgcgttttttttttctttgtgagatggagtttgttgtttcacctggtgcaggtcgctaactgttgttctcaatgcagtgtttggattgcacgtaaaccacctggctttgcat

SEQ ID NO: 4821 - DNA, 1048 bp, Zea mays
  Intron number 1 from transcript GRMZM2G132090_T01 (locus G RMZM2G132090) derived from phytozome v7.0 (chr-ID 5; pos 2 0922203 to 20923250 reverse strand)
aggtctctctcggcgtcctcggcgtcatctctcaggtaaggtggtatatgtggccggcgtcaagtgagcattctcccctcgtctgacaggagtgaacatgacatgatacaatgagttcgtcagttcgtatttcgtaatagtgtaaccgcaacaaactcttatgttcaagtgaaattggcattcccgcgtgttcttgttcgttaaaaacagactagatatatggcatggaattgattaaggactcggtaaattttctttcctaagcaaatctgcagtttcttaaaagcaaagaatcataacgtttgggcacacatttgcctacttgcacaactcgattaaaagcggtgcgtactacaacatttattggcagaccgcaacgttttcttggagtagaaaacatgatacatagttcggcaataataaagcaaaacaatatccgctctttcggcaataaagcttactatgtacagtcccttatactctgaaatcatcgagttattagatggataatagtccgttgtggagggatacatccgtgcaatcatatattttaatcgatcatgcagtgataatattttacaaacaaccttttatttacgtctcaatataaggagatggttgaatacactaaaactaatagttagtgactaaagttagttgagacatccaaataccctaactaataatttgattgttagctatttttgataaaaagctaatagttctgtagctatttattagctagctaattttactaataatttttagccaactaactattagttctagcgtattaaaacacttactaaatatctatacttatattattcgacgacaccatatggtggattatcaaagatgaaaattttttattgcacgatttcatgttcttgagagacgttttagtcgcctgactttatttgagtccatattccaagatcatgtttttaatttatcaaataataaacacttgatcgtccaataattatgcattcatatactcccgatgcaaggtgacgctggcgctacaacctctgttcaagcgctc

SEQ ID NO: 4822 - DNA, 835 bp, Zea mays
  Intron number 4 from transcript GRMZM2G019945_T01 (locus G RMZM2G019945) derived from phytozome v7.0 (chr-ID 5; pos 8 827442 to 8828276 reverse strand)
tcttaggtgtggaaggctattggtaattgtcaaagacttttctattgttttgtattgtgcttccacaaaatcgagcacctgatcctctagcactggtaattattgaagatttttttgtcgtcttgtattttgctttcacagatcaaacacctgatcctctgctaagttatgtgtagcatttttattatatgttcagtaatgtttcgatttatgttcatgtcatttgtcttatgcttcattgcatatgcagttactcatgtaatcatatgcatgtattctgcaacgctatctggataactgagcacagtgaacacattatgcacacatgatttggcaactattgctaatgctgcacagttatgctgttactctgaatatattcaactatttattaattattacaagggacttatatgcctggttttatatacttaacccctttatattttgggttttaaaatgttattgaaaatatccagtgattatattagaatcatattttggacccaccagtcaccatagtgaggtccagatctttttttgtgagaacttctggcatgtttctatcaggagttggggcaacatttaccatcctaatcaattgtagattcttagcaaatcttgaaatcattgtaataattgtattatgctgtaaaatttttaattaaataacgtcactgaaatgacatttgcattgagaattgcatatgggtaaatggatcttgttcattggcacataatccatgcgtactgagtttgtgagtctactcttctaacttctaaggtgctcaccatttcagaattaaggggcaaccgtgtaggtgtggcactgtgg

SEQ ID NO: 4823 - DNA, 341 bp, Zea mays
  Intron number 2 from transcript GRMZM2G019945_T01 (locus G RMZM2G019945) derived from phytozome v7.0 (chr-ID 5; pos 8 828380 to 8828720 reverse strand)
agaggcgcacaaccgaatcaacagtgagttagaccattgggaatatggggaagatattgtactctggtttccatattttcagtccaaatgttttgatttagcacatgacaatatatttgagcatctaaatctgatggcaattgattcaaactaatgatgcattttgtttttatttggttcatggccaagaattgggactgaatatcaaacattctactaggtaacttatgctcagctcgtttccactgaaaaagaagcctatttagtttgctttgccctactgtatttcggttatatgttattgattattcatatccatgcttgtaacaggcaatcaaaag

SEQ ID NO: 4824 - DNA, 885 bp, Zea mays
  Intron number 1 from transcript GRMZM2G349864_T01 (locus G RMZM2G349864) derived from phytozome v7.0 (chr-ID 1; pos 1 85299311 to 185300195 reverse strand)
agaaattctatattaggtaaatatgaatattgcaagcatgggattacactgattcatgctcttttttaagaactcgatgctgattctttgttttggtgacatggattcattcgctatggtccaagcacacatctggagttcgttctgtccttcaaggaaagttttggcgtaaacacaatggcaaaagagaaacttcattattaacgacctacatcattattaacattagtatcatcgtagaacctcagagacaaatttatatatctattgtcggcttgtcgccaccgaggtgtaaaacctgttattttattttaatggctcgttgaagagatgccctttaaccttattataatttttctctctctaaatttaactttaaaatggcttcgcttagtttttttttggttatgtagatgtagtttatgtatcgtttccattgctcggaatatacctaccagacaattaatctagaaaattagtttgcgatgatcgtatcactttttgaaccatgtcagttctatttattgtcaagcggtgtctactagccagtttactactgtccgtcaaccaacaaccgacctggcacacgttctctccatagaatagacccagtaatggcacgatgaaacgacggctgaacaggccacttcgcgtagttcccaagcacccgccacacaactcgcgtccacggcatctgaccggcgtcaaaacccaccggcccagcccaacccgtctgcagaaaccgtcggcccaggcgccccttccaggtacgtccagtcgcgagtcgcgaccctataaaaaaagtcagagcccagagcctagagcccagagcaaactctcacaccaacacatccaagtatcacgaacagcgagaggaacccgaag

SEQ ID NO: 4825 - DNA, 851 bp, Zea mays
  Intron number 1 from transcript GRMZM5G895903_T01 (locus G RMZM5G895903) derived from phytozome v7.0 (chr-ID 1; pos 1 38262655 to 138263505)
ttggtgaggctttgctctcttacattatttcagtcgagtcctagcaggtacagctttatgctccttaaaccttaatacgagtgtctctttaaataagattataagtatgcatgctaacttttagtctcagtatgtgtatgttgatataatttttgtcatttgccatttataattctctattgtaaaagttgatttctaacatatggaattttgtagacatcccaatgaaaatgtcatgttaacataattaaatttacaaagctaaagttattaaaagaggtcttgaaaatccctagcaagcaccaatgcattatagttcctgaaggtctttttttactcgctcaccatctttttcagaagcacaagcagacaagctgcaatagtaaccacctttcagctttgttcacaaagtaaattcttaccgtcctttccttttttagagagaagaatttcatggttagaatgtgtagtttatatatcaattgtcatgtctctcttttttatttgttcattatgatgtacccagctttgatatgtaacccatagcaatgagtagagtttgtagacttaagaatggtttatttatgaactacctatgcattttttctacaaattctaacttcatttgaccatgaagataagttgtttttcttaatttctacttctaatgctattgttcatatcagtttctaaatttcatgaagcgtaaaaaatgttctattgtttgtattttatttgctgcacttttgcttccacatcataaaagctaggcgttaaaccatttactgcttttgtacatgaacataaaaagaaacacttgcacaggggtagatcttaactggaatacatat

SEQ ID NO: 4826 - DNA, 822 bp, Zea mays
  Intron number 1 from transcript GRMZM5G828630_T01 (locus G RMZM5G828630) derived from phytozome v7.0 (chr-ID 1; pos 1 41736728 to 141737549)
cccccagcgtcgccgtggaaaacctcaaccccaaggtgacagcaccgcccgttttcctcgccctgtctacctgtctgtccattgaaggttccgttttgatggattcttcggtgggaagtttgggctttgacgagacagaaagaagcactgtggatgtgctgcgttctgcatatccctgattcatctgagccgcggctttgattctcgtttgcttgagaaatttggggtgaaaagattatccttgattcgctgcagtggtacatgcgtgcttagttcttgttctgatgatccggttttgattcatactttgaaatcaaatgagatttttttaggatatttgtaaaataactgcaccggcgcaaagttccaacagtaagatgttgggaacaagtgtagttccttttaccgggatcactagttgctatcgctctctctcaacccagagttagatctcagtgcgactcgagctgctggagtgccttttctttttgttttgttttgttgtgatcgaatagtttaatgtcatctatgtcagtatcctttttctcccctttgacttcaaaaggggatacggcggtttgtttgaactgctgccccattctggtgcaaaatgatgataggttgatgctgtactatttatgcgagatctgaggtactacaacgttggcaagctgtactttgttactaaacctattgaatgtcgtgtgatcttgatctccacctgtttcatagacaatagctttcgtgctttgcttgtctaggtaaggcgagtgtggcttctcatgcctagctaatacactgacaactattacaggtcttgaa

SEQ ID NO: 4827 - DNA, 971 bp, Zea mays
  Intron number 2 from transcript GRMZM2G057084_T01 (locus G RMZM2G057084) derived from phytozome v7.0 (chr-ID 10; pos 133216377 to 133217347)
cagttaaagagactaaaaaagtatttcgctcagaggtacctcttttaaggtttcagcttttggttcagctgtcttgttacttgcatgccatatttgaaacaatgctattgagatcccacctaaactttcccactgtatgcatgggctagtccaactcctcataagaacctggcttatataatcatatcatgacactgacatgtaacatctcccattagtttttgattttttttaccatttgaccttgcataagtttgtcttttggaaaaataaattgacttgatctatcataaaggtattgcccccttagtacttgcacacattcttgctggaatgagctgctatttatgcacaccagtagttatcgaatgcagactggctaaacatttttgttataaaaactcaaaactgtacatggtatgattgtatcttcctacaatcttgcccctcttgaagtgaacattggtggagtgcaataggtgcatcttctttacattttttggtgccgaatatattaaccattttttcggacgataaagaagtaatgcatcttttccggcatcctaatcaacatgtgcatcattgcatcctttactgcgtgataggaaaagcctgcttttacttccccaccaaaatctcacttcatatgatctatttacacatacacacattatttgagaataattccaaaagcataactttgcattgctctgattagccatcaaagagcttggctgggtttattgcttgcatagtttattgttggctgggtttatttctccagcaaaatctcatttcatatgatctatttacacatacacacacattattggtttattgttggctgggtttattgcttgcataactgacttttgcatgccgagtgaaggtagcaagctgtatgagagaatttaccctttacattgaataatgaatactagaataatgttgttacttttggcatgttaagg

SEQ ID NO: 4828 - DNA, 510 bp, Zea mays
  Intron number 3 from transcript GRMZM2G023863_T01 (locus G RMZM2G023863) derived from phytozome v7.0 (chr-ID 1; pos 2 73068 to 273577)
gctgcagaggaacaagataaatcaaaaataccaaggtagaggtttctcttaaaatcggctgctagctcaaatacgttggcacatttatgttttcggttgcggaaccccgtatcaatgagcattcttctcttaaaatcggctgctacctcaaataagttggtatgtactaatgagcactgaattatgacaatgacaagatctcctctgaggaggaggaactaccaaaagaaaaccacctggaggaaaggaatgaggcaaagaaagacgaatgttgtctcaatgagaattgcactgctatctcaaatatgttaactgataatgtttctttcatggatatccttgctgacactggtaaaagagaaaattcaaagaaaattgtgcgtctagcttgaatgtgttctctcttttatgttcattttttagagagaaaaaatttcttatgtttgttacacggatatccttactgacttcactgaataatataggactgttcaaaggaaaaacaactaa

SEQ ID NO: 4829 - DNA, 858 bp, Zea mays
  Intron number 1 from transcript GRMZM2G056762_T02 (locus G RMZM2G056762) derived from phytozome v7.0 (chr-ID 5; pos 1 91904036 to 191904893 reverse strand)
gacgaggttaccggcgcagtcaccagcatccagcagtaagatttgcctgctcacctcgttatagcattttttttctttgcgtactgttagatttgatataacttcttctcttgacatttcttgtgttggtgacccgcttgattgtcacgacctagtttatgctttgtttacctggattatattagagctgtttttgtctttattttgatgtgacatggatagcttctcatggggacatgggagccttgcatgcttcagttcattgagcaatatcgtgtaggtggttaccactcgttgtcgttatcatagttgtatgcctgccatctttggatggtgtcttcttggtggggcagggggtgggggcgagggatacatgtatagacatccgcatggacttgcagaattgcagctagtcccatcggaacaatcctgcctgcgcttcctgtaccttgtaatagacatagcagcccttgcagctgctgaaaagcacatccgagaattagatcctactgatgttgtgtccttgaatcataggattgttctggctaccttatggtagcccgtattgtagggactgttgtagaaacattaaactcacgtcattatatccactttcaattagtagcagctatacgaataattaccccctcccgccccgcacactcacacaaaatacatctatgtcctcatttgttgcgtgaaaacaaaccttttttgccctttaagatgaatatatagtagacctttgctgattaaatcataagggagttacttatgcattgatgttctttgctccatctaatctagttgccgtttcattcagagtatttgagaatcctcttggactggattcagata

SEQ ID NO: 4830 - DNA, 910 bp, Zea mays
  Intron number 1 from transcript GRMZM2G048455_T02 (locus G RMZM2G048455) derived from phytozome v7.0 (chr-ID 5; pos 5 6014850 to 56015759)
acagcgtaagcgggcggcggacgaccgcgcccccccggcccctactcccgaggtacctacgacctgtgcccgcttcctatgccttgcgtgcgttcggttctcggtccggccgatccgccgcggcactcgactccgcacgctgccagaccggcgacgagcggcggcggaagggagggacgggtggggatccgagcttgagcttccaccctccgtgtttctttttctttatatctgtttgtttatcggtggcggtgctcactgctctgcctcctcgtcggacgatcttagctcggggagccgcgtccgactatggtggagtccaatcaacgctgcctgccgcgggaattggcgctccagtgaggttgggactggattaggggtgcgtgtgcgtatgacgtgctcgtttaatgcatgctccctccacgaaccaaaaaaaaagatttggacataagacagactcttgcctctcttttcgttttgtcaaagtcgtttcagagagattagggaattgggggttacagcatgttatcaaagtgggaccttgccttcgcttaggaagtatgcttatcaaagtccaactggtcaaaaaaaaacgaacaatttgaattcttcgtagcatcattgcaaagagcatattcattcattatttttgttcatgctactagcaaaagtaagaaatttgcacaagttcactctgttgtctgttaaacggtttgtacaacctgactgggtcttcccagtgtacagtattaagaaaattacacggttcgtatgacatgacttggtgttccctgcgtgtagtattaggaaagctaacctattctcttaaaagagttgatgacgcttcaccttttggtttcttataattttatctcctactaggtcattggcgtgtgctccttggcagaaa

SEQ ID NO: 4831 - DNA, 790 bp, Zea mays
  Intron number 3 from transcript GRMZM2G057567_T01 (locus G RMZM2G057567) derived from phytozome v7.0 (chr-ID 10; pos 141508577 to 141509366 reverse strand)
ggaaaagttctttgaggtaaacatccccggtttgttctgttggtagattcatgcattttatcatagctcctgcaatgtgaattcagtattggctttcatgactgatattggcctttgcatatgccatacaactaggctttcagtagaaccacctctgagattcaaaattcatcttgtataatattttgctttttaatacaactagaccttgacaagtgcgtgtgtgtcatgtgtttgtgtgtggtcgttactcatttgcttgtggtgcatgtgtctttgtactgctctgctgctggttgtgtaggttgatttgtttcgctcttttttccctgcaaacaactggctttgtagctatacttttctcctttcttaatacaatgacgtgcggctttcctgcgtgttcgagaaaagaaatccgtatttgatacttcaggaaggatgtaattttagaatttaacaatagttcaagataacaagcatgattgatcttatgttttggttcaactctgttcttatttgaagtcctacataactactacagcctgaagctaccctttgtatgatgttgtaagaattttattgtccagacatattacattactatttaggatcatttattctaacttcatgttgtaacaactataatttaatgatacgccatgagcattttgtttaaaggtacaatatgggtattgccaaggcctgttaatctttgaaggaatgtcataatccattgtgtcatcatctttagctcaaagtctccatgaccgcctgttatttctgtagggcc

SEQ ID NO: 4832 - DNA, 790 bp, Zea mays
  Intron number 3 from transcript GRMZM5G879536_T02 (locus G RMZM5G879536) derived from phytozome v7.0 (chr-ID 10; pos 17540355 to 17541144 reverse strand)
tacacgaaactgctgccttaaaggctggttagtccagtcgcatcattttcccccaagcattgaacatctgcagtgttattaaaactacatttaaacgttgaaacactaattataggttgaaaccacgttttggcgttctaaactgtaaaacatattgtttcatgcgttttagaccattagctacttttgggcctagtctcttagtaacttttgggtccgatccggctcatgggtgaagttttggtaagccactaacctctccgttttggtatttaacttcatgttattgtctgaaattatgatatattggtatttttttatgttgtttgaaactacgtttaaacttaaacttcgtttaaacgtttaaaagtcaaaacttcacccatgagcgtttcaatgtttcatcgttttaacaaccttgaacatctgacttcccgtagttaaaattaattttatagacgatggaataatgcacatcctggaatctacatctttaaatatatgtagccatagttaaaattagttagaggtcacaagtgcaactaattccacaaaaatacttaggggtactattggcttgtcatgttatcctgaattgctgactggcttgcatcttctctgaggagactcttgattatcatttggccattctttagccatggatcattgaaaaaacaaaactgtgactataaatttgtgtttgcccaactgattctgagatacttgaaggatctccatattaagtgcgcataacagctaaagaatctttattttgttacaggggtctcta

SEQ ID NO: 4833 - DNA, 727 bp, Zea mays
  Intron number 1 from transcript GRMZM2G136237_T01 (locus G RMZM2G136237) derived from phytozome v7.0 (chr-ID 1; pos 1 73313439 to 173314165)
cgctcgggtggtggacgctgaagccgcgccccaaggtttctcaacttcctcctcccgtctcgtcttctctcgtcgttcattgggctgccctgtaatacaatactgcggaaagtccctattttgttgcaagtgattagatgcagtttgtgcagctgtgacctgcaccattgcagtcctctttgtttgttcaaattagattttaaactccacacctcatggaatttgagtatttcagggctttcatgattgaaaatgtaccccaaattagcttataccccgaatcgtatggccctcttctgactggtgaagaagaagtaattggaggtgctggaactcgcaacgcgtttccttgccccatttctcttatttgtcggtaactactaatttctattgtgctgacaaggaggcatatcaagcattgacaataattcctctgttgcgaaatttttttggatggaggctatgcttgaaaacatgttggcatgttgcctttatacagtgacaacattgacttcgctgttaagttttcttagctttcaaaatgcatagaaagaatctctcattttcttttgatcagaagaatctctcattttccatatctcattaggtgcatcacatcatcttagccttggatgtcatagatgattagtgtgaatggttgcccatctgctagtttctgggttccctaagacaacatatgctcaacatctcgcaggaagaaagagag

SEQ ID NO: 4834 - DNA, 808 bp, Zea mays
  Intron number 1 from transcript AC204940.3_FGT007 (locus A C204940.3_FG007) derived from phytozome v7.0 (chr-ID 10; p os 39136070 to 39136877 reverse strand)
gcttctcaatagtacgagaaagaaagccatggatgttgtagtgcttcgtcagctgtaggtcttttcctggggttaatttgcagcagataagacagaaaatcgacaaactctgaatcaggacattgtatgtgttgttgcaaggaggatttctccaggaacaaatactctagctgatctgtctcctggatataaataaggcaacgaagggatgtgttagggattattgttctacaaccaacagtgctagactgctagatatgcacagtgaaactcaaattgaaaggaaaagcttaggtcttccctattcgaactaacaaactgacaaggccatatattatgccttcagcgtatcaagtgagtaagggggtgtttgaatacaatagagctaatagttagtggctaaaattagttgaaacatccaaacaacctagctaatagttcagctattagctattttgggtaaattagttaatagttaggtagttatatttgttagctagctaattttactaacattttttagccaactaactattagttatagtgcattcaaacaccccctaagaagccacataaatataattctgtagcgaattcaaaattaaaattcggttacgtcgggttaaggtgcaacaaaaattatgaagacgagggaaacaatcggaagcaacttgtgcaatatagaattttcagttaaagaatactcatttagcaagatgctggttcagattctgtggaaacaactgacaaagcatcattttctgcacatgtagttcatcataaatcatcaaaaactaagggccagctt

SEQ ID NO: 4835 - DNA, 1058 bp, Zea mays
  Intron number 2 from transcript GRMZM2G083526_T02 (locus G RMZM2G083526) derived from phytozome v7.0 (chr-ID 5; pos 9 0342287 to 90343344)
gtcgacttccgccagatcgacgccgagtgggactggtgagttagtcgtagcgtgtagactgcacccgtttagttaccttcttcggtctctggctagttgcatctgcatgggcatcttccgtctttgcggcaccgaacagaaacagcttcggagtctgggagtcattcaaaatgcgtgtggatggaaacgagtgctgatgatgtactactaccttgcaagagtagcctaggcttctacgactacgagtaagctacagggccggttcaattttttatggggagtttttgtaggatctggctgtagaaaagatcagactgcaaagagaatatgagtgtcgtgcagatatagaaaaaaaatcggacttagagagaaaccgagtgcggtgaggattacgtgtagaggaagataaaattatatagagttttaaaagtagaaagtgatagttttatattattacaatgaatctacacattctatatttatattgattttgtatgattttttgattaaagtggttattataaaaataggctaaaaagttggacgctaagatgccttcaccaacttctaatagcaaagctggaaaaaacctaaaacgaaaaagggccataggctgtaccagttgagctagttgcttccacgactctagcatctactcctgccactatattcctagtattccatttgatttttcggagccgtcgatgctaggagtttgaattgaaggccccgaaacatacttttccttttttctatatatataagtgtacattctttgtccgttttcatctcaccacatttatgtaaaagaaaggattaattactgtaggagtacttgctctgtaaccaagctgtccgcgcgtcaataacaaaagcacagtagcctgcatatcattggccgctgtaattcctcatgcagagtggcacagtagtaactcggtaattattactactccggagttccggaggcttgtgacatgtcagtgactgtggccctcctgtcctgccccctccaccacgcagggacaactttctcgtgctgcaaacgctgattgggg

SEQ ID NO: 4836 - DNA, 693 bp, Zea mays
  Intron number 1 from transcript GRMZM2G062425_T01 (locus G RMZM2G062425) derived from phytozome v7.0 (chr-ID 1; pos 5 6223773 to 56224465)
ccctctggtccgtcgactgcgccaccgacgccatcgtacgctcttctacgcctccaatctggttccccgctctatcgtttgtgtttgctctcacctgtttcaatatgttcttagccaggggttaatttaaggtgtgagtgaatcgtttatttttctttgtggggattgcagtgaatggaaggagttcttaatagtaaggggcacgatctatgttggggagcagggtaatgtcttaaaaataagtttattgagaacaaaggcaaaggggcacggtgccaatgctaggttctcctttttacgaagttaggagcaaaacgagacaccggggttctatttgagttgtgaactaagcaagagattaatatatagaggattagctaaaaacccatcagggtgcgtagacctcgatggtataatgtaaatccacctctgttggcagctatttagaggagtacagaatggttgataactttcaattcctatgatatatcaagctcttacttgtaatgtgcaatcatattcctcccaaacaattctaaatttctacgatgaatcaagctcttacttctgttataaattagggtgcttatttgtatttgtctctaattcgtcccttgttaatgaatattgctcaaaatctctgtatgtgataaaaaactgagggatgtaactggcgtttgttttggcaggtta

SEQ ID NO: 4837 - DNA, 889 bp, Zea mays
  Intron number 1 from transcript GRMZM2G089454_T04 (locus G RMZM2G089454) derived from phytozome v7.0 (chr-ID 5; pos 2 04910617 to 204911505 reverse strand)
gggctctgggattcgctcctcaactggctgcggaggtccgtgctgccaaactctctctctctctctctctctctcgtcatcttccctcgccccttccgctccaatgcattcatttcgcagaaatccttcccgcccctttctttcgatcagcagtttcggggtgtctcgactggggcgggaccatgagttctcttgggattgagctagactgggattcctttgcggcgattttatgctgcttgctcgcgaattcaagtggctcgcgtgctctacgcagttagatccatgtcagtaacagttaccgcaagcacgcaaacttaagttgcttctgcatactagccttggtaaatcttcatgatgtgaggatagttattactaggataaagagaactggttggagtacgggttaaaaaatatctctgcgtactcacgattgttgagcgaagattaatagatacacgatcaagcttcagaagcgtataaggtggtgcccggaagaagtttaaattcgatcttaaaaaaagagtgcctacattctgcagtgtggatggagtcttccattgttaggatctgttcctgcccttcaggaagtgcttgatcatgtttgaatgattggttgctcctactcatgtttggtgaatttgagttttcactgcatacaccccactgtggcagatcatcttatttatctgtttactcttagcttttttttggataaatgagatcctttctctgctagtgtgaaattagcatctgtaccagtgtgtacattttgatggcttttaagcagtgcatattgatttgtagcaattctactcatggcagtaatatttctatttcagcttgttttttaagcaagaaatggaactctccctggttgggttgcaga

SEQ ID NO: 4838 - DNA, 1057 bp, Zea mays
  Intron number 1 from transcript GRMZM5G896859_T01 (locus G RMZM5G896859) derived from phytozome v7.0 (chr-ID 10; pos 130902631 to 130903687)
accaggacgctgccgtcgagctcggcgaggagctggtgcgtcttcttcctctcctcggtataggtagttgcacgcaccaacttacagcgtgtgtctgtctgttactgctgaaaatggctgtttgttttgttctgatcaacggtaacatggtttcctagtctagtaaggccctgtttagaacccctaatagttatccagcaaataaattgttagctggattgagcccgttaataaactaaatgttagctgtagttaacaattagctacggtattagctgacggtgtttgtattagttttaaatgttccaaacaggacctaacctacaatcctgcatgcgccaagtttttcttcagcacgaccacggcatgctcatgaacgcttatcttgtcatctttttagcttaattgcaatttccgcggcaacagttccatgctatatatgcctgccttaaaacttaaaagaagatagtacaacatacggatacgtacaatcatatacgcgcattaaacgcgtatataggtcgaactgtagagctgaattccagcaaacccaatttccatggatacttatatattatatatatacagccgagagcgcgacataccgcactcactgctgcaaagatggcataaatatatgaccactgaaactactgcgtgcttgacctcttttttttccagaaatgatgagtttgaatttgcatttgctgaacttttccggaccaatgaaaaagatctcgctgaccgccagcaagctcatccgcgcatgcacgaattcattggattaatttttgaagaatttcctgttcttcgcaaatcctcagtttcagttacctccacctcatggcaacaatgttattatggctgcagataaaatacgatatgtaagctagatcacacaacattgtagctagccactatacaaataattaactactagacatatatacccccatcgatcatgctaactagctagttccattagatttatttatcactagagttgccattatattgtataggtctcgaggaacatcgatctggtctacggtggggg

SEQ ID NO: 4839 - DNA, 1059 bp, Zea mays
  Intron number 2 from transcript GRMZM2G135045_T03 (locus G RMZM2G135045) derived from phytozome v7.0 (chr-ID 1; pos 1 48453686 to 148454744)
ttggccaaccaacaccccagtctcatccagaggtattgccaatctcatatgttacttgctgcttgtaccagattttgtcggcatgttggccctggctttgcatatttggtatttagtgtttagacactgatagtagtcgcaagtggcagatcttggacctaaatccagcaggggccaatcattaaagaacaaggttaatctttagtttttatcaagccaaaatggctgcaactttggagtttacacaagtttaggggtggccatggctgatggctcatttcggcctgtgaaaagctctgccactgctagtactttcgcaatatgacaatttgagtttttctgtgagagatgcagcaagagtgcaggaccaccgaaaacacatgcatctaataaaggaatgactttatttgcgccattctaaataaaatcatgccaccttttgttcctcttttgatgtactagtatctactattatatctaaggcctggcacctggttcattttcaagcttaagttatgaggcccataatcctttcatacagagaggttgaagttggggtagaagattgtcctcatcgcttataatcttatataggtttatgagctgagtgtacacaaagtactttatttatcaaataaactaattaaggcttttaagttactagagctataatctggtccacagtgggtggtgttaggctgaatatgctgatatagatctctcatccactaaaatacagtcttgcaaatctagttaaatcctgctcttattatttttttcttattctgtaaacccaaatgctgtatgccttttcttaaacattgctacaatatgagccagttattagctgatggagagatcacaccaggcatcacaaacgaggaatacatctctagaagaaaaaaacttttagaggtgctaccagagaagagcttggccattattgcttctgctgatcagcagatgatgactgatgtagtgccatatccattcagacagaatggtgattacctgtatattacaggttgtacacaacccggtggagtagcagttttgagt

SEQ ID NO: 4840 - DNA, 950 bp, Zea mays
  Intron number 1 from transcript GRMZM2G161538_T01 (locus G RMZM2G161538) derived from phytozome v7.0 (chr-ID 5; pos 7 5900127 to 75901076 reverse strand)
actcaagttgacaacattactgagctagaacggaggtaactctattgtgtatctatttttctgatcttgtttgatgaatctgtattgaggttgattgattattttctaccatgcccctttgtttattttgctctaattgatatggggatatgtgggcgtaggcgtgtagctcttagtagtcaccggatgctactaacttgtacccagatcagataaattctttcagtacattgatttataaatctctctgcgctacatatgttggtttttacttatagaaatagcttagaaccctgcttttaaaggacaacgtattgcaacagagtatggccacaatgaccctggctggggatgctagcttgcaagtagaataccgactgacactcgcaaacatgaagaatcatttgatcagtgtggtctaatagaaagaaaatagttgcatttgcatcaaaattaattagggctctaatgacagctatttctaattgtttcagttacgttattacttagttctctgtatttcctatttgtttcactgagatcaaaattttgatatgtaattccattttttctattagatccttacttactattttaaagacaactaactatatactatttcaaagttttatgtgttctttgaaaacagctatcaatacatctgtaaacaatcccagccatctaagattgttttgctttccacaagaaactaatatctgaattgggtcctttgttgaatgttgatgttactcccccttttaaagttcctgtcaatttttgcaaatgagaggtcaaagactgatgagctttcctgatatgcttgatgatctctaagttttctaggaagtttgctttctctcattgcctttttcttaccatacaggcttatttagtattttgcctattgtaggtcagtttgagtgcatttgcattcttgttctctgagttgg

SEQ ID NO: 4841 - DNA, 510 bp, Zea mays
  Intron number 2 from transcript GRMZM2G580235_T01 (locus G RMZM2G580235) derived from phytozome v7.0 (chr-ID 10; pos 130002007 to 130002516)
tcaacggacacgctttttctctttgtctatcagaggttggtctcagactaatcttcttcgatgagtaccttgatgtgtatacatgccatttctttgatcagtacgtgaatgaggatgctatgtttctgtctcagaattcaaacttgtgagaacttaaataacaaagacaagaaaattttaggcatactttgctttaagccatttgaaaagctctccataattttggttcccatttcatctgaaaacaaacctcgacaatgtcttgtatttttggtgacctttttattccttgctaaagaaataccttgctgattgttttgttattgcatctgtatcaattctctcttagaaagatattatttcttgtaaggcaaaatacattttggttccttatcgtgcgttgattttactgttccttgatattgcatagatattgttatctatgttgatgttacaacgaaccatctcattccagattctgaaacttgctgagagggaaaacaaatttat

SEQ ID NO: 4842 - DNA, 708 bp, Zea mays
  Intron number 3 from transcript GRMZM2G164743_T02 (locus G RMZM2G164743) derived from phytozome v7.0 (chr-ID 10; pos 132026030 to 132026737)
cttaatcctgaggttcaagatcagataagtatgtgcctttaccctactactggacaactaacggttcttgaatgcaatttagttttctggcacagcagtagaaacagtactccatcagtcagagcccttttttctttatgctgattgctgaagtttctttgtattctcttatcttctcatgctgccatccatctttgttaaataaacaattcagagttgcagagaaagtaattctgtgatgagttgactaggttggcattcataagcatcacaaatattttcataacataaataatttaaggataaggctggtgttttaccaaggacgttgtcttattttaattttccttgtatttaaattcaaaatggtaattgtgtttctagtgaacaaatatgaaccatgttatatgtatgtttccttggtgacctttttaatatgcctagagcatgtttgctaagactatctccaacagcttacccatccttatacctatattcaaattctactcttcgaacagtgcagtctgtagtacaaaacagtgtatatgggtaaactttagataatctgctggagtcggcctaaggcctagttttattatggaacatggttcatgataagtagaagatgcctcctcttgggttgtggctaattcagtattttccccttatttttaacctatctatttgatttcttctttccagataata

SEQ ID NO: 4843 - DNA, 697 bp, Zea mays
  Intron number 2 from transcript GRMZM2G042782_T01 (locus G RMZM2G042782) derived from phytozome v7.0 (chr-ID 10; pos 115689157 to 115689853 reverse strand)
cttcacaggtatagatatcattgtcataaacatactactgggttgtcccaaaacattaggctacacatatttcaaaatccaaactttgttatcttcgactaacaattagtctaattatatggaaagtttctgctacaatagtgattacattggatttgtatagaaatattttatagcaatcaaacctttgttagcacaaatgatgtatgtaaaagagaaatctgtgggcaaagtatgaacttgaggactgcatcaagccaaaccgcaccttatactctaagccatatggaccacccgctcgatccgcccctgtgaccgacttgggcgattaattgcgattgatccaaaccgacttggacgattaatcacgactaatcttgattaatcagacgacttgaaaacagtggttgttggctccaaacccatattcacactcacctagccaacataacacacatatttctgtgttttatactctatacttataaatggaaattgtatcaacatacggacatggacactttgctagtaagatattatttgccagtaccatgtttattacattatagtaacattttattctatatttattttgcacagctttgatcattattaatacaattgtggtcaaataagatatagtgacttaattgtcttatcaggaaattgtgaatttattgctctgtggagaggctgt

SEQ ID NO: 4844 - DNA, 607 bp, Zea mays
  Intron number 1 from transcript GRMZM2G098084_T06 (locus G RMZM2G098084) derived from phytozome v7.0 (chr-ID 1; pos 2 54404547 to 254405153 reverse strand)
gaaaaggtgctgctgtgataagtgaactatttttcttgttactttggtaatgcacctgatgaagaaaccatccatcgaatgcaaacaactagaatagattgattgaatattaaaatccgggacaacttagggagcctgaaagaaacgctcatattttgttgaaagtaaaatcacagaccttgaggaggctatatcctgccacatcacttgatgattagggacttatctaccatgtctgtcaaggccaatactgttaagttctctgccactgtgcagtgtcctgcatgtcatagtcataagcatttatagtctcaactcttttttttcgttctttctgtatatatgtttatggtctgaggtatctgcttgtccaccctccccaccatagcactatagatagacattatacttggattatattaaacgatatacaagtcctttttttttatcttagcatgcaccttcagtgagtttgattttttaaaaaaggaaattatgtgaacggtactcttgttatgccatattttttttttgcattctgacctaattttgtatgaactttttaacgttgggcttaccctgtccgtgttattttgcaggcacttga

SEQ ID NO: 4845 - DNA, 537 bp, Zea mays
  Intron number 1 from transcript GRMZM2G011098_T01 (locus G RMZM2G011098) derived from phytozome v7.0 (chr-ID 5; pos 1 1391737 to 11392273 reverse strand)
gagtacgtcaccaaggtgagcgcctgatcgatccgaaagttctgcgcgatctctcctctcttttttttctctctctctcgcccctgccgggatcgtttgcttcgctttgtagttcgtaccgttgttgcgatctctctgtgtcaggaatccaagattttacacggctggcgaggtgaaatccaacgagtgatgcctggataacatggcgccatattatttattactttcatcagatcttccttctttctagaaaagaacacacgtcaccgaaaaaaaaacgaactttgcaatcttctccttcaaggaagctccaggaaagaaagttgtcgcgttgatttgactcgcggtcgattgcgtgcagactctttcagtatttcaatggtcggcgttattagcaccactgcaccaatcaaaattgctcccgcgtactcccggcaacggaacgtaacgccgcttctccgcgtgaatactgcgtactcataccacccatctatccttccaggtgaacgatctcatcggtgccggcaagtcgtaccg

SEQ ID NO: 4846 - DNA, 769 bp, Zea mays
  Intron number 3 from transcript GRMZM2G010636_T01 (locus G RMZM2G010636) derived from phytozome v7.0 (chr-ID 5; pos 4 8217903 to 48218671 reverse strand)
caaggtatcacttgcattcctatcctgctatacattcctgttgggttccacatacgcgtatgtagcacaattctgtttgcaccagcatagcaaggaacccatgaacaacctcaacctaaaccacatattatcgtccgtgtgggggctaccgcttcttattctccacgctagcaaaattgcccatacgctcaagggaatagatgaaggggaaatgcgcctagacagtaggaacgccattagatcacactggggtcaatttgcgtcctaaaacttagcaggactatgtccacaaatcatgcaggggttatgctacaaacaggttggccatagtggaaaataaaaaatgccatcttccttgcaaaggaaaactggttctaaactacctatgccttcagttcaccatacttcattgcaatataccctagaagagttcattttccctgctcggtcagtcctccatgtctaagattatctattgccgactcaaagttccgtttagtacatgggcttaccatgcacgctgtgttcatatagaaggttactagacaacttcatctgcaatcggccatttaaacgagcaactattttgaggcctaccgtttaatggtttacgtacttcgcgtgtaatttgcagtatgaaatagccctctagacgcacagtttacagctttggtttctttacgatatctacacctaacacaatacaatgaatagtttatctgtaaactcgctgttcttcgctctgacagggatactgggccaaccgttg

SEQ ID NO: 4847 - DNA, 817 bp, Zea mays
  Intron number 4 from transcript GRMZM2G101098_T01 (locus G RMZM2G101098) derived from phytozome v7.0 (chr-ID 10; pos 51683295 to 51684111 reverse strand)
atccagaattgtatcgacatcttctatttttaaaggtttgtccctatttctattaatgggtaaagtagatatatgttcctggagttggaaagaatcatcttttctagatgtgtaattagatcctgctgctatgttgcacaaaccattgaactttctgacttactagttactccctttgtgccaaaatgtaattcatttaagttgtgtactaagtcaaacttctctaaacttgttaagaaaaatgtgcgaacatctagagcatcaaactagtttaattaaatccaccatttctttgatatcgtagatgttaatatattttctataaattggtcaaagttgagaagtttgtgtttggcttaggaggtaggacaaaactaaaacgactacgttttggaatagaggaagtagtatttgcaattttcttattaaagcattttctagtcaccaaatagtaatatgttttttgagaaaacgaaataatccagctttatgcatgatactgtaatccagatattgagatgtggaaggttatttctggcctttatactagtcaccaaatagtaatatgttcctttatgcttgtttctggcctccataaggaggccctgtattcgggtcctttccgacccttttttcttcttacttaataaaatgaggcgcagttctcctgcgtttttcgagaaaaaaagatgtggaaggttgttgatgttttgtatttgcatagctgtggatactaggatacaaatttgagttcattccaatctgatgttcagtttgtccctactggtctcacttcttttccattctcagcattaca

SEQ ID NO: 4848 - DNA, 867 bp, Zea mays
  Intron number 3 from transcript GRMZM5G865811_T01 (locus G RMZM5G865811) derived from phytozome v7.0 (chr-ID 1; pos 2 00248623 to 200249489)
cgctcctgcagcccacgattttctcaagcttcgaggtatcatccgaacgggccctcatcacctccggcgtagtgtacttttaacttttttgctcagcactcaattattaagcaccagtttagtcaagaagggaacagctagctagttactacattgtcactcgatcgatctactgaacagaaatatagtgtttggtaggggattattgtccagtccgtttctagagagcagaatcacacctaccaaacgtaaattatacaggatttgcagacaaacagaaaatatatatatatatatatttcctctgttcttttttatttgtcgtgttttagtaaaagatgaacaagaagacgataaatattcgagaacggagatagtgttaggtctgtttcgcaggagaatcgtagtaagtggccgcacgtaacttgtatcttttctgactaaaactctttcaacgagacaacgtccgtgtcaagccaacgttgtagcagaaaaaaccgatcgaagccgccgtcagtatgataaagactgcactaagcattcatgcgaaattgctgcatatatagtactgtctggtcttgtcgtatttctccagtctttgtagcttaaacttgggggcaataaaccaaagataggttttgatttgatggcatattaaccaactgtacctgtacttagtattttatgtagatcttatatgagacgctactgctagtttcagtttgatccaggcacgaacgatcaacatcattgtttaatttcttatatcatcagaacatactgtcatcaatacattaactataaactactgctagtgatgcttatcatctagtcacaacgtcaacgaagactattttttgttgattt

SEQ ID NO: 4849 - DNA, 993 bp, Zea mays
  Intron number 1 from transcript GRMZM2G380910_T01 (locus G RMZM2G380910) derived from phytozome v7.0 (chr-ID 5; pos 1 9176717 to 19177709)
ccaaactaacaggttcgtatggaagggcagataccacaggcatatctctgtgagaaagtaggcagttggcgggaagaggaggaggtcccgcgaaacggcgggaagccagctaacgcgctcgatagtagttgttcgaagacgaaacgattctatgtttgtgtaggcgaaagggaaagagctagactggcctaaccaggggacatattaaacctaaagaaggtagctataccagtacatacctcacaaaatcgcagaacgctgagcacttgggctttgacggcagcacgccatgctgtcacgtgtgcccccatccatcattggcagtgcacacaaaaacatggatacaaaactaatagggccgtggtcgtatggaagggaaggttatgcagttgtgtctctacgagaaagaaggcagcaagagcggcaatagaaccgatgagtaagctgcaagcacgctgattcgaaagtgtctacagactctgaaaatagaattacgtaccaatgtcttgtaatatgagttcctaggtattgcatgttagtcaacctgatccaccaaagattttggagtgtaggattcggtctatgggccatcattttttcacgacaattggtgacccagttgagaaagccatatttgtaaagccacataagctaatttgtattctaatatgttggtcgagccatattttctaacttaatcttaggcatgacgatagcctagataactctgtttctccccaaaaaagtacagttccaagaaattgatgtgcgacataatgacaggtaaggaagcgccacaggaccacacccaatctgaaaagtctacttgaattatttgagtgtgtcatatcttatctctgtttttcttttcattcccttgttctttttccaagaataccatgaatgagataatatacatggaggtgtatcagaaacagaccctatttcttttgttaatgcaggtgtaaatcagggccctcacaggaaaggcac

SEQ ID NO: 4850 - DNA, 609 bp, Zea mays
  Intron number 2 from transcript GRMZM2G079352_T01 (locus G RMZM2G079352) derived from phytozome v7.0 (chr-ID 5; pos 2 02210303 to 202210911 reverse strand)
agcatctgttgtccgggctgctaagcttctatcaggtttgtttcttttacagtttctctatgtatttccagtattatctgaagagaaactgttttttcgcttcattccaccgtgttgaatcaaattatgagtttaatcatgttaggctgattctaaccattcccccctatttgtactttctattcattttaaatacctccccctctttctttcctccccctatttcttctcttctccaaccatttcacctattcagccccctttacatttgagaagagggggtgagggtgggggagacggtggagcaatccatggagaagtacaagactgagttctaggggggtgaaggatcgagtgatacattgaagggagtcttatacccttaaacagagagtggcatagtcactgaccttctcattttgcaatcagcttgcctttattgtactaatgagcttcatcgtgtcataccattaagactacataatcactgaactatccatttccagtcagcatgtcttttccacaatgtagtccattctacttttttaaaaaagaaatcttgttttctgtacagaacctgctttgcgacgaggagattctgtctatcta

SEQ ID NO: 4851 - DNA, 692 bp, Zea mays
  Intron number 2 from transcript AC198398.3_FGT005 (locus A C198398.3_FG005) derived from phytozome v7.0 (chr-ID 10; p os 7639289 to 7639980 reverse strand)
gagaaaggaagcctcgacgactacatatttggtacatatgataatcttcttttatatttacgtactcctataagcattgtaaagataaacattgttatcacacacgtacgtatatatacgcagagcacctctatcaacaccccatattaccccttggttgtatactttaggtactaaaattgccacacattttaaaccacacttgcctaattaaggttagacattcaaatttcgtgccacagttttccacgcataaagaagtcttgccacatttttacatgtcattgacgagtaggacttgcacatctgcagaaaaatcttgccacaactatggctacaaaccaaactcatgtctaacttaatcaaaactgcctaaccttaggtatggcaagtgaggcggcgaaccaaacaacccctcggtctcccagttagattgtacaatttctatttagtacacgtgcagttgtatatagaagcatggtcatacatcactactaaaagcaatgcatgtgcaggtgtgtgattagtatggtgagtgtaaatagttgcaaataataaaatagccctcattataatagatcatatacacgtgttgcagcattagtgagtttgttgataatatatgaagaagacatccatccgtgaatgataaattttgttttcatctccatgcaggtaccaaggacaaacgt

SEQ ID NO: 4852 - DNA, 638 bp, Zea mays
  Intron number 4 from transcript GRMZM2G146286_T03 (locus G RMZM2G146286) derived from phytozome v7.0 (chr-ID 1; pos 2 19380790 to 219381427 reverse strand)
ctgtgtaggtaagacatagtgctatacagtatacaccactatagtatcatccatcctatggcacaacttgtattctcaactatgcaagaatcactgtttgaataacatggttctgcacatgtatccatcataacctgcacatgtatcacagcttgacatgaattgttgtcctttatgaaatatcattttggagcactgagatttctggttgtagttccgaataaaacaaagtgtcggcattaaaaatatactcctactgcacagtgcagactgtagtaacatatatggttatctgtttgatttgtctgggagttttcaagcttgcataggtaaaatttgcaagtttatattatatcatattctgtcttcatgagaaagccaatatactcctaccatattcaggtaattaatgaagtaactgcatagtttgttctatttaaattgtttagagtctttacacttaatgaagtaactgcatagtttgttctatttaaattgtttacacttcttgtatgaatctctctcacagcctttcaacaaaaaaaatcataagcatagagtttggtctctctttttctaatctaactacttgtaaaaccaattttcagagttcatcaatctcctttcgtctgaatcga

SEQ ID NO: 4853 - DNA, 513 bp, Zea mays
  Intron number 2 from transcript AC233979.1_FGT010 (locus A C233979.1_FG010) derived from phytozome v7.0 (chr-ID 10; p os 135172145 to 135172657)
aaggtatatttatctttattataatcaaagttgcctctatcttgtgaattaatcatatgtttttcttttgcgaagaattgtttttctttttgaacactaaggagaattgtgtatcattgaattaagaagaaaaaagggacccttacaaaacatcacacccaaaaggaaactacaaatctccttagcaccagtaaaagaaaaggatatgaccgcaacctaaaaaaacactcaccttactgagggtctatttagttcagctgtagattcttggaaatttgattttagttcaccttactgtcaattgtagattttgtaaggacacaatagcttggtaacatggataacatgaatctgaaaaatctaggatagaaggtgattctgaattgaactagagaaatatgtagattttcaggaatcaattctgttatagtacccgtttggctgtgatccataaggctcatataatgacagcatacatcatttgctttctcttttccgtaggaagtttcagga

SEQ ID NO: 4854 - DNA, 760 bp, Zea mays
  Intron number 1 from transcript GRMZM2G125552_T01 (locus G RMZM2G125552) derived from phytozome v7.0 (chr-ID 5; pos 1 571305 to 1572064 reverse strand)
gacgcgctccccatccaggttcgtgtgcctcgccttttgatcattttacgattgattgattgattcgatcccgaggagcatgcttgctatggcttgaatttgacaaagtaaaagtggcgccgagatttaccggatgtttggtagaagatgaggatgtgcatcataaatcgattaaatatagttggatgatgatacagtgatagatcaatttatttcattcaaaaaaaacgagcaacgagaaaatgtagcttattcctcaaactaaacatcatattagatttgcaacaaaaccggtatgctgttatttgtaataataactggaaaacctatcaaatttcccgtctctctttttttggcaagctgcaaataaatgctttgaaccagcaaccagctgttcgttttgctgtaaatttatatggattaggtgggatttgatgggtttaaatcctaaataagtcaaactcttttgtattttttttcaatgggataggaataactgatttctgccacaacatgacaaataaatcgtatttcgtatcaccagctacccaaaaaaaatgtccctcgaggtatcaatcaagaaagcttgagagcgaccgacaaccatacaactcccctgtcgcatcatcatataaccgaatggagacgcctcaaaagtaaaaaaaaaaacactgtccataacatctaatcaaatttacttcaccatgctcatgcaatcgacagaaatttggctttaccatggacttcacgttggcaggaa

SEQ ID NO: 4855 - DNA, 1032 bp, Zea mays
  Intron number 1 from transcript GRMZM2G067535_T01 (locus G RMZM2G067535) derived from phytozome v7.0 (chr-ID 10; pos 113484255 to 113485286 reverse strand)
ccaccgccttccccgctggtaatgtgctaccccatagcttcgcctcatcttactctgcgcgtagcacgggttggtataggatttagggcctggtggccgtcggacggggtgcacggcgtagggcgccgccgtgaatggggcgccgccggtcggggatgggggagaaaatgggcactccacgatggccgttggattctgggcgtgcgatccagattaaatctcttcataccgctttgctctaggaaaccttggccgtcggatcggccgcgggcggccgagattaggtatttccttacccattcgcgcgatcaacaggaaccgtagatctgccatcccaaggctcagactagatctagcttcattaaatcatggccgtggatctcggatcccacggctaacagcgcttaccgtttcgtttgagttatatctaatctgcgccacacgttgttgatcggacggaccagattagaacttaccccttcgctgagctgattttgtaaaagagaccccgactttctaagaaaacaacccaccgtccatgcggctgtagctttgagtctcgggaattttagtagattagcccctgttgtctctaggatttgaggacctgtccagacagtgataaaaacatataaaatcatttagaaaatgaatttctatatgaaaataattgatagaatttgtttaattcatgtaaaattcatatggagtctaaattggtccattccaattcctataaatctatagtattactgtttatcacatagtacatctggtttgacatgaaaatcatattaaaacttatttcctaattaatcctataccaaacacatgaaaccttaggaaaatcataactccttcgttttaactccgatttgactcgttccagttgcgttagtctcatagcaacgcgtagatcgatattatgcagttgttcttatgtttggtgtgatgttaattttgtctatatcatgtttgcttgggttgcaacgactagtgcgaggactcgtgtcatctgaaaagcaagttggt

SEQ ID NO: 4856 - DNA, 771 bp, Zea mays
  Intron number 4 from transcript GRMZM2G540538_T01 (locus G RMZM2G540538) derived from phytozome v7.0 (chr-ID 5; pos 1 86521134 to 186521904 reverse strand)
caggagccacccagaactctatcagggttgcccaagtaagctctcaggcctcgtttggagacagtatttctggactaccggataaatactacacttttgcaaaatactctggttttcaaaagcttctgggtgtttggatacaagtggctttgtgttttctaaagccatagttttgttaaagctgtagtctttttcgagttctagaaactcctttcttgacctcttttgtctaaaacatggttttttgtatgtctttggattataaaaccacggtttcatgatgccacagttttctaaaactacatcatccaatcagcctttataatatactaaaatgcgaacaaccaaaactgtacaacaacaacaacaacaacaacaacaacaacaacaacaacaacaacaacaaagccttttgtcccaagcacgttggggtaggctagagatgaaaccccgtatgaaaacctcagagctcaaccccaaagaaaacaggggaaacaaagtcaaaggagaaccggaaacgacgaaacgagggaacacataaaagagataaaacccacaagaaccagcaaggtctaaatgggcacaagaaaaggtcaaatgattaaggaggaaaagcggaactataaatcaaggttctggcacgtgaattgcacacttccaccccttcctatccacggcgagctctttatcaatattccactccttcaggtccctcttcactgcctctgtagttacatcaatttgttgatgacatgtcattgttttcagtgg

SEQ ID NO: 4857 - DNA, 207 bp, Zea mays
  Intron number 2 from transcript GRMZM2G540538_T01 (locus G RMZM2G540538) derived from phytozome v7.0 (chr-ID 5; pos 1 86522054 to 186522260 reverse strand)
ctattctcgctgaggagaagcacttgcctatgtaagtatatgtatcactgatgctactttatatgtcattattttttcatgtattttttgttgctgaactttgagttgttgtctatttaaatttactgagaagacatatttgcattccaatactgtgtcttgttgcatgctgtttatctaataataaggtgtgtttttttgacaggt

SEQ ID NO: 4858 - DNA, 322 bp, Zea mays
  Intron number 3 from transcript GRMZM2G061783_T04 (locus G RMZM2G061783) derived from phytozome v7.0 (chr-ID 5; pos 1 75181052 to 175181373)
gagaagtaaccagtggtatgatttctttctttagagacacatcagtgtttaatatgttcgtagaagaatcactcatgttacgtcagcagatcatttgagtatgtcaaggtcatctggagtttttttatataaaagaaatctattatcaaattcctgctgtaatctaatatgcttccagccatcattattattccttaagttagctgcttaccttgatgacttcagctgtcacacttttgtagcatgtttttcaatgtttattctgttgctgccgcaccaaacttgaatttctttttttttctatcttcaggtgtacggcaga

SEQ ID NO: 4859 - DNA, 952 bp, Zea mays
  Intron number 9 from transcript GRMZM2G147335_T01 (locus G RMZM2G147335) derived from phytozome v7.0 (chr-ID 5; pos 1 65071304 to 165072255 reverse strand)
tcttgtgcaaacctgtgactggtcgaactcaccaggtatttttctcttgattgtgttcattgcaatgcatttgagtatactggtggtcggatgcatttttatagtggcaccacaaagaacatgataacttgccactcagtctagatttaagaaattaaatagatgcggtgcatgacacgctttgcccccaatccccatatattaaatttcatggtcaaatcaatatgcttattcacgttgcctctacaatacagatgaaataaatatgcctatatcgttgatttgtgtccttttggagatttttggacacagttaatcatagttcagggatagggatggttccattgtggtaccagagttgcattttgagaaggaattctcaagtttgaattgtcaaaaccatgtgaagcattttttattcatgatcccagctccaacgatcatgcacaaatgtttttttctcaatcgtaaaggctttatcttgagaacttggtattgcctatagctagtcattgtagatatatttacccttccagtaaaacatgaataatgcatagttatcacacactatctaaaattcaagtcttcatccattttccaccaattgtgatgcactagaaggctagaaccatgaaaatggctcctatcatgttgactcagtcatcatttatcctagcttcatgcccaatgtattgtttaatccactgatatgcaccagtttgcctctttttttcttttccttttcattttgcaagggatgatgacatgatggattgatggtcttgttactaatctggctactgaattcttttatcctataaaattatgttttgttatgcttttgcatgtaactatatgtatgctggtatatttgcatcgtttgcataatgccctgatatgttaaaaatgtagataagggtgcatctaaagcaagctggttatccaatagcta

SEQ ID NO: 4860 - DNA, 587 bp, Zea mays
  Intron number 4 from transcript GRMZM2G147335_T01 (locus G RMZM2G147335) derived from phytozome v7.0 (chr-ID 5; pos 1 65082833 to 165083419 reverse strand)
tcgtaactatttgcaaaccagcttctgttccagtaggtttatatttataatgtaccggcacgagccacctgtcctgcctacttattgttattcttctaatcaagtgcatttgtcaatatgtcatatgtttgttaaatatgtcacctgaactaaaatgcattaagttttgtagcaacacaaattatatgtgctagtaaatagtcaatacagtactcctaaaattatatctgatgggctttttcgggcatttgtactggtagaatcttagcttttgtttctagtaatttgttatacaacttgatgatgcctttatcaagtaatcatgaaggattttagaagtaactatgggaaaactagaatacctaggtggaagcaatatcattgttcttataagaattaagaaaatagcccccccaagtgttaaccaaagaggacctgaacttaggtggtgtgtacacacacgccttctgccaattgagctaagtttagtacctacagaaatacttaattgctaattagtgtatgtttgattgaagtcagaatgttatatacataactcaagtgctttccattttgtaggttcatcc

SEQ ID NO: 4861 - DNA, 926 bp, Zea mays
  Intron number 1 from transcript GRMZM5G816135_T01 (locus G RMZM5G816135) derived from phytozome v7.0 (chr-ID 5; pos 3 3807423 to 33808348 reverse strand)
tcggtctaatccccagtttgttacaggtatgtattctttcagcagagaacctacttccacatatatgtcaatggtgatccaacacacatagcagggacaaacaccgacatcgaagggagaaatggatgaacagctgcacagagccttggaaggaatctgcataatataaagaagcatgaatttagacctttaaaacagaaattgaccaaagtgggagacaaagatcagaaacataagggaactgtccaatctagcacagctccctcccatacttcagttcaaagcaatgaagggaataccataaattatatggatcattgatcccatgaattattccatgctaacagattggtaagtgaatttggactaatagagagcaaaaacttgcatgacatacgtgacctggtagtgaaccatgtaaatttaggtgggtacaacagtgagaattgtacttcccagcactatacggggaataatgcagttggcactctttattctccatcactaactgtaaatttaatccaaactcaagggggcaccgtggtttatttgaatcccagaagaaacaggaagcagagcaaagtataggaaacattccacacaatctgcaccaacaaaagaatccatctaatcaaacacattgggatttctattaaaaagagaatccatctaaccaagagaaaagggaatcaacctgagccaagatagatctctaccctatgctcgtcgggggggcacacctgcatgaggacgatgacaggagaagagctgtggtcgaaggatacctggatccagatgcgtttggcgcagggggaagattgcttccgaagttgtcaggtcaggccagaggagcaggctgtgttggggaggcgcgatggcgggttgctttaggtcaagggatctaacaccgcgtcgtcgtcgggaaa

SEQ ID NO: 4862 - DNA, 500 bp, Zea mays
  Intron number 2 from transcript GRMZM2G161418_T07 (locus G RMZM2G161418) derived from phytozome v7.0 (chr-ID 5; pos 1 5325501 to 15326000 reverse strand)
aaaccacagcactgatatttgcatcgggtaaagtatgtcatcaatgtcttctcttatactgtcaattttcaaggatttgcttacttttggtggcagaatttcccttctattaaatttattgacatcaaattattgttgcacatgtggcctacgtgagatttgatctgtttttgctgtgtcccaatctacctctcaatcatcaagtattgaagaataacgttcttaccctctgtagcctacactaggaaaatctatgttttccttaccagttgatatatcacggtgggtgtttacttgggattttgtttttatcaatatcttcagtaatctagactttcttggttgtcatattaaatattggtttaatgcattgatgcatcaatacttctcttccaaatgaaaaagttagaactgcatttctttcatataaaactacaatcttgtatcaacccatcataagtgttgtagtgctgaaacaagtggcccgtaattttctaggt

SEQ ID NO: 4863 - DNA, 573 bp, Zea mays
  Intron number 4 from transcript GRMZM2G003656_T04 (locus G RMZM2G003656) derived from phytozome v7.0 (chr-ID 1; pos 1 73215697 to 173216269)
cggagaaaagctcagagtgctgccttgtcgtcacagtatgtcatttagctccttacattttttttatattatgctactgtaatagtatgatggcttgggactctaccacatccaactggtctgctatactgtacttttcactcttctgatttgggatgaaaaccttgtgcaagatttttatgaaagccaacaaggactagacaaaataaagcagtaagtaaaaaagtgtaacaaaaatatatatagcaaattcatttaaacggagtaactaaaattggtgtgtgaacatctgggcaagccttttcttgtagtaaccacttaatgcttatgtttagagaacattacagatttttattgatttattactgaatgtaagacaaatgttctcttgtaatagttttgagtcttttatccttaggtgccgataatgctgtaaatttaattgattgggggggggatcaagttattgcactgaatgaagtgtatccttgtataaaatcatttatgcaaagaataggatgtataaggtaagtaggaaactgagaatatttgtctattgccttgcagagttcc

SEQ ID NO: 4864 - DNA, 804 bp, Zea mays
  Intron number 2 from transcript GRMZM2G007647_T01 (locus G RMZM2G007647) derived from phytozome v7.0 (chr-ID 5; pos 1 83145494 to 183146297)
ttgagcagctcaataagctcgtcaacgttcatagtgtgagtacgccttctcaaaatttggccgagtcacgcgaatccgtacttcattttgatgcccccggtgacgattcactagtacagtgagattttgttccatgagtttagctcgcccgaatcttctgtcccttttattctgttataggatcatttccactttcgtgtaaccttttgtatggctagatagaatatgcacaacttttttttccctttcctgaattggtcacagtcatcttcaagatattcttttccctccccccactaggatcattgcctgacagtcatgtcaatgtcagggacatgctcctttgtaggggatacctgtacatcattattatatgcgctatattctgccaagctaatgcactttctgtttgtgtacgatgcgccatgtatcggcctcgaagtagagttatttctgaactttcttggtacttgccatttgcaaatgttgattttttagggaaaatatttatcgtttttttctgaaaatactagcagatattacattactttcaatgatttgttaaatgtgcttctgaattctttgccagaaaaaacttcatggataatcattccttcgctgtttgtctcaattgccatgtagatggttgtaaataccatgatagtttctatcagaaacttatttactactgtttggtttggcaacctgccataagagtaaaccaataaatccttagctatttattttgttcggatggattcaattacaggttgaagatctatctaaagaacctcaggttgaaag

SEQ ID NO: 4865 - DNA, 694 bp, Zea mays
  Intron number 3 from transcript GRMZM2G167999_T01 (locus G RMZM2G167999) derived from phytozome v7.0 (chr-ID 10; pos 8705942 to 8706635)
ttgattgggtatgcttttttctgtttttaataattaggcttactgtttcatcaatcagtgctttaaatatccattatgtttataaattagttatgtttatgtttaacatggtgtctgtggtctattatttggatccaaagcttagcacatttctagtgtccatatattttagcatcaacattctaattgacattttgagttcattatgttaacagacgtttagaattttagattgatatattcaagttggtttccattattttcagccccttctttcttttttctttttcgtgttcttagctgcaatgtttaaatcagagcaccacagtttcatattcgacaaaagtggacagaagggtaatgttaaagaaagacttcagattctattcttctttggcctatttgtttgatgctgtgttatactgttatttttttagaaaaaaacaacgtgagctggaaagaatactaatcacatgctttagcattagtagttatctgtgtcctaatatgccttagcagttatctgtttcccaatatgctttgaagtttggaaagctggtggcattatatttattatttggagataacttttgtttgaaactaacatttagtttctgtctgtaagtggaatactgaatagtagtaccattgattgttttatgttgtttaagctttttctttattgtgcaggtta

SEQ ID NO: 4866 - DNA, 677 bp, Zea mays
  Intron number 3 from transcript GRMZM2G043737_T01 (locus G RMZM2G043737) derived from phytozome v7.0 (chr-ID 10; pos 116861593 to 116862269)
ccatttggctctggccctcctggtgaccgcccaaggtaaaagccttaaatcttgtggtgctgtggcatttttgttcatgtacttaacaaatgtgtctagtgatgatttcacatgtttgcttctcatgtctggtgatgattttagatggaaaagtacagtcaaatctgaagtagctttttgtgcacctctcatcttatgatgatagggttatctagtaaatggcttgttgctgggtgcttattatgcattttccaattatgtttttgtgcaatgcaacattatttctaatactgtagctcggggatattggagataaagccttttacatgtgtgctattatgaagctggttgttgcataagaaaaaaagattacatgtttattaaagaattctgtctttgctttatgtatttatactgagttgtaattggtttgctaaaatctgctctagaatgacacattttgcagtgtaaaggatattgttgtgaagaagacaatctaaatttatgtaagattgtatttgtgtgcttattacagtgtgttttaccgaggagcagattaaagttaaccaattaggtacaaatctttaagttttgaattgttgatactgttatttaatcttctctttcctgtaacttatgtaggggcccaggtcgttttgacggcgacaggccaaggt

SEQ ID NO: 4867 - DNA, 641 bp, Zea mays
  Intron number 2 from transcript GRMZM2G028726_T02 (locus G RMZM2G028726) derived from phytozome v7.0 (chr-ID 1; pos 2 08433961 to 208434601 reverse strand)
agtaaataataaaaaccctctcccgctcttccgctttctctcgtctggaactggaactcaaacatcgtcactgcaccattattttctgttatttcattttagaatcatttcacttgatattcagaaataagcagttgtaacagcagttaccacttcatttgtcgcgacaagaaaatagggaaaaaacaataaataaaatatcttcatttgtggcttgatattccttgaccccacgcattgcattcccccctgggaagaaaacagactcacatgaacagcgagaagaagtacactgtagtttttcttgaacgtttgcttcgtgtactaattatatcttgtcctggtcgtctcatactccacatttggactgttcacacatagctcagattccatttacattcctgtttgaggttgcaggataagtggtagctagtgtatcaggaaaccaacataatagtaatacagtaggtgggtcctgtgcagttcttctttctcttttttttttgaaaaaaggtactattgaacagtaatattatagttgcgtgtgtctttgattacgatgttttgctcacaaagttgctactgctttccaataattcttgacagcgtcaacgagtttgtcagtgcaaagaccgacccaa

SEQ ID NO: 4868 - DNA, 430 bp, Zea mays
  Intron number 1 from transcript GRMZM2G416388_T04 (locus G RMZM2G416388) derived from phytozome v7.0 (chr-ID 1; pos 2 73867233 to 273867662 reverse strand)
ttctgtactcttggcatctaacttttggcctgtgggtatgatgggaaaaatacaaaatcatgtaccactacctccattttcatttaactggcacccttgaccaaagtttttctgatcataaatacttgatttaagataaagctggtcagctagtgcttgtagcttgctatttgaaacaatgggcttttgaggtgtttcccaattttctctcatctctctatgttttcatagttcttgccttttcctgttcctttaattggaaaaatatcattagatgcaaaaccatattactttactgcccctttatggtgataagaaactccgacgcattggaaagggaagtatgttcggcgggtaggttgtgaatgtataactccgctttgtttttacttcagctgtgcatcatagtacttttggcatcaaagagtct

SEQ ID NO: 4869 - DNA, 1068 bp, Zea mays
  Intron number 2 from transcript GRMZM2G015384_T03 (locus G RMZM2G015384) derived from phytozome v7.0 (chr-ID 1; pos 2 895039 to 2896106 reverse strand)
caggcgacgacacccccaaggccgtcttcccatcggtgaggcaaatgcttttctgctgcttcggaactctcgccccgttccccgggtgtgggtgtgttggggggcgcagtcgcgcagacacttctgcagtgtccctaagctgaggcaaaatgcgtttccgggatgcactggcgagttggcactttacttttgattgcctgaatcattttaggctgcccactctaaaaaaatggttgctgccatcaaatctaggttcaaacacgagagactaccacttcgcttgggttgatacaggtgtatcctcagttttctttcgattctaggtgggttcagctcagtctgtgaatctcatgagtcagacattagcgtgcacatagattcttctgattaatgtatgcatacttcattcccgagtgacaaagttagttagtgattcagctttatgtttgctgcaagccatgtggtctagcccaaacggtgactagttgtcagtagtaggctatcagctctttgtcgggtattgtgcagatatcttcagtcaagtcatacgatgaatcctaatatctgcatgtgctgggagcttcttgttactctttttttttgtcggcttgcctcctattgattctataggctaaattcagaacctatgaaaatgagtgatagtctaaaggacatcttctgtaccagtacttaaataggaaattattcttgtcttatcttagtttcgaccatgtccacattgtgaggctatcccttgtagctaatggacctaattagttagtactgcattctgggagtaggttgttagctttactatgttgagaagaatgggaagacagtgtatatgtagaaatcacaaatgttaaggatttaccatgttgtacaataaattatgtttttaccagcgtcgataaagaaggttttggagttgagtatttaatgtctaattcagcacatctgtcatggtttatcaattcaattgtgttgtgatctacatataacaaatccttaccgtgcttttcaacatgtttaggttgttggttcaattgaacaaactgaagacacaga

SEQ ID NO: 4870 - DNA, 803 bp, Zea mays
  Intron number 2 from transcript GRMZM2G090480_T02 (locus G RMZM2G090480) derived from phytozome v7.0 (chr-ID 5; pos 1 23838807 to 123839609 reverse strand)
tggagtgcgtggtgcagggaatcatcgagaaccaggtattgtgccacaatgcaagttggcactgatggtttatgtaaaatttgattttcacgcattccactaacatttgaaagataggagctctttcatcatcgttagtgcagtctattttgttatgcagatcagacattaacttttcctctcactgcttgcatctagatttgataagtattttgaatggtgtatagattgttaatatctatttgtaagtatatacttatagtattgaatttgttgttgaacatttcgttactaattgaattccgttgctgtggacaaaacaatctcatattgatgtacatgtacagtgcacaatgttgagcttacgcaccatacaatctagcttcattttagtgttcagttgagctcccttaggtatggccactatccatagttgccagttggtggtcacttttctgtttactccatcacagataaatactaacaaaagtttattttattgaagtgataaatagatagatcatgtagaccactaaatgtcaacaatttattccgcgctttaaggcactacttctggagcttttgatttcatttgttttttttcttctcagcatgttaacagaatagtaacatttaatatacagttgggggaacatatgatctatccttgtgcttttacaatagagaggaacttaattttttggtatgttctagtttatgtgttgtgcacagaatgtaagttgctctttgttgtactgctctgccattagtttaacctttgtttgatctttccattttgcagc

SEQ ID NO: 4871 - DNA, 697 bp, Zea mays
  Intron number 1 from transcript GRMZM2G317738_T02 (locus G RMZM2G317738) derived from phytozome v7.0 (chr-ID 5; pos 1 99873003 to 199873699 reverse strand)
ttaagaagaaagaacagttgtaggtatgagatatgtaatgacattgtcttatactcttattgttatgtattatagggtatataaggtggagaaatcaaatacaaggaaacacattcatacttatagaactatgagacttcagagatgcaataattagtcattatgcatattatggatcatttgcattttcataaagtaaatccatctattgtgcatttagtttagaggtgaaataataggatcagatctattgcttgttacgatttcagcatctctggcttgcattctcttttcccctggggttttgtatcacagtcggaatttaactgtgtcaatatgattttgaaaaaaatcatgcaaaacaaggaatccgggaatcccagagcctgattcaataacaaacagatttccatacagccatgaataattccttgagatatttactgtgtacctttgtcctgcttttttgttttgccggaaacttccatgactgcaattttatagtctgttactaatgccatttcttgcatccgtcttctgtagattttattgataagttttttatggcgatctttttgcagatgcaagtgtgattctacctatagaatcacatgctcctgatccgtattctgttccaatatatgagaagttcaagcatgtggattatggtgacaatgaggtggcctattctaattat

SEQ ID NO: 4872 - DNA, 940 bp, Zea mays
  Intron number 1 from transcript GRMZM2G151223_T02 (locus G RMZM2G151223) derived from phytozome v7.0 (chr-ID 5; pos 2 05544778 to 205545717)
tcaacttcgagaagtcccctccagccatcgaccaggttcgtaaccattcgcccccaccctcttctccgccattgctcttgtatgttgcaatgccgcggcatcaattgacagttggttcagcaatggcggacggacccccgagatcctgcacgttgttctcccggttgtctctgtcttttctttaaggagcaaacaaaaaaaaaggaaaagaggagagagagatgaagatgcgttctggtttgttgaagctcacagtcgttgcggcgctagtcgtctagctggacatgattgctgtggttggctgggagcctgggacaggtgctgtccattgtcttgtggaaagaaaaaaatgcccattcctgcggtggggaaggcggggattttttagggtttaaagacgtcacggaactgaactactgggttggtgccacattgtttgttcatagagtggttagtgtgttcgttgcaaacaccatctggaggtcactttgacaaccattgggggcgctcttttggcaaccttttgatcccttagtttattcttagaaaggtcactgtcgcagagattaataatgttgcaagctgctctctgcctttcttttttctttagcttagattattaatcgtcgaagccgtcctttactgcatttacagttcgtttctcttcccctttttgttgatttaccaatagtttagtttaggctcacagtgccgaaggcccatggtatttgaagacatgttcattttttttgcatactaaagtgatgatacaatgaccaatcaggttcattgcatcattacttttggtaaatcaacaaaatttcttctgctggttcttgcaatttatagtacattgctgctcactgttttttttattctggattaataaacattgtccactacaggacacctttgcaaaatacacggcaaggacatcatt

SEQ ID NO: 4873 - DNA, 784 bp, Zea mays
  Intron number 2 from transcript GRMZM2G010095_T01 (locus G RMZM2G010095) derived from phytozome v7.0 (chr-ID 10; pos 38588328 to 38589111 reverse strand)
aatccctcaaggtaaaaaaaactccatcgtatatgtgtaattcactcttattgtattttttttatcttacttcaaataaaaggttccttctctatattgtcatgaacaaacaatgtgatgctccctctgcttttaaataaatggcatttattattcttgacgccacatattcaaaacggagggagtaataacattgggtgattcactgagttgtttctactatgttgtttccattacattaccaacttgggtgccgtttggttcacatattgataacgtaatggataaccgataacattaaattttgtttgtttaagtgcaaccgtaatttgataccacactagaaatggataccggcctattcaaacttgttaccgtcgatactcgagtgtgaatcattaccattaccatttacgttacatttcgtgaaccaaatagcaccttggtgctattatatcatgtactcgattttggacttccacattgttcctgtcaagccaagatatagctgccgctatggttgatagaagagctcacacttcatgtgttcttttttccttttgttatccatgttttgttacttatcttatattcttgtcaagtacacaatatgttatctgcgataaagtaggaattccatgctgacaagcttcaacaaaaatagtaacaatgcagtttattcatgtgtttgttgtatcctgtcacaacgttatggcattgtctttaattccatacctgagtctactttgaacttgctagggcaaggatatcaggttaactaata

SEQ ID NO: 4874 - DNA, 952 bp, Zea mays
  Intron number 1 from transcript GRMZM2G010095_T01 (locus G RMZM2G010095) derived from phytozome v7.0 (chr-ID 10; pos 38589872 to 38590823 reverse strand)
ttgcgtctggattggcctgcccctgctagattcaggtaactgctgcagctgcggttcttgacccgtttacttcggtttgcccgtggccgcccttgtcttatccttctctctgcatttgagccttctttttcacagtatacttgattggtttgggctctgtacccagtcaactccctccccccttgtcctggcttttgatactgcattttggttgtcctaacttgtttctgctaatttaatcggcattcattgtaattcccgtaccgagtcctcttgggtttgcttggcagttttgctttgctagcactagcagtactctgcatctcttttgttgttaatgtgggtaaagtttttgctttttcttcaaccaaatgctcccttttttctctttccaatgaacattgattggttccttgatggctcaggttctctttacgggagctgctcttgcagaccggctgatttaatgcaagacgctgtctgtttttctctttccattgcccttgatttaatgcaagacgctgtctgttttctttgcctctggtattgggctggtacttcacatgttctggatgctgcattggttagtctcagtccagtccggtcaaagtcgtctcttctctcagatctcgtgctgtccctagcattttccctagtttaactaggttcgagttatctccctttgcttcatcgactcatgcgtccgtattatttgggttttacgctaccttgttctttttgctgaaaattttgtattttaacgaagtttttctattcactgcatccccactaggatcatctgcttctgctgctgctattattattagcattaggtctcgacgcacacgatcttaatcattaactgtttttcttttctcctttacctagtaagataatcactgccttgctgaatgcagggacttcgcatccattgtgtctgatttcttctatt

SEQ ID NO: 4875 - DNA, 1005 bp, Zea mays
  Intron number 2 from transcript GRMZM2G041123_T05 (locus G RMZM2G041123) derived from phytozome v7.0 (chr-ID 10; pos 122524824 to 122525828)
aggagcagagccatcacagaaattcttgtctccaggtatgttgaagtttcaacaacttggtttataaattaacatgattttaaaaaatcacagtgactcctcttgcagattttgtaaaatgtttttttctctactgcactgcctatcatttgctgcaatttgaggattataacattctagacacactaaaatctatcatctatcataaacagtagctatttccccctctgttctttgtgtctctgattgtgtggtaccagctactttggcatacatttgttttttgctttaatcttctgttcagcttctaattcagaaatctttacttcagataaccagaatacttcagcttccatagttccacttacacagttgtaacaatctagcctgtaatggcttgtaacagtacagtgagttgggagttgggacacctctgatgtttagagctccaatggtcctgtgggagggatatatttttgttttcatattgtttagccatggggtgccagggtctacgttctaccttggtttggttctctccttttctcctatctgtcaacacatagtcgtctattacttataaaaaaccacattttcccattttgatccctttatgaacaatgctggaaatcaaattctattcattttggaaaataattacatatttattcgtcgtagctatattccattgttttattaggtgctcaaaaattgtgttgaccggacacatgctattttggcctatgtgctatccattgctatgttttatcggtagggttttccatgcttagataacttcctaatttctcattttttgtaaataaataaatacttggagattcttggtcaaaggaatgttggacacctgctagccaatgtgcaggtaacaggaacctgaacaaaatggccttgcagtcttttttttttgactgtgtatatctttttcatgtggagtccattaaaaatccatgcataagcagccgcgagaggtctcagacagataag

SEQ ID NO: 4876 - DNA, 809 bp, Zea mays
  Intron number 1 from transcript GRMZM2G088313_T02 (locus G RMZM2G088313) derived from phytozome v7.0 (chr-ID 10; pos 4053932 to 4054740)
acgacgacgacgacgacgacgacgacgacgacgaggtttgggtttgtttccagcttcacgcgggtctcttggggttgtgtgcgttggcaggttctggatttcttgattcgcggcacccaatttcttggggattaatttctcccgttctgatagaaggcgatggctcatcgactgggtcggtcgtaggctggttttcgtttgaacacgtcctcgatttgattgaccattgggtcgggtttttgattttacggggaaacccagaaaagaaggaaggaaggggaaaccgcaatgccagttattgaatatcgcggagtggtgccatggcaatttcgagtgtccgttttttgtcccgttctggctgattcttgccctctgaagtttttcgtcgctttattcaatcatccgtttacatttttatgtgtcataatttgggcttccttcagggatttgatccatttgcaggatgacttagtttttgtagataggtaaatttagcaaattcgaggtgtgaatcatgtgaagcatttttttctttttccgtttagaattccgcgagaaaactcggtacatgttgagcacattatttggattctttttttacgtgtttttgttgtaaatggacatatcatgataccagaggtcatgccatgacttgcatgtcttctggaaagtttttttagactatggccaatcattcgagtaggataaaataggtgaattactgggattatttcgttgtgctctccctgcttccatttggaaataaaataaaataataaattacctgatgattgcaactcacaaggatt

SEQ ID NO: 4877 - DNA, 817 bp, Zea mays
  Intron number 1 from transcript GRMZM2G031022_T05 (locus G RMZM2G031022) derived from phytozome v7.0 (chr-ID 1; pos 2 64552145 to 264552961 reverse strand)
gcgcgccctgcgtctccaaggagtgccctcctgatgtaagcatacttcctacctctgacatatgttggcatgactatcaattttttttcccgtaacgccccgtttggatctttggggttgaatttcattataatagtagtaatttagacaaagatcaattaatataatatggttttatacgaaatatttgtatattattattagcaatatatgagagatatttatgtgctacatttttactatagaggtctcttatatctgatctttggaaagtggtgaaatgtcaaattctaagctaaatagactactttattaagtaaattccaattcttccaaattcaatagatacaaacggccctaatggaaatcgacaatattttatacaattattgtggttacaacggcatgtatgttgacaattcgatccgctaggactaaatcgtgtcccaaaggatgtgagccttattcttgtctataaattaattcgtagtgtatcaatgtgatattgaacttctgtcccaaaggatgtgagccttattcttgtctgtaaattaattcgtagtgtatctatgtgatattgaacctctgagtctgagggttacaaccatcaattcatcatgatacattaaccttacggtgtgacactttctaatatatcaactggagtattgcagataagaataaacaaaacataattagaattgattttgtgtattctcatgccttttccactttataattacatgtttcttgtatattggtttgattttttgttgctcatcgatattattttacgatgtagctatacaaccgattg

SEQ ID NO: 4878 - DNA, 962 bp, Zea mays
  Intron number 4 from transcript GRMZM2G396455_T01 (locus G RMZM2G396455) derived from phytozome v7.0 (chr-ID 1; pos 2 23386986 to 223387947 reverse strand)
tgcaaacgccataatagccaatccagcagcatgtaatcctcttactgttcctactttatattacgtttccgtttgatttgttacacttctaatatgtcaattctaaggcattcttttggctctgaaggaatgacctttccacttactgcattttgtttgttaccttagttcaactgctgacctaaatgagtgcctttgcaggacatgtacatgtggcagaggctctcaatatactgattcacataattttctcgctcgcatgggccaatatggcctagattttaacttcaagcatatcagtgatgaattttattttattccagacctacctgtgaatttctgcatcctttctctcatgtgaagcaacctgctggatatagagtaagttgattgttggttgttgcatgaagtaatcatcacaagatagaatgtctactggttgtgaagaaaatatgataatgcaacagacttataacaagtagacattctatctttcaatgaaatttcctcactgtttcttgagaaacagttccattacatacaaagactatcatgatgcacacatttgactattaatttgggttgcagctttcataccagattgttgactcttttgtctggcttggcataagaggtatgataaatggtctccgaaaaaggaagttgaaattgagaccagtcacatacctaagcagtacacatgcttatacgaatgattaggctccccgtcatgctcaagctcttggaaccaaccgtcgaaacggctccccgtcgtgctcaagctcttggaaccagccgtccttgtcacaagttccggttgagctataaattccctacaatgttcatgtctgacatgccaagtcgttgattaggcttctgtcatctgcgatgtgtttcctcagtttcgttatcatcatatttcgaaagggctccccgttgcgttgtggtttgtcggccccacg

SEQ ID NO: 4879 - DNA, 553 bp, Zea mays
  Intron number 7 from transcript GRMZM2G034143_T03 (locus G RMZM2G034143) derived from phytozome v7.0 (chr-ID 5; pos 6 6029852 to 66030404 reverse strand)
aagatcttcgttgatacaggtacaaatatttgcttataagttgatgatgttttcttctgtctcccttgcctgttgatattccagaagttcccaatgcacaagcattgattcctgactattttctgaactagaaatgcatcattgttaataattttctgccctttatccaaaaacttgagactatgaatcatttcatttataagtccacttgtatgaatacttatattttgagtcattcatgttaacgtggtgtactataatcttactgagctgatagagatttttttcttttgtcctgaattctcagaatttttttaatgcacaaaccgcacatgttgtgttagatcaggttacttgtttattgaagatatcatcaaagttaacttaaattatgaatccagaaatactgattttttatcatagttttttgcttccttaccatatgttgaacatagtactttgtcagagtagcctataggctttcaaaacccactaattggtttcatggccatgaggtattttttgttataacactcacttattgatttctcag

SEQ ID NO: 4880 - DNA, 622 bp, Zea mays
  Intron number 1 from transcript GRMZM2G017229_T01 (locus G RMZM2G017229) derived from phytozome v7.0 (chr-ID 5; pos 7 4644354 to 74644975 reverse strand)
aaatacagaagtcagcagaactaaaggtatatgtattctgtacaacctcccttagcaaaaatgctagatcaatacaagatgtaggtactggcgtactgctcaattagaatttaaaataactgggaacacctagcattactgcagcattttatctgtatgaggtggataacaagctgtgacatccatcatcttatataagtataaacactatctgattatagattgactagaatcattatattacatgaaggagtccaccaaacaaagataaaattttaacaaatttctgtcagactttttcatttctttggcacgcatactattcagttggatcaacataaaaaaagcttgactttggaaagctgaaatatatattgtaaagtataaatggaatagtaaaggtataactattgctagccaagatgaagtaagctattctaagttgtatactgcaaagaaagaaaaatatcagtggtgtttgtattttgtactcctgttttttcttcttaatgcaatgatacacagctctcctgcatatttgagaaaaaatataactctagttctttgagattggacatagcttgcaagacacctcactagtgtatcttatacaggacggtcc

SEQ ID NO: 4881 - DNA, 785 bp, Zea mays
  Intron number 1 from transcript GRMZM5G856599_T02 (locus G RMZM5G856599) derived from phytozome v7.0 (chr-ID 1; pos 6 0420975 to 60421759 reverse strand)
gcggatcagttcgcggattctgcggtaagcctcgaattcttccttccttaatcctatggcatgggagaccaaagcaagttcgagtttgaatgtatagggtcagaagcggcaccgccgcatcgtctctctgggcgactccgccaccgccgccgaaaaccaccaattgccccctctcccggccgccgcttgtcggcaccaccttttctccctcctctatccctcttctccatcttgcaattgaacctctagcagcgtcgtcgccatccggtcgacggctgtgtggatctggggcccctaggtgtggatccgctcgtaccttccccggacctggtgtcctatcgcccgggtgtgctccgatgctctgcccggccctctggcgtcgtgcacgggcaggttccacttattctcgcgcgagacaccttggtctaagcagtctgtgtggacggtgttactcatgaggcggtgacagctgtttgttccgatgttttggcttgtagaagtaagcgctccatggccggagctgtagttgattttggtgcatctgatttgagtttgatgtgtggaggactggatctgtagaatttgggcaagacttctacgtgatcattaggccatgtgataaactgataattgtgcttgtttgaaaaaaaaaggcatgtttcaattgtgtcctagaaaagagatggtggactgcttttatcttgtacgtgagcccacaaaagcatctataaaaaaatgatgtgaactcaagttcattattaatattatttgaaaattcttgcagt

SEQ ID NO: 4882 - DNA, 474 bp, Zea mays
  Intron number 1 from transcript GRMZM2G411041_T01 (locus G RMZM2G411041) derived from phytozome v7.0 (chr-ID 1; pos 2 21945451 to 221945924)
gtgtggccgacatcgcagataagattgtcaagcaggttcggaacctcctcgcttaattattctgctgtttccggtgcacattactcgcgtcgcttgacgccgagtcaccgtcgcgtagaactgtagatctctgggaaaaaaaaaccggaaacgccgagagcgcatgctgctgcaggtgatcttctctgctctaatctaacagatcagggagccgcatgatctttggttccctcatcctgaacttcttcaatgatgcagacatttatttatcacaacttaactagtgacgtttttatttcagtgataattctcgtgattctcggatctacgttgtagatcatgcgctgttggacgtttttgatttgttttgtttttgcttttgggttttacagtggttgttgcccttatagtttcattgttctcacctttgtgcatgcaggtcgagtaccaattcagtgacacgaacttggttgc

SEQ ID NO: 4883 - DNA, 638 bp, Zea mays
  Intron number 1 from transcript GRMZM2G110869_T01 (locus G RMZM2G110869) derived from phytozome v7.0 (chr-ID 10; pos 149301351 to 149301988 reverse strand)
actgtggtggtggcttccatccggcaggaaacgaggtatgtgtttttttccttgaaccatactaattaatctcgtttctgtccacctcatagcacgttattgtgtgtttacggcatcctaaacttaacgtatcacttctctctcatgactatgttagtaggattgtttgatatacttcctcttcttccaggatctgttgtttagttcagcagcatatctggttaatgtcattgtacctcaaccttgccccattttgtattaacagattttctaggattcaacttgatctgatctttcgagcccaaaaacattgcacaataatttttttgagtagaatgagtgcatgtagtagcagaacaacaagagccttacaaatcatcagcattgattaattggcattaaaaaatctgtcggctgttgaaaatgatagtacatttatcgtagtacatgggtattggtgatgatgaacaatggtctgaaaggataatttatttactgtggctttgctaccaaatttatttgttgtgtgttccattattttagaaagaggaacttgttgctattgtgtttgtctcctaatctttgtctttaaatattgtacaggtgatcttaaattcggaggtgtgggatctgaggaa

SEQ ID NO: 4884 - DNA, 668 bp, Zea mays
  Intron number 3 from transcript GRMZM2G102021_T03 (locus G RMZM2G102021) derived from phytozome v7.0 (chr-ID 5; pos 1 35584324 to 135584991)
ctgatttctttaggtaagtttttgttattttgatacaatatgaaaatatcttttcttgtttttgttttctaagttttcatattttaatacaagatgaaaatgtcttttgtagttctggttcaagacaaaatggtttttttcttggcaattataaattattatctctcaagtgctgcattgtgtttaatccagattctgaatttaaatgaatgtatacatattgcacttgtatatgtgccaaattgtgccccaattttatagaagggatacacatagcaatttttttcatggaaagaattgcttgtcatgttatttgttatctactaggactttttcctaattttctggggactgattccaacaaggactattaaatgcgctaataaatgcgttgccatataaaatttgtgttcataacaaaacagacacagtttctcaaattgtgcattgttgatttgaaactaggaagtctcccaaacataaacatggtttgctaactcaaataaatactttaaatctgatgatgtgcttctgtactgagtttatgattttacttattgcttggtaggaacaattactcttcaatattactttagaatgtcacaactataactgctacatttgctcatatgtgtttgaaaatgtttgtgcagctggtggtttaggcc

SEQ ID NO: 4885 - DNA, 521 bp, Zea mays
  Intron number 2 from transcript AC200622.3_FGT005 (locus A C200622.3_FG005) derived from phytozome v7.0 (chr-ID 10; p os 67234371 to 67234891 reverse strand)
agtaagagtctttgttggatcaattggtagttatttgctggggcttagtccaaattacatgagttttgcaagctagttttctaaacaattagttgaaagttttggctaaaaacttagcccagttgtggcagatacactccaactaatgttcttaagtgcatcacttgaagattttttacctagttcaaatgtggtttctttgttcagcattttttaccactagcagccagtttttataaatgtctcatatatcaaagattagttgttgccttgccactagtaataataacataccaaagaaatttctctactgtgtacaatactaatacattatctagtgattattccatccattttcaaattgggatttcattccttcttttctaatgtttttagtgttttctttttttgctactgtgctcttgtgggtcagtacatgcatttgtcttctattattttttagagtgatttattatttatcatatcatgtcattaatgtacagaaatcacttctactgagt

SEQ ID NO: 4886 - DNA, 683 bp, Zea mays
  Intron number 1 from transcript GRMZM2G083459_T01 (locus G RMZM2G083459) derived from phytozome v7.0 (chr-ID 10; pos 90762430 to 90763112)
ggtcagtgcctctcgcctctgttcctcccttagcccccgacctccgctctaggctcggtcggagttgcacgctttggatttcgaggtggtggttaggtgataggattagggtttacgtgcgccccagtttggaatgcgtgcggtaggaggatgagatctgtgcaccatagggtgtatggtgatgtaatgcagccctacgggtacctgaaaaagttggatgctgatttgcagctgttgattttggtggagattcacttgggaagaaaatggtgatttctgaagaggtagggatgtttaggaaggctatagattttggatgtgtgctgtttgagtttttttactcgtaatttcatgatagggtgatatctggtctcaggacagtgggctaagtgctagtacttctctgtcactgcacctgtacggagagctagggccctttttcttttgtaatttgtcacaattattgaattatagttgtttggtggttccttgcatgttctgggtgatgaaagtaatacaaaaaaaacctagcatgttctctttggaaacaagcttaaaataaaatgctagactgctgtggttgctttgttgatcaacatacacatttcataccacattcatgatttgttctatacgcacaatttgcagaactggagactaaaaggatattgcttgagattttc

SEQ ID NO: 4887 - DNA, 669 bp, Zea mays
  Intron number 2 from transcript GRMZM2G162966_T01 (locus G RMZM2G162966) derived from phytozome v7.0 (chr-ID 5; pos 1 62399110 to 162399778 reverse strand)
tactgctggtgtcacaggtttgcccactaatcttgattgcattttgcttcacttatctatggatttatggttctgtactacaattctaaaacctatttttgagttggatcgtttagctgtattccctaagagctttttactgaagtatctgggacatgagagaacatagttttgttcacaataatgcaaccattacatcttttttatcacaaccttgttatagcagaatatggctaaacgagtgaacaataatatacttcattcgatgatttgttaattgttatagcagtatgcaatacatatagatatagcatactcataattggagtagcaaaccatcttacttattgtttagagtgagaaaactatagacagcagaacattttgtctacaagatgacaatgtgctcgtggttgtgctccttttttgtgctttttagttgaaatctgatgctacttaaatctaactaatttctcagcagacaacttgctttctattgcactgttttctgagcacataattgactgtctctgcctttctgtttctaggtccttaatgctttgttcaacctttgcaaaattaataaaagaagacaggaacaagcagccaaaaatggaatcatccctcacttgatgaaatttgtcatgtcagactcacctctgcggcagt

SEQ ID NO: 4888 - DNA, 1058 bp, Zea mays
  Intron number 1 from transcript GRMZM2G374385_T01 (locus G RMZM2G374385) derived from phytozome v7.0 (chr-ID 5; pos 2 4947304 to 24948361)
agcacgtggagcagctcaagcggctgcagcaaaaggtttgtccctgtcgcctccggtttattgttactattacttaaaaatgatgcttaacagtgtaagtggatttttgatagttcctgaatgtgcctattcttttcttatgctttattattactggttgcccacctgagtatatgacttttaggttcgcctgtgcccttgtgctgtttgtcctgtagatacttttaaattgaatctgcaagctggtacggttgcccttgtggacagtaactattttaattgattcagaaattgattgcagtctggcaatctgctgagttaatgtagtatttgaaactgctgatagtaggtatcgtagaatgggctataaagtgactggctgcaaaatagtattagttggaccaacttccttcagaggtggatctgtgttatagagataagttgagaggtggacaattgtgtagaacgatgatgtttttctatgttcgtttcattcccaatttaaccatattgtaatggtagttatgctacaaaatgagtaaggaatgccacataataactgttttgacctaaactgctgttgcattaaatttaacatcttgcatactccaataagtgatcccttgagcttacactctaactttaaggcttgaattgtcgcctgccccattcactgattgtggaaatggcattgtcataggctcataacatttgattactcactctggcatagctttcctggtttttacttgctcaatttacattcattggttagaaacaataacattccctggtagattatttttgtatagtattggtgtcccgcttattatatctgttgcttaaatcctgaactatgttaactagggttgcacagtttagcctaaggcccacaagtagctattcgttttgagaaatatgcatttctccccttcctaatttctgtctgtctgctgctgtgctgcatgccataatatatgttggttgtttttgaggcttatgtccttttttgattttatgtaggatcctgatttctataaatatttagaagagtttga

SEQ ID NO: 4889 - DNA, 521 bp, Zea mays
  Intron number 1 from transcript GRMZM2G461557_T02 (locus G RMZM2G461557) derived from phytozome v7.0 (chr-ID 10; pos 126281843 to 126282363)
tcgacgccgacgcgcagcgcgccacggtacgtacgcgctcccggtccttccccgttccccgccgcgtgctcacgcgcttattgcgcgattgggtccgcgtcgccgccgggcgaataggaacagacgcaggctcccggtagtttcggttcttggagccgtctgcagtttcttgggcagggttcttggataatttcgggttcgcgccggccctagggtccggagttccgaatttgtgtgtgtaagatgggttctcttctcatcttctgaaatgaccatttggggaatgaacacatgcatgattgtttggggggtggtcatgtgacattcccaaaattacaaatttgaattggtttctgggagggttttatttttagagtaatgatcatactttctttttttgggtcaaacctttgtattctgaattctccacctgtcatctaggtagatgtgacagtctgaaaatgagttttctttggaaaatcccaggacaagctgaaagcagtgtcagaggcacttgggca

SEQ ID NO: 4890 - DNA, 870 bp, Zea mays
  Intron number 5 from transcript GRMZM2G092959_T01 (locus G RMZM2G092959) derived from phytozome v7.0 (chr-ID 5; pos 2 00468957 to 200469826 reverse strand)
aatcaaaggtatcatagtaatttattgatgtgatatcaggtgtgcctaacagaaattacctctcttttgaaagcttctgatcaacaactagcagcccagcaggcaaaggggcctgtagcctagtggttgcagtgaccctagatcctgtgtttgaatccccactggagcaaattccagactgggtaaaaaagatcacgtgtcgctggttccccaggtcggcacatgggtgaaccgacccgtggtggacggccctcgtgtaagaggctgatagtgggttgagcttcaaagcacatgttaatgtatgaggcccagctttcatgacttctcttggttaggctccgctgctcacggttgtgctcttcttagtgaaataccgtggggtagtcttcacacaccggccgttttttatgaacaaccagcagggatgcattagtgtcagtttattttacattatgcatggaccaagtatgcatttatatagtttgtttgtatctttaggaagaaacacagctcaaagttaccacctttatagctgttctactggtttctattgcatcacaccttgcaccgtagcgtgcctttgaggaactaccatcattgaaaacgatgttccacatgaaagtaatattgatttttccacttcttttcattgatgttttcgtgactctgttcaaaggatctagatgcacacttatcattttctttagggttagtttggaaactcaaattccctctgggattgagggaaaattagtttattttgtctccaatcccctccaacccctgaggggatttgtgttcccaaactagcccttaagataggtcaagtggagttgctgctttactagtatacatgtttttgcggcagaa

SEQ ID NO: 4891 - DNA, 696 bp, Zea mays
  Intron number 1 from transcript GRMZM2G092959_T01 (locus G RMZM2G092959) derived from phytozome v7.0 (chr-ID 5; pos 2 00476844 to 200477539 reverse strand)
cccctggaagaatttgagcgagggaaacttgccaggttgatactggatcgttgctttagcgttatatatgttcccagagattagtgtttcttcatcactattttttgcccacccaatgtttatttgaataagcatatctcttgcacaataaaggttccatattgaattaatctaatggcacttccatttttttagtttgtaacaactcacaagggatgttatggaggcccctcaaccttaaaaatttatatgatactgtgtaactattttcttcagtcgcagagctggtatttatatttaccagtgacgtctgcactaatgtggattagatgatgagtctgcagctcagtgaactacacagtagttaggacctaactccagctgcatgtctcattcagattgtgtgctgcagttgaatacttgaatatgcttcatgaactggataaattacatggacttataacacttgcatgtactggagttatgcagcacgttgatgccttattaatgcccaattgcatccattgcactgacagagtgcatatttcttgaatgtaaaatgtcatacccatgcattttaaaaaaaacaacaaaccaatcaaagttttcattacaaagttgaaagtaccataatatattctcacttgcaatttctgttcagagacagaaaaggctgattgcttggcattagttgat

SEQ ID NO: 4892 - DNA, 835 bp, Zea mays
  Intron number 1 from transcript GRMZM2G058098_T03 (locus G RMZM2G058098) derived from phytozome v7.0 (chr-ID 10; pos 143244250 to 143245084)
tcttcgggtgcttttcgaacaccggcgaggtatggaacccgatctgattgatgctggtcgtggatacgcgtgatttcgactgttgcttttcacggaatatatgatgcaccctttgctgctgctaatagatcttgcttgaggttttactcgttttactgtgcattttgtacgaccgctgacgattgaagtccagtctaagttagtttgtggtggttctggaatctcttttaataatcaagctctgggctatatttgtgattctagaaccagtaattttaaaattggtttcatgaatttgttagcatgatctaacgagggttgtatatcttgcaaaataacttaaatctattcctttctgcttttttgctgtctattatcttctgcgccagggtaataatttcagcagccatgttttttattgaaataattggtattttgctgccactgtgtgtctgtgtctataaattgcggatccatctaagtctataaatgtgggcctgacggtaattttgcgaaccccttttgtggaaatggcaaatatcagaatctctctctctctctttctttctttcttcctttcttttttgcgcaagactgtttacatgctttactgagtcaccaggtcgtagttagaagcagcctcttggcatttgtgagtggaaggctttcctgggtttatcccttttccagaccccactcatggggctgtgtccttttttactatttacatgtttctgtttgtgttttctgattgacgtttatagctgtatgctgtccatgcattcatggtagtttgatccttcacttcgtatctaaatttatttgcaggttcaaa

SEQ ID NO: 4893 - DNA, 507 bp, Zea mays
  Intron number 5 from transcript GRMZM2G082664_T01 (locus G RMZM2G082664) derived from phytozome v7.0 (chr-ID 1; pos 2 90266671 to 290267177)
ccagcccgctggttctcatctacaggtataaccacacgtctcacattgttaatttgacatagatataaacaaacagaagattattccataacttatgaacttcatcctgtacctctgatgttgtgcaagtttttgaattcatctacctgtgatttaactatgttccttttgttctgcaatataatatactgaacaaggagtcaacctcatgcacagtatcatgtcattttctgcggtaacaattggtttctacaaaattaacccaacaacaacaacaacaaagcctgctatgttgaggaaacataggcggagtttctacaaaattaacccattcaaaagaaatttcctaagcaagatcctgttctgtgaacatattgtgctgatgaatcacatccatttgtgcttcattacttgtagttttcatattttattacagttaaattatcacattcgttaatttgtcattatcttttttttgcagggcttcctccacatctggtggtcgga

SEQ ID NO: 4894 - DNA, 876 bp, Zea mays
  Intron number 2 from transcript AC195461.3_FGT002 (locus A C195461.3_FG002) derived from phytozome v7.0 (chr-ID 5; po s 86819644 to 86820519 reverse strand)
agcagcaaaaaaagggtactgttattgtctgggaggtaaccagttggcttcaactatttttaaactgtcataaagtacatctaatcttattgttgattgcgaacttataaatttataacccatgaaattctttgttgtattattattgctcgacaatcaacataacgagaatatgattgtcatccaaactaaacttgtatcacaatatgtgctttctgtttttgtataagactaccaaacattttgatttaaagatagtgctttctgtttttgtataaaatgccaaacattttgatttaaagatagatcgacttcacccacgattgcgccctaaaaattcttcaaaatgctcatctcagaaaaatgataaaactgaagttaattgatttaataaatggtacttcctccattctttttatttgttgccgtttagttcaaaaatgaactagcgggtggcaaatattcgagaacggaggtagtataacgctttgatttaaatctcagtatcttagttgttttgaagatacttctcctagcaaatttgaattcgtggagcttgaatttgtttcatatgcaaacccatatacagacccagttgttctcccaaatatctacaacacattgactgtcataactttcgtttgcaattctttttgtctccacattagcctaaataaatgacagcatgttgtttatttttgggtcaacaatcaaatatgcctttaggaaacacattcatgttccttagatcttgatctttgcaaaaagtggtgatgtaggactaaattgtgacctacctacacacttttagtactatcttttgacttctgcttatttgatgctttataaagtgtcccaccctttgctcaatcatag

SEQ ID NO: 4895 - DNA, 1006 bp, Zea mays
  Intron number 2 from transcript GRMZM2G108474_T01 (locus G RMZM2G108474) derived from phytozome v7.0 (chr-ID 5; pos 6 8021471 to 68022476 reverse strand)
tcgagaacggcgtcctgtgggaggtcgagggaaaggtatgttcgctccatcatcggatggctagcttgtgttgtgatccgatattctgatatcatttgtttgatgcagtcagtatcatgtgtttagacagtacctgtgtggttggtatgtgacctatggcgctgttaggttctttcctgcgctaggttttttagtctagatgtaatttgcttgatgtggcatgccatgtagtttatccaaactattatgctatttttagattattttagttgcctttacataccaggactcattactgacctgcagctgcaccaaaacttaattttgatgtgtgccaacttctccacatttgtaactttcttgctgtggtatgccatgtagtttacccttcgttcaaattgatgtatgctaccgttagtttggtctcattgtcttcacaggctagaacttctatgggcctgattggttgccgtatctaggcagcatggccgagcgagccaggcccgcggcagcctggctgtgcatcgcgtgagcctggctccacagatgcgcagattttggtcgcatctccagagcctggcccgagctccttttttgcatcgcgagacacaggcgctgatgcatatgcggcaaaccaaacaagcggcaaagtagcacgcgcctggttacgtggatgcaacctacaaccaaacacactacggtcgcataccgtgagcctggttggcctatatgcgggcaaccaatcaggccctatgttggttcatgagtgtaacctggaggtgcatcaacatgttttcatgcgcacccctggcctgagtgtttgtttttttctgtatgcttggtgttgtaccaacatttattggtctcccttattaagttatgtagtcatgattgtgcagcgataatactctgttttgcttaatccattacttggttagctgtttttgtgtgattgttacttatgtttgtgctggatgattgcagtgggtcacccaaggtcctgttg

SEQ ID NO: 4896 - DNA, 824 bp, Zea mays
  Intron number 2 from transcript GRMZM2G329159_T01 (locus G RMZM2G329159) derived from phytozome v7.0 (chr-ID 1; pos 1 0695723 to 10696546 reverse strand)
tccagctttgctccgtcggtctatccctagaacaggtcaatgtagaaattagagtggagcatgggatatatcccggtcgttttcaccctagggagaaggcatcgatcagattttttttgttgaggtagttggtacaggggagttggatgcagtaaatggttggaaaaaaaatgaatgtagagaaatagtattctagagagagtaaaatagaaaaaaaaatacatagtgacaatgtatggagatagctttaagttgtttggtttgttgccttccttgccacaatttatcacgtttaaggttagataagttttatcaagttagacatatgtttggtttggagatacagttatggtaagattttctcttgctatgtagatgtcatttgtcaatgacttataaaagtgttgcaagatttactttggcatgacaaacggtgacatataatttgaatctttaaacttagacactttagacaattgtaacataaaagtaggtcgaaattttttacaatataaccaaacatacccttaaaaactttcgtttgcatatgaactgaaggagattaaaagaattaaatcttttttaactagaaatgaatttaatcttcttcgatctcaaccgaacaagctcggttgtccggacgcgaaagccacacacgcacacgcctcgctaccagaaaattctttcttgcccaggggaacgggcacagcatagggccagcagccagcagccaggctcccggtcgaaattccccagcccctccgcaccgcgtccgcgtcccccgtgcagctgcccaccccctaccccaccggcaccaccgacca

SEQ ID NO: 4897 - DNA, 412 bp, Zea mays
  Intron number 1 from transcript GRMZM2G137308_T01 (locus G RMZM2G137308) derived from phytozome v7.0 (chr-ID 1; pos 2 59370259 to 259370670 reverse strand)
tcctcacatctcaccccttctcccacgatatccacgtgagcacccatttccgatcgaaccctcgtcttcctattcttttttgatttgtggtgtgaatcttttacactcctaaacctacaccggacgcggaggacttagcagtcatcagtttatttttttcccatactatgccatgtaagatttaggacatttggagtcactgcttccatcgacctccagagatctcttctgctctgttccccggcaaactgatctctggttttgatatgtgcacttacctttgatctttgaattatattattataccatcatgccttgcaaatgcattctaatctacaggaattttgctagcgcacttcactagcttacgacaagtattgattttcttttatattttctcagggtacttcag

SEQ ID NO: 4898 - DNA, 616 bp, Zea mays
  Intron number 2 from transcript GRMZM2G027741_T02 (locus G RMZM2G027741) derived from phytozome v7.0 (chr-ID 5; pos 1 99378045 to 199378660)
aggaaacatacaaggtttgcaaacacaagccttcattctgtttaccattgtttcaaccaaaccaactgcacaattcttatcttgttccagttgactcatactaccatactgcagcagtttgttttcttttgctagttcatggcttcatgccaaaagatagaagtacaatagtctgttttgttccatgatgcaagtataagaaacaatctgatttaggagcaacatgttgaaccatgtttgctttagagcagtgactgaactatccatgcttttgtagttcataatttactaacatttttattgttataattttgtacaacctgctgaactctccaagtacttgaaaacaacgccttaggcagcagtaatgtcattcctatggttgtagatttttattatattaatttactagttgttttgatttgagatttgatggaagtacatgctctacttgactattttagacatcaaatgtctacggatgtacttgtgagaacatgtccttgcacagaatgtttttgtactttagtaaccaagttcctgaaatttacattgtataacatggtcatttctatgtatagagcttgaaatcaagaggagtgcggtttcctggacg

SEQ ID NO: 4899 - DNA, 801 bp, Zea mays
  Intron number 2 from transcript GRMZM2G075683_T02 (locus G RMZM2G075683) derived from phytozome v7.0 (chr-ID 5; pos 1 86115062 to 186115862)
gtcaacgtacagagcggcgaggaggtggctatcaagttggtatgagatagtttgatactgttcgtggaccatttttttttctccctatcgtggaaatacatgcctgacattcggcattagtttgttccatatgcaaacatatatttggccaaccattgctagaaccgtttccccgaagaattctcgtgtagattatggcatgacataattatgaaaatgaatggtgctgtgcatgtaattgctttcaaagatactgacatggttctgagttatatttttacatgactaataacaagactttcaaaccgtttcttggttgtccatgcgaattgacctgtggattcagtccaaatcatggttctgttacctttcattagtgtggctgtataacagctcctccttttttttagggaaaagaagtaacgagtcatatttcatagggccattttgaacatatgaaatagcacttgcagaaagttgatttatggtggtccgtgataagagaactttaaattttacattttatcctgtatgtatgacgtggattatggattgactaaagcaaaaaaaagtgctatgggaaaatttaggttatattgctctatatgtaatggatttgtagcctgaacatatagtattacgttttgagacagaatgaggttagccattttcaagcaatatgatctttcagtcttagtcttggtagtacccctttcagcctcaaggcacactacctgaccgtttttcgtcatctcatgtttaccaggaatctgtaaaatcaaggcatcctcagcttcatta

SEQ ID NO: 4900 - DNA, 714 bp, Zea mays
  Intron number 1 from transcript GRMZM2G404767_T01 (locus G RMZM2G404767) derived from phytozome v7.0 (chr-ID 5; pos 1 75636321 to 175637034)
tcgagaggagcggagatccatccatccggtcgtcggtcggtctcgtcgtctgtcgttggtgagtgacctccagctgctttgtttacctggatagataaattttcctatctgttggttttgttagtccaatccaatctcccagatttttcttcgttccttcgtcggttcagttcacttgccgatttgtgtgctgcgtggtgccacacagctaatctatcgagtccaacacaatccgaccccgcccgtggttcatcagcgcgcaaaatccgcccatctcagttggcgccgcgccgtagaagttagttagttgctggtgcccaattaagtcgaaatcagattcccctgagccacgtcatattgaggtcgaaatcagattctggcagttattgatctcttatggagtaaggaaaatttctacgattcgtttgagttttaccagaactggaagttgtggtaaatcattaggttaagtggatgagttcatttttagtgtcaaatagtcatgtgtggttacagggaattcattatatgaactgattgcggacattagggtgtttgtgccctgccatacactgatacactatcatctatcatattgccttctgatggaaatgctcggtctattcactatcactcacagaatttgctcacgatgttcttgaaggagcaagctggaactgatatgattggcctattggtgtcttgtaggctgta

SEQ ID NO: 4901 - DNA, 871 bp, Zea mays
  Intron number 1 from transcript GRMZM2G145870_T01 (locus G RMZM2G145870) derived from phytozome v7.0 (chr-ID 10; pos 69432583 to 69433453 reverse strand)
gcgcccgctcccgcgcgctccgtgctggccacacggtacgccctgctgcatcctcttccattggtttgtttggtttctccactctgatgtcgcggatacgatgtggaggtttcctgttttcttggtacgattttgtcacggaccttgatgtccaggcaagaatcactgaacaatgtaccaagatttatagaagcggagagaaatcggagagaattagtgtgcgtttgtttgggattataatctgtctagattatataatgtaacatctttagacgacaggcggcaataaactggagacaggcagggacagaggaggaaggggatgtttggtttctagggactaatttttagtccttctaatttaatcttttttagtttctaaattgttaaatacgaaaaactatagtgactaaaatggaataaaatggagagataaaccaaacacccccgaagatgggctcggcagttctcttgttctgttcgatcgatgccctctgcctgacactcccagctccttttgtagctgcacacttcactaatctgagcttaactggcagctcagtccatggtaggcccatttgacagcccagtctgtgaccgatttcgtatccttttccccattcgctgagcacgattttgggtttcccactttctctatgtgtcgttgggtttcgtctttacttgtagtaatcaccaactcaagacacaatctttgcaccatttcgcctgccccgtatggaatgcctatttgttattttatcagtaaaatcttgcacataaatactgagttaatatgcttcatggtgcactttgatacactttttttgtttatttaggactcaatccttgaggtgctggcacaggacgatat

SEQ ID NO: 4902 - DNA, 544 bp, Zea mays
  Intron number 3 from transcript GRMZM2G010745_T04 (locus G RMZM2G010745) derived from phytozome v7.0 (chr-ID 5; pos 1 96788332 to 196788875)
cattgcaggtaaagcatgatctttctatttactaagtctagtgctaattcagtttgtataaatttttcatgcattgtgtgtctctttgctgaacggcattaacatttttaatttctttgtatatggtgctattccacattattagaggcctttcttttaagaaaagacattattagaagccaattggaattgtagaagaattcattactttggcatagcgagaaaaaatatttctgatatttaaaactctaatgtcaaaatatagattcttactaactcaaatataaagtagttagcagcagataaagatagtgcacagagtaaaaggaagtatctttatttgttaaattttggttgattcttttatggatgattgattcgttttgtattaaagaattgctcatttttttccttgaacaaaaatcttcttatttcagttgttcatatgtttacattgagtatcctgttattatattcaagacattctgatggaattattctgtcttcagggttttctgtggttgtggctgtggtggaatccaaa

SEQ ID NO: 4903 - DNA, 1004 bp, Zea mays
  Intron number 3 from transcript GRMZM2G009785_T05 (locus G RMZM2G009785) derived from phytozome v7.0 (chr-ID 5; pos 1 33504344 to 133505347)
agtcaaccccaccgcaaggggaggtgccccctcaggtagatgttttatggctcttatgtcttcttttgaaatctaaggactcataacatgatatgaagtactttgcactacctagagctccttactgaaccacaaaacacattggatggcatgtccttagctacttcatatctgtctatcaaggggtacagtagccattagggaatcattgtttgtttgttataatttaacttggaagttgtcgaagtgctatatctttgattttgataattgtattggctacatatgcttatataaacatcttgtttacttttaagtacaaaaagtatgatatcattcatgcttcaatgccattcattttattttttggatgaagatactttcaggaacacgtgtctccaatttaagtattgattctatccattaaggcaaaagggcctctaactaagttggttaggtggtctgagtagaactcctcaggtcctgagttcgactccccgtgggagcgaactttaggttgaggttaaaaaaattccctcatctggcccacgccaaagcacaagtctaaggcctggtcctggtcgcagtcgttctcacgtgggctaaggtgccgccgtgtatgggtgggacaggggttcgggagttttctcgatctgtgtgaggtcttattcttaatgaaatgtccgggggctgtcttatcccccgtaggtcgagtttttttatgctgtccattaagtatcctttgtccaaaaaaaagttccttgcaaagatgggtttccattgatatgtacaattgtcaattgtgatccttcaatatcactatatttcaattaaataatgaccagggaatatgaaatttcctgttctcttgtttgtacatgatatttgatagtctgctggtttattgttttattctatcaaattttttaacatgtaaaagggttctcactggatactcagcggttgtaggatttctctaggcgtgttttggaagggttccaagt

SEQ ID NO: 4904 - DNA, 847 bp, Zea mays
  Intron number 1 from transcript GRMZM2G078396_T01 (locus G RMZM2G078396) derived from phytozome v7.0 (chr-ID 5; pos 2 15478665 to 215479511)
tcgaagcgaggtaattaccatgcccccttctcactcgatcttctcgtgtatctttcggcgcttgtgctgctgtttttaatcgttcaggatatatgctgagaattttttctgatgcgcgacagcgcgagtccttgtatttggaagtcatcgtaaacaagtagatcatctgatgtcgcagaaaatgggctcgggacgagtgatctttttacacgaattattctgaattttgatgccacgatcatgagtttgatacgtagttagatctgaggttagacgttgagctttgtggtttagatgttagttggtttattacggatgtcaaatctatatatttgattgcagttctaatgcttcaagtgtcacacttccttacttgcagttgcagtcagatccacacttggattgaaaaatgatgctatttattagattattagatgactggtggcagctacgtttagccaatattgttgttaaatgattacctgctaccaatcctccccagtgttctctttaatgtgtaaagagttaatcgaattgtcacatgatgttttcctcttttgtatgcgaagagctaacctggttggttttaagtgaagcccagcatatcacatttctcagcctaggctttctgtattttatcatttactcctacttaggtttctctattacttgacaatcagatgaaagctctctttaaacaaacttggcaatgtgtacaattcatttcacatctatatgctttaaatgctgcttgttatctatagttcacacttcacaatgatgcattggagttctgcttgtgttttgaactgcagggcgtggaggttcggctggtaacaagttccgg

SEQ ID NO: 4905 - DNA, 917 bp, Zea mays
  Intron number 2 from transcript GRMZM2G335978_T01 (locus G RMZM2G335978) derived from phytozome v7.0 (chr-ID 5; pos 2 08061716 to 208062632)
agtgtgcccctttgtctagctaccgtggaaatctggtatgcatcccctttgtttagtagcttgatgttaatatctgaagatgtcgtgttgtaaaacagctgtcagcttgagttgggacctaagagaatctgtttttttttcaaagatatatgtggcttgttcatgtaaaattgctggtgcggatgacgacatgttccttgacatttctattacataatgcacaaaccttggtcgaagaaactaatacgtgccatgtagtttgctttaatttccattgactactaacatcaccgtcaccgatctatgatatgtaaacttcttatcgtgtctctgcagtcatcttcagtctgaatttcactatagtcactgttcttggccacatacaagtgtggcgtaaagtatgcacagttgcacaccattatgtgaccctgaaataccacacgaaaatatcatctacgttttgatggaaaataatttctccatcattcgcgtacagctgcaattttggcagttcaattaaatttgtactaccaccaaaatggcacgtgggtcatgctacaaatctcgtgtaatggtctagtgtaagctgaacaagcacaactacaattcattgccgattttagctattacctgtgtgactggcttgcaagtttcatattcatactggctagtttttgacttaggagtacaagtggcaagtacaagtggtggtgtcatgtgtgaactttggttctcttcaattttgttcattttaagtttcttttatttcttcgtaacaagtgcaaaaacaaaggaaactaccatattttaaagcatttaagtgcttatttccagtgattgatcggcaggtgctccgtcgtaaatggagcatctattatgcaggatagagatcttggaatatacaagcctgccgaatc

SEQ ID NO: 4906 - DNA, 584 bp, Zea mays
  Intron number 1 from transcript GRMZM2G159739_T01 (locus G RMZM2G159739) derived from phytozome v7.0 (chr-ID 5; pos 1 32713217 to 132713800)
cgcgaattgagagaaccggcccaagtcaagatctggtgttttttttttctttttttgtttttcttttccattttctatttaaacttcaaatttgtttctagttccaagttcaaatccaaattcaaattcaactcctatttttgaacttcaaatttcctagtgaatataacttctactatttacaatattattatttattagtttcttgttattcatttagggaaggaataaatggtttcatttaaatttctcttctcattcctttttatgtttttatttaaaagtggagatcaagtttatgttttccataaaatgcattaccacaaattcatcatcaagagatcaaccttttctttatcaatttattagttacttaactaatttaatattattatttgaatatgaagagggggaatcctaatagatttcaaaggtcttcaaaaattctcagcacacttattatatatacttttatatctttattttatgatttcatgatatattattttattcttttatattttttctaccaaattttgggctttacagcgtgcgaccctggccctcggcagcgcggcccctgc

SEQ ID NO: 4907 - DNA, 1028 bp, Zea mays
  Intron number 2 from transcript AC234520.1_FGT005 (locus A C234520.1_FG005) derived from phytozome v7.0 (chr-ID 1; po s 164490398 to 164491425)
tggacgtcctgtaccgcgccggcgagacacaccaggtagagagaggctgtcactcgcttgggcaccatctccccccatcccctcccccaactatagtggtttgtttggtcatttccgtgttcgttcactgacactgctcgacttcttcagagcgtcgccagctactgccctcgcttggtatcagtcggttctcgaggtaatggattgatttttgccatgttcttccttcttcattctgcgtgctcattagtatttctctgtcgcggtcgtgaaaataacatggtgtgccatctgcagggtctcttggctcgttaagttcctctggcactctaggttcgagcagtgcagctgcagatgagcccaacatcttcacatggcaagtgatgttctaactcctatcacttgtacaatttaattctatgttccgttttctccttactaaatgcttcaagcgtcatcgattcttggcgtcccacgtttgtgaactgaagatgattaggcagtagttcggtgtagtttgggttgttttgagcaatggggctaaagatacactagctgcagactaaagctttacatagacaaaaccagttgcttgtaaaattgtactctgttcaaaatcttgagttttctatttatataacttttgcagtgcagctaaatatgtacattatgactagatacatagtaaatacactatgactagatagatagtagatacatagtacatactatgtatctagaaaaaccaaaacagtttataatttggaagggggagcataatgctgttgctgccagtgccagaagacacaatttatcagtcttagcctcttagaattataatccttgagttctctaaggatgcattgcatacactcatctagaagcttgagaattgcttcatggcatctgcctattgttggaaaatcgtccaacttttgccttaccattgcctgttgttgaaagtgttgcttttgtactattgatgctatgagatgtatgttagtatagtggtgatttaattctgagtg

SEQ ID NO: 4908 - DNA, 1042 bp, Zea mays
  Intron number 1 from transcript GRMZM5G828460_T01 (locus G RMZM5G828460) derived from phytozome v7.0 (chr-ID 5; pos 1 62237481 to 162238522)
ggggacagcacaacattttggctgtgcggatactggtacgttattgcaagaccaaaaattgccatctacttatttataatatcctgtccaagtcatttgtggcatcacaatatttatatgtatcttactccacatgctgaatgtaatcatctttgaaaaaaataatactcaacatttgtaaccctattaaaaaatgtagtgaaattatatttacaagggtatatccaaaattttgttgcaagaataaatttctaaaattgtacccaaaatttatgtagacaagaaacgtccttagatggagttgtttcttttgcatgtgtatttagtggattgagctttgtgcatcacttgcttgttctgctattatagataatattataatctaaacctccaattgattaaacatcagtcttttattctgttctttcccacgagagtcaccatgcataaatattttgagatcttttattgttggctgtttttattattcctgttcacatttgtttgtttaaactatttatttcatcaaaacatattcttcatccatatgatggctttttatgccgactgaagcaggtaaatgaactcttataggaagaaaatgtgagaactctagtctccctgataggctgttcaagtgttatagagcattgttatgacttcgctggtcgctgcaaaatttgatgttaatctgtgcattctaattggcatatacttacaaaacttaatgttggaaggcatattatattttgatgcttgacactttataagtatgagaatggatgtagtagtacctgtttaatattctgtggttttaacgaaaatgactgttacatcttgtatcatctacaatggactctttattcaatacgaccaaattaatttctctattttacaaccaccatgttattaacaatgtgattgaaatattaaatttatcacttactagggtttctagcctgtcaccatatttatcttttcttattcttgggatgaaagtgctaaaagtattcttttacctttttacaggcttttctcgacc

SEQ ID NO: 4909 - DNA, 1017 bp, Zea mays
  Intron number 2 from transcript GRMZM2G099352_T03 (locus G RMZM2G099352) derived from phytozome v7.0 (chr-ID 10; pos 75696418 to 75697434)
cgttacaagctcctcggtggccttgccgtccgcaggtacaacatgacaagaccccgttccttctgctagctgtaatttgctaattttgatgtggttgctagttcatatatgcttgcgtttagttgcatccaggtggcgcctaggcaggtgaaaattgatttgtagctagcgaatattacctgtaaatatcaaacattggtattattaggagatgataagcctataaatcgtttataatctggttataagatggctttctactcgactcatacttccaaatcgagacattgcacctgtgatttatgttctgccttcagtccttgttggtgggatattgtactggtgcataaaggaaatgttgctccttcaggcagcgtcggccagacaaccgatgagacagatccacagataaatgactaatatcatgttgtttgtctactaaatctgtctcacatttcttaatctccgcagacccaatagctcagaaaccaagattacaactttattggcctaagtggtcttatttctatagtaaatgtgctgactgtaataatttcatggtttacaaatattgtttcatcgctgacgtttactagttatctgaatatattaggtacattttttttctctttttgcacctatatttatttttacctgccatcttttatgatggtgtgtacttaagttggtgcatagaggaaatgctgctcttgtagcagcggcggccagacaaccgttgagagatggatccacagatgaacaatctttctgctgtttgtctactaattctatctcacattgttgatacaaatggttatcttcgcctcattaattttcttctctcctttgtctttctttatatgctatcgatttgtggcttccgctaatatgcttttcttggataatagaatgatgcctaggattttaatatgtgagttgtcaagttttacagttagtccagttcccgctactgacacgcgtgtttcctggccagggcttgctacggtgttcttcgtt

SEQ ID NO: 4910 - DNA, 498 bp, Zea mays
  Intron number 2 from transcript GRMZM2G174830_T03 (locus G RMZM2G174830) derived from phytozome v7.0 (chr-ID 10; pos 24967685 to 24968182 reverse strand)
tttggtttctcgcggcgccgggtgaaacttggaaggtgaatgttatgcacagttccttgatttcatcatgtgatgtttttccccactcttttttaaaaaaagaagaagatcggtgcctgctgtgtgatgatgacaaggggagcttgctagcgtgaaatttgatctcttgtgtagttgtgcatcttttgagttttggcagttaaattagcacttttcttccagtacatatcagacttggagattttcttcagagattttttttccttttactgactaccaaacatctatggacacagtagcactgttcataaaactgatgggatacattgtaaattgatgaagtcatacggcttcatgaagctcggtcggcattgcattcaattttatgctaatcctatttccacatttgctttgactgctttatccattgtcttgagtttttttttttgcttttctttttcaggtcgaagggtgacccaagtgatcctttgaacagct

SEQ ID NO: 4911 - DNA, 593 bp, Zea mays
  Intron number 4 from transcript GRMZM2G162776_T03 (locus G RMZM2G162776) derived from phytozome v7.0 (chr-ID 1; pos 1 4895553 to 14896145 reverse strand)
ggggcaatcgttggtgccattccaccacttttggggtaagttactgaccgtttctggtagatgcaatttgagtagttgttgtgtaatgacacactatatattttctgcatagaagaaaatatgtaactgacaatagttggtctgtatagaaggaaaggttctctcagtagcattcaaattgtgaatttgattccactttgtaaatgcatgaagcacagtccctactatagttgaacttgtttctctggggtgcttggagcattggactatggtgtatagctgtacaagcgaaagtatgacatgcatttgatatgctctcctaagaatcaagttgtctattgttagtcagggcatatcatgactgcattaaataagcttgatggaatatgaatgactctgaaatatctcatataaatagtttctggaaacattcaagtgtgtttggtcaattcttgctgtagagtattttgttgtgatcctgtttgatgtgttggatatttcaatcgagctgtatacatcttttgtaagatgtgaccctttactgtctcttcctctgtacaggtgggcggcagcttcaactgaactgtcactaa

SEQ ID NO: 4912 - DNA, 781 bp, Zea mays
  Intron number 2 from transcript GRMZM2G174168_T01 (locus G RMZM2G174168) derived from phytozome v7.0 (chr-ID 1; pos 2 29031919 to 229032699)
agcttgtggctagctggaggaagaggtgaggagatgtatgatctgaatgggagtgggtagtggtggtggcctggcgacggacagcagtgcagagtgacgaccttgctgctgttgtgtcatggcgagagtgctttagtagcttctttatttgttttgaccagtctataaaataaacaaagaatcattagcaattatgtaaccacttgcttgtggattgtggtaattatgtcatatacgataaaacctgttagatatgtcacatatatgcttgttgcttgaaatactaacagcacaatgcatttattaaggtgccgtttggttcacatatttgtaacgtaatgggtaacaaataacgttaaatcatgtttgttttagtccaaccgtaatcagataccacactaaaatttgataccagcctattcaaatttgttaccgccagtaatcgagccgaaaccattaccattaccatttgcgttacattttttgaaccaaacagcacctaagttctactacccttctgttcttcctattgaatgttgcccccttctgtttgtcctcttcaaactcagatcagcaaagcttctattttaatactaggagaatattataatatactgtatggattagtaatgctttcttatgtgcttaaatttcatttcttgttatttaatttaatagggaaaataacaatctttgaacctctattgcatttcttgttagttaatacgaatgtacatgtttgtatgatttcatatctagcttgcatcggcgtacaaggttg

SEQ ID NO: 4913 - DNA, 450 bp, Zea mays
  Intron number 3 from transcript AC191620.3_FGT001 (locus A C191620.3_FG001) derived from phytozome v7.0 (chr-ID 1; po s 163170835 to 163171284)
ctgctaggaaggttatgggtgcaaagcagctggccgaagctatcggctacaatgaacaaattggatacccttcggggtccaccatcttcagggaacggtcggatgactatctatattgctgctcggacaacctagagaaagaagtatgtcgtcatatggcgaataatattggttttccgaagctagaggctaggctctcaaccatgttctccgaagatttctctgactacctggattacaaaattagttaactttttttacttttcatagggtttgttttttagcaaggctctaaagaagaaaagatacattgagggaaagatgccaaaaaaagagatagttaaactcagatctgatgtatccgggcttcagttcgactctgaagagaaggagaaatcttttaagattttgtaaaaagattttattgaaagtccaaccaaagttcaggct

SEQ ID NO: 4914 - DNA, 830 bp, Zea mays
  Intron number 2 from transcript GRMZM2G415330_T01 (locus G RMZM2G415330) derived from phytozome v7.0 (chr-ID 1; pos 6 3018515 to 63019344)
tttttgtccttttcagatttagtataggtaagctttttttgcttggacagtctatttctctttgcttcgacagtttcttttagattcaggtaggccacctttctttgcttagtgtgtggtcgattttgacacgtttttcagattaatcatagtttttattcattcttggcatgcttttgtctcttttttcagattagtctttattcatccttgacatatttttgacttttttcagatttagattcagtacatctaagctttctttgcttggacagtctatttctctttgcttggatagttttttagattcaagtgacttggtgcggttcattttgttcttagtatgtttagatgtttttgattctgaactttccatggtgctattcgtagaaatcctggattaaacaccatgatggtgaatttctcgggggggggggggggcatcaattggaccacctgattttctcttctttgatatcaagttttaccatggaaaaagttcaaatgttttttattcttgtgcaaagagttgttgtgacaaagtgctctattagtattagactattagtacaacataggcatcttttgctcctcccctgttctcccagctccaaagctcagaattctgctagccagctaggaatagtttaggagtgtcgtccaagtaacttaagcatcatttcctactcctcggaggcatggagtctccagaatcgtgtaccatttctatctaattgtttagtgaagttgcttctgataagcgtgaacagcaaaaaagtactcttgtggttgtaggtgcaagactcgaacgccgcgctctacagccggca

SEQ ID NO: 4915 - DNA, 684 bp, Zea mays
  Intron number 2 from transcript GRMZM2G145061_T04 (locus G RMZM2G145061) derived from phytozome v7.0 (chr-ID 5; pos 2 16553636 to 216554319)
gggagcccagggcatttgtctaccacaacttcctcgtaagcaactttaaattgcaaattccaccaccgcggtcgctctgtctgttcgtcttcgtatcatcaaagttattattcgcacaatgttcctgtgcgtgcatgcatgcttgctcatcttcgcctgtcatatgattcccatgaccgagtggattgaaccatgagctgtgtggtagtacagttggatctgggaatacaataatggtgctcagcttatgacttacggatgggttttgccatggacttatgaattgggcaggctagtactgtatgtgttactctatgggccatcttaaactaaacaatattaaatgcagtggaagaaccacatgcatcgtcttttgcttcttgttgtgcgtcactattttgaaatgtgagtacacctgacttgataaataccatgtttaggttcacctggttggttatgcaattccatatgtaccgtcacttggaaaaaaaaacccagatgctacatatgtgtttgattgttcatagttacgcatactatacaatctatatacccagcatctattaacttctccccacccccaccaacacagaaacttttaataacttttagttcataacctgatgtcaatgattatctgactatgatgattgctgatattttgttcttttccttagtctaagg

SEQ ID NO: 4916 - DNA, 409 bp, Zea mays
  Intron number 2 from transcript GRMZM2G011050_T02 (locus G RMZM2G011050) derived from phytozome v7.0 (chr-ID 5; pos 1 6557165 to 16557573)
ggagaaggttagtttggatgaccatatattctgaaatagttgatttaactcgattgggcatgccaatacattcaacaaattttgtctataactgaatgtagctgggactacttggtgtaacctgttagcccctttgatcttattgtgcacacagaaaaaagataactaattttatgagataattccttgcctttgtttgcaaaagtactttggccgataagctggtgttgactaatcattgtatgttgattatgtattcaattcagcatggagttcagtttacttgcatactggctaccatgtatacagaatgctagtgtctgctgacacgttcttttttgcttgttttttgtttgctcttctcaaaaatatagtctacaggaatcagtggtcttctccgctacgctcc

SEQ ID NO: 4917 - DNA, 613 bp, Zea mays
  Intron number 1 from transcript GRMZM2G172642_T01 (locus G RMZM2G172642) derived from phytozome v7.0 (chr-ID 10; pos 80315018 to 80315630)
acctcaccgtggagcccctcggacgaccgcagaaggttcgtacttgtcgctaccacctctgcctcgacccatctctctccttcgtgttctctggctgtctgaaagttttcgatttagaccaccggggaaaaagtttttggtttggaaatttttacgtgggttttctctctctctctctagtttcacctcactcatggtcatgggtttgtaagatcttgatcctacggggaaaatgatttatcctttgttttatcttcttcgtggtcggatggtcgcttaattcgtttgcggtttctttgtcctaaaaatgattcgtaacgctagctcgcgttcctccggaaataaatctgccgtcgacgctgcaatgattcttttgtggtcgtgatacgcgcgcgtgttctccacttctttggagaaattttatttgattctggcacatttcttgcaccgtgtgcttgtttaaagatcactcttttgtgaaccatttcaaaggccaaagacgcataagtttttttttcttcttcaaacaatcaatatgcatgagatgcgttttcttttcttttgtttttcttgttcaggtgattgcgataaacaaccagttcccgggtcctct

SEQ ID NO: 4918 - DNA, 902 bp, Zea mays
  Intron number 1 from transcript GRMZM2G010669_T03 (locus G RMZM2G010669) derived from phytozome v7.0 (chr-ID 10; pos 30864627 to 30865528)
ggaaacaactccccttttctgtgcttcaagttgttgtaaggaaaaccatgccgactagcttctctgctgactgctacttggataatatgcttcttatttgtttatcacactcgatttccctttttcctgctttctatatgtatgtgtatccatgggctgcgtttccctgcgttactaatatttgattcttttcttctaatgagatttttccagttctcgtctgcttcttgcttaatttgccataatctaattaacttgaccccagattatattcttggctacctacaatgttctaaagattctttgctagattttgttgcttcttttcgcatctgatcctttatctgcatccaatcgatccacaagtgttcttccagttgaaggagttggacgaagatgagctttctgtttagggaaaaaacaagcagctccttattattgttcatcccatttgctgggtttacgttgtttagtttcctttctgttttagcttattttcttccatctagctttgcgccgaatgaacgaactcgtaaatcttgtgttcctgtgtggctgctttcgttagatctctcggctatgtctatatgatcgtcttggccagcatctctgggttcttttcgcggccgagaggaaacttactaactgatcgagtgtgccaggcatcaatctgtcgaatcgtgactcgtcgctttttcatgtcttcagattttgtccatctgtcaaatcatgtggaaaaattggcatatcttcttgtattctcttctgtcctttttaatgcctccagcggattaatttctagctagttccgttccattgatctgccttcagataatataacttaaattctcgctttcttatgcaagaactaaattacttgcatttcagctgagatctccagc

SEQ ID NO: 4919 - DNA, 866 bp, Zea mays
  Intron number 1 from transcript GRMZM2G454571_T01 (locus G RMZM2G454571) derived from phytozome v7.0 (chr-ID 1; pos 1 50934240 to 150935105)
cgcccatcgactgcctcgtcgacgccgccgaccaggtggctgtagtcactggaggacgaccgacgctgatgaaggggagagagaaggggagcaactcaagcacttgctgtttgacagactcgaggtaggagctagccacggaaagggaagaagcagaggcagtgacaacggttttgattggccaccggctcttattgaagaacacagctgcggcgagctgggatggatcaagcacttgcgtgagagttcttcgcgcagggctggagtgctacttccagtattgcttgcagctcgaggagttgatgagatgcaacggcggaatgccaaggtgatttcttgtatgctatgcaaacatgcataaaacattgtatataggtgattcccattacgtaattaggctatatggttcgttgctagctacacagtacaaataaatcaactgggttctctataaatcaatagtcatgagcctggggttgtgttatccacttttggttaatggcaagtaataatcttatcataattagctagtgttgtttgtcaatttttcatatatactcgtgctaatgatatttgttgcttcattctttacaattatgagacattttatatttatatatatatattttttggttatgcatatatattggtttttagtgtatatatattatttaagtacataacattaaaaaaccaaaacatctttgagtttttctttggcatatgctatcactttggaactgtaattaaccagtgcttactgctttcaggttctctttccagatcacaatttaattatttaattttttgtttattttttatcatttaaagattctaggagttgggaagaccacttctcaacaaga

SEQ ID NO: 4920 - DNA, 963 bp, Zea mays
  Intron number 1 from transcript GRMZM2G152466_T01 (locus G RMZM2G152466) derived from phytozome v7.0 (chr-ID 5; pos 9 473748 to 9474710 reverse strand)
gcattcaggtaacgaaccgtccatttccactcctgttctcgcgttgttgaggtagatctgtacggatctgtaccgtcacatacatgtagatctataatcggtatggggggatttcgtcgttcatgtgtgcctgatttggtgtggctgaatcgcggaagaaatggtatttcagatcgttagatctgtacggatctgcttgtatgtgactgtggctacccagatccccgtttgctatgtctgaaccgtagatccgttagaatggtgtggttacaattgtttttaactggaattttgatacgtagcatctgaatagagatcaccccgaaattgcacattattttccattatcaatctagtagttaggtatcgtaattgttgttggttttgcctatgtgttgtagatctgaacgccctgaagtcgtttaaatgtactgtaaatctggatctgtaaattttaataggccattttcttattcacagcttatatgtcagccttgatacagatacagtgcattgtgcgtttaatgttagtttgatgtacatcatttcgatctgttaatagatccgcaaaaaaaattgtacacattggcgttaggcacgtaatccatttagattttactgtttagatctgttagaaatgggatggaagatgccatgctgtttattaactgtttagatccattttgattttactgtttagatctgttagaaatgggatggaagatgctatactgtttagatctgcaggataaatgttgatgattatttgcatgtttacaatctatgaatagttattcgaaacatggccattggtgcacgcgctgctgccacttttagatcgtgatgatctgtctggtgtactagtggcatgtagtgtttacgcttctaatgcatttgaattatatgttcgacttttgtaagttgcataaataatgcggctatgactgttttctattcaggctg

SEQ ID NO: 4921 - DNA, 964 bp, Zea mays
  Intron number 4 from transcript GRMZM2G085747_T03 (locus G RMZM2G085747) derived from phytozome v7.0 (chr-ID 5; pos 2 3901021 to 23901984 reverse strand)
atttacaactggccagcagagaaggtatagctgaaagtgctgtctaaatgcacgttttcaagtaatgcctctagtgtagcgattaagattgagattatttgagtgtgggttcaactaatgagatctgaaaccgaaccataacatttgattgatactagtggtttcctagaaccgtactgcatgctactccatcccaaattataatacgttttggcttttgcgatggagggacgagtgtattttaatatgtcatcagccaatgcataatgacagttacacagtaatttgtatttaaacatattgttattttttgtgttaaacctattatgcttagggaatgtttttggtttctagggactattttttagtccctccattttatcccattttagtcactaaattaccaaataaggaaactactttattttagtttccatatttggcaatttagggactaaaatagaataaaatgaagggactaaaatttagtccctagaaaccaaacaccccctagtgtcttaatgtttagagaccattgaagtaaggccctgtttggttcctttagtcactagactaaattttagtgactaaagtttagtcgataaagtactccgtttgtttacaatgactaaaccggactaaagagcattaattgctgtgaataatgactattttatccctattaattaatagatgtttgctataagaagaaagtaagagggcaaataaggtaaaaatactactttagtcccttttagtcacctccttggtgactaaagaactaaagtttagttacccactttagtcatcatgtttgcttctttagggactaaaagtgactaaactttagtcactaaactttagtcataccaaaccaaacggggcctaatatgtcaatatgcagcatgcattcttccaattctggctgtatcatgcaagtggttgacacttttttcaggttgac

SEQ ID NO: 4922 - DNA, 816 bp, Zea mays
  Intron number 1 from transcript GRMZM2G152929_T01 (locus G RMZM2G152929) derived from phytozome v7.0 (chr-ID 5; pos 7 4286369 to 74287184)
agggtatgtaatgatgattccatctcgccccctctccctcttccggctcccttccttcccgattcggttgcttgctctgcctgtctccttgctcaagtaggctggctgctggctctgccaactcctaggctcctgctctagtttctccgcggattgaaaaagaaatgttttaggactgctggcgccggtactgcgcgaggatgttgttgacggggatgttccattgtcagaggtagagcttcgatccgagttcttggttttgtatcggggagtggtatgtgaccagggatccgttgtctaggattatactgttggtcttgattacatggctctttagcttcggttattgacttgtgccatgcagaagcctatcgatttcccaattcggtgcttgctcactatatcgccctcgtctctgcatgcgtgccctaaataaaactataccaccctagtccctagcagcaaagtgcgaatttttagatgaattcaagtggttggagatagcactcaaggaatactgggtacagccttccgaccagctgattttgagctgaaagatgagtcatcgaccagaattccagtgattctagctaaaaacatagatgttccatatcctccttattaagtcaaacaaaccattccaccaactcttcttcaccggtttttttctttttttttctgacaagagaaacatctctgcttatagatagcgctcttttattcatagtataatcctccatcagttccaacctctctttttgttagcgcttacctaagtctgtcacttaccgtgttattaccctcttcaaggttgtg

SEQ ID NO: 4923 - DNA, 978 bp, Zea mays
  Intron number 1 from transcript GRMZM2G120035_T01 (locus G RMZM2G120035) derived from phytozome v7.0 (chr-ID 5; pos 1 99003052 to 199004029)
ctcccccgcaacctccaggagctccaagtcctcacgtaatccaaccctctccattcgttatttgatctaatttgataccctcaaggcccaagccaatttttcacttttgtttaaattttagaattgttttgttttcctcccttttgtgatttaaagcttaacaaatggcctaaatcctacttcgaccgttctaattaacccgtcagtctagcaagacaaacagatatgcgatcttcaagctgttctttgttgggtcgcattggtagattgccagtgtaggcgtatcttgtagcaaaaaaaaaaaactgctgtgctccttgtcatgtttaatatggccaagttatattattcagcaatacagtataggtagaatgcgaatttataacatgtttatccaaatccaagtaggttcatgcactttgttgtgtgtggtccccttcattcattgaaaaaaataataaattccgtaattttcggggtcggtggagtttgcaatcctttcttttcgatatttggtttctgaccagctgtaactgtccgtgtcgtatgttttgaacctgttcacagcgtgttttgtggtgtgtccgtgcgtgcctttctgttagctcacacagcacgttgtactcttgcgtacacacgtgagcacatcttccttgtcatcatttataagttaacaaatgttgaagtcgctgatatttgtaaggtcagatcaccagtaaatgtagaatacagcgctacagttttgattcttttttgtcagttcagcagtaaagtctcggtacatctttgtttcctgatgaagttatcatctgtcagtacaatcgagcatctgttactcggtagtcggtatgagttcagagtgttgccaatatgtttctgtaggattatgtatgtttcagttccaatgtctctaactgtggaaagtggatctcctgccttgcagtgtccatctggagggctacagcagtgactacacca

SEQ ID NO: 4924 - DNA, 694 bp, Zea mays
  Intron number 3 from transcript AC209835.4_FGT004 (locus A C209835.4_FG004) derived from phytozome v7.0 (chr-ID 5; po s 21886122 to 21886815 reverse strand)
ggcaaggtactttgcagggcctgtcgtcatgaatttctttctgacaacagattggttcaacttgttttcttgccattagccataattacataaaactgtttttaatgaattgttattcagttttgcgtcacaatttccatgttctcgcatgaatatgtagctctgcattggccttgaaatcttatcgaggtcttcactttggactaaggaattagaaaagagtggatgaatagggtagggagtaatttctttgtctacttgtatagtgagctgtgtaaaatctcattactttaaccactccaatagctgttagctttgcacaccagtttggcatgttggacccatggatcagctttgcgtgacgacacaacatgcaacattatataacacctaaaacccatgcaagatcagtggctgacatctagaatccacccacagcttctcatcttttcaagatctcttatctatttagagagcatgattggcctttttgtcttctactccattcgttactcttttgtataaaatgtttgatgcgcatttttttagttctgattttgtttttgatgaatgatgatatgctcatttcaagttcttttcatcagatgctactcacatttaagattcccataattttgttatgttggtcttatttacagttaactttttttgcagtggggaattgcatattgtg

SEQ ID NO: 4925 - DNA, 447 bp, Zea mays
  Intron number 4 from transcript GRMZM2G076128_T01 (locus G RMZM2G076128) derived from phytozome v7.0 (chr-ID 10; pos 46952792 to 46953238)
cttcacacagaagtatgttttttcagtgtctgttatggcattactgctacacagaaattcttggagcaacatcaaagcatgagagagcaaggagtattcttatttggagaaacatacatagaattccctatcaacaacttaataaaaggatctgacttttttttgccaccattgtagccttccatagtaaatagtaacattttgcagatctttctcttataacttaatgacagaagttattaaagacatgaatcttcatgagtcatgacgggaaacttcaaatggttctccagaatttgacttttgctggatggcttgagttatggttctgactattgaaaactaaagcgtgacatacaggttctgtggtactattcttctaacaaatctgtactttgttatctcattatcatatatactgcagaactcggaaggagatacaagctg

SEQ ID NO: 4926 - DNA, 1021 bp, Zea mays
  Intron number 3 from transcript GRMZM2G110143_T03 (locus G RMZM2G110143) derived from phytozome v7.0 (chr-ID 1; pos 1 82539698 to 182540718 reverse strand)
ctgtgccaatgtgagtaggcacacctgtatgttgataacctgttacctgtgttgtttatgtagttatcatgacaataagaagcatgatatttatctcattttgttgtggaccactcttgatttgaggtgacaataattatatgctaacagcaaggaatatgattaggttgatgcgtcttggttttttatttgtctgagatcttgctgacggttgatgcctgattatctatctcttgttacccaaacatgttttggttaatcttctgagattagcataccaatgtactagttatgctttgttacccaaacatgaatgaaggacatacctggcacagtggtgagaagccttcccactgagccgaaggcccttggttcgacgcagcctctctgcaaaagaggcaggggtaaggcttgcctcagttattccttccccagaccccactcatgtgggccaacactgtgtctgtccttgataatgtgattgaacattttggagtttgtttgttcttagtttcttagttcaagactactaaaataagactcgaaacaaaatcagcaaaactcttgccgttctctgtatgttttcccttttttggttacagcacatgaaataggttgagagaattaattgtcaaataatttgtatgaacagtcgagcattgtctatctagctttaagatatatagcacgtttttcgtatggtaaaatcccagtaccagtacaatactcattatgtacatatagtatgccatatgcatttatggggtagcttgtgtaaaacagtctgtttagctaaacatatacaactcaaagacaacaattgcattcactcatgtactaggttctgttagtttttcttcttcttgaatttatttatctcctgaagctgtgtgcaagagagtgtatgcatccatttatcttatcctctacctatttcattcaggtcaccaaagtttgtccctgctttgttttttttgtgtctgtagccacaaaggaagggtcaaagagggggttgagaaat

SEQ ID NO: 4927 - DNA, 793 bp, Zea mays
  Intron number 1 from transcript GRMZM2G119802_T01 (locus G RMZM2G119802) derived from phytozome v7.0 (chr-ID 10; pos 142094374 to 142095166 reverse strand)
cttcgtccaagccgggcagtagtgcgcgccgcctggtgagttctttcttgctccgacgcctacatacttttcccgctgccgcgtgatgctattttgagccggtcaatgtatgcgtaatacaggttgaatcttagctgatcctctttatgcgctctttgggtatcggaaacttagttcgagctcggattgtttagaacacgggccgacgggcgggtgctttggagatatcatgtgcaactctttcagtggcttggcttctgttgctgcttggtctggtgatgtagatgtgtgggagattatggatctggttgcagaaactgtgcaacaaaaaaaaaagataggttcttgacggacgtgtgtagcttggcccagcagttcgctagtttgaatgaattttaaatcgcgcaagactaggagtcgtgctcgaattgtttcacagacagtttctgcgcgttgagcaccatgctaatgtgcgacttggacagtcaaacaaacaactgagaaaaaagacatatttccatggccttagcccttaggccttagttgtcctcggtgcggcaagtttgttgagttgtttcttagttaagtacttttcatctcataattacaaggtttttaggccctgttttcactcagaaactgggccgatctcttctaataaaaacaacagcaaaacttgtgctgtcctttcaaaaaaaaactttgtatccaaaggtgtctatgtttccttatttgacttaacattgtctcgctgagctaaacacgatcttatgtgattctacagggcgtaatt

SEQ ID NO: 4928 - DNA, 757 bp, Zea mays
  Intron number 1 from transcript GRMZM2G029186_T03 (locus G RMZM2G029186) derived from phytozome v7.0 (chr-ID 5; pos 2 04098660 to 204099416 reverse strand)
ccgcactccgcgcgctcctccgtggtcacacacaggtatggacatgcaggttgagagatgtagccattggttagtatattgtgtataaatcttcagactaatgaccggccaacagtttaatctgatgtacacgatccaattgagctgccttgttgtgaaaatttgaagagaaacctattgacatgagatggtcacataatttgttaagcatgttgatgcacatttttttccttgtgccatgctcagctgcgtgtgttgtatagagcttcataatatagattgttagttttgttttgactccttgctttgtttgattccatcatgagattgataagctaaccatattggacagactgacagggaggctgcatatgtttctcctggctgcttgtgcgttagaatagggctgaaatagtgttgtatgcgagaacactttgtctgttcaatggaggcactagtttttagtctagcaagctgagtttgaagaaaataattgtatatgcagtaattcttttcttagtgaattatttgtgcagacaactcatcaacataaatatttgtttagtaatacagatgatatgatgtgtgatataaaataaagagtcagtgattttgtataccaatttttcttagctttgttacatggttatgtgctcctattttttccttgttgtttcattaattttactgagcacatgactgcatttgtttgatctatcctgttgtcattctgtttttgccgcagagggtgacagac

SEQ ID NO: 4929 - DNA, 738 bp, Zea mays
  Intron number 1 from transcript AC229986.1_FGT005 (locus A C229986.1_FG005) derived from phytozome v7.0 (chr-ID 5; po s 191891760 to 191892497 reverse strand)
cctgccttattttatccggattctttgagaaagaggtaaggtcaatgtttgtttcagtctaattttttagtatgttttaatttcttcgcatctgctgaagactttaaatttgaactaagtctcaggagaagcatttgaattgttacagatacttttggtctcacctaactgtatggtatttatagtttgctcatttgtatacaatcattggctttacaaccttgtttggtcaacccaaaaaaaaaggtggacagagactgtctgtttcatcactcaccaagcacacccaacgtacatttaaggagaacagcacaagaagacaagaagcacctaaatggaagtgaataattaattaaccatgtaaaaccatgtcctcacacgtttaagttgtttacatttcctcataaatgaatttgtaccaattcaaacaagcttgttagcaagtacgagtagcatttgtgttagaaaaatacaagaaaaaagatctcttaagttctcaacttttgcttgatcttgtgtgttagactgttagtgttcatatggcgcatcccaaatattcctgtcctgtaattgaacacagacaacccaaatactcctcctgtaattgaacacaagaatatgtttagttgatggtctggtcatggagctcaaatttggttcaatatgaattatgatgcttactgtgtactctagatatttatgtttaatctttgcaaaaaatttttgttcatttcagac

SEQ ID NO: 4930 - DNA, 1013 bp, Zea mays
  Intron number 2 from transcript GRMZM2G364873_T01 (locus G RMZM2G364873) derived from phytozome v7.0 (chr-ID 1; pos 1 0042601 to 10043613 reverse strand)
catcaaatcctcatccagtcctgccagtcgcagaggtcagtctcacagagagcaacttccggttctgcttctccataggctgtgttcaccaaaacaggcggagctttttttgcttagaccatattcagaaactgcacccttgaaggattttcatactccattctattttgtttgtatacatgggaactccaggatactctcacatcgcccttgccactacagcctacaataaagatttgcaggtagcagtcctgcagttgctgcttgtcattgagttgtggtggcttcctagggttatggagctgccatgcctgttggctgttgccacgactggattccaaaagttgccatctcctttacgtgccattgccttccaccaaagtccacgttgtttcctccagccgcagagctgattcattgtatgaactatgaagtatcctgtttgactgctagcatgcatttgatgtttgggatttatattttattcacttggctcatgattctgttactgtggttcactgatatccaattgaagtgaggatgattagtcatctgccttttttgcttgcttaataaaaggtagaaaaatattacatatctctaatgtgcccaacttgtggggtgtaggcctgctggtgcagtggtgagagctgtcttattgagtcatcaggtcacgggtttgaagcaacctctccgcatttgtgggagaagatttgtcttaatttatcccttccttagatcccactcatgtgggagcctcctgcgggtctgctctttagtgtgcccaacttgcatgggattaatattaaagagtcactgttgtttgctcaaaattcttccaaacagcttttcaagcttgtcgctttagcttgttttctgggcttataaggtagtaaaagctggtttacaggataaactaagcttggccagaccaacactctgagctaggcatccaagtgggtacccagtgttttctaggtcagctgaggggttcacggacaagacaatcatct

SEQ ID NO: 4931 - DNA, 785 bp, Zea mays
  Intron number 1 from transcript GRMZM2G146278_T02 (locus G RMZM2G146278) derived from phytozome v7.0 (chr-ID 1; pos 2 19377137 to 219377921 reverse strand)
ccaccgaagaggagagcaagctccccctcttcaacgtaaggggcaccaaaacaaaaacttcccttgcctccttccgatttttctgccgctatctcgtttgcaacagtggatcaagtgttgatcttggtgtctattgcgtgggagcgtttgatcgactcttcaagagttggaccgagcgtttcccctatggcggaattcttggtttggtggttcttctgtctggtcaatgggtagtaatggcgaactttatacagttttgggaggaaacctttgggtcagtggtttggtaatcgcctaatcgttggagagttttagcataggtacgaatttttgccggagtggtgatttctttcgttatatctgctagttcatagaagaaaattttcttgtttacacgtttttctttcgcagtcttatcgtgcgtttggtgatgatttagtgtaatgtccacagatgaatagaatttctcttcttagttctttttatgtttctatctatttgattcccttccatccgtgttagtacattgtgaattgtccaactgatcgatctgtgtgtggagtactacaagttattgcagttttgttccttccactaccactaatgtttagctgcaaaaccaaaaaaagcaaggaaagataaaaagatgatccagtggctagtgactagtgtgtcctgattcctgatggttggaatgtaaaaactaggaacaatgcttatactctgctaaaaagatatttcagcaaataaaatttcttcctctctttcaggttcacccagtgtta

SEQ ID NO: 4932 - DNA, 1020 bp, Zea mays
  Intron number 2 from transcript GRMZM2G071589_T01 (locus G RMZM2G071589) derived from phytozome v7.0 (chr-ID 5; pos 3 2666097 to 32667116 reverse strand)
agcgagcgacaccactatcgcgaccgtgacgtcaggtacagatacgtgatctctcatgtatagtgccattgagacaggtctgatgcaattcaaattaatggccttgttacgagcccgttggattgtcaattggtaaaggcctgtgatgtgattcgttgaggctaagtttctagttccaaaccctgtatagggtcggttagctaagccaacattttatcatcttggagtttgttcttgtaagcatacgtacaagctctaagtcttcaagagagtaaagctgggggttggatttccttgatcgagtgagcatgattatctgttgctgtagaaaatttgtactccatccgtttcaaattacaagacgttttggtttttctaggtacatcattttaactatgtatctaaacatagtgtataactgtatatctaagtgcataacaaaatatatgtatctataaaagccaaaacaccttataatttggaatagggggagtaactgtctgttgtaatgtgcaacttatatgcatggtagctttatgacttccttttggcacatacatgtcaaacatagtgagtttggattagtatcaatcaccagtgcttatagggctgctaacatatgactttagtttactgttatatcatcatctagggttgttatgtttaaatattgaatagtaatatgggaactaacaaatatgatatgctagagccgattccagatgacatctgcatttgggcctgactaaagatatcaagtcaccattcttttttaatccttgtggagtacttgcaagttaacaacatggattgggctggcacagtggtggacttgcattgggctggcacagttggctgcttggacacgtttggttatttgtgcttatcacttatcagggatgaatatattaataatgatcatataataatagtcacaattctattttttactgcttcatgcattgcttacacttcgttgataaatatgttcccttttctcgttgtgaaggcgtaggaaag

SEQ ID NO: 4933 - DNA, 879 bp, Zea mays
  Intron number 1 from transcript GRMZM2G123550_T01 (locus G RMZM2G123550) derived from phytozome v7.0 (chr-ID 5; pos 3 0601887 to 30602765 reverse strand)
ctcgacggcgacgacggccatcccttcagtgtaaatcttctaacacgtacgaggctaatgtgtcgactggaattgtttgagagctagctagctccaaagccatggcggaggacctttgtccaacggtcttaattgattgtcgttgcatgccgttttctctactcgttttttttcttgatgacgattcctttatcggattgcaattgcatgcatgcttcgatcttgctagagcactgtgtatatgtggtgcaataattgtttatatcggtgcctatcctagaaaagcaaagcaaagaaaaaaaaagacacaagatcaacaagacacctttcggcttttggacccctgctatatgcagtacctaccaaccaagagaatagattcctcgacttgattgttttcgcttgttggtctcgatgaactttatatccatttcgctgcgaatttcattatattattgggtgcggcggctgtttttttttcttccaatcctaatagtgacattcgccagcagtacgcacataccgtgtactgtttcgccatgctctcagagagatggcaaattagaacattttacgctgttgcaaagacaacttgtacggcatttgattccctaaaaaaggaaggctataaaagaaccactgaaatattttcgcacaatatggttagcagacagcagttttaatttcttgtgtgggttcttaaaaaaggtacgttcccagttagacagttcttagaactatatatatacatactatgatcaattttttttttatcctgcaggtttgcaatacacagttattcattcttgttgatcctttttttttctgaaacggatgatgtcgctgacgcgagttggtttgcttctggattttagcagg

SEQ ID NO: 4934 - DNA, 642 bp, Zea mays
  Intron number 3 from transcript GRMZM2G052479_T02 (locus G RMZM2G052479) derived from phytozome v7.0 (chr-ID 1; pos 4 3493961 to 43494602)
gccgaaagagggcggaccttctcgccgcgaaacaggttcctagctgatttctcacactgttcttctgtagccacttcagggtttgccgtttcttaccttgccagttgctgatgtgcagtaacaaaatttgaaatacttccccactttgcttaatgcataaggtgctttaccaacttttcattcggaaccttagttgtacggtgcctagtggtagtttggcaaagggcaatcttttttgcatgatatattagatcctctaatgttgtcgaaggtgggggagttccttaatgcccacctgatattaaattgatccctcaaaatagccttaggtagttaggtccaacgaggaaggatagagttaatggaaggaattactttttgttaatttatgtagtttgctcttgaattcaaagttggtgtaagaacggcttttccagttttgctatttgtgaagcttctcattttcttagtttagtaatgttgattttcctagaaacaagtttagcaaattagcacaatggttacaagatgtgacatatttatgaggaaagattaagccaccttagaacaggcaagcttctctttgttggccctctattctgaattctgaacttatttcttgggttgccactaatgtgcagg

SEQ ID NO: 4935 - DNA, 632 bp, Zea mays
  Intron number 3 from transcript GRMZM5G867991_T01 (locus G RMZM5G867991) derived from phytozome v7.0 (chr-ID 5; pos 1 66051125 to 166051756)
aaactggagactggccgtctgagtggtgctagacggtatgtctttgaaatgcgaatattgctgttcattctcatatttcatcagcaatactttctttattacttttgttcactccgtatttaactgttgatcatttgatcacagctttagtgaaccttaggtcatttttggcaagctgaacgattcttgcataggcatcactggtatatagtagcatcacttattctatatgatggtacctgtggataggatgcacattagttatgtgcctgggttttttgttttcttttctcaagcggaaaatctcttcctggagctgtaaacattgcgctatttttattttgtcatgcatagatagttacttaatatttgtttgtttagttctgtgtgtgggatctcatgtcctaaacaaaacacatttttgtttattcttttatattgtagtcctaattctttgtatacatttaggtgtgttgatagatacttgtatgttagttattaagtttatccagaaagactaattaattgacgcagcattctaaactccattctacaaaattttgaaaacattggttttaatcactgatctaacattgattttaatgttgttttataacagttcaacacagcac

SEQ ID NO: 4936 - DNA, 750 bp, Zea mays
  Intron number 2 from transcript GRMZM2G146446_T02 (locus G RMZM2G146446) derived from phytozome v7.0 (chr-ID 5; pos 3 1686575 to 31687324 reverse strand)
tcctgatatatctgattcttatctggacaatttatgtgagtgccacatttcctagtgtgtttgttgttgcatttgatgtttccattttctatttaaacatttcatgcacctgcttaattgtacggcaaatttgtttaggttgctatatgtagtttgcaactgttctcttctaaattgaatggatgttttataccctattaacattattcttaatcctatcatgattggtgctgtaatatattttcatggttctagtataactttctcgcaaacattgggtgacaaaataagaaagatcatcactgcacatgtttgctaatccagaaccacataatctttcttcaggttgttcatactgaaaaccaattacttcagatttcaatgtaatattgtagagtaattttgatgatcagcaccttgtgctatttcacatccaacatgagggcgttgaactttatagccatctaacatatgtgttatttcctgctggcgttgagcaagatatttatttatatgagctagaaacttcccatcaagtgacagtgctttacctttccagttgtttggttcaaatgaataatatatttttgtagagaaagaagatagttgattttggggggcatccttctgttagctttctttgttcatctttttcttgaaatctattcttaaatgcgtaaatagctttctgaatcattcaactaattttgacaggaaggttctttattgcagtatcaaactctctcccag

SEQ ID NO: 4937 - DNA, 582 bp, Zea mays
  Intron number 2 from transcript GRMZM2G010797_T03 (locus G RMZM2G010797) derived from phytozome v7.0 (chr-ID 10; pos 117990710 to 117991291)
gttcggtgagttttcggcaacttcattatttcttggttgatgtactttagtaagatttgtgtcatcgtgagtctctgttgctctagtcgaagttaggataggtcgtgcagttacttatgactgctaaatgctacccatcagctgctctagtaaaatgcaaaacaaacaagcttgtctttggggctatgtattcataggatagtgatttagaattgagagtgggtgattcaaaatttcaaatagtcacttgtggttcttcatttattctcaattcaaaaatcatattatgtttctgtaaggcactaccgataggcaagccctaaaatgctggtttctggttatgtcaaaatatatacttcaatgcacatttccatctctgcatgctcaaacaagttaatgttcctgatggttaatattttttagctttctcactgtcatcactcatcagtgtggtagttaaaccttattcatgcttgcagctacatcttgatgttctttcattttctataacactgaatgatttcccagttgtccacttgtccttgacagtcttctaaccgattgtgtggacatgcacaggaa

SEQ ID NO: 4938 - DNA, 996 bp, Zea mays
  Intron number 3 from transcript GRMZM2G092991_T01 (locus G RMZM2G092991) derived from phytozome v7.0 (chr-ID 5; pos 1 62674184 to 162675179)
ataactagtaagtgtcaattgaaatcatgttttaaagaatttatcaattatatcatactttctatatagtacttctggttagtagtacatctgtactgctatatctatagttcattgcagttccacttatttttaagtttggttgacgtatatcttaatatcttattgatatgccctttaagatgattgtttcatgattttctgaattgtgccacataacttgtgtaagtcacagttgattgtagttattcattctccacttgtgcatttgcaccgtacgatcttggagcagtaaagttgggtttgtgtcttaaactaaagttccaacgtgcaaaaatctacattgactagattagcatttggatcgttcagtgttgtgtcgtcggcataaatgcctgaggatccaagagttctgcatcattttctcattgtagtaaatgtttgtagagcactctctacatattttattctgtattcttaagtacgagacacactagtaatagtaaaccttactagctatgttctattcgaatgaacagagcagcatgcatattttttaattcaatatcttcttgggaaacctctcgtgccttagttctaaaaagactatatacatgggtttcagctaaccttgttgtttgaatcctgtcatgacccttttcattttatgaatgaatgatagaaatttgaaaggtttgagtctgatgacttgcattgccagtatttggagcaataatgggatgtttatatcatctgatgaagaatctcttgaaagaaatatagagcatcaaagtgatttattgattaatttccttttatttctcttcaatttgaagggtaggaatataataccagtgaaatataaaacaatatttctgacagtgatacttattcgtttaggaacttatgtaatgatgaaacagaagctcactcttattaatctctttgttttaccttgcagtgattctaggcgaggtagccaattttgcagcatat

SEQ ID NO: 4939 - DNA, 801 bp, Zea mays
  Intron number 1 from transcript GRMZM2G102639_T01 (locus G RMZM2G102639) derived from phytozome v7.0 (chr-ID 5; pos 3 1181789 to 31182589 reverse strand)
acgccaccacctacgtcggcaacctcgaccctcaggttagggttcccacataccctcgctattgcgattcctaggtccccgccgatgataaagttatccctaaagcacataattacttgtgtgaactggtgaccccggatgagtaaatagctgctctttaattgaaggtacagtggtgtaaccatattgagtggtgtaaccatattgcaaggacaccgtgagtgacggcaaacgctagatttttacaagtattgagactgcgattgaacggtcactggaaaaatcgtgcgtgtttcgctaagtggtaatgttacaatcgttgttgtttaagtacatttgtcaggttacaatctagacaatatgtaaagtgtactgcttatttgtcaggttgggatgaaaattgctgtttagtctttcagattcatatcaatttctctctaggttctatacaaatagaaccatagtccaggaatgaacaatttaaggctgtctccagcagcttacccatcgtatcttccatcctatcttctatttcaaacttcgctaacttcactatgtgaacagacgaacagtgtagtctataatgcaagtgttttgcacaaccatttgcacgatctgctgcggacaacctaattacattggcagttacttggtggagcacatctttactcctcaatcctcatgtataggaaacaataaacatcctgtagtatatggctatatattgtttcttcagtatctgtaaatcacgaactgatgccgatagttctttgatatatgacaggtttctgaggagcttct

SEQ ID NO: 4940 - DNA, 1013 bp, Zea mays
  Intron number 2 from transcript GRMZM2G078806_T01 (locus G RMZM2G078806) derived from phytozome v7.0 (chr-ID 1; pos 6 6015282 to 66016294 reverse strand)
cgagagccgtcaagtcaacgatagtgcatttccaggtacggtttcaactcggtacttctccatccacacacctgaccaagacgtgtttcgcgcgaggatgtgaagtgccgtttgattagcccactggaatttaccataatcttctgctcatcccatatcgcccaaccaaaaaacacacacacagtcaggatagtagtcattccgttggccataggctgttacacttgcacaatttattctcttaaggctagtttaatttgggaaccttatttttccaatgaaaaaagaactaatttactttggaaaaatgaaaattccttgagaaaaaatgaggttcccaaactaacattaaggaaagagtaggcatgccatcaagatgcatagtggtgcgtgtgactctgggttgcccgcctcacagttcgattgcttcagtttgcatgatagaagcacagtgctcttgttgtccgttctctttaccagaactcagagggcgcgcagggttacaagttggaacgtgtgccacccccctatccgaaaaaaattctttacatacgagatataaagaatttttttacagcctctcacatatatctatatcagttgttggtttatataaatagaagaaaaataaattactaaagggttattttgtaaattttgatatgtgtttgtgaactttcgagtggtggatgtgaggggctttaaaagataacgtttacatcgggtatgtacagaatttttttcgcctcctatacctaagcactccttttttcacaaaatacttaagtctaacctgtcatcatcatcccctaaatctaacttgtgattttttccccgactgctgtgcgagtatatatatatatatatatatatatatgtacgctacgaaccatgaagcatgatgtttcatctgcatcgaatgatgtcgctgttgttctgcttctatcaatgtatatatggacatcacgctggttgcaggtcaacaacaagcagtggcaggacgtttgggtgtg

SEQ ID NO: 4941 - DNA, 882 bp, Zea mays
  Intron number 1 from transcript GRMZM2G179677_T01 (locus G RMZM2G179677) derived from phytozome v7.0 (chr-ID 1; pos 2 06117681 to 206118562)
ccgtgtgcgtagctgcggcagcccttggttagttctctcaatcacctttcagagttaattgattagttcgtgttcggtgtagcttcgattatatctgctcatggatgcatctctctctttgttccctatatatcccggccccctctttgttttctgtgtttgtttgattctttcctctctttaatttgctatattagaggtagagagatgtgcttagtatttgttgatgatgctctatttggtttcttgcatatgcatctccatgcatgttctcttctcctacctagctctccacatgatggcctctccctagctacctacacacctgctatagcgaggtggctcaccggccggcccttgtgctattgtagctagcttctctcatcctagtttttttttgggatgcgctttgtttacgagtgcatcagccgcgcgcgcggctgggtttgtttggactttcttcctcctcgctccggccggcctcatcgtcatcagctcctccattttccccattactcgcttttcatttgttgtgtgttgctgtgcagagaggagacactaattcgtcctctttggcacacagatccatccgtgtccatgtccatgtccatgcatgagtttctttcgagtgtgctgcagcctgcagtacatatatactgtggtactgcttgtttgcattcatcaatttgtccgatccttcctggatggatagatagatagatacgatatatatagacacacacaacacacatcatgtatatacagacacatgtatagctgatgcatgcatggaattaattttgtctaagcttgacactaattccctcttctctcgtttgtcttttagatcgatcaatcgatcgcttgtgcggaaggagccgg

SEQ ID NO: 4942 - DNA, 1023 bp, Zea mays
  Intron number 3 from transcript GRMZM2G416388_T03 (locus G RMZM2G416388) derived from phytozome v7.0 (chr-ID 1; pos 2 73866688 to 273867710 reverse strand)
gaataaatcaatcgctggcattgtcactgagagaggtgatgaacaaatttctgtactcttggcatctaacttttggcctgtgggtatgatgggaaaaatacaaaatcatgtaccactacctccattttcatttaactggcacccttgaccaaagtttttctgatcataaatacttgatttaagataaagctggtcagctagtgcttgtagcttgctatttgaaacaatgggcttttgaggtgtttcccaattttctctcatctctctatgttttcatagttcttgccttttcctgttcctttaattggaaaaatatcattagatgcaaaaccatattactttactgcccctttatggtgataagaaactccgacgcattggaaagggaagtatgttcggcgggtaggttgtgaatgtataactccgctttgtttttacttcagctgtgcatcatagtacttttggcatcaaagagtctcaactctttagagcactttatagtagatacaacagaaattgcatcaagttaaagtatacgtgtaagtaacataggatcttcttcacatggcacaatcatagctgccacttcacactgaatttcctattagagatgtataggctaactgacatcacttgttgtattcttgtatcacaagatgtactcagctacacacacgcgtcgcggtacaaacactgccgagcatggaggttgaaactgggccaacttcaggcacatcacatgatgatttctttttcactatgccttgctgcactgttcgcacgttacatcttggacttgaatgtgaccaagtagtatccatatacagacgatcactcgatcagcatacatagatggtatttttgagattagaaccaatacttgacagatcttgcattctgaaaacggaaacgtaagcgtggcaatcttttaagacatgcataagatcatagtgccatgaggctaacatctgagacttggtgttttcagattatctccggaaaatcatagtgcagggaaggtct

SEQ ID NO: 4943 - DNA, 590 bp, Zea mays
  Intron number 2 from transcript GRMZM2G149323_T01 (locus G RMZM2G149323) derived from phytozome v7.0 (chr-ID 5; pos 1 1082308 to 11082897)
tgaatatcttatttgacaaagtaattctctgaactttttatgcacttttttactgcataaggcctgaattttttactgcctttgtttgctatttcagtttttttttctagtaaaatctgctatttagttacctctattatttaattgcttaaatctgctatttcaattttgtttctagtaaaatctgccgatatttgagttcagctatttatgtttacataagcaagtgcttcataaacatctaaatccacacctttgttccagttcagcaacgtcttctctttattacagatgtgctgatccaattcagttttcagagtatgttgacaatctgaatttagttcaagcaataccttctctttattacatatgtttaagcaggtgcttcataaacatctgaattcagttcatcaatgtcttctctttattactgaatattgaattgaatataaaggctttcatgtccccaaatacagagagtctccaaattggatattgaactgaatatagaggaattgaatatatatacatttgtctaagttttctcatcaacaggtgatacacaagggtttttcatcaacaagtggtcg

SEQ ID NO: 4944 - DNA, 874 bp, Zea mays
  Intron number 1 from transcript GRMZM2G018757_T01 (locus G RMZM2G018757) derived from phytozome v7.0 (chr-ID 5; pos 2 11000164 to 211001037)
caagtacaagtaccccaaggttcgtgaccttgaaacatactgattatgatctttttcaaactagaattggataaaggcttgaggagaaataatttcccacttcctgagattcattacttactgattatgattactgaaggatgagtgatgagtgcttaagttgtgctggtttattcaagaggcttttatcaaattacttttcccgctttgttttatgttgctagcaatctgaaaatggctaactttctataagatttccttctcatttttgttcttacttgtatgtggctagtgctggagttacattttagcttataatgtcatctttataactttattgtgaatgattatgcaagctaacacagttttggatatggtattctgaattctgttttggaaatataatcttagggacttacctgaaagaagataaagttaaacgattttttaatcttactaccttatgataaaattaacattttacttttgtagctatcgtagttagtggatgaaatcttcaatatcacactgacgcttttggtttgtgtggaaactgttgaagtgtataagtggattgtctaccttctcctaatagattaagcttttgggttgaactgattagtgtggctactctatgaaggtatcaaagacagaggtcttaagtccgaatcctggttaataaaccagaaagataataaaacactatctggttacctggtatttgaactgcgttgctctgctatttctctaatcttggttagcgtgttattttgtccttttaaggaactgataatgttcaggtactaatttttcatcctgcatttttatcaccattgcaggttgctacagaggtatttaataaaaggaaatacaa

SEQ ID NO: 4945 - DNA, 945 bp, Zea mays
  Intron number 2 from transcript GRMZM2G413643_T01 (locus G RMZM2G413643) derived from phytozome v7.0 (chr-ID 5; pos 2 09788535 to 209789479)
cacctaacatcccacgtgaggtctcagctctttgagctactttcttgtaaattgtaatgttataacaattggtttatactgattcttttttaccttttttgtttcagatggcacatctgtaattgaattgttgtctgatagcatgaaccaactgtccattaaaaatgagaatcagttgctaagtttcttgatattttgtctgtgtctgattgtggctatacagattccattagctgcaggattttcttttagacacgggtatccaactgttgattgtttttcgtcatattgtgtttgctgcaaatatagcacatatgcacaacggtcatgtattggtggatgtcattactgcagtcaaggtgtttgtttactcatagtgttgcttatttattaggccatccaacctgaaatgtgtcatgtgccatcacaacattgatttactccatgatacatatggagtggtggagggagatagtcctttttaattgatgttaacttgattctcatgccactttactgttttagtaatcactaacttctctaccacatttcttgattgctaggctctctgtagtttactaagttacttttgttgtgagctactgtggtaactgataacaaccatcatctttatattagttattacttattaggatgtgcaacatcttgtacttttcggtacatgcaagtagacgagtgaatggcctctctacttcagcggattattttgctgctagcttttgtttatcacacagacacagttaatgcttaatcctcagagctgcattaaaccaagtggtgcttacctggatttgaggacctctgatgcttgtttatctcaagtcagccttttgagtcttcatgtttcgttgaagaacatcattacatgcactatccatttggcaaattgatagcaatttgtatttcttctctgtttcaggagtg

SEQ ID NO: 4946 - DNA, 817 bp, Zea mays
  Intron number 2 from transcript GRMZM2G301287_T01 (locus G RMZM2G301287) derived from phytozome v7.0 (chr-ID 5; pos 1 56163749 to 156164565)
caaaggtaatgttgttacagcaggtgacgtttggtggggcgcttaacccgtccagactatcccgttcctcccctaatttagtccttccgaaccatgtttcgcccctgatccacctgatccgttcggtctgttcctaacttccgactttgtaaggaggctcgtgaagtcagtagttgtatctggcagtggtagttgagcatgccatggagggactgagctggagaacggtgtgttgtttatcgatgttcgtaaagtaataatttagttttttaaaagtaaatctatagtcctattaagagtggacagaggcacatcaccctgttgtgttgacagtggaggaacattgagtcgaccgccacactttgttctgcagtggtctccgttgatttaccatgagtatacttatttactttctttttggctatggtaggccaaacatgttgggtgttggccatttaggaggtgctttgagtaaaaattactcttaaaggtatatctacggcaactggtgtaatatagttctgactggagcacttgtcgtcgtgctaatgtttttgaattctaaatttcaggacaagaagcatcagttatatgttatttctgcccttgctggcaccaaaattgatatgaaaagctggtagctttgctatgattacatcttattgttgcttatttttttacttcatggcttcactattgtatcttgtaaaaagtcaaagatagattttgtttttagtctaaagctttttgtggtagataaatatgtttgccaatgtaatgggaccaattgctttgttctgttcttttgtgcagttag

SEQ ID NO: 4947 - DNA, 527 bp, Zea mays
  Intron number 2 from transcript GRMZM2G108355_T02 (locus G RMZM2G108355) derived from phytozome v7.0 (chr-ID 5; pos 3 663345 to 3663871 reverse strand)
ttcaggttcgctgttttgattgctttggcttgagtcatcagcaatcccatttcattaccagttgagatattattttgtttgggaccggttaacttttcttcatgtctagcctaagctttgacccgacccaattagcaataaaaaattgtttaattcccagtccacactctaccccaccccaccttgcacaaactaaatttatgcctgctaactaaatgtgtagatttgtgacatcttataccgtgccttcatccccacacatcatcatcaagttctgatgaaagaaccctgaagccacctttttaagcttcttgtaaaaaaatgtcagtggtgggaaaggaacacctgaagtttctgaaacgtatagctttaacaagcatttaatacaagaagataagatggactctttggataatctgcgctgtttatatggcggattcacagatgcggttggtcgtgttatttgttgacttttgccgatttgttttgttatcattgttgcagcctgtaaagagtcctgttactat

SEQ ID NO: 4948 - DNA, 938 bp, Zea mays
  Intron number 1 from transcript GRMZM2G175269_T01 (locus G RMZM2G175269) derived from phytozome v7.0 (chr-ID 10; pos 128415631 to 128416568)
ggtgacagcaaatactggtgcgtgcttctggttttgcttgcatgttttagcatttgatgtaggggtaacctgcaattagtccagcataacactttgcactgattcaatagttattctggtgtaaacagagaagctaaattttgggtctataatggccaactaaaggtctatctctcagtaagatagagtccagaatgctagttgacttaagcttgggctttgcatagtgggaactgggagctatgtcaactgtttatgattgggagcattacagtcttcagttctcctatgagtattattctgagatcataaaatcggttttaagaatgctgtttctgtatgtctacattgcaatctctatgttgttttgcactgaaccagttcattttggagcagagatttgaacgacctggaggtatagaattgtgttacagttttttcccattagattcatgctctacagtttttatttattcaggaattagaaagtttgcctaaaaacacccaaaatggaaggcgagaatgttatgcaccaaggatccttgctaacctgtagtttgataatgaaaaccactgaaattgagtctgctgttgagggttacaaatttagtcaaggtagaggatatttgttatccttctgcccaataatagacatgttgaaatgaactagatgatatctttatttgtaggttgtgttagcttaatctgcccctcatatattactcagaagtgaccgttcattctgaaatcaagtttatgaccttataatcttatatgtttcaatgcatatgatttacggttcgttacacataatttcttcatggtcatagacagagtaataaaaacttctattttttattctccttgtacgtattggatatttaatttgatttttatattgtttacaagtgtagatccttgttattctgcatttcacg

SEQ ID NO: 4949 - DNA, 600 bp, Zea mays
  Intron number 1 from transcript GRMZM2G046288_T02 (locus G RMZM2G046288) derived from phytozome v7.0 (chr-ID 5; pos 2 10888764 to 210889363)
gcagtggagcagagaagaagccaagtaggaaggaggtccttctcttttctctcctgcgtcgacttccttgtcttcctttacccccattgataatgcatacttgcgccattggttaatgcatatttgcgcttgctattgtgtatggccacaaaaaatctactagtagtgcttatgggcagaacagaaaagctctcgtaggtttctaatactcatttgttccgttatactgagaggcctctgcaggattttatctggggtactacactcattcagtgttcgacaatgggccgagaagtgagatagctggaaatcgctgcaagttcttgaggtccccaggctggataaattttctgcatacgatcaaatagttcattggatgaaatgtaggctgtagggataactttaacacacccattgacgcatcaaccaggtttacatgttgtcctgctgaacttgtgtcaatcatcttttggtgttgttctctgcttggtgtttgaatctgtttttaaacaaaactaatagaggtgcataggtatattgggggctcacacagataattctattctcgtgtgtagattttggaaaggaagaaggccacat

SEQ ID NO: 4950 - DNA, 973 bp, Zea mays
  Intron number 1 from transcript GRMZM2G415327_T04 (locus G RMZM2G415327) derived from phytozome v7.0 (chr-ID 5; pos 2 06149783 to 206150755 reverse strand)
atgtaagtaaacatgcctttcaatactgtcccttttcttttttctgtttccaaacaggcaaacagtatgcccaactgaaatatgcaccagtgcattgttcttgttttttacatagtttttaaaaaaaaacatttcttcttagtgctccctgaatcaccgacattgtgataatatatttgttcacagcaaataactgcaaccataaatttagtgtttaccatgtatatgtttaattaactgtcctttctttaaatgtcaacctttttttttcttgagatggagtatatctaagttttcatagagaggaccagtggatgctgacttcatttcgttgaatatgagaatgcatgttatattgatccattgtgagtttgtaaccacattagtatgccaggactagcactgaaatcgattcgagtgctctgcttggtgttttatagtttggtgcctctgccgccgtcttttaatgcttgacgttgctactccctccgtcccaaaataaatcaatccctagaatccgtgcaagccaaactatcttaagtttgactatttattcagggacaggggggtattaagaaacgccgtggttacctaagtttagttgctcttaagtacatatgtgaaagaggcatgctggattcctagctgatgtggcctgttacttcttaacactctttttcttgtacgcaactgcaggaacatcttcggtggaagaaaaatgctatgcttcaagtcctgaatggttcaagggggtcttacatggactgataccacgagtgttaccccaagttcgcgaagcttgaaatcttgatgtgcttgttgcgcatgtgtatatttgcacctttggttattaatgactagaggtaggtaattgaaactagtctgcttaagcgttctgcactgctggtgtggttagctctatgagttaggcagttcgacagaggccaaaccgacagtgagattttgctctttc

SEQ ID NO: 4951 - DNA, 1038 bp, Zea mays
  Intron number 4 from transcript GRMZM2G338441_T01 (locus G RMZM2G338441) derived from phytozome v7.0 (chr-ID 10; pos 5440723 to 5441760)
gcgtcaagttcgtcggcagggaccaccgcctccaggtctgtgctgctgccgcccatttcctgtgttcctgcacttttggtcctgcttggaagctgggattgggaggcaaatcattagctatggccagtagaacagtcccaaaggctgggcaggccctattgaacaaacaatcgtctgtatgctttcttcttatctggggtggacttgtaacagagaagacctaatctgtattatatgtcaatgttcagtagtatgtgtaaattgtgatgtcgtactttgataagttcaagtgattatttagggccttcttgttgtatctgaacactcccaaaagtatggcatttggcagccatcattcattatttcttttttatgtttcttttggcgtcaagcaactttcagtaacacttaagcctttctctctctcttaatttgtaatattttaatggcatggatttgaatcgcttcactgaatttcttattatagcaataaatcctacctgtgatacctgtttgatgagccttttgaaactgcacaattgagagttgaagatgccaaagagagatcagatgaatcatgaatagaataggatactgccaaggtatatgagaccattgttgattttagcttatggtataggctttctttcaataaaagatagcaccaagcacttagttgttgtcaaaggtttgcaaacctgttacctatctggttaattttggatgaatttaaattctacttcagaaatggcagcttcacatgacttttcttcactggaaagtgatgttggaggaaatatcattttaaaataaaaacctcaatagtactgatgctatgagaatggactactcaaattaaaaatgttaacactttcacatctcatggactgtagttcaaagattgaggtttcttccttcgttttcttttgtacgaacttgattggttgcttctgctgtaagcaaaagtaactgttccagttatgaaaaaattgcccctgtgcatattctcatgtttttcttttgatttatttcaggata

SEQ ID NO: 4952 - DNA, 902 bp, Zea mays
  Intron number 8 from transcript GRMZM5G848541_T01 (locus G RMZM5G848541) derived from phytozome v7.0 (chr-ID 10; pos 84617022 to 84617923 reverse strand)
ttgttattgctcaggtaacaaaataaattgcaacttaggaaacaccttaataaaattttggttgctggctcaggctgctttggtgatgtacctttctacattcatatgggcacttgtgatgttcatgaaatcatacacattagttttgttgcaactactataaatataaagacatggtgtttcaatggattgaatggggttcatactttattttgactcaatgatgtatgaatttatttggtgtttagcctaaggtgtttataaatatccaatatattattatctttaggcgcacatgcttaacaagtttacgtgcacttctttttcaagctagctggtcggccatgcaataatgtaacctgttgaagtgacacaagaaagctcatagagctgtagttaaagcagtgtaagacgggcatagtctcagcactataatcaggattcaggagtatagaagaagccatcacctctcacagataatatgacaattgatccttttacatgcactctaagcaatcaagctttcttggtagcactaatttttaactctcgtagcaacgcacgggcacataatgtgagcaggaattgtggaattgtctctagatgtgctcggtgcgggaacattgccatttggtactctcttcattgagctcttctttatcctttccaacatttggttgggaagattctactgtctttgacttcttgttcattgtcctcttcctgctggtcatagtctgctggtcagatgacttgccctgcgagtttgatcttcctcctatctaatcattatcagatcagatcaattagattgcagcctgccttgcatgcactgtgcgccatcatcaaataactgctacttaactcagatttgtgtttcgtactggcaccacatcatagac

SEQ ID NO: 4953 - DNA, 736 bp, Zea mays
  Intron number 1 from transcript GRMZM2G095778_T01 (locus G RMZM2G095778) derived from phytozome v7.0 (chr-ID 5; pos 2 11985324 to 211986059)
agccaccgcgcgatcccgggggacggccaggccaggttcggcgcttttggtttgcggaatcgcggtccgagcaacgaatgcgggatctgttgcggtcgtgtggaaggagtggggtttgtttggagatttgggcatttggttgcctggtgctgcgcggtgaggctgggcggcgctacgattggcggcctctgcggggttggtgctgtatgaatgtgaatcctgggggccaatagcgagatcgtcgcgttctgatgctaatttgggatgtttgggatcaggggttcggggctttgtagtttttctgtaaccgggtgagatttcgggtgctctttcaagctcgtttgcgaggcactaattctgatcgagttagaacaccatagcagatagatcatcactgttttgctttgtttacctttgaggtcgcggtttttttttccaggagatagtttgagaagagcaatttaggatctagtttgagaagctcaaccttttatattgcaattttgatgcgattttgattagtatcttttcatatttattcatttaaatgtttgtgagacgattaaatagtgctgctaaggtctacatacagattctgctgtaaaatagtatgcccaggggggaaaatctgtgtaagcatgtatgcaattgacatattacttctttgtgtcctgattcgcttttgttgctccaattggcagattccacaacgttttactcttattaaactccccaa

SEQ ID NO: 4954 - DNA, 699 bp, Zea mays
  Intron number 1 from transcript GRMZM5G845601_T02 (locus G RMZM5G845601) derived from phytozome v7.0 (chr-ID 10; pos 136878225 to 136878923)
ccgttcggatccaggccgctttccgtggctacctggttagcttctcacagactcctcacctcactcttcagttactaaatctttttttttgttgtcaaatttccaataaataaacaaatctgtgtaagctacagcttgtcacgaaaagctagcttgaaaaacggaagaaggggccttttgttggttcaaaaagaaaacaaaaatatctccctcttctgcgtggtatgctatgctcatgatgtgtaacctacgagctgctctggtaaccgcttcccctccagcaaggagaacgccaccttgtggcgtcagctctgccgtcgtctttactgcctgcgccttccaggcttcttcgtttcaggaagcaaggcatggccatggccgctttaactccgcttccttcgcaggaaatcggaaggcctgtattattttgccgttttgcgcctagttactgcgttactgttattggaagcggctaccgccgtagccgtagtaatggcggtggtggtcggtatgcaaagtttttttttgttgatgttgaacaaaagcctggcaagttgagagatgccaacctcagttttgcactgtagatgcccgtgggctatggtggagccaaggggccattgctgattaacacctctgcttctgcttgttgttccgtgcgaaggcgaggcgggcgctgaaggcgttgcgggggctggt

SEQ ID NO: 4955 - DNA, 846 bp, Zea mays
  Intron number 2 from transcript GRMZM2G032267_T02 (locus G RMZM2G032267) derived from phytozome v7.0 (chr-ID 5; pos 7 4164430 to 74165275 reverse strand)
tagcgctcggcatagcgcaggagctcggcagcaaggtccgtgcgcctagtggcttatatttgttttctggtacttcgaagaaatgattttattgcttcgccatttttctctgttgtgggtcacatgagtggagcctgacaagggataaactagggatgaaagtgggtatccgaattgttgggacaaatttaatattttaaaatagatatgcattaaatttggtgctcatcttttcttatgttatcaatcacactattatgaacaaaaacattttgtctctggttgggctgttgcggagtggagggttgatgccggcccgttagtgatgggggccagggttcagggattttctcggccggtaccattgtttcggtctcttaataggcggtcattccctccccgattgagtttactgtaccaggaggtctctccctctctaatatatatacacaggttagacctaggaccaagccattaactaagacggtgttccccctattagggaacatggtttgttagcctcctaagactcagtcagttctttgactaagcccaagaccaaccctaacagtttggtgaacaagctctgggtgggcaggaaaaagaacagtttagctaattcataggtatcttgaggtattgtagcacacctaatgtcattttagccgcatggttcgagttttatgttcatctagcttaactgggtgttctggtgggacagtttgtctgaaaaatgttactgatgttgataagctgtgatgcttgctggattcactgtagcatttatgctataatcttctgatgtttccttcccctgtcactgcaatgcaggtcccattctgtcct

SEQ ID NO: 4956 - DNA, 665 bp, Zea mays
  Intron number 3 from transcript GRMZM2G017789_T03 (locus G RMZM2G017789) derived from phytozome v7.0 (chr-ID 10; pos 134415267 to 134415931)
cccaagcttcagctacctcgtcggtggagaccaaggtgagactgaagccggattgcttgctagtaccgttccaaagcagcgtgttccattgaatagatatacatcgttacttctcactgtagatgcagcgatgtttcaaacttatagattggaaactgtgtgtaatttttgctaattatgtttgttggtgaacattactgcattagatctagcaaacccctagttatgttttcaaagtcgcattatgaatggtcacttacattattcttcaattagaagcatgttcaggtttgattttatgcaacctactatctctttcttcaagtaaacacactaatttatcttcaagtgatgttgattcctaacaatcagtaacacaaagtatcaatagatctgatgctattatacatatagtgcaccatctcattagtgatgcattattatcacgtattcacataaatcaaaggtttctgttatgttgttaatttgaatctttgcaagatggaaagctcactccatttttatatagcattgaattaatccaaaaaggttgttactgaatttatggtactttaactgtctagagtatatgtatcctttactcattattctctaaattaaattatacaggagcccagcaagaacgtatatttcacaaagcaaac

SEQ ID NO: 4957 - DNA, 671 bp, Zea mays
  Intron number 1 from transcript GRMZM2G409205_T02 (locus G RMZM2G409205) derived from phytozome v7.0 (chr-ID 1; pos 2 29356454 to 229357124 reverse strand)
cattgttgaagttgcaaagatgtatgtctaagtttattttcacataatagtatattttttctattatcaagaattgtttctcaatacattcatgagttggaaattgtattgtgagcctttctatattatctagtctagctagctctacaatagagctctagtacagacagaacacatgctttcatactcctatggaatagtagaatcaggtagtagaattaggtgttcattaaccatgcaaataattaattcaagttatctaaataggcccttagtttatactgctgaaagtataaaaagtgttccactctcaataccgagaataggaagactccaccatgtatatgtgttcttatcaggtgctcttctttcccgataaaataaaaatcctttgcttcaatctgctacatgatactttgtgtatagataaaggaatacatccatatgatgttcctgggagttagtttgatgtcaatatactccatgcttgctgattggaaaggaaactagttatttcgtttgaagtcatatgctgcttggcgtcattctaatccaagtagctgaggggtcaacagtggctaacttccctgtcactttattccaaagagcaaaagggaatcccaccctagctgtgatattttccctggattatggttgtccaggaatcctac

SEQ ID NO: 4958 - DNA, 632 bp, Zea mays
  Intron number 3 from transcript GRMZM2G423333_T01 (locus G RMZM2G423333) derived from phytozome v7.0 (chr-ID 5; pos 1 70187308 to 170187939 reverse strand)
ctgagaaggtaacaaatactttcatcttcaacacatttgtattttgccagtggagtatttgttcttcaataatttaagaatcataacagaacattagtggacgaatcttgcttcaccttttagacaaatacatactgacattggattgttcccaaaagaaaagaatcaatattaagttgactataaattgatagtagttttcccccaaaagggactaatgtgtaccctagcattgatactacatggatatttttcttcacgtaaggactcgttataagctattcattgctttaccatagtcgaatttcaggtatggcataagttatgtggaagctggttatatgcgcttcacttggtctgtttttggtcaattttcagtgactcactatttttctttgcattttggtttgttccagtaatttaatgtggccagctttaacctcctagaatctaggcccttgactgaccatatattaacctgttgtcttgcttgtacgaagttgaaccataccagagtgaatttgctatgaaaatatagattattttgatgatttatggcccgtgttaactccatgtagatctggaacgaaggtttgagttaacttgggtgtgttttttatgccagatcttca

SEQ ID NO: 4959 - DNA, 891 bp, Zea mays
  Intron number 1 from transcript GRMZM2G094831_T01 (locus G RMZM2G094831) derived from phytozome v7.0 (chr-ID 5; pos 1 84232395 to 184233285 reverse strand)
agattaccaagcggtcgcccctcgatttccccatcgtaattctcttgctcttcaacttaccatcggttcatttcattttagcagcttgttctggtgggattggaggaggctataggctgcccaataaccggtttagggagcgggcaaaatcggtagaaatgttacgtaagttgtggtgtggacaggttgttccggttgggtatgcctatgctttagctttcggatgtggattcggtcttcatctactttttaagttttgccatttcgtatatctctggcgaagatacctttacgaaaatgataatttttcaccctatgatttattatgagtgtaataatttcatctgcgctaacataaacttttattgctataactttctggggttcttttgcagctagtagctcgttgtgctgatagatatttggagcttcaattttatattcgctcctaaatactgactacagtctacaaataagccctaaatgtccttctgaatgtgtagcttctatatatgtttttctttgtaagagtctttcatcatcaaagattcaaaatgagagaatgttgtggcgagcagtcatgagctggttttggtgaactcttaatttctttaaggcttgactatgtaaatggcttcatgactgtatgactgcatgtattacatgttgtgatgtacagtatgtagatactgatcctagcctttcttggtaatgtttttttgtgtacaaccaaagtggcgattgcagatctgttgcaactttttccaatgattattagctattggtgtggaagatctgtccagcctagcaaaaataatgttcaaacatgactagtgatttagatctgttgacatcaacattaatttctctgttgtttgattgttgctagga

SEQ ID NO: 4960 - DNA, 639 bp, Zea mays
  Intron number 2 from transcript GRMZM2G378130_T01 (locus G RMZM2G378130) derived from phytozome v7.0 (chr-ID 1; pos 1 5612385 to 15613023 reverse strand)
accggttcccctcggctaccctcggcgagctccaggtatgcacatgggctttagggtttagggtttaggctttaaactttagactttagggtttgttctgatttgagttagcagcagcggagatctcccaacaacgacacattattggtcaccaactgttggactacaaatttatcttgcacttggattacttgaacaaatcacattattggtcaccaacagttggctagatggattacagctggaatgattctatgtacgagtatgattctacatttaataacttttatagaaattgaatgaagtagtatgattctatattttttatttttttattttcagctttgttactaactgaggcatctcatgcagaatttttagtcgttctctttgttgtgctagttactttggactgaaacaaatgtgtgttgttatgcttaagatcatgaactattagtgtgctgctatttgaaacaaatatttagaagttgttagtgtgcatatcttctgttataatccaagattatacaaacgcgggagcaaaactggaagctcatgcaaccacgtaacctttaaaagtttcaactgtttgatctgattccagcggccaagaatttctccgtgtatcggttcctcgaa

SEQ ID NO: 4961 - DNA, 733 bp, Zea mays
  Intron number 2 from transcript GRMZM2G477146_T01 (locus G RMZM2G477146) derived from phytozome v7.0 (chr-ID 5; pos 1 66928390 to 166929122)
atcaggtggatattatatgtttttgaattgtgctccttgttcttacttgtaatatacttcatatatgtgttccagtgaaaagatcaaggagaacatacatgtgggtgccctagtttgacccatttggtcagctgaggagaaaacacctttagtctaaatccattttcttttaaaaaagaaagcaaaaaaactgaaccctagtaacatccttttttttgtaaccagatgacctagccatttcatctatgttttatagcctttatgaggaaatgttgcattaactgattaggatcttcattggctagttagctatttctagtgcacctgaaggtactgttaacaataaattgtgcatttgatgacaaactgtaggacagtagatcaaatatagcttgattccccagcccaatttcggtagctttgtagctaacctttgctgtggtatttgaacattgtctacattaatgcttaacatcctttgaaatcaatgtgattgtagctgtttttatgcgcaaaaaaaaagaaggaacaaccgttttatggctatgagaaactagccagtagataagaagaaacaggcacccaatcacatgttgaagagatcttgcacttgcactaggcacaattcccatgtgtgaatgaatatgatgttgttttacatgggaagaataaaaaaatatatttgttttatttggcagagagaaaagctttcctcaattaacaacagtgaggg

SEQ ID NO: 4962 - DNA, 932 bp, Zea mays
  Intron number 1 from transcript GRMZM2G003897_T01 (locus G RMZM2G003897) derived from phytozome v7.0 (chr-ID 10; pos 83447492 to 83448423)
caaggccgacccatcccccaacctcttcgtctccggtgcggctcctcccttctcctgtttcctttttttccctggtgaaacctacgcggcggcctcctctgttcgtttagctccagtactgaatctctggcgtagatggacggtcacgcggccgtgattttacccgctcgttagtgttctggtggcgctggatctcgtcgtggtttatgtgtaggaatggttcatttgttaccgtgctcctcggaaatcttggtgaaagtttgaggtgcgtactgactgccaatggaagcacagcctgtgcatccacggcgctggacaatgaccatgtaggtttccttcattccagcctagggttttctacactgctggtgattggtttagtttccatttacttaccctatgaacgacggtgttggctattgcgcacaagcaactagggaatcaggtcacatgagaggagaatgggggagcccaataattgtaatactcctgcatgccattgttttttagtttgtataatttccgtgcactccattgtttcactgtttgtgaaactcgaaaatgacctaccctttgacttctgagttcaccagaagtcatggcagagaatgacgtcaggttggtctggtctggatgttgctgaatttttacagcaggaacaaaagaaagattgtagtagtgagctcacttttattacagaattaaaattgggatattctgtctcttcccctttagggcttgttcagttaggaggggattggagggattaaatcctcacctagtcaaagttgaataggaagggatttaatccttctcaatcccctctgattcttatgcaaccggacatggccttaatgtatgtaggtttgatgtttccgaacatgggcttacttgcaggcttaagcaagcgtaccacaagtgaaggacttaga

SEQ ID NO: 4963 - DNA, 494 bp, Zea mays
  Intron number 2 from transcript GRMZM2G158789_T01 (locus G RMZM2G158789) derived from phytozome v7.0 (chr-ID 7; pos 1 67820612 to 167821105)
gcagaatttgggaagacaaaggtcattgtatcggtgtaagtgcaacattctttgataccacccttttcatagtatgttttagattttggatatcaaatgtgaaaaagctagtctttcacttcaatattctgcacatcaccgcactctccttggcctgttaaatatttatattggtatatttggaatgaaataagagcaagttagggtcaagctgtatttcttgttggtaatttgacaatcatggttttagttttgtgctgctatgctcttgccactcatgagtttagttataaggtcaatcattgctcaccggagacattactgggactcttgtatgtgtttcttagcattgctatatttgaatttcctctatcttgtctgtgaacttgatggttttgagattctttacttatcttgaatgccttattggtttatcgttcctcttctttaattatcacctttgcagttttggaccaagggaaagtaagaaagca

SEQ ID NO: 4964 - DNA, 547 bp, Zea mays
  Intron number 2 from transcript GRMZM2G154245_T02 (locus G RMZM2G154245) derived from phytozome v7.0 (chr-ID 3; pos 2 27279640 to 227280186)
cactatacgggtaggtgaaagtagtggttttgattttatttatgtttctcaactatagttattatacatacttcctccgtattaaaacagtcgacgttctgtttttgataataaacttattttggagattcaaattttattattattttctataaatctaatcaaatctgagaaactttggccggtcatattatatcgatgattattttagaacggagggagtatatgatatgcgcagaatttatcaaaaaagtttgctatttgagcccagcagtgaattgttctgttagtaaatggtagtactgtgtagcgagttttttttttcgttcagtttgtgtcctttgttacgcttgcatagtcactaataattgtgaatttttttttgtaatgaaaggatttaattgattcacaattactacatgatcgagctggtacaataaaagtgaattcacttcctgcttcaacctaaacacaaagctgaatatctggttttcttcttcttcttattttaggatctctggagcaataaacatatacggcctcggtc

SEQ ID NO: 4965 - DNA, 992 bp, Zea mays
  Intron number 1 from transcript GRMZM2G041463_T01 (locus G RMZM2G041463) derived from phytozome v7.0 (chr-ID 6; pos 1 42256694 to 142257685 reverse strand)
aggcgtagagtgctgcaagatctttggttttgttggtaagagaaatcggtccttttgtcctgcattctctctctctctctctgtgtgtctatacatatatatatgctgcgacacctcaaattcgaagtttagtttcggtttgtatactagaacccatcgttttgctgatcgagatctctttgccgcgtgcggaggacgagggccagtaacaatatcggttttctaatatttgttctgataaacttttgccatcatttattttatttcttattgggatgagcctcgatacaacccagatcattattcaggtcgtcactagctagtaccaagccacttctagccgatcaaggttaattagttcagatgcccacatgccattaggtctggctgggacaagtcttgtaggcttcaagactccagagtcctatgcttgaccttaaccaaaataagcaagaaacacgaacatttttgtctaaatgcacaattcagttttttttttgtttttgttttcatatactttccgtttcgtccatgacatgctttctaaaacttttaggtcagttcgttctcgatgaactataatctctctattgctaagtacaaaaaattaattattcttctttttaaatcaataattaaaattaattatgcgtgtgctatgcatttgcagctctataaacactgcatgtgttccgtattgtgaggccattttaaggaatgcagaaagatgtgtttgagtgaaaaagatttctgctctgaagaggagcacatttctccaataaatttcaaatcgctaataattcttgatgagcgaggatttcaagcacacattagacgcatagtagaaaatagctgtgatgcaactgatgtcagaagaaatatcgcaatgctatgtcatataatttctgaagacggctgaagttctctctttaccgacttgtcgtcctacgagttcctacaatcagttggtagcaggtgtctatatatataat

SEQ ID NO: 4966 - DNA, 827 bp, Zea mays
  Intron number 1 from transcript AC191735.3_FGT013 (locus A C191735.3_FG013) derived from phytozome v7.0 (chr-ID 7; po s 149989189 to 149990015)
gaccttcttaaacatattgtagttcacaagtaaggtgtactaatactaaccttttttaaatcattccatgctacatttttgtctttcaaacattcattattcattattcagtttgtaatttgtactaacacctttagtgttgtgaggtgctacatgtatttttagttgatcagaaactgcttactgcaatgcaggccatacttttgattcacatgctagctaaatttagagcttcgattaaaggctcttctcacttaaggaattgttcttttttgaatatatttttaaattattcattgagttatgctcatagttatgtttttgtttgtttgtttgaattcagtcaaacaaactgagaaaggtgtggatcttattgcttcattatgtcatgattatcatacctctaaataacgtttgaaagaaatgacggacaagtctcacaaggcaatagacacagacatggaaccctttctcacatgcttgagcacatgcagtccagctaatgcaaaaacaatatccacgttaatgatttagtacttgcatcaatcaggaactatgatgatttccatgtcatcgaggaggatgagaagatcttggactgggagagaagtgcaccgaagcaacggctgtctctctacgcgtaacagatcaaaaccaacatatagcacaacaccgggaataacggatcacactcgtcaaatatgattgtgtgcctctgcaacatatagcaggtaaatcatgatttgttttcttctgttggttaattcatgaacctttttattagaacatcaggaacaacacatttttgtacaggcagaacaactttc

SEQ ID NO: 4967 - DNA, 803 bp, Zea mays
  Intron number 1 from transcript GRMZM2G054821_T01 (locus G RMZM2G054821) derived from phytozome v7.0 (chr-ID 3; pos 1 86437211 to 186438013 reverse strand)
cgcccaaccgcaagtgcatcaattgcaacagtgtggtaaccctctatcgccttttggttcattactaagctgattgggaggcgtctgctgttccactttgcggatcgttacatgggaggcagtggaatctgtctgcgtttggaatgttacgcggttagctcagatttgcgaaaaatatcgagttacttgtgaactttggttcgttggtttatattttcaagctgtacctgttggctggacgattattattatttctatattgtttccaatatcagaccatgacatattcgttgctattttacttcgatcacttgtggtactttatttcgtccctagtttactctagattgtgaaactgtaaatgttgccactgtttcctaacacacaattgcttgatttgtatgttaatagatagttctttgatttatttgagctacttactggctttgttactgttgtctgcatcttctgtttctgtttgacaattaaattgtttatagttgactgaattgctgagctttttaatattttaactgtcagtaagtactatttgggttgcatataccagtttatgtaatatagtgtgtcactggagctgattttcccattcggttaagtgttattgaatctacctttgactgattttcccatttggttaactgttattgaatctacctttgatgttcagcacaaaactttatccagtgatgtactctgtcagtttcttgcccaagtgttattttatataccattctcttgatttcacctgaaccacttctgttttgttatataggggccacagt

SEQ ID NO: 4968 - DNA, 739 bp, Zea mays
  Intron number 2 from transcript GRMZM5G890843_T01 (locus G RMZM5G890843) derived from phytozome v7.0 (chr-ID 3; pos 1 3391396 to 13392134 reverse strand)
atatcctgcgtaagcagactgctctgaaggttggtgattgttttgttgaacttctggtgcaattttactaatatttgtttctcaagaacaatgagaagcaaaaaattgctttgctctatgtcattatttctgcgggtgttaatgccattaaataattctggtttcactgcatgacagagcttcgcatagagttgcttttgctcatctaatgaatgtcttcaagtgttctaaacatggaaatattttactcagcaaacatggtcaacctttagctatttggtcacataaccatgcattgatagattttatgggtttcctgcacatgaagtcaaataattctgtgcatgtgtataagcaatcaccaaggctatgttgttctttcatttgtttggagtgtgttgtctaaggattaattaggcggataacctctgtcccacactcaacaagtgtcaagcatggtttgtgagtttgtgtatacagaaacaggattaacctttctaatgctgaagtaattgattaattctgatattagtcgggagtcctgtttctatagggatttttttctacctttaattataaaaccctcaaacttagttgctttcgatcattttatacaaatgttctctgttactgaagtacagtgcttacaatcgatcattgtaccatattgactaacttgattttatggtgtcccgtgaatgcagagggagagaaaaattccagttcttgtcgggattac

SEQ ID NO: 4969 - DNA, 999 bp, Zea mays
  Intron number 2 from transcript GRMZM2G168913_T01 (locus G RMZM2G168913) derived from phytozome v7.0 (chr-ID 7; pos 1 45640183 to 145641181 reverse strand)
caacaagtatgccgttctgagttttttcccctttatggatatgcatatatcttttgttatctgtgtcaatttggttatcacgtaatggtatttgttttcttagaaatcataattaatatttagttgatctaacataggggagtttaacatctgttggttatgttctagttgcatggtttactgattcagtcatgaaataaatcatctccagttcagggacaacaatttccaaagacattaagagttctttgcccttgtttgtaaaagtttggttggttcaatcaagacatgaacaacaacctctctgaaagattatcaatggaagcatgtaatttgggaagaaattatctgatatgaaaatttgctcagtttatgtgttgaagttttgctatgtaaccaactgtattgagtccaaaggaatccatcaaacattttcccttatttgacccaacactaaatagtctttcgttgttcatggtccagtattggtgaacacctaatgagattatgattttcaacacatgatgagattatacgattcatttatgcttccatatatttttagaaaaaaaccctatgattttgtttctaaagtaaggatgaatgatgactacaagtatgaccagttgggctaatactttgctgtgccgtttctttggggtcttctcacaagttttattacacatgaagattcaatctaagatttttcttactgtcaactgatgtttatttccagttgtccactaatcaaaattctgaattaggtttcagacttttgaagttttctactagccatggccttaatttcatggcaagctattctgagataaataaacacagtgcaaatgacccaacaaaaatgtattggaaatggtcattctaattgttctgatgcattgtcatctagtgttcccattttgcatactatcaatggtttgtacagttatttattattagagttgcagtataatccttatgaatattgcagtactacctgta

SEQ ID NO: 4970 - DNA, 801 bp, Zea mays
  Intron number 2 from transcript GRMZM2G055678_T02 (locus G RMZM2G055678) derived from phytozome v7.0 (chr-ID 6; pos 1 34465092 to 134465892 reverse strand)
cgtccccaacaacacattggaattccacttacgcatgtacccccatttttttatcttcattatctatgattctgcaatccacatgtttgatttttacttagtttctctttgagaccggtcgccatgtttggttagcacatctataatgcattacaataggaggcaatagctgttcactatccactagaacctgaatagcttagctgttcaactgagctttctgattcttccattttttttccattcaagtatatgatattcttgtgtgctattcaatattacaaataacaaatttgcatatgagaataattaagtaaatttggccacctaatcagtaggattgtttggttggaggaatttttgtagcatgtgaaacttgagctaattagaaggcaaccactaccttctcttcagcatgaaaaaatggcttagccatttcttagagttaatatataatgaggcgcagttctcctgcgcttttcaagaaaaaaatcttagagttaagctcttagccacttgctggtcttatcatttgaaagaagaaatggtactcaattgctggtccctttggcaattttttctttgcacttttcttgttagaactggcaagccacagccaagtaccttgcttgcacaaacaaaaatcccttctattgtagggcaatccatggatttattgcttgtcctgaaatttgatagaggcgttcatgatatcagttgcttgttaattccatttgtttcttgttctcttatgcattgttatgaatatttgcaccttctgcaggtaacgatcgaccaaca

SEQ ID NO: 4971 - DNA, 948 bp, Zea mays
  Intron number 2 from transcript GRMZM2G020928_T03 (locus G RMZM2G020928) derived from phytozome v7.0 (chr-ID 6; pos 1 64573648 to 164574595)
agaaggaacaccctttgtgcgacaggcgaacagctgtctctatctctctctgcagtgttatttggtttattatatgcagttgcaggggagaaaactaaggcatgttcactgcagctagaagcacagccgcagcagatgcagcaggcttcttatagtatttgcagcttaggtcaaactttatctgttattctaggccctccactgatctagtttgatagtgttaggagtctagatagtctagatagagatctgaccttgatcattccttttggattgttggtcgcgtgagtgcagttgtttcaaactttcctatttcttaatgaaatagggggcttcgccccttcgtaaaaaaaagaagttggagtggcaactgcagctagctgcagcaaacactcctaacaataatagtggagagagactttcacgctgtttaaatttaggtgatttttgggaattaacttgcagatttattaattattatataggtaaaaagtgtagtatcagttactaggagcaagaacttgccctgatgacacagttattttggtttttctgttcacttctcctaatatttaaccttttgagtaagtgtgcagattaggtcttaaaaagggattgcgattaagattttattgccagagcctgagctgtagaattttccatttacacacgtggctgtacagggggtaaacttgcaggattattacttggtgatcctataagatacacatgctgtgaaccctgatttgttttagctgcttttgttcgtttttgtctacttagccttgcacactgaggacctttattgaggtattccttgatccccatggttctagataacaaaccatgagtttatatcattatcccctctatctcaccttgtattgaacatggtttttgatactattcttctttgtgcttgaaggttgccggtctgcgggttgaatc

SEQ ID NO: 4972 - DNA, 713 bp, Zea mays
  Intron number 2 from transcript AC201958.3_FGT001 (locus A C201958.3_FG001) derived from phytozome v7.0 (chr-ID 3; po s 54967464 to 54968176)
cctgccctggcggaggggaagggtaaagggaaaaggcctactgaagttgaggaagccaaaatggctatcgaagatgacacactgcttggttaaggtcccttcgaccaagtcctgggtggccgaaggtatcgagttcaccatgccgcggggaaggtaattggcgcaaagcagctggccgaagccattggcttcgccgaacaacaggggtacccttcggggtccattatttgggggggggggcaggcaagatgattatacgtactgctgccttgacaacatggagacagatgtgtgccgctatatggccgacaatgttggctttccgaagctagaagcgattctatcaactatgtctgatgaagacttttctgactgtttgtcttatactcatctcaaggtaattttgttaacctttgttttttagctttgggttgctttgatgaaaaaaattatcctttgtatcttcgtagggcctggtcctaggcaaagccttgaagaacaaaagaaatattgagaatgaagctacccagaaagaaattttaaagcttagatctaaagtgtttggacttcgatttgattgtgaagaaatggataaatctttcaagatattagaaaaggaatttattaacagctagaccgaattccagagactcgaagcttcaaatgttgaactaaaaaagtgcattgcatcgctcgaagctgagctggggcag

SEQ ID NO: 4973 - DNA, 870 bp, Zea mays
  Intron number 3 from transcript GRMZM2G488458_T01 (locus G RMZM2G488458) derived from phytozome v7.0 (chr-ID 7; pos 1 49719784 to 149720653)
tgcccctgaggatttcccaaacttcatcagagaaggtgaaatcgtattattgatcttgtcttacaagttatgggttatagactgtcatattcttcataatctgttgttactgtcgcagtttctgtcagatgccatttactactcacttttcttgattagatgttattatatattttctagataggttggtgtaattctaggggaaactaaaagtctgcaagctaatattaatgaaaactaaaagcatgtaagatactaactaatattgtctactaccaaacaaagttttgcaatcatgtagaagttatttcgcatacacgtgacatcttggatattgtttatattaatgtacgagtcacaagagaatttgggaatactgcattgccaaaaattctatggttttttgtaaattatggagtcacctttttatattccctagttttatctttcagtttactaacaatgtgaaaaatgacacagagatagtgtctaaggacaactgcttctgtcgagggcaacactgcaacatagtttttattagcaagtgcacctctatatttaaaaaaaactaaagaactgtaagtatggatcaaattttctgtatcggcacaagacatttgattctggaaaactttatgagtgtattatttttatatcttaagtaccacataatgtttgcttaaatacaatgcctttagtgacttggtcatttatttgcctgagaataaccttcatcaatgaactcttatctatgcagaacaaatgggaacgtttcttagcttcaaactaaacagacctgtaaagtttaatcattctgcaaattaatgcatttcaggcttccaggtcaaagtagtgacaccggacaactat

SEQ ID NO: 4974 - DNA, 566 bp, Zea mays
  Intron number 3 from transcript GRMZM2G410839_T01 (locus G RMZM2G410839) derived from phytozome v7.0 (chr-ID 3; pos 1 13642830 to 113643395 reverse strand)
tggaaggttggtgaaaaggtgcgctcaagtatcaacccatccggaaggtgatcttggcccgctccatgccttcacttatggagtgtacactgccctgatgatggctcaggtacataaaaagaaaatataaaaaacaacatggggccagactaacacatctctaatatactagaagcaaaccctcgtagcttcctagacatgccacaatgagattttgtcagtctgcttcttttagtttatgtggtttagacctaattaattatgcaagtgatgtggtataaagttgttcactgacatgtcttttgtggttagtgatcgaaccctaatcttattatgataactgccatttctgcattattttgtgtatttattcttattattgtgttctacctgggtgaagaaactttgatttctggttccttgattccttaatgtttctttgtgttacaacttacaagtttattctctatgtgaagtggtcacatggtacccttgacagtttgttgctttataatatgatataaaatatcacatattagctacgaactctttctactttctgcaat

SEQ ID NO: 4975 - DNA, 1018 bp, Zea mays
  Intron number 1 from transcript GRMZM2G338896_T01 (locus G RMZM2G338896) derived from phytozome v7.0 (chr-ID 3; pos 2 24606205 to 224607222 reverse strand)
gttccgctctcgcccgccttggcgacaccgtaatactaccccgttcctcccccctctctcctatgcttcccgtcttgcttgtctcgcgctcttgaactgttcgacgaattgtctctgcaggccatgctcgcgtcggtcaagctcgaggtgatgtcgcccccggcggagcacccagacgaaggatccatcggttcgtgttccccctttccctactgctgcctgcttcctattgcctttggttttttattcttttgttgatggacgtatgtgtgttttgcgcagctgttgagttccacatgccgcctatctgctccccactggttaggccaggccgaccccgtcatctccaaggcccttgaagacgtttcgacgaggttttttgtttctccgttaacttcagctctttaattgaatggttggacttttggaacttcctccccaccaatgggactgctagccgctaccggctgcagtaaaaatactcatgtacgtactaccgtagactttgaattagcgcaaaaaaaggactggttgacgctgacacccgtatgtgtcggatccgcacgggtaaaagaaagaaacaaagaaagaaacctcttatataatctgataagtgtggttaaatatcgctgttcttatcgtcgcgagatgcccactaacgtgcgggctagcaatttccatgtgcaagagctttctttgcgagctttgattggtcatcatgccatgttgttaattaaattcagaaacgacgacagggaatcttcggtggagggcggagattccacagcctcgccgtcgccgatatttagaaccacctagcgttacgcaaccaatccggcaataagaagaatccgaccgactgcgtcaacacacccacaaagtacaacaaggctggttccgctctcgcccgccttggcgacaccgtaatactacctcgttcctccccccctctctcctatgcttcccgtcttgcttgtctcgcgctcttgaactgttcgacgaattgtctctgtaggcc

SEQ ID NO: 4976 - DNA, 1059 bp, Zea mays
  Intron number 2 from transcript GRMZM2G091989_T01 (locus G RMZM2G091989) derived from phytozome v7.0 (chr-ID 3; pos 2 31109432 to 231110490)
tgatcatccggccttaataatccagcagatatctggtatttccgtacttatttgataacatctctaccaagtatctaccgttgatttactcaagttgagttgattttttattttccacgcagaataaaaaagttgatttgatttatatccgtgataaaactgggccgcatctgatatggcgtgtgttccacgtttccttgagcaaaactaggcacctgaaagttgacatctagaacgatagaaggaacctagggttcagaaagaacaaagctgtctgctatagttgaaatctgcaatgaacctagacttcataaaggacagaaatgcctactgtggctatgatatatagctgtgtgacattcatgcactaagcacagcaaagggaaaaagggtggcaaaataaacaaacctgtaggatatggcctatttggggaagagaactttctaacttgcatcattctgaactgttataatcaaatgatggaattcataaaatatattatttaaagcatttcggaatcagaaaatataaacttgtgatgatatgtactgtaacttttatctgcaactgatactcaatgtcaaatttgtcacctatgataagtgtatctagtgcttcctttgtcatcttgcatctttggccactcaatgccaatggttactaaggaagcagtccaatcatactgccaattgagcatctggttgttttaccttcgttataatatatgaaaatataaaacattttctctattgaacatactcacattcatcaggagagaaaggagagacatgaataccgattgtttgataggtttgcatcatacatttgtgaattcgtaaggtaagttagaagtctaaaatctgaagtcatatttatgttggatattagtcttcaaattgtgtattgggggggggggtgcatatttttgtatgtttacatcaattatgtgagaatttatgatagttttatgtttttaatattatactcccttcaacatctgatttagtctattttcttcaaaaggtatatagattaacatattcagtacctgagatctt

SEQ ID NO: 4977 - DNA, 698 bp, Zea mays
  Intron number 1 from transcript GRMZM2G142873_T01 (locus G RMZM2G142873) derived from phytozome v7.0 (chr-ID 7; pos 1 17707104 to 117707801 reverse strand)
ctgccttcacccaggagttcggcgacgactaccaggtgcggttttgctgctctcttctcgcctgggatttacacgcacctgtagaagtcgcattctagtccgtgtagcttgtacactcttagtactgtctaacttgaatttttgcatcgcaaggcctttaagacatttcacaccataacctgtacgaacttggttggtgcaattatcattaatttgattttttgctgttgcatgttcagcattgaataaggtcgtcctatcctaccctacttgggttgatgtgttcacaacagctaattatggggaaaatcttttgctatgatattgtctgtccttgcaaccactactttcttttgatgctttagcataatgctgtactgatgcagacccttttattggagaagaaggacgcccatttgtttgcttatggtggtgctcattgttattgcctagtgccctagtgacttgtcaatgttggaatggttaaatagtcagtaatgaaatgacacatgatggtttagtttatttttattattcgttgctgtatatagtagaatagagagttttggtagttgctacttctccatttacggtgcaagtatcatctgcataggtttagttcttaaatatacaatgaaccagtgattgatcttccacttacaggtatttgtcactgatctgtggactgaccacactcc

SEQ ID NO: 4978 - DNA, 970 bp, Zea mays
  Intron number 2 from transcript GRMZM2G143234_T02 (locus G RMZM2G143234) derived from phytozome v7.0 (chr-ID 3; pos 2 24458374 to 224459343)
ccttaagaatcacattttcaggatttgtgcaagtggtaaactgggtaaatcgtttatcaaaatcttcttgttgtttgtaaagtggtttgtattttggttttgtttggatctttgaattgcacgatgcaaggtgaaaacattgtgacaaatgccagcattctgtagaatcgaaccacttagaaaccccttatggatagttaagttgttgattgtagcacactagcacttaacaatgttacaccaaaatgtggattatttatcaaacctgaatgcatctcatgatgcatcatatatatgtgactttagagaatatgaagtacaaagagactttccacagtcaactgtgaaatctggatttgaagataaaatgcagagtgtgtcgtcataaggaattaaggatgaagtgtgatgttaaaacttacagaaactgcaacgacatgtttcagtagcattatgttttgtttagaaaagggatgcacttctttgaagaaattgtgatcctacagcgaataacctacttatgataacttagacataatccatgcacatgtaatatgtatatattgtttaattgtgcctgaaatcttgctgaaggacggtgattgatcgtatttcctgatttgtgtgatcatgcttcttccctgaatatgttgctattcaaccatttataatctgctaaacctgtcattgctcaaatatgcaagcatgcgtgctcaccagtcaccacacacaaatgtttgcaaaaaaaatcatgcacaatatgaggaaaaatgcaccattgtataatagacattaaacaatcaactattctatggaattttatgctttgtgtttaaggtacttccatgaaattcaaaggcatgaactagccatcatatgtttgctttgttttttctgtttgtttcaatactatgtagaactggatgagtttttttttgttagcatgtataactttttcctgtcgtagagt

SEQ ID NO: 4979 - DNA, 455 bp, Zea mays
  Intron number 2 from transcript GRMZM2G318849_T05 (locus G RMZM2G318849) derived from phytozome v7.0 (chr-ID 7; pos 1 45382558 to 145383012)
accggcgatttcaaaaatttccctcccacccagttggtggcaatagtgtgcttcgttccgtttttaggctactcttgcatgtgattttgtttttcgcttggaggtgccccgattgctctctgatctctaggtttctagggtttaatgcgcaaatggcgtgcaatgcggcaggtgtgagcgtgagatacgggcctggtgctgcttatctgaagttcactaacgcttggttttattctgtttcggtacatttctgaatcgaactagtgttcatttgcggaaaatttagctctcaactgttggctaagctccaattggatcttggtgtggataatctgattgttttcgggctcaaatttgtcaatgtcttactgaatgctccaaacttgttgtcttccaggtgtatctgatttcttattcgaatcatgtatgttttgtgttttagatcaggtaaaggg

SEQ ID NO: 4980 - DNA, 846 bp, Zea mays
  Intron number 3 from transcript GRMZM2G174390_T01 (locus G RMZM2G174390) derived from phytozome v7.0 (chr-ID 7; pos 1 00298744 to 100299589 reverse strand)
cttggtattaacattggtaggttctaccattttttcctctatgagtgatgtacttgttttagagatccagatagtgctcgtgttcaccgctgccttcgtcgtctcctcgccggcgtcgctcgcgatgacccccctccaacgattccagggtcttcgcgacccaggcgtgatgctctacgccgacgatggaggggagctacacgaccacctcctccgtccgggcattgttccacctctttcttcccccctgtaggaatcacgggactgaaagaaaggttagatttctgtttgcctttctgggcatctcagtccgaacaccataaagattccgagagcactgtaacaattattattaaacgatttctctgtctcttgctctgaacaggaattcctatcgtcgttgcagatcaaatacgatgaacatagattggagaaaggtggaatctttgtgcgtgaaaactgcaatcagttgcagcagcaggttgattctcaacctgcctgaaaaagggatcggcttttacaaaagaattatactggactcaagaacacctctgaactgaacctaaacacagccggaatgcttggtagagacttctgtttctgaatttatgaaaaaatttgttggatacctatatttatccttggtcattttcttaaatgatatcttcttgttcaagtagttttttgtgctttaaaatttcaaggtgtgtaagagtgtctgtaatatatttacatggccaaattttatgtgatatttctgcttttctacaatatctactttgtgtcatgtacttgtgtgcctgatatgttgctccatgttatatttcttgaaggacaaaggttctg

SEQ ID NO: 4981 - DNA, 937 bp, Zea mays
  Intron number 2 from transcript AC187802.3_FGT010 (locus A C187802.3_FG010) derived from phytozome v7.0 (chr-ID 6; po s 157820296 to 157821232)
accctaggtcgactgggctcctaggcgttgacaaggtaacatactgaattgctgattatgagttccatacagttcacagtttcatcaatagcatagattggcacataaaacccatagtactatagtagaggcatatgtctgtgaccaaagttcttttttcttccaatcatttagctaaagaatgaaaaaaactgagatataactaacatgaaatgagtttgacaaacactggctcatcgggcaccagagaaacaacacctaaatttccaatcatttagcctaacatcattttgatctacgtagtttgctccatacagcagtagaataagaaaatgctgactccatcttatgaggaaattagtaagtatgacttccacattagctctagttggttgatcatgcaggtatgtgttgtcctaccttgagctctatgggtcagacttcagagtgaactagaggcaacctgaagtaatggaataatgtgcaacagcgtaagcagttgctaaaaaatgcgttttggaaatttcacaaatacctgaaatttacgtagcctacgagagaaagatgcagaaagaacagcaaaataagataattatacagcaattacgaccgaaatcctgaattaaaccactgattataaggaactaaaccagtgaaaatcagcaacaacccccttcctctgtatagccaaaatggatgcaaagcgcacatcatccagcatttcgttcccccgctctattaattagacgcataaggatattaatcgcgaaaggaaaaaactgactccgccctgagactagccaacagaaccaaaacgaaacggtcggaacagtaggttccttacagcttcaagcatctggactttttgcaggcgcaatgcttgcacccgttgccgtccgcagcctcctccaccctcggcctgctcgaacacaaagca

SEQ ID NO: 4982 - DNA, 1058 bp, Zea mays
  Intron number 2 from transcript GRMZM2G069651_T01 (locus G RMZM2G069651) derived from phytozome v7.0 (chr-ID 7; pos 1 31784686 to 131785743)
gtactaagattacacttttcctcaaggaagatcaggtatgcaggaagctggatcaatcaaagctcgttattatggtatctgttgcattgcttgatgtaatctgttctaattgcataacccaagtatgcctgtgtttcatctagctatcttttaactatcctgtacaactggtactgatagtacttcaggacttctggttactgggaatgcttctgttttcatactagatagactatatagattactgttgtgcctgatgttatctactagtcctaagatggtaaaatttatgaaaaatataggcttttggtgaagttgacttatggatgcgagcaccacttgctttggttcatcacgttgacccaaaatttgctaaaattgaaaaatgtcatcactatctcattagttagctgatctgaaataatccatccatgggtagagcacttacatcgggtattgtttcttatggcttattacatggcttgtctacatttgatacatcatatgcacattggggatgaaatcatttttgggtacttgtactgaattactgattaggggaaacagttcaacatgatcttctgcaaattgtgatattaattagaagccaactttcttatcatggagatgtccctgcgaattagcacatgtgcatacctaacacagcatccaagtttgttcaacaactgtgttattactagttggccacttggtatttttttttgttttaaaatgaacgtgcaattgagtaaagcagggatgtatatttatttttatgcttgctttgctgtatccattatattatatatactgaatgttcattggagtgtcctgtaaagaaaataaattggttaattatttctagggctcttaaggtaacagtacaaactatttgatgttttctgttgtcatcaatcacctcattgatttttcaggactgtgttcattttctgtgtagttatttgcttttctgtgaaagctgttggtgtttcttgtactcacctttcaacttctctcttgcagttagaataccttgaggagcgtcgcctcaaggattt

SEQ ID NO: 4983 - DNA, 637 bp, Zea mays
  Intron number 1 from transcript GRMZM2G169788_T01 (locus G RMZM2G169788) derived from phytozome v7.0 (chr-ID 6; pos 1 06542096 to 106542732 reverse strand)
tctttgctattctacccatccctcaggtacttggtctatagaacaattttgatggcattctaacatgtgttctttgcaatatacttcggttaagctctttgctaaagcattttgttggcatcatatgaaatgtgttttacatttgatagcatgtcggtatacatgaaacatattattaccattgatgaacttctagtactccttctattttaaatcataaaatattttgacttttctagatacatagttattctatgcacttcagatctacactatgtctagatacataataaaagtaatacatctaaaaagccaaaatgtcttataatttggaatgtagttgttaataagaaatgtctagaagtaatatcttaacctgttagaagttacagatttacattataatccacatattggaaattagagttttgataaatttacatcctgaaaataatcgccttttttatggttcttctgtactttgactgccctgagcatgcattaagttaaggcttatgcatgtttctatcttgttatgtagttaagattctactaatgatatgtctgttgccctgaatggaaaatgatgatactttctgttagcaggttattattttggtcgtgctacctaatcttc

SEQ ID NO: 4984 - DNA, 1002 bp, Zea mays
  Intron number 1 from transcript GRMZM5G893913_T02 (locus G RMZM5G893913) derived from phytozome v7.0 (chr-ID 7; pos 4 6187804 to 46188805)
cgcgtcgatcccaagtgcgaaccccctccactctagtcctctactccctccatctactttctcctgcgatcaatgatcatcatcccgtcgccacgtcttctgttggctcgctttacagacgccacttgcgtcgcgatatttatttatttttctttgtcacctcgattgttagggtttacggtctgcaggtcggtatgccccagcgctcaatcgccaatttatctgcaagtctcagcacttgtggataatttggatccatgtggtttggtttcgttctaccgccgtgctctgcgctacaccgttaccttcgccttttgcttcgcgcattgcagatttggtgccgcgttgtagatagtttatgtttggtcgaaccagtttcttccatgcagaaaataaaaaatattgtttggaccacaattgtttgttccttcgatgtttcgttgaaataaagcggggaaagtttttatctaaaaaattgtttgttcttttgtccgtttactgttcctaatcatcacttccgtacttttctgtacttgctgtggtctccaccctttttgattagcctttcttgtaatggttatttcttcctttggttgaacacttgacttatttttgttttattctgactcgcttccttctaacgttattaaaattaattttgacatcctgccatcactgtttgaaatactgtatagccagtatgtagctaattaaatgtagggatgatatcaggtgtatatagaaggctagcgcacatctgcacctatagaattctgcccttcaaaattagatctcacgatggactatatctggagtttttctataataaaacgaaaaggctaagagtgggaagagtttttctaaaacaattgtgcactgttagatctgattttaaagccaggattttaggccagccctcatatgcagctgataggatcccttaaatgtcggtgacagtcggttctcactcatttcacctgtggctgtgcaaggtccgttgga

SEQ ID NO: 4985 - DNA, 911 bp, Zea mays
  Intron number 2 from transcript GRMZM2G105604_T01 (locus G RMZM2G105604) derived from phytozome v7.0 (chr-ID 3; pos 2 16595159 to 216596069 reverse strand)
ttgtgcgcttgaaaggtggcgatcctctggtaatttgctcttgcttgcaaatctacttaacacctgatgattattttggcacttacgtttgttacccaatctcaaacaacaaaattggcttgacaaattttccctgtgatagtgtcaccaaacattgaggactaacttttttgaaattatccattcttagaactgattgtctgatactgattagtagtttagtaccgttatatatgtcatggctgtcacatctaacttatcaaagcagcaggtcataaaagaataaaagtaaaccctcatgctactttttttttctttgatacatgtggttcttgtacttggaaggagacaattttctaggatggaaaaagatcaatcatttttaaactgttgtgtttgcacaacactatagatgatcgatcaccacgacgacgacgacgacgacgacgacaacaacaaaaccttttagttcaaaataagttgggatagactaaagttggaatccaactgaaactaagtcaaggttcaagcacatggataactgtttttcacgcactcctatttaaggctaaatctttgagtatattacatcttttcaagtctccttttgttgtctcttccaatgcaacttcgccctaggatttccttattattggttaattggttataccatcttatgaaaatgccatgtggatgtatcattttagagatccaaaagccataggggtacaattgtactttttctataaaaaaagaggcaaaaaagtagttagttaccaacactgcaattttatcactttgagcatggacagtgtttcactccacatataactctctggaactgcacttctatctgtgggcactaaatttgcttgtattcctttcaggtttttggaaggggtggagaagag

SEQ ID NO: 4986 - DNA, 951 bp, Zea mays
  Intron number 1 from transcript GRMZM2G533860_T01 (locus G RMZM2G533860) derived from phytozome v7.0 (chr-ID 7; pos 9 5827382 to 95828332 reverse strand)
gcaagcagttcgcagctgaggagatttccgcacaggtttaacactaacttcgaatgtatctccagtaccgctattactctgtttttttggattctgacagtatacagttaatcaactatctcaacagatttggtatagttaccagtggataatttgccttataatttagcggatctgtgtggtgctagaattatttttgcagcatttacttttaaaaggttgatgctcctagatcaatgaccatgcgggtgttcctcctgcactgaataagaaagaattttggtgatggtgttcctcctgcactgaatattgggctcccatcgagcaaccaacagaaagaaaattttatgataattagcggtactgtcggaatccactggtaactgtaccaaatctccagtaccgctattactctgttttttggattccaacagcatacagttaatcagctatctccacagatttggtacagttaccagtggacaatgtgccttataatttagcggatctgtgtggtgctaaaattatttttgcagcatttacttttaagttcatattttgttctgtttgccagagtaatatatgagtcagtaacttgacttcatttgaatcatgcggcttcttagatttcagtctaactaaatatctaagtttgcaactgcaccttttgtttcatgtcttctttggggtggcccggtggagtgggttggagctagagagtccctgatttttagtgcattttgtcgtagtgcaccggtttctaatttgatgttgtgatttccaagttatgcttcagaatgttcgtaatactaacatgccgatggatacattgttaaaaaggttactgaggtaccagatcttgtacagaagtccatgaatcatcaatttggtttcctaaatattttctttctttcttgcagttgaacctgtatcttgtcctgcttccacttg

SEQ ID NO: 4987 - DNA, 944 bp, Zea mays
  Intron number 1 from transcript GRMZM5G856920_T01 (locus G RMZM5G856920) derived from phytozome v7.0 (chr-ID 6; pos 9 9763221 to 99764164)
ctcacggattcaagaatccttgagagcctagtactctgcaatgcagaaaagtattagaaagtaccattcacattgattctttttaaagggcagacccagtgccggaggctcccacatgagtgggtctgaggtagggataaaccaatcgagtagtataaaagatactagtaagatgattatcagctatgctaaaggcatattgtctgtcattttggaagtgttatgctcaaatttagaatcatgcatagtccatgacaggacgaacaccaccgagaggatggccgggtggagttggcttgtgcatgaggggaactagattgatttcttgtttacctttgattgctagaaaggcagacttcgtgcagtggtgagagctctcccacaagtcaccaggtcacgggttcgaaaaggtttgcctcagtttatcccttccctagacccaactcatgtgggaacctctggcactaggtctggcctttcattgatagctctcctctcctttatataccgaggtttgcatgagtacttgactcctaagtgattcaatctactactagcaattctaatcttatctctaaacctgaagaggcagagctacggttcgcgaggctgtaccattgctagagtgccatcccagcccaaagagcctaggtggatgcccaattgcccatgatgctgcatgcctgcatcatggtgtacaattggacatgttgagctatttgattttgacacgggataagaatagtccaacagataaaacatgcaaagttacattttatgctaatgattagaatccctctatcagggacatcgaaacaaagttgcagcatagaaacatcaaaagaaagtaacagactaacagttaacatatttcaaaaggcaaaggaaactatgaaattagtaaacaaccttttccttttgcagggcttgtagttcagaaagat

SEQ ID NO: 4988 - DNA, 859 bp, Zea mays
  Intron number 2 from transcript GRMZM2G373277_T01 (locus G RMZM2G373277) derived from phytozome v7.0 (chr-ID 3; pos 9 8732658 to 98733516 reverse strand)
ctaatttttttagataaattgatagtggggaggtattagacattatctctgtagattcaaaggccttatggccccagactacatgatgcagtgcacatcttcataacgcagtactattaattaattacatgtgcaaacatggggtgaataagctgacacatgccacatgacaattgattcacataaaacccatttatgttattcttagcctgcccataccactttggtttcctaacaaactatggtgttagtgccatggatgcttgtgtgtattggtggtttgtaatggggtataaagtttatatgcattcttccggtatatatccgttgatgctaatttttagataaattgatagtggggaggtattagacattatctctgtacattcaaaggccttatggcccctgactaaatgatgcagtgcacatcttcataacgcagtactgttaattaattaatgtgcaaacatggggtgaataccggttaaacaagaccatgccaatgtatttcatactattaagcaagtgagcccattatggtacatcttcgacaaaaatacaaattaacatgagtacaatccatgtcctgtctatatcttatctgaaacagtttcgttttgaaatgtgtagcataattaatgtgtagcagaattgtccattttccaaatcacatgaaatcatcaaatgtgtagcagcatttaaatgtgtagcagaattatgtgaaaccatgcccctctaaccccatacagatataaggttaaagccaaatttgaaagctgatgtgaaaccatgcccctctaacccctctaaccccatttaaatttaaattttaaattatgttaaatgctacaaggttttg

SEQ ID NO: 4989 - DNA, 427 bp, Zea mays
  Intron number 1 from transcript GRMZM2G031400_T01 (locus G RMZM2G031400) derived from phytozome v7.0 (chr-ID 3; pos 2 11230637 to 211231063)
cgaggtgctggtgctgccaaggtgatttcctcttgctgtgcttcgtttctcgtttaggtgtgtcgacgactccttgtcttgtggtgtgttctgaattctgatgtcgacagggcccctaattcctgtacattgtcccttgaccggattatcttcttccgaattccctgtatgctcggcatgtcgcgtccattattccgctgtttgatttagtttcctttcctgcgtgcttcctccccgctcacatggaagtggaaccgaaccgtgctctcagaggatgcgtagctttcttctccagacaaaatttgcccttttcctcctgtagttccgctcatgtgcagcttcaggtccctgagttggctaacgtaccttttcttttttcctttcttgcgcaggtaaataaagcggttgggataagtttgtaaattgc

SEQ ID NO: 4990 - DNA, 865 bp, Zea mays
  Intron number 2 from transcript GRMZM2G087758_T02 (locus G RMZM2G087758) derived from phytozome v7.0 (chr-ID 6; pos 1 44778901 to 144779765)
ttcttgctaggtacgtatcctttgtcatgagctacttttttgtcagttagcatgatggtaaagagctgatttatggtgaagaaccacctcaactacatgagatggtgcatcatgagttcattcttatactagtaatggatattagtttgtgaggaataaggtggtgatgggatcaactcatttcattatgtaaaccaaacaaaaaagtaagaaatgagaagatgacagactacttcattccttaaactaaacaccctattaaccaatcatacaattcatgttacagcttccaaaaaaattcatgttacactaaattaaaaccagtgaaaggtgtcacattcatggcagcataaaatattttataatagagctgtccattagtttaggaacttgttaattgaacagggtgagtagacaggatttataagcgaaactgaggttgtgggagttcaggagctatatcctgattgggtgcaagcactacattttagagctgtacacgatacaattatattaccccctgttgcaaattatgccattgtaagtcaaacttagaggtttgatcatttattggattagttcaaataattgcactgacattatggagaatttgaaagaaaaaaactaatttgatcttgtagatgttgacgtatttttctatgaacttagtcaaaataagagaagtttgatttagcacaaagctaaagtgaactatcatttgaaacggaggcggtagcagcaagaaaatatgatataaaaaagtaggactgtgttatcaacatatcactgtctcctggtttagatcctgatcttttttcccctctatctatccctcacccatgtggatttcgtgcccagtgtgttg

SEQ ID NO: 4991 - DNA, 850 bp, Zea mays
  Intron number 3 from transcript AC205384.3_FGT002 (locus A C205384.3_FG002) derived from phytozome v7.0 (chr-ID 6; po s 117656208 to 117657057 reverse strand)
ctttgacaggctgtataaaagtaggtattacaaaggtaaatggtgaccttcccaataattgcagatgtatggcgttttagcaattgcttttcagtagttgcaatcagtggcttcctcatgttaggatagtagcttccaaacacagtcaggtgcatattatgagttagattgtgtgtctgactggttctacctcagtagatgacaagaagaacataagaaactctatacttacctcccacacataaaatttagaagtacattcaagaaacgacttttcaaaactcttagaatacattccaagagcagtaagcatcttctgaagatgactaagtaataacgtatccttttgcttcaccaaatatgataaaaaattagatgtatatgttattggcaggactatgaaattaccagattatattccagtacagacacggattttttatgtgtggaaaaataagtggcccaaaatataatagatgttcatacaaacttggaacacaaagtaacttgaggcaaattggctaaacaataattttcctcaaggacgctgagactggggcacatgtgggttgacgaatatcgttacactcaatcaaattaatataattggcttgtttggttggtcaactctggaagccctcttccgttcgttctgaatctgctatcgacggggttcgaaaaaagatggaatattaggataaatggatggatgcgtgggtactgtggcaagtgctaaccttgggggcgagcttgtcgacctcgacgatgaaggtggctcctcccagacctcccgtagcacctcatcctcgtgcacctccctgaaatcgagctctgtgtcgtcatctaggtt

SEQ ID NO: 4992 - DNA, 729 bp, Zea mays
  Intron number 1 from transcript GRMZM2G414813_T03 (locus G RMZM2G414813) derived from phytozome v7.0 (chr-ID 7; pos 1 04884639 to 104885367)
gcgtacgtgcttctttcctttgctcagcagctcactcagttgtcacctccactctactctttttctgttcgttctttttttgtttgtccgttagcttgcgttgtctcgccgttcaaatctttctctgtgcttgccctcttattgctaaccgggacgggagtagttccgtttctcgctgcaccgcacgcttcgtgttttctctggtgccgagctttggttttcgtttcacctttcggacttggtggattgggattgggagcacccgatccttcgttcatgcaaagcgctcctgtcagctgggatcttcaccgttcttctttctctgtctttaatttgtcggcgctcgctcatgtgtgctgctgtaattctgcgtatggctttcttcgtattttctcctactacgattcttgttttccggagagaaaaaaaggtagctttccttgatcaagtacttgtcagtctaggattaatctcgcaatgcgttgatttgacttgaatccgccgtgaaagctaaagaaaggtggtgtggttgcacatctttttctgtacaattaaactctgtgtgcaagtcccaacgcatggaaatagaaggcgtgtgctactaggattaatctatactattagtcgcaatggtgaggcatgattgaagttgaagtttctctcacacctatggttgggaccctctatgttgcagcggaggccatcttgctagggttccagcatttcgtc

SEQ ID NO: 4993 - DNA, 236 bp, Zea mays
  Intron number 3 from transcript GRMZM2G108144_T01 (locus G RMZM2G108144) derived from phytozome v7.0 (chr-ID 3; pos 2 21307621 to 221307856 reverse strand)
tcaaagcgaactcagaatcagatgtaagcatgttccacttccctctatcaaattaaccaaggttatgagaatctagtttctgctttgtttcccattattctattttggtttgcacatctaactattttctatgcatcatattctcaacttgtgaggataccttctttttttttgttgaggcttatgaatttcttttgaatttcatatcttccagcttttgacaacaatcactgttg

SEQ ID NO: 4994 - DNA, 900 bp, Zea mays
  Intron number 2 from transcript GRMZM5G852968_T03 (locus G RMZM5G852968) derived from phytozome v7.0 (chr-ID 7; pos 1 43526710 to 143527609 reverse strand)
ctttgcagttcttcgtcggaggcaactggaagtgcgtaagtgcatgttctgcttcttcagctttacgcggcttggagatgctgtgtaccgatgatcctggagatgctgtgtaactgtatcattttttggctgttgccgcattgggcattccaacgggacagggacgagatttttttgtcgtcatgcataccacggctccatcgaccatcgccacagtgttgcgccggcctcccctccttggttcctgccgtagtgcagcgctggccgccggcaccatacatatatcgtgatttactccgtacatggccacttctagaaatacaatcgcttctctgctgcccagcccagcttggtctgccagccagagccgttttgttcggtatataaaaagtgtgtctgtgtgtttttttggaaaggcaggtgtataaaagttgatattgcatctttcgccttttagaaaccttttagctgagagaaaccagggaatgccactagttcctgcctcctgagtatagagaggccttgttgctttcttgactctctttgctaagctttgagagacctggccggaggagagaagatgtaaagtggtgcgtgttgtgaacttttgagttgtggttgtttattagtaatgggtctgcgagtttcatcaatccaaaatcaagctttaaatttgcaaattcattttttgggctccatcttggattagcgaacatggcctatttgttttgaagaaaaatcttatacgaagcttcttcacttcaggagctcttgctagcaacattaagctatatcccttggggtatttagttactcgtcttagaatttgtggtcttgatgtcagtttctttaccctcttattcagaacggaacaaaggactccgttagcaagcttgtctc

SEQ ID NO: 4995 - DNA, 1019 bp, Zea mays
  Intron number 2 from transcript GRMZM2G393540_T01 (locus G RMZM2G393540) derived from phytozome v7.0 (chr-ID 6; pos 1 52300162 to 152301180)
cgaccggctggggttgctcgccacggggatcgcaggtgacctcagcagtgcttgcttctcatgtcatttctgccagaatgctttgcggaatgtacctaaatatatgaagtcctggattagtgtcctatctttgttttctatatcatcctcaaccttttcttccctaataatgtcatttattttctaaaatacatgatttagagtttaatggttggagctcaatttgtttttagtgccacaaacactttaaatgatagggtattttaatttcggggcactattttgaggcccctcgttggagatgctcttacggtttttggggtgatgatgccggggagttttggggtaatggtgtaatacccatggcatagcatgagggcgtttgaaaatttaaactactaggtgtatcctcaaaattcttctatgaacctttttaaattgagttctttagacttgcattttggttggttgacacaccaacatgctgtaatcatattcaatttgataatctgaaacctttggtcatacacagcagagggtcaattcgactgtcatcattaacgcacacatataatgcattaatgcatcacattgtagaagttggtgtaaattctaatgatctgtttggttttactgattgatgtgagctatttctgccttatgttcatgagcatggaatgcattattgctagctaagcttgacaccacttcaagcaaggtggctctgccaatttattacttctgtttctagtcaccattgcatctgaccattggcttggtaccttgttaaacattacacaattgccattaaatttaacacctgaaatggtttagaattttctgttcaaatttgaaccaactcgaatcaccattaccagtactgccacgtggagcaccaaagatggtaacatcaaaacatgacataatagttatttttatttgcatgcttgttttagaatgccgataatcatatttttcttcttcaatcatcattacaggtgaggggagatcattggcac

SEQ ID NO: 4996 - DNA, 946 bp, Zea mays
  Intron number 1 from transcript GRMZM2G541772_T01 (locus G RMZM2G541772) derived from phytozome v7.0 (chr-ID 3; pos 1 9094054 to 19094999 reverse strand)
actcatttactgaacctgtgatttatttactgaacctgtgatttatgttccatgcctagtattgaaaggttcggtttcagtttatgagaaccatgccgagtttcagtttcagtttatatcccaagttcacaagtttcggtccctagtttttcccaagtttctgtcccaagcggccaagctcacaagtttttatgccgagattgtgtcccaagtttcaatttgagttcacaagcaaccagtttgaaacaaacatctagttcacaatttagttattttcataatatgtttcatagcttgaggagagcattactacaattgaatcatgtggaaaaaacagagaaaggaatagaggaagcaacttctcttccaagatttaatggttctgcacaggatgctctgcaattgctcgactcattgcagttccagcttaattttctatctcaacagctacccacttttcatgaagtgcagtctggacaagcaaccttagggtcatgggatggacaatacaagaagtaagatagtgtcatagtttttttattttgttgtcgttcttttagcctactttctttttgcaaaaaaaaaatgattgtgtttacatgttgtgtgctagcatgagaaatgctaacttacaagcaaaagagaacattacaaaagatgtttaggaggtgtgattttgcctctatttttgtaggaagaacctacgccactcccaaaagggaaaggtaaaatcacaggcctacccatgtgctaagacagtcttgactttagcatagaaatatattagagccaaagacttggtttgccctattatgattaacaatataacaagtacctaatgcacattctctcattctcattcaacttaatttaatcaaaactaaccgacaaccacctggcaaaaatataccctttaatttatccagaaattttgattatatacttt

SEQ ID NO: 4997 - DNA, 889 bp, Zea mays
  Intron number 1 from transcript GRMZM2G151254_T02 (locus G RMZM2G151254) derived from phytozome v7.0 (chr-ID 6; pos 8 3605366 to 83606254)
ccgccaattgggcgcccccccccgcccacgcaaaggtgcgattttccccccatccctcccgctcccccttcttggagccgcgtaccccagcccccaggattggtgacaggcaccctccctcctgatctcaatcagttctcggcgcttgagtgccgtggtatcgttccaattttgtgtttttttagttcgtgggctaagaaatcgtgtcttgtttctccaattgacgggggtgcctaccacacggctcagaagaggagtatagtgttttcggcgaaattaatgtgccaattgtggtgtgcaatcgtctctttagtttccctgtttgacgatgcagttcatccgcgtcgcgaaggaaggacccaggcagagcttaacaatttttacctggcgaggggaggagactttgcgtaattatagttcctggggggttggctttgattgccatttacacgcctctactagatatattttcttgtccgctggaaggagtcgtacaaaattctgcatttgtcattcgagtatccttatgtccggagctagctttgaataattgttggagtggcatgtcatgtttatttccatttctagcctagtcctttaaaaaaggagattcctgggattcaaggaggtttagagtgcagctatgccaacattgatataatacctgtagtgctatttgttaactgatatgaaataaaaagaaataatgttatccacttattattgaatttgtgctttcagaccgaaagacaatggacttctcagttctcaccgacgttcataagccatagctgtgtttggttcatttctagttgtttttgttacaggacagatagaagaaaattattggcgctctgacaaatccaactgaggttttcttggactacag

SEQ ID NO: 4998 - DNA, 546 bp, Zea mays
  Intron number 1 from transcript GRMZM2G001497_T01 (locus G RMZM2G001497) derived from phytozome v7.0 (chr-ID 3; pos 1 60304849 to 160305394 reverse strand)
gtggagatagtgtcacatctcaagatcctgccgaggtgaaatctgtgtgctaacatttttcttcaattcccgtcatgtatattgctagcatttttttctttcattttctgatgactgtgtgataaggaagagatatggtgcttgtatttaccagatggttagagaatgtttgaatgtactagaacgaatagttagctgactaaaaatttgatagtagaattagatagctagtaaatagttagctaactagtagctaatttaataaaaatagctaatagcttaaatattagctagggtgtttgaatgtctgtaactaattttaaccactaactattagttctattgcattaaaacatcccttagatctaaacatctaactctcttaaatgattagatctatatatctttaactaaccatcagtaacatactgtctccaaatatatccttaaatatcattattagtaggaaaagaaatctaaagtgcatactcggaggttttattctacatcaaatgtataacgtggcaaattgtgtttctcgtgtag

SEQ ID NO: 4999 - DNA, 595 bp, Zea mays
  Intron number 3 from transcript GRMZM2G053273_T01 (locus G RMZM2G053273) derived from phytozome v7.0 (chr-ID 3; pos 1 53785251 to 153785845)
tgaattcacaggtgtgcatctgcgctcactgttattgataatggttgtgtttattgaagtaggaccatgttgacagtactctgctatcatatgagcatacttctaagaattgtgcttacattgggtttaaaagtcaaaagagatatatgtcatagccatcttgtccgatgtcattttggcgagtctgtttgggttttcaaggcaaacatttcccaccaaatttcactatgtggttactagtattggcatttgagaggtggaagcacaataataattgacaagtaaaggaaaaaaaggcaattcagtagttgttaacatcctcttggagccctggtgtacatgaagctaaagtgataagtttcatactggtggtagtaattctgactcatatttgatgtgcattataagtggatttcttctttactttcactggccattaaataaacagccgtgcttgctattggtacaagggcaatagttattaaacttttctgccttttgtatacattgtcagttttctttcttgcattggctacattattgtttcatcttattctatctgtgcttgctttttttacttatatgtgtagttacc

SEQ ID NO: 5000 - DNA, 670 bp, Zea mays
  Intron number 1 from transcript AC207726.3_FGT002 (locus A C207726.3_FG002) derived from phytozome v7.0 (chr-ID 3; po s 200600296 to 200600965)
ataaatcttgcaaaagccgtatctggttgtggcttcctgcactagcgatatcgattatgcccatctagaagctttctgcagcttatcttgccatcatcaaactcccccagataagtgaaacctaaacagacaaaaactcttgatcagacaactgaatctgagttatacaaatgtttaacaaatattgtaagacctgttgagcttggaccacaatatagtgccactatactacacaagtggcaacatacagttctccaaacaaaattgctctgcagttcagtgtagcagaatcgttgcatcacatgaccctatgctactttgcagtgcttttccttttgaagagatgttttgaaattaatcttcacgagtcctgcttcttccaaaatatgctatactgcgcttgaatttgaaatagatcattatcagcttaccaactaaatcaacagtatggcaaaactcaataaatgacgtgtctacatttatgcagataaggaaaggttccctttggagaacatgaaaagcagatatatagatctatacaagttattgtaaatttcctagaaaaacttgtacataagtgcacgacactgtttattcatcacaaaatctcctagcacattctttattatttgtagagcacagcaagctagagtttgcaactttgttcacc

SEQ ID NO: 5001 - DNA, 541 bp, Zea mays
  Intron number 2 from transcript GRMZM2G087850_T04 (locus G RMZM2G087850) derived from phytozome v7.0 (chr-ID 6; pos 9 3002663 to 93003203 reverse strand)
gccatcagtttatctctacatccctaacattatcggtacgcctctggatggttatttttttgacattctattttgccgttccaaaacctttcttgtaatatttatattttttatgtcaaggtctggaaacgttgcctattttctgtcatcgattttgtatttgatcctagttctggtgccactatgctatgcagaagaaccatctacatagctgcattttagttttgttgcccaagattaggaaaaaaatgctgacctagtgtcagaagctcccactatgagtggggtactggggtctggggaagggataaactgaggcaaatctccccgccgcaaatgcggagcggctgctttgaacccatgaggccatgaccggacagctctcaccataattttaggatatataataatttaactaacaaggcaatatgtttatttatagctgcttctatggatgaaaaacagaaacctatgtgactaaaattccaggaattgtcaccacacagggtattttaggatcatcataaatttcattgcattt

SEQ ID NO: 5002 - DNA, 1070 bp, Zea mays
  Intron number 2 from transcript GRMZM2G074472_T02 (locus G RMZM2G074472) derived from phytozome v7.0 (chr-ID 7; pos 1 42811638 to 142812707)
gcaagacgttgttgccatattgcaggggcctcgaggttgggtttctcttcgtttacagtctgagaatctctgaacttagtagcttttcttttcttttcgtttttatttttttgctaatggctcaatgcagctgccagcatgtgtatctgatttgttttcattaaatttcagacctaggaaacatagcacagtatatatgtagtgactagtgatagtgagtgatcggaacatagtacaaggccacgattttttcttcaaattttgatgtagtagatagtctttcataccaaaatcatgggctgatcgatgagtatttctctgcatctttcccttcatgcaagatttgttgatattccgagaaatcagcaatccacacatctcatgtaggaacaggatttatagttttgaaagatttatgagctctaattccaaaattaactacatggatgcatgataatgctagtgcatatacaaccctacaagggagagacagatttgttaccctcctagtaggagggacattccattactgttgcccttatgtaacaatttgatattgacctttttattgagtcttgacctccttttgagttgtttttttctgcctaccaccagtacatcatcacgacacgaaaaaatcctaatctaaccctataatttgatctcaccttttgactgtctcatgcactacaaagaatcactgctttgattcctaatcaccctgataaggttcttggcttcttgcatttgggatattcatcagcacatatgacttacgtgaatccttgttcaatcacactgaatatgaatgaatggtaattggtgaagaaaaggttccatatgctttgctttcagattatgttcttgagaatgttgtgcccctcgaatgcaatgaatgaactttctacctcctaatagtacatgtaacttttagaattcactaataagcgtgtcataatttttctatttcttggagcttctcatatgataagcttatgtgcacagtcctaacatgagtgagaaatgtccttgcagttattggtggacagcagattggtcgagagaaagcc

SEQ ID NO: 5003 - DNA, 1004 bp, Zea mays
  Intron number 1 from transcript GRMZM2G032944_T02 (locus G RMZM2G032944) derived from phytozome v7.0 (chr-ID 7; pos 3 5082334 to 35083337 reverse strand)
cgtccggaaaattctttaaggttgcatctcagccccttgcgcaagttccctttttattcctgcattcctgattattcgataaggagttcaggactagtcgaaacgtaaaagcaaaatgttccatttatccttttttgtgcaagaataagagttggaccatggagtttgacatgtgatgaagtaactaaaagtaccaaaatgtttggatgggagatgattgcaaggaaaaggtgcaggctgcgttgtcaatgtgcactgccgatggaacttaaaccctgctgggtgacagatttttaggcctgtttgtttacctatagattttataatacagcttaaataagttaagagacaaacaaataacacagattattaggtggattatataatctagatacctagattatgataatccataagcaagtcatcaggtgcttatataatctataagctggattatataatctagaggataaacaaacagggctttacgttcttctgtaccattctcacaaaaattctcaaatcaaattctatgcttgtaacattcacatgcaagtgggtctttgtcagattgcaagatccgattttctgtgcagccccagcttttgcagcattgccatgtcgccataggaaattgggatgtagtgtcttgggtggcctactgacatcaccgtgctatagtgtgaatagaatgccactgtttgcacactataggccggcagtctcagaaatagtgttgcaagtatacgagactgacattatgattattcagttcggcatgtgtctttgatgatgccatgatttttattttctaacgccatctttgattctttttccacctttgttcaccagtaaattgatttaggaaatgccatttctgattgactatactaagcttaaatgcatacagagtaaaactaagaatgaaaaaaatgtgcattataggttgaagatcacatctgatattacttttacaggaaaggagatatttgcttaaggaattt

SEQ ID NO: 5004 - DNA, 976 bp, Zea mays
  Intron number 2 from transcript GRMZM5G812169_T01 (locus G RMZM5G812169) derived from phytozome v7.0 (chr-ID 6; pos 1 14379359 to 114380334)
acggctgtgccctgctggccagaggccacccccaggtacgtcaatgccctccccctgctgctgtcctccccccttgtcagctttacaggaaagcaccgaatctctgcatctgttcaataacagctttctgatttctgcctcctcaaatcttgcaatctgtccaacaaaatctgcatcatgtatggatagctggatacagcaatcatgataagccatgatggtgaattgtccaatctttttttttcaatgcggtgaattgtcaagtgatttcagtgatgtcatatggcttatagttttcaggtgatttcattgacgtgatcaaatttcagtttgtcttggactgctgtgaatgtaatatagaaaaatatactagtgcatagaggtgatatcctttaatttccatggcatctcttgcatagtacaacctgttattagaatttaacactgttatcctattgattttttttgactctgtcatcctttgatggatgttcttttagtgcttgctagatgttattctagtaccaaaaaaaaatattcagagcagggctgcgagatctgttatgctaactgaattcagtgaaatatttgtttgcttgattaaagcatggctgagaaagcagagtgcagtgataccaattgggggaaattcattgatatttgtaaaggagagttgatgctggggttggcccatgttttttctttcaatagaaccattgtttgcttgtattgtaaaccattatctgcttgtgttggtgccatggatattcatgccatatttgttgggttgctgccatgaaacttgtgcttatgttgctatcttcaaattgttattgcttatgaaacaagtgctgtttcctcgctgccataaatattagtatattaatatcttgtgtagagagatggagcatggaagaattacatattcgctgcggctttaagccaactaatgggtgttcagggctagcactggatc

SEQ ID NO: 5005 - DNA, 481 bp, Zea mays
  Intron number 1 from transcript GRMZM2G156958_T01 (locus G RMZM2G156958) derived from phytozome v7.0 (chr-ID 3; pos 2 2013264 to 22013744 reverse strand)
ggagcaaatcgatttgtgaaaaaaacctagaacaggtgggtaaatctcatgatttttttgttgtcgcaggttcctggatctgaacgagcctggcacaaaaactaggaaaataacaaagcacggtcgggatggggatgggacgattctgatatgaatgattgaattgccactcagcttacctggcagatcggtaaatctcttcccttcattctgttcacaataattgactcagttcacattctgattcagttcacactctctgtttttagttcattttctaacactctctgtttttagttcgactctttgataaaggtcacacgataattgactcagttcacaatttgattcagttttcagttcgcacaatctgactcgcacaatttgactaagttttctagactgaattagcattagattcacttttctggactgaatgtgacaaggttgtggtacacacgaattctgaagattatacaat

SEQ ID NO: 5006 - DNA, 419 bp, Zea mays
  Intron number 3 from transcript GRMZM2G090034_T01 (locus G RMZM2G090034) derived from phytozome v7.0 (chr-ID 6; pos 1 61465005 to 161465423)
agttcctcaatcaagtaagccacatctcccacgaccatgtatctttctggatgtctggttacaatagcagctactcatgtggttgagaataaaatacaaaagataaagataaatattcagatgatcagtacagtctcatccacgacaagttcgttatgacttcatttaatcattttttacacccaaaatcaaaagaaaagaaaactggtagaacgtttatcccaacaatctactacttgtctgccatattgtctcgtgcagtatataagcctggcagaaccttgcctacgtttcggtttcgttgttaagcacagtgcatgcgtgttgcatgatctgagtactctaactctaaccgaaggattcaccatcttgtccccctttcaggctggcccatcggatcctcagcgctttccgttcat

SEQ ID NO: 5007 - DNA, 1043 bp, Zea mays
  Intron number 2 from transcript GRMZM5G851999_T01 (locus G RMZM5G851999) derived from phytozome v7.0 (chr-ID 7; pos 1 44684164 to 144685206)
aggcgctcgacaaggggaagctcgacaaggtcgaggtgagtgactgccgctgcattttctaaagtctggtattgattgggttccttaaatttgctcgacaaggtttctatggatccagtgcctgacagagttcgtccccaattcactggttgatttgaaccaaaagagcttcactggtagctatatgaggattgtatcaccattctctagctcgtcaatgaatgggttttggaggatctcagtctcagttgtcaaggcgctagacacacataacgccactttggttcaagtcacgagcttggatggataactgcagggagatgtgcttaaggaaatgtgcatgtaatgctaatgcttacacactaccgagagacaccaaatccgtacagattgtggcagataaattgttcttgtatcgacttttccttcttgcattgttattattgccttgtaaagcatcaaagctaaatctggtgacagaaaatatcccaatgtcagagataacttagtggcagtagcgtccaatgtcaccatgcaggatgtttgttttaaaggtggtactttattgaagctttataatagattgtgccctttttctaaatgtaatattggagaacatcttatgtgaaatgtatggatgatggttgcaaatcctgatattgaatagaacttcctttttcgaattatcatatacaaagtaatgggtatatatgcttatgttttcctcccaaacacgcttcagcagtggtaattatcatgcaatctgcatatttatataggataaaaggtctatttacacttactagttcttaacacatgtacatctatggaatatgtttatgagctcctggtcctcgttttggcgctgctgcgacctaggtatatggcgcatggcaggaccacccaccatgccttagctaccaggaaaatgacaggataagtgttcctacactgtcatttgctatggagatagagagatacatttttgtttgtatggtttcttagcagattaagaagcagttggaggcggacataatcacagt

SEQ ID NO: 5008 - DNA, 903 bp, Zea mays
  Intron number 2 from transcript GRMZM2G138176_T04 (locus G RMZM2G138176) derived from phytozome v7.0 (chr-ID 3; pos 1 71710832 to 171711734)
ttggggtggggggttgcaaatctttcactatcgtaagaattgtctttcaggcatgtccattccagtttaacatatgttatcttcagaagatgagtttatcaaatatcaagattttataaccgattagtttccatgctttagatttggatacaatagtacattagttattcagctatcctcggtttcttagatgtttaacctgatgtgttcataatgctggttgcagcagtgctattcagtcactaattctgtaatccgtatccatcatgataacctgtttggttggatctcttttcaagagctcattttctttgctgctgttgtttggcaaatgtttctgttgctgttcaatcatatgatgtagacagtcaaccatacgatattcttgctaataaattataaatgtaactgaaaacatggaaatttcatgtgctgatttctcggctgtgcagttgactagattaagtaaaaaaaaggaagccataaatgattgtacctgggctgtatggcaaccgaaatactgtgcaataacacgtgtggatcatacatactaacatagcaaactcctagcactaactttagtatgttattccataccttctgatacacagtagttgtgtatccacttgatcttccgaaagaactggtgtgaatttttttgatataacaaagtcatccggccccagagtgatatgtcttcctataacattcccagtttgttattacattctcagcttgcttcatgtttctgctatagttccttgctgtgctatgcaaataaaacagtatattttgtttacttcagttcctatactagatgaccacatggtctttttgaatgaccttttggaaagggaagtattttttgaccaagaaagtgtcaaattcaggtgccaggaccgc

SEQ ID NO: 5009 - DNA, 999 bp, Zea mays
  Intron number 1 from transcript GRMZM2G121565_T01 (locus G RMZM2G121565) derived from phytozome v7.0 (chr-ID 6; pos 1 47211363 to 147212361 reverse strand)
caggtttcctccagggctgcaggaagcagcttctggtgagcacccatggaaccggtccctccctcacttgtctcgtcctctcacctgtttgcttaaactacctttcttgtgggtcaattattattgttcttccaaaatttgccgcggtccggttcgatatcgcatgctctggtctggccgatcgatggctcttgaattcgagaggagctgtccgtcagtcatggcaagggaacgaagcgctcaattttgcgttttcgcatagtactgtgctggaatttgggggagaaaccctgtgtgttgcgttcgttctagcgggttggtgtcctcaggaaggaagggtctgcgacaatcaaaaggtgctgtttttaaaaagaacgacacggcgtgtgaaatcatagagaaaggcggaggagcatgtgctgctctatggtgcccgctttcgggagatctttttcctcagattttttcttctaaaagttttgcgccttttttgcggttggagggagcatgagagatcaagagactaattagaaagcttgtcgacagcttttacatagaaccgtcgatttgttcatgatctgcatctgcctctcgtttttttttggttgctttccatccatctggccgcacttattcttcgtcgaagaagaaaaaacgtaacaaaagctgccaactcgtcttatttgattgtctctagtggggaatggggatcggttctttgctgacgttgcttgtgtgtagttcacattatttggcattgtcgataataccaagtttgaattgaattttcgcattttaggcagtgaaagacagaagttgcatagcaactttcatgtccccatactggctgcagtcaccatttaaaaattagtacatatctctctagtttattttactagtatttattatttggaaaaaaaaccagcgtctctaattccgtggcttcgaatttgattttgtgtagttgcagcttgaatcgagaagtggcgtggtaacatc

SEQ ID NO: 5010 - DNA, 606 bp, Zea mays
  Intron number 1 from transcript GRMZM2G152799_T01 (locus G RMZM2G152799) derived from phytozome v7.0 (chr-ID 7; pos 3 9164236 to 39164841 reverse strand)
aataagaaaccaattcaggtaccgtatgtttggttgactgcttttcacgtgcagttgcacctgcagatccataaaacattattcgtttggtttacttctctgtacatacagtctcattagatacaaatattagctctcggccaggcccgcgccatacgcccacagctcgcgtaggcgtgcgtccaggctgaatgcagccggccattgcgcaacaagtaaaaccagaatgacttttaatttgttttttctattatatcttctattaaaaacatttgatcgccaaactgattttatatttgtgttcctcagattttttgaataaaataagaccattcatgcaatgtaatattttgatatttaattatgtagtcttctataactcatgtctcaatacaatcaaccaaacaaagtctgtatataacctgcacgagtatgtacaataaccaaacagaaacatatgtataaactcagcctgattcaaccaacactggctagatttatcctggcctggctcgacttctactgcaatcaaacacatgggtagtgactacaaggaccttttcacttgtttgtttccgccttgtgcccctgtcgtctgaccagata

SEQ ID NO: 5011 - DNA, 732 bp, Zea mays
  Intron number 3 from transcript GRMZM2G307720_T02 (locus G RMZM2G307720) derived from phytozome v7.0 (chr-ID 6; pos 1 34997441 to 134998172 reverse strand)
ataaaatcaatacgtcacgtaaatttgtatttcattgccttgtctacacattatgtttatcttgtacgactgctacacatggtagtttgtggtatgcttatgctgactgtcggtagtttatattcaacttgctatacgctatactaaatgtaaaaatggtcgattgcatatttcacgtctgttgaagccgagactgtaacatatgttgttttctgtcaatcattgtgtttcaaaacttaataaaatttgcataaatgtcctacacttcgtgattattgttcttctagtaataccgtaacatagagcaattagcatcaacttttgtcatgcacaaacagggcatcaattaagacagttttagttttgtcctttttttttctaaagtttttgagtaactttgtttcagcatggaacgggaagtgcaagaatctttctatggtttctttgagttacagaaagtagaactttgcaaagtcaataagatgatatttcatgaataaaataatatgggctttattgtgaaagatgtatgaataaattactaacttcattgtactctagtctatatttgaattgatatctttgataaaatatagcaagggttaactggacatattcttgatcttggttgacattttgtgtctggtgggaatacgtcttaattgtaggacactgacatgaagttcttattttgcagactactcgagtgatctccgctcttatctcaaatac

SEQ ID NO: 5012 - DNA, 805 bp, Zea mays
  Intron number 3 from transcript GRMZM5G865769_T02 (locus G RMZM5G865769) derived from phytozome v7.0 (chr-ID 3; pos 1 57205672 to 157206476 reverse strand)
ccttgaggcatcttttccacagcatttttggcggggtaatatgaacttttatccattttttcaagtatattctaggctctaaccaactgatccaaaatgtcacattgattgatatgtggattttgatacttctgactccatgcaactgctgtcagtagcatgttgatatgatttagttataagtaactttcggggtttagatatttaccattttttttccaaaatgacacattttctcttttctttcaaaatattctgtgctgatagatgcattgggaagggcaggcttagtgcagtggtgagagctgtctcactgggtctagggttcgaagcatcctctctgcatttacgggggaaagacttgcctcggttatttccttccccagatcccactcgtgtggaagcctttggcactggatctgccttttttatagatgcactggccttttttatcacatgatgttacaaactgaagagtaatattttcctcttttttagagtattagatgcagcgctaaaaggaacagaatccatagtgagcattttgtagtcctatgaaacccaaaacagcaaagcttgttgagacaatgcaaacatgaatgagcaggggtaggcacatttgacattgctaggtagacctgctggcgttcttctacgagttctattgtagataaattatgttgtgcatcttaatggcacttccatagtattttctatgttcactttcatatgtaaggtttcttctaactatagtatttccttctatgtagtatactgcaacattccagaggcttgagtctaggcc

SEQ ID NO: 5013 - DNA, 855 bp, Zea mays
  Intron number 3 from transcript GRMZM2G022777_T01 (locus G RMZM2G022777) derived from phytozome v7.0 (chr-ID 3; pos 1 96050601 to 196051455 reverse strand)
tcatgtgagcacccttgcttatcttcagcggtgctgcgatctacttaccccttaagcaccgcgtttcttatgctgcatgtgatgccgggttgctgaacagatctttagcaagtaggattgggcaatggatgtaggttgctgggaaataatgggggtttcctcggtgaataactaactttctcggaatgcttttggtggggatacggatagagagatttgcgatttagttgacctcctgatactggtgtagatagagtggggtgccgagtcaattcaattttagctgcttcattcagtgaatgcatgaatgccttcccactgagcgcagtgggagaagccttcccactcacttaccacttagttctggtttcgacgcagactctttgcattttgcagggtacttgcctctgttattcctctccagatctcacttaccacttatataggacccgcaagcactgtgttctgtccattcacaggatgcatgaatgcacatgcagtcccttgcatgttgtgtgtagcttaaacatcatgcgacatacatagctcaaacgggaatcataggtcgtggtccttgtatgatttatttcttcgaaagaatggaatatgatgatgcttagtaaacaaggacataagtaaaaatcatgacacaactaactgttgtggaactgcttaattttttactttcttaagatttactcaggtgaccatgtgggattccaacactgttatgtcatgatgttttctcacgtttaactttaagttgttccaaaacattataccttcttgaagatcacacttttgaatgcgacttttgtagccagaagccccttctaccttcatttgagtcagctg

SEQ ID NO: 5014 - DNA, 968 bp, Zea mays
  Intron number 3 from transcript GRMZM2G138128_T03 (locus G RMZM2G138128) derived from phytozome v7.0 (chr-ID 7; pos 1 76146002 to 176146969 reverse strand)
agaccatcaagcttgctattcgtgcacttctagaggtatatcataaataaattcagttttaaatttcctgcaatttaagcaacaggctataaacataatgaaggttttgccgatgttttggttcgcttcaaatgtttctattctttcagtttaaagaacacaatataacagttgcagagcacggttaacatgatcagggaaatcaaaggtgttacttttctgcctaagcctagagcaaaccaaacaagtttccatggcaactataatctgaatatgcatctttgttcaccgcctatcagatcatgtagtttccactttaattacatttggcgctggcaatcataggaagctcttggagcaatactgacgaatctgttcctgacttgcgttgttttttcaagcatgaattgcttgagggatctcccagatttgtcattctagtcattgacttcgcttcatgtgttttatacacatccaataagatattagccttagtgatgccaggtttccttttttaacaaatggggcagtctttcctgcagatgatgttttcattgaataatacaaaagcaaactaatgcaaaactgcaatcatatccattagtaccttctttgaaaaactaggtaaaaatacgaaggaactgaataattttgcaccagatttctcatatctgctgatgtgcatagtatattttatatctgtccaagatgtttgataaatgttcacagcaactgcggagttatggattaccttcgtgtcagcttgtgtttgtcctactcaccatcatttgcaaattagatagcatgatgttcgattattatagcattggatgtgtacttaaaaggtgatttagcctctccccgatatcttcctggcccctgggagcaattcagccccctattccagaatattgacaaagctgttactgataggttgttgaaagtggtgggaagaacatcgaggttgc

SEQ ID NO: 5015 - DNA, 797 bp, Zea mays
  Intron number 2 from transcript GRMZM2G134797_T02 (locus G RMZM2G134797) derived from phytozome v7.0 (chr-ID 7; pos 1 49916794 to 149917590 reverse strand)
cagtcgcttcgagaagaaagggttctacctcaagggtaagtgcgtttcattttgttctcgaattgattgctggaacacgtactctgttaaattttccagttatacgcatgaacttctctgctgttgaggcaagatttgatgtgcagattctggtgatatcttagaattgtttaatctatgtatacgttcggttgcgtgtgattaccatctgaaaagggatgttggtcgtggaagcaggaatattgcgtggagattagatttgattgaaaaccattatctttctgtcactagcccatggttggtcccttttatagtctgggtggctgatggccatagtaatctggaattaagtgcagctgctgttgcgttgtaaagtctaatcgcgaagtggacaagaaccacagatcagcactgctgttagaaaagaaaagaaaaaagaggatcctaggacatggattccaaaagcagatattcctgcccaccgtttgtgcctttcaccaggtttcgaacattccctttccatttcagcgtcaaggtaacttttacagcgcaacaacataacagaaggcaatcaatccttggccagttgttatatttgatattatggatatcacacggaaagaaactatgttattgagattccttcagtatgaatgaaaaaactaaaaacaaaaccgtccgggagagactgtttagttgaactatcctcgtgtctaacacgggcacacacacacttaactgttcaggaatggttgtgttaacgagttagtacttttcactcgctgtatgatgcaggg

SEQ ID NO: 5016 - DNA, 750 bp, Zea mays
  Intron number 1 from transcript GRMZM2G474988_T01 (locus G RMZM2G474988) derived from phytozome v7.0 (chr-ID 7; pos 4 2977019 to 42977768 reverse strand)
tgcaactcagcaagagctccatcaaggctctgcaggtgctccccaaaccccgcattcctagatccataaacgtgcacacacaacaatcctcccttttttcctaaaagaaaattagtttatgctttgtctcacaagggatccggttggatttatgcttcatgatgatggcgcgggagctcaagaacctacgcccacaactctgcactgtttccgagtaatgcgagaagtcctacctccacagcaagcagaagcaagactgagtcacgttcctgctcctggaaagttgtccactgtctatatagccttggttcgttttgatcttctgcaaaactgttgaaactgaagaatacttttttgattttcacctaaagtttacaagttagcttaggtataaatttataatgttaacattcagcttcagttttgcgtgcgttgttttaatgtgaccattgtgtgagtgttgtccacatgatttcattggttttaatatctcgttactaatgatctgaatttggtaatattcagtttgtttttaaccaccatgcaaatactagaattaccttctgtccattaaatgaagtggtccctgttcaaactgcttcaagatgtaaaaaaatcaccttttgattcaaggatctgttaaattagtatccacatttgatttgctctgctggtaagggatgttctgacccagtgcaatttatggtacaggtaggggctctgtgtgagaaggcgaaagagattctgata

SEQ ID NO: 5017 - DNA, 661 bp, Zea mays
  Intron number 1 from transcript GRMZM2G087078_T01 (locus G RMZM2G087078) derived from phytozome v7.0 (chr-ID 3; pos 2 09593309 to 209593969 reverse strand)
tttccttcacaggtactactgaactaaacgaaacgaatcagcaggcttgaaacctaagaagcgcctttgtttacatattattgtttaaaaaaaatcagagacgctatgtttatcaagttctgataacgatcctgtaagccataaagctacgatttttctatcacataatctcaaagcccccacgctgatatgattgttgtcactggtcacatcatctcacttttgatttctcttatcattttctaatcaagaagagtagggccaaaagctaaaaataacaataataaaaggaatcacacaagtactgcacgctagtcataactcatactagtgagtattcagtaacttcacctgctcttgcgcctgctcttgcgcctgcgcgctcttcgcatcagcagcagcttcacctgcttcctcccgcttgggcttgacgtcgacggccggggcagactccacctcctggatctcctcggtggcggcgaagcggccgctcagcaagtagcgggacgagccagccgggctgacgaggccaccggcgtttccgacgacgacagcctttcgctgctgctgctcctcctgctgccgccctttcttaccgtcgtgccggtgtgtcctgggcgcggcagggacgtgagacagggggctggcagtggcactggca

SEQ ID NO: 5018 - DNA, 996 bp, Zea mays; identical to SEQ ID NO: 4646
  Intron number 4 from transcript GRMZM2G320802_T03 (locus G RMZM2G320802) derived from phytozome v7.0 (chr-ID 6; pos 1 66463276 to 166464271)

SEQ ID NO: 5019 - DNA, 695 bp, Zea mays
  Intron number 3 from transcript GRMZM2G164862_T03 (locus G RMZM2G164862) derived from phytozome v7.0 (chr-ID 7; pos 5 9685501 to 59686195 reverse strand)
aagaactcctgcagcttcagagaaagtgggaggaggtccgtagccttcatcttccaaaatctaacatttagagaagtattttcctctgaattgcttatagcactgtaattcaagctttgtttcttgtgtatttgcaagacaaatagcggctcttaatccattttgcatcagtccgtatggcctccgttcatttgaattttgatatacgaagtcaattgagccgtaaaataatcatattgtcttcagacactgtagcatattatcacgggcttttatgtaacaagaagagctgtctaatctgtttgaattgtaccagtgccagatctactggaatatccttatgctgtctgtgacaaaaaggaaaattaagtgtcccagactctttcctagcagaattcatccatctcacatacttactagctagtttttcagtttcttcagcatccctttagctatttacttttgtttgagtttcagggttaggactcatgagtttacttgtacggttgtaccagttttggagaaagatgttaattctacctagcatcccagaattatgtgttgtcttacatacagtagtaaaaatcttcgggcgaagtttgttttttcttggttttttccttacagtatttttcctaatgagttgtctcaaaattttagtattgatcacaggagcagcaagttgaagccaaaat

SEQ ID NO: 5020 - DNA, 498 bp, Zea mays
  Intron number 2 from transcript GRMZM2G164862_T03 (locus G RMZM2G164862) derived from phytozome v7.0 (chr-ID 7; pos 5 9686239 to 59686736 reverse strand)
caaacctgaggagcagcagtttgatcccagccgaagtaagggggcgctctcgtctcaacttgcagcttcgtttcattcagtagattattctttatttctagtcgaactgtagcttggttcttgcttttttctgtaggaaatcatgatatcttgttctcatgcttggggaattcggatggaagattgacttattatgctttagttggttatttgcacaacaaattatgaataccacattccctggcatattattttttgagaatggcttcaagttcataatttttttaaatgattttgctagattagtttctggtactatactgtgaggacggtgtctttacaatgttgtcaaactcaatgataatgtattgtttggcgttaccttggtttctcaaagctatgctttgagcatagtttatcaatctcacggtagtctgacgcctaattttttgatgttttgaagtgatcgggatagttaaaaggaaggcctcaattaaa

SEQ ID NO: 5021 - DNA, 739 bp, Zea mays
  Intron number 1 from transcript GRMZM2G000281_T01 (locus G RMZM2G000281) derived from phytozome v7.0 (chr-ID 7; pos 1 38102099 to 138102837 reverse strand)
tccttgcctgaacagtccttgaataatcggagtaagcaccggatactatctttttaaaggatgagaatcaattttacatatatgtcaataaatgcatcattcacccgctagatggatgcataacagttgaaaaagtcgaaagacatcagttatccaactataataaaccacatcaaggtaaaatctatgaaagtgcatatatgacaataacaatagcagtaataataagtacatgtaatccaacatgaaacaaaagaagagacaaaatataaaagggtttaaagcctataatggttgaggcatgtgatcaacatgttgctaatcaaggttcatatataacaatattcagtagacttaagttaatttagaatattacatgattaaatgaaatgattaatataatagaacaaatcatcaatcaaattctgttaacaaaggtaacagatacttggggaacaggatctgtgattattatgtcatttgccctatacttagcgatagaaacaaaatctaacataaactaaaagagaatgccaagagtcagcgctacaggtagaaaattgaaagagaagtgtaatatcacacagatggatagttatcataccttcttgaccttttttttgtaattctcaacttcaaaaaagagaaagtgggttgtggacactcaaatcttaccgaaattgatttatctttaccattcatattatcttttttgcaggaagctacctccttccagata

SEQ ID NO: 5022 - DNA, 895 bp, Zea mays
  Intron number 1 from transcript GRMZM2G114741_T04 (locus G RMZM2G114741) derived from phytozome v7.0 (chr-ID 6; pos 1 03506373 to 103507267 reverse strand)
aaagcacatttgaccattttgggtgctcacacaaggttcgaaattgttggtattttttacattagattatgctttatgggaactatatccttatgctctgaaacacatgcttgttggcactgcttcttaacaagtaatggtggtgcttgctgattctcactagcgagcgatgaaatagttttgacaatattttgtgcgtcttagcgaaattattttattctatggtttaccttttgttagtgataactacaggtgacttatggcctaaccagttgcaataaaataagtttgatctttggtctgatatactttcaaatatctatttgtacatatgtaaaagtttatcttttccatatttctatattatgcagtattttgcccatcattatattgcacatgaaaaattctcaaagtaggattgatgggagctaacatcttgtggaattattcaaataaaatagtgtgttatgcatgcatgagccatgataaatggtgtacaatgaaaccaagaaaatcttttggtcttaccatgcagacatttttattatgtactatgaagttgtcatatatgttccttattatctgagaaagatttaataaaaagccctttctacctatttctacagattctaaatgaaattcttggagatagagagcgtatccaatctctgtattctgagattcctgggagaaccacaagcaatgccagtacctccagaagaacttctaatttcagtgtggacgcaactggagatgaaagcctttctgttgaagcacacaattgtatactcgacaatactgcgtctattttatccatgaggagctgcgctgacaagctgtggaagagaagaaaaggttcaaaactttaaaatcagaagataaaccagaggaagca

SEQ ID NO: 5023 - DNA, 1053 bp, Zea mays
  Intron number 1 from transcript GRMZM2G108780_T03 (locus G RMZM2G108780) derived from phytozome v7.0 (chr-ID 6; pos 7 4408354 to 74409406)
gcagcgtttgggcgcagtccgagagcttccccgaggtcattcactcccaccttatctcttcccgctctacttgcttagttgctttatccatgttcagtgctcctgcgctgatttagacccgcgcgactctggatctgccccagccgtgcggcccggccggatcggagcgaggggatgtccggatctcggtcgctgaggcgagatgcggatctaaggccccttccctcggtgacgtggttgctgctgctgctgttctccgggcgtttgatgccaatatagctgagatcaagcttgatgatctgcgtactgtggatttgctagtgagggatggccggatcgggctgttggcgtccgacctgatttggttgttcgcttgaatagacttacttaccagtggacagtggtagtgatcgttcagcagcagtagagcaatttgttttacatgtaaaatttgagtggctgctagagatgcaccaatggccgagctgcatgtgtttattcctatatagcgacagttgtgtgattgatccaaaacgcaaaattttagttttcatcaaatgatgatttcctgatgccactacctgtgtgtgaggcacttattaaatgaaaagtaactttcggttgggatctgggaatctgtattgtgttccgtggttggtcacagcttgtggcctgcattgttccataggccaaatggctaggcaaggaaaataaatcatgtaatttggaaaaaaataactgccatagtcagtagtgtacagcagtacatgcttgtccgggccttttatttcaccatggtgttgtggtatatggagtacttggattgtgcgatgctttatacatttgtttgttctagcagagtttgagtttatatttctattcttatgtagggcgtcacgagtgtcgtcaattgttacatccttacatccttgtgttcacaatatgatccatcaactctttcttctgcggtctcttatccctgtgttctcatgtccatgtttcctgcttcttgttgcagttaaagcctgaggaggttgctggtatcataaagga

SEQ ID NO: 5024 - DNA, 617 bp, Zea mays
  Intron number 1 from transcript GRMZM2G100911_T01 (locus G RMZM2G100911) derived from phytozome v7.0 (chr-ID 3; pos 2 20028107 to 220028723 reverse strand)
gcatcactgcaaggtactctgtttaggtggctcgctctgatagtcagatgcgcgtcgagatttcttatcgccaccctgctcgtgccgctcgctgactcgcatcggcaaggcatgcatgtggccgcgtcgctccttggatcgatgattggttgccccttgtgtttttatttcgttttcggtcgtcttgcttggcgtttctccaatccaagtcaaaaaactaaaatgcggctccgtatggactatggagtatcattgagtttttttaattattattttgaagatgttgccgtcccaagtcgcaaccaagcagctcctgttgcccagattgcaaaacgtttcttggctcattgctaacattttctttcagatttatttccatttttgtgacccctctactcatacggcaataccaaattagtactacccacaatcagacggtttgtttctccaatccaaatgttcgaagccatagcccataggcactagccagtactactactacttgtccttgcattgcatatttgcatcacctacctgaatgaatgctgctgatattgatgtgtccatgaccacgccgtgcagtggtgcagctctgctacaaccagctcaccgggagc

SEQ ID NO: 5025 - DNA, 889 bp, Zea mays
  Intron number 2 from transcript GRMZM2G119513_T02 (locus G RMZM2G119513) derived from phytozome v7.0 (chr-ID 7; pos 1 37616092 to 137616980 reverse strand)
caggaacaaagggctcatctgatctgagcgagtgggtgaatcgatcgccttcccctgatgcttgtcattctgtctgttttggcaccgcgagatcctccaactgcttctcgagactgggcatcatcacgtcaaatactagctgattagtagtcagttccttttgtaccttgtgtagatcagatcgattgcttatttggctgatttgatacaattataaacaatgggtttacttttgagtgcactacttacaagcatcattcatacggatttcagtttacctaaacaaaccacttgccctcttctgctgcttggctggtttattacgataactgtgcagaatttctctctatgctagttctccctcaattccaaaatgtaagttgttttagttttgtctgagttaagcttctctaagactaagtttatagaacatcaaattggtttcgctgagaccaccaggaaatatgtcttgccacttgacagtgcatttatttggtattgtagacgttaatatattttctatagacttcatcagaattagagaattttgacttaggacatgaaaacggcctatgttttggaaacatagggaatactatgtttgtggtttaataaggagcacacttgttgtgccattcatccttttgcatcatcagctgttgatggtctagttgttgcattgtcagatctaacagcattgggattgaattcggcactgatcctgcccttctgtgtagttgtgattcctatgcgatattttcttcagtgcttccctcttcaaagtttggtttgctctcttcagtccccttctttattctattctaacggaggcctttcatgtcattcgcttccaggagctgacacatacattgttgctaagtgcattagt

SEQ ID NO: 5026 - DNA, 822 bp, Zea mays
  Intron number 3 from transcript AC185500.3_FGT005 (locus A C185500.3_FG005) derived from phytozome v7.0 (chr-ID 3; po s 180933374 to 180934195)
aggggtatgttaacaactaggagcagaacatcgtgaatgctattgatcttctcccgtgcctcacggcaggcattgacgtcaacgtaatgttcaggaagtgcttaaggcttttaacttgttgaggggtatgtagctgatcagtttttccctaaatgtcctggtgaagatgtagctgctcagtttccccctccaactatcctggtgaatgttaatcgcatagcgaaaattatccaagaaggggtaggctggatttgatctttgatttcccttagtaccagtgaaactaccgttagtcttagcattgtcagttgatgatcaacaaacatttggatcaattctacaaatcatcaaattcagttgaagaggctattgaacttgcaaacgactcagatctcaaagtatggtatcggttgtgctatttttttaggcaaccagaagcgtgccatcagaatagaatcccaatgatcttgcttcgagttgcctgtgccaggcaagtgtataattcatgctctgcctgcccaattaacggttaaacgtgtatcatgtggtgtctagcattgttttgttacaatatcacatcatacttatacttctatgcttacctgggtttctgacagagtggtaagtacgaggaagcaacagatagacacacaccactgcataagcatctcctttctgtcctagcacaactatgtgaatgtgaatcataacagtaatctttccctgtcatggttgattcaggcgacctagacgtagcacaactatgtgaatgtgaatcataacagtaatctttccctgtcatggttgattcaggcgacctag

SEQ ID NO: 5027 - DNA, 1037 bp, Zea mays
  Intron number 1 from transcript GRMZM2G007489_T01 (locus G RMZM2G007489) derived from phytozome v7.0 (chr-ID 6; pos 7 1230480 to 71231516)
cgagcgcagcggctcgttcctcgcgggggcgcacggtgagttcccgacgatctgcgtgctacgagtttccagggcgtgggggcggtggatttcgggccgcattccggtttcgtgggtagatctggcggtttcgtgcggagttctatcggcgccctaatgctgctggtgatgagggatttttttaaaccgtcgggtttttcttgtgtgtgttcaaatttgcggaaattgacgggggtcacgggcgaaatgtatggttttaaggtgggtgttgtgcctggcctgaattgggcacgaacaatggcgtagtttagggtgttgggatgctgtggatttgccggcaatgcgcttctgttcttagctggaaaaaaactggagcttttgattcgttttattcggttggaaacatggcccggcgtcccggccaactggcttgagctgtttccagaccagagagaaggttggttggatttctctggcctagtaggcatttgttggcctcccaccccccaaaacttgtggtggtggccgtagttgaaatgctttctaatggtggggcagtgaccctcgctttcgaaccgattcgtatgggcgcagctggttccagtgttctttggtggtggccttgctttgcccgaaaaggtacgtcttcagcagttggatgcctggatccggtggcctatgcctgtcttctaattaatttgagaaaattgagtgcgttctcatatttctgtataaaaaatgtaaatgtccattgctcctttctgcccgaaactggaaaattttaaccatcacagtcacacaacagccgtgttcctttcgatgtcttattcacgagaatgcaatggaaaataggggagaaccgtggttgttgtgttcctttcaaggtcttattcacgagaatgcaatggaaaataggggaaaactgtggtgctttcttgtaaaaaatggtgaatacatacaccttctcacaaaagcttctgtttttgttgattatttcttcaggttggcatttcgagtgctgagacatcggcttcatt

SEQ ID NO: 5028 - DNA, 665 bp, Zea mays
  Intron number 1 from transcript GRMZM2G701138_T01 (locus G RMZM2G701138) derived from phytozome v7.0 (chr-ID 6; pos 1 35988468 to 135989132 reverse strand)
atagtgaaggttattggattactaatttgcaacaagtaaagagtgaaaggataatacaagtagaatccttagccaaactttggagcaaccatgttcagtgcttccacgcacagtggacaagagttggagttcaggaactaaataacccatttgggtattttgttcatatcattagggtattttgcatgataataaccatgttattgtacttgaaaaatacagaagaataagtagcccctaccccccctcacaaaaacagagatataacaacacaaagctattgtcatgcctggacggacataccagagacatcgacatagaacagctcaggactggaggtccaagcaaacacgttcagttttgtgcctaaaagaacaaaaggacttgagaaagaaatcaaagcaacaaaccttgaaagtatgctcatcctaacaagggaagcaaccccttgcatcagctggttcaaagtgtgtcacagtcatgtttttcctctccccattaagctcatgcacactacaaacagaaggttaagttgtgaatatgtttcttgatttacagaaaatgaaacaggtcgatccattggacacaaaccgtagagacatctaaaacatccccataaaaatgaaataggtcgattcagtttgcatatcgacttgaagtgagtc

SEQ ID NO: 5029 - DNA, 928 bp, Zea mays
  Intron number 3 from transcript GRMZM2G022090_T01 (locus G RMZM2G022090) derived from phytozome v7.0 (chr-ID 3; pos 2 18777456 to 218778383 reverse strand)
atcatttgccactaattgaggctagcaggtctgtgagctaccttttcaaactgctcatagttttcctatcccctctatttttgtcaccagtggtgttgcagtgtggatatatacctatttggtccatgcggtgtatcgtttagtagcacctcttctcagagagcgcacaagtgcaggtgctatgcatcctttgtttttggacaaaacagattgcactttgtttaactcaaatagatcattgatggttcggtacaatccagaacttcattacgctgcactgaaccaaacactatgttctgcagattttgcagtagtttctggctttctgcttcctcatttacagaactattgcatgaataaaagacactgaatcaaaaccagcaggtggacaggttgatgccatgattaatatttgataactctagattcgggtctgtccaagggtagatactgtactgttagcttgaccaagtgtttttttgtttagtcagttgtattttagaataccagcgtctgcctttttgccaatttgttagagtgtatagatatcttgtacctttccaccacccctttcagttaggggtaaattgatggagattgagggctgatttatagtaaccaggcaattgaaggggatcgggagaaatccccttgctatccaaaattgaatagcccaatggattccttccaattttctggtcgccaaaccagccctaaaggggattaaatctctttttattcaaaattgtatgaaaaggattagatcccctcaatcccctccaattgagatgcaaccgaacatggccttagccggctcaaggacatggattgaaagaggagtcacatttatttttatctctgtattaatatgtattgtgactagaataccacctttatatctagtggcaactgttgcaatcttcaggtt

SEQ ID NO: 5030 - DNA, 948 bp, Zea mays
  Intron number 4 from transcript GRMZM2G139210_T02 (locus G RMZM2G139210) derived from phytozome v7.0 (chr-ID 7; pos 1 44131535 to 144132482 reverse strand)
cggtaagttttgttgttcactcttctcaactcaatttctaaataaaccaccagatattgaccacacatttaatcaatcattgaatgtaacttgggaatattgtatctttttatgtatgttgtatatgcattatagtttgctgtgctgctactgacatattaatcagtctgtggtttattttcttcaagcatgatatgcttaaaggatatgacactttggtacatctttaaaaaatatttttctgctaaggatgtatgaatttgcatgtggaaatacaacttttattgtagcatagtgagttatgtccttttgtgtgaagtgtgaatcccattatccaaacaaggtaatggtaacaatgtttgttaagtggggatgattggtgttctttttgatgttctatactgctcaaactatgctcatgaaatgatgaaatctgagtcagtcagtactgactaaagtttaacactaagtaacgattccactaggcttgagaagttgaaacaaataatctaaatgcaactaagactgtgatatattgtactcctccgttcttttttatttgtttgcggtttagttcgaaaatgaactagtgggcgacaaatattcgagaacggaggcagtacaccgctacctagttatgaagtgtttcttttgctatgttaattaaacttttctgctgtctgttactctgttgttgagacccaacattttataacactagttatcaacttatcatccacataattagcaagaaaatcagattatgttcatcttcagaattagtatgaaaaaatatggcatacaaccttaccaagtttgggataatttttttgaatgcaattatgctttgcagataaattagttttcaaataattttatcaccatactgcagttaatcatctttgtagtagagagaagcattatgccactacttaacttctgcaggta

SEQ ID NO: 5031 - DNA, 531 bp, Zea mays
  Intron number 3 from transcript GRMZM2G139210_T02 (locus G RMZM2G139210) derived from phytozome v7.0 (chr-ID 7; pos 1 44132505 to 144133035 reverse strand)
aagctgaggtaagttacacaatcttacaaaaatctagtgctagaaactgtgcttgtattgtttacaattaatgaatctgcaactaggcacatgtcatttgtatttaggtgacattatctctcttttccccattaaataactttttatggcctagtgactatactaactgatatagtggaaagcgtgttgcacggttagtatcataactatacattttgggcttagctcattgacgtgactattagaatttgtttcttattcattctggcaacagaaccaatgataattcttgtttatatgaaatatatagggccgtcttctgcattttctctattgaatttgatttctttagagttcatttgtgacaaaatggaacatctattttaatgtggtctttaatgcttaataaattttccttgataattttttataagttttaagggaatcagacatcaaaggttaaactcattgattgtcttcttttgttcatttgtttcaatcaagcttgctgtgagaccggaggatccaaaa

SEQ ID NO: 5032 - DNA, 958 bp, Zea mays
  Intron number 3 from transcript GRMZM2G107309_T07 (locus G RMZM2G107309) derived from phytozome v7.0 (chr-ID 7; pos 7 278361 to 7279318 reverse strand)
aattgcacaaacagctttgttatctgctgacacaggtgttgtttgcatttgaattaaagttatgctgttacttttcaattttcatcgttaaatgtcagatgtttgttaaaatttcaatacttgtttcttatttgcttatcaaggttggaactatacctaaaataaaaaagaaagacgaacatgcacgagaagctatgtatcgagttatagactactactaggttaattgacctagccgagtttcaacctaggaaaattctcattaatacagaattaaattagtagctaattctgttattgacttatgcttggattgagactggtccccacaggatcctactgaaattggcaaaatattaagaacatgctgtcacaatcttttcaaataggcatcctttaatccatgcatgtgatattcatatctttcgaacttggaccagtgagatcacggacacaaacaaacaattacacatttacactgccccatgtttccaaatatgttggcactctacttgctccagtttccttccggggctttataaaacccacctttgattttgatatggcttcttttatgatgtgatttagtccgattagcgattagcacatgtcaatggaaatttctcattggcgagatttgataaggatccaaaaccatctgaatatcgaaagaaaaataagaatggtcttacactgaacggcaaatttatgtccaccatcatacaatagtttgaagaatctgaatctgttccaccgcctcaaaatagaatggtgttacactgaatggcaagtaaaaaatgtatgttcaccatcgcacgatagtttaagaatctgaatgtgttccactgaatcaatttctcatgtgcctattgcatccagttctgaatttctcgtttgctcacactattgactattctatgcagggttgctgccagtgtctacggcgattggttttgat

SEQ ID NO: 5033 - DNA, 587 bp, Zea mays
  Intron number 1 from transcript GRMZM2G010775_T02 (locus G RMZM2G010775) derived from phytozome v7.0 (chr-ID 3; pos 1 40415843 to 140416429)
tcaaggtgcaaaacatcgaggtaaagaaattcgaaagacatccatgtgtgtgttacttcattatttctcatattcatctcactatgaacttctttctattaaagaaaaaaaatgcacacatggtcgttttctcttctaggagtctgatcaggttaagttttattgtattagatctcctaggtggcacatgacatcatttgttttatttatgaattctctgctctattcttgaaatataattcatattgttaacccatcactaaacaattctataataaatacatgaataactgacatattagtttttcccctcaaaaacaaagatgtcggttattcatgtatttattataacattgtttagtgatggtttaaatgattagattttgtgacaataaagatcacagtttggtcacatttgacaatggatgtggccatcatcactggtagatgtcatacttattgtaccttttgtggtggtcgagcttattagccctgtacatctataggtatttcatgattaaggctgttctgattgtaaatttcataatgtagacaggcaaggttcattctgtactccatatagaata

SEQ ID NO: 5034 - DNA, 668 bp, Zea mays
  Intron number 1 from transcript GRMZM5G888444_T01 (locus G RMZM5G888444) derived from phytozome v7.0 (chr-ID 6; pos 1 34682827 to 134683494 reverse strand)
cagcccgcctctcccgcgcacgacgggtgagcaccgagtggagtctctacccgtgtgattggttctcttccctgtcgatcctggctcacgctagtcagccaggctataggtggcctggtttcatctatgcaattgttcaatgtttggttacttgatttaatttagcctggctactatgagacattgtttggttgcttgtatcaaaacatgaaccaaagaaaaatttacaaataaatcttcaaattttatacaacatatatgatctagttttgtccgaaaaaatatcaaaaatacaaatacgaaatcggttcagtgattaaatcttttaattggaaaatataattaaaaaacaaactaaacaatcttttagtagaacgtgtcgctgcatcccactgtcctggccgcgcgcagatgctcagattgggcatcgccagccggcctggctcaggcctcctatttgcatctatgtagcctgacttagtagagatatcaaccaaactaactatgttttaaagatccgcggctgcagcttctgcactcagccacccaaccaaacacacggtacgtgccctatcctaccaattcgcgccgatcacgatggccagggcgtgtgatagtccgtccgttcctgcgtctgatggatgcttgggctgtgctgtgttccaggc

SEQ ID NO: 5035 - DNA, 819 bp, Zea mays
  Intron number 1 from transcript GRMZM2G099980_T02 (locus G RMZM2G099980) derived from phytozome v7.0 (chr-ID 3; pos 2 29190377 to 229191195)
ccctcgagaagaagggcgtcctcgccaagattagggttcgtacttccaacttattttcttcgtttccgccatcccttcattgatccggtgcctcacccacgcctcacggatctagcttttcatcccctccagtttggggatctacacctccgcttccgcaatttccttcccaaaatcatcgcatatgttttttttccaatttctagtgtgcacattctgagcgccttggctctgttgggtaggttcttgtttaggaatatgaaagaatgctcacgcattgctctagaaaagttttttttttcaccacgtccagtttgttgtcctagtcgccattaccaattcgtatgcccattttggcaaaaaaactcgtttggagcatatgagattgttctcacaatgctgaagcaaagactcacatcgtattattttgttgtctggttgtcatcaccaattggtgtgctcgttcttggcacagtcgttaggaggaaacacgtctgcgttactggaaatcttttgttgtgactactgtacctatatttatagtgctcttttgagtttcggctctaatggtatgatgtcagttgtcagggaatcttactagaatcgacaacagtctagagttttttttggtgggggtgcaaaagattgtgtataacatagataaatacagctatcatggtttttttttaatctttttctctatcgaatcatgctattctccaccgaatgcacatacttctgcttccgccacctttcttgatgatgtttctggctgcatgactaggctgagctaagagcaagcgtgtttgaagccattga

SEQ ID NO: 5036 - DNA, 387 bp, Zea mays
  Intron number 3 from transcript GRMZM2G150209_T01 (locus G RMZM2G150209) derived from phytozome v7.0 (chr-ID 6; pos 8 8899226 to 88899612)
agagggtaatttactgatttttttgccccaacatattgcattttagagttccatgtcgattgtaggttgaacaatatcatttcccttacatttgaaatcagtaggcatacattattctgagttatagttggtcctatctactgaaggaaaaactgtgacttctgatactaggatgtggtgttttcactgcaaatctcctatatattttcttacacatataatttcacacgttgttctgcaataaaattagacacatacatgaattctagatttttttgactcttttgagctcaatttttgtttgggtggggtggggcttggggttgtgtttcttttcaagaccaattatcttttccccccttctctgcagtgcttgcttgttaaagg

SEQ ID NO: 5037 - DNA, 396 bp, Zea mays
  Intron number 2 from transcript GRMZM2G315769_T01 (locus G RMZM2G315769) derived from phytozome v7.0 (chr-ID 3; pos 1 84192801 to 184193196 reverse strand)
gaaaaaggtcccgacaaaaaagaaaggatttgcatgtacaatatcagcagtggagtgttgagttaggctcaactcgtgtcatttactatatttctcctttcaccttgcaatccgaaaatttacaattcctgtaccaaaatgcatctatctgttctgtttttttttttgctttctttggattgctgttatccacgaattaaacaaatgatatgaataagttttcattataaattgccattttttgtttctttatagaaatatgtgtggattgtgaagaaaatgataacaaaaatagttgatacttctttgagggaggtggaaatttcttgaggtattcgtgctttgaaatgattcagtaacctcttttacaaacagatcgtagtacacttgctgtcc

SEQ ID NO: 5038 - DNA, 817 bp, Zea mays
  Intron number 2 from transcript GRMZM2G088299_T02 (locus G RMZM2G088299) derived from phytozome v7.0 (chr-ID 3; pos 2 15215350 to 215216166 reverse strand)
tctggcataagcttgagcatccaaacgttactaaggtaattgttgcctgaagaagcccttttcctcccccttctaatttcttagtttaagccactctgctgatataagacacttcttcagttattgtatatctttggttcataagacaaagtctaaaattgttgtctgatattattaatatcaaccttatgattaaacttggttactaacacacgaggtactccctccgtttcgttttagttgtcgctggatagtgcaaaattaaactatccagcgacaactaaaaagaaacgaagggagtatctatttcaatgtactgaaatatgtgtccaatcatccctatgctgttggtcttcatattattccctatgtctgggtatctgacagcatagtgaggggcatatgcagcactagtgcactaccatctcttttgatgctccgatgcgtcctaatttgtttcaaagcatgcaatatatccccaaagctagtcttgtaactgctggtaagggacaacaaaaccctttcttgtaccatttgatacattacaaattttaagaaaaatagaaatttggaggttttatggcattgatttagttgcatatactatgtgaatttatttcaacatgatagcaaatttacctaggaatatgtaggaggtttgttttcttttacatctttaaaattcaatatagatcatcaactactattattatctgttcttgtttcttgttgctgaatattattgatatctttccaagcgcaactagctgtcctaacaacatcttgaacttttaccaaacagtttattggggctata

SEQ ID NO: 5039 - DNA, 875 bp, Zea mays
  Intron number 1 from transcript GRMZM2G088299_T02 (locus G RMZM2G088299) derived from phytozome v7.0 (chr-ID 3; pos 2 15216230 to 215217104 reverse strand)
cctgattacaggtattaatacatgactgttgttaattctgattgtgatcagggaaactgcggggcatcctttggcggcagattttaaccggtaaagaaaaagtggcggtaaatattttagcgggcaacaaaaaaaacagtaaagggctcgttatagggcctgctgttggagttagaaatgttaattaggccctaaactcttcaaaacaggtctcattttaatttttaggactcctatttaggacccatggttggagatgctctgaaaaagcagaagcaatttgtatgtccagaactttatctccctttgcatgctgccctctcaatatgtttggcccaccatccaatttattcacttatattcttaaaattggattagaatgttatatcaaatgtgtcctaggcatccataagtgcttttcaattattcgttactttggctgtgtgatggttccagtttcctcactgtcctccataaagtacctcctatcagctgtcacgctttacttccgtgtgtgcttcatgctcatgctagaatattaggtgtctcattgttccattttagacaccatgcataaaaggatggtaagtttgaccctttacaaattattgtttgccatgcgcaacaaagtgcatcctattcgtcaagaatgtgctacctttggtccccatcaagtgctaacctacacttttgagttttggaatgcgctttgtccatccttgggcaatcatgctttcattcataagttataacagatatggagtaaaatgcacgttcacatgataaactttgtgtttaccatcttaacttacatttctcaacactgattgtcaaatgttaccatcttctagtaaaattgcttgactggggcgaag

SEQ ID NO: 5040 - DNA, 539 bp, Zea mays
  Intron number 3 from transcript GRMZM2G437460_T01 (locus G RMZM2G437460) derived from phytozome v7.0 (chr-ID 3; pos 2 10266374 to 210266912)
cggcacggagtggaagttccggcatatctatcgaggtacaactagagagtttattggctgggttaccttggcttgttgactgattataggctatactggttctgtacatcgtgcttcgttatttggattctctctgcaaacatgggttccattttcttagcatgttattcgggcttaagtactgaatgagattcagtttagaaagagggcttcagttgtgctaattgattgtctgcatttttagtaataattaaccgaatgttggctttgattttcaagcaatggaggttattgtatttgcattcagtctgtaaatttaagcaagtttctgtaaataaatatcttgaacctaatctaagcggccaggaaaatcaattggtacttcaacaaaagatcatgcaccttgcgaacagcgaaacaggtgttattgattgtataaaacataaaataggatggatgctattggattctgaataactatagtttctgataggcctgcttgttacaggtcagccacgaaggcatctcttaaccactgg

SEQ ID NO: 5041 - DNA, 541 bp, Zea mays
  Intron number 2 from transcript GRMZM2G439201_T04 (locus G RMZM2G439201) derived from phytozome v7.0 (chr-ID 7; pos 1 71632632 to 171633172)
tggtacgagaccgtctctgcggctgtagcctcaaggttcgatttgtttctctaattgcaaatttataggtgtagtgggttgatgtctttcactggccgcaggttttatttatttcactgattgcacatttgtaagtgtcgtagattgacgcctttcactggttgcagattccctggtaaggctgttggtgtaaatctgcctgcgggatcagctcctgcggcagctgctcctgcggatgaggtttgttctccccatcccaagccatactgccacatctcttttttatttgtttacattaatctgtcttattggtcaaacaatgggccagtgctgttctgtttgatttagcatggtacaatttttcattgattggtcaaacaatggggaagaaattccagttgatctatgcttattttttattccattaaatatcaacctatttgtcgttgtgtgattaattgcatgccaagtatgctttatatcaatgcttcttttttgttgtcactgtcttctgcttttaattctcgacaggctgaggacg

SEQ ID NO: 5042 - DNA, 628 bp, Zea mays
  Intron number 1 from transcript GRMZM2G042386_T01 (locus G RMZM2G042386) derived from phytozome v7.0 (chr-ID 6; pos 8 5298669 to 85299296)
agagagacattatttgcttccttcacattttagaggtaccaaaggcttttctagcaacagtcctactatttcattttgtcaccttaaaaaagagaatgaatgttatttgattcttcacacaatgcgatgttttcttcacacagtagtacttgaaggtaatacattgtaatgggtataaaattagccaggagttctcttttatcctccccttcctggcatttctttcattattcattttgatttctgctcttttgctctatactgctactcttatcctcttgttgtaagcagtttgtttctacgactatttgcttgcttttagtttagttttgccaattcatattccatatcatgggacttgtatgctttcttctcatcatgcatgaaagttaatatcatgatgccttattggaagatcaaaattattttaggcgtgtgctatttcttctattcctgatccttcttacatattgtagccacttttggttccattttcatgcttcctatgtacaacgtgggtgcacatatcgcttatcttggtattttattgtcctattctttctttttttgttcagtatgttcggtatgtgcactctcatttctgctcatatggccctgcaggtaccca

SEQ ID NO: 5043 - DNA, 932 bp, Zea mays
  Intron number 2 from transcript GRMZM2G115834_T03 (locus G RMZM2G115834) derived from phytozome v7.0 (chr-ID 3; pos 6 527071 to 6528002 reverse strand)
ggagcttcagattcactgccatcagaaactcgcaggtgaggaaggagagggaccaagttcctggcccctgcatcaactgttcctctttgagtttcatcgatatcttgaaattggtgtgcatttaaaatactcgattgattctcacggctaccgtggctgctagtaaacttgcttttcgtaggagtatctggcgtagtaatggaaaaaaataccttcactcttcgtgggttcaagtccatttcgttctttatgattaggagctcttttgtagtgacggttggttcatttctgtctttgattgcactgtctcgattagtgtagtttaggtattacatatctgtgccaatttcattctgctttcgatgacctttcgttgtcacctacacttcctgagcctacatttgctactactgtaagaatcagaatgaaaaaaaaaagcttcatctctatttgtttctgctgtgcattgtgtatcttagagttgtctcttaacttcttaagattacattggtgtaaagcagtcaccacactagaagttgacaccttgtatgtatctccaccttgcagtttgagattccaactgttgttgactatgccttgttttatttatttacttttggatcttacatcagcctacacttgtacaagaaaatagtttatttgtcaagaacttgaatgtggttatttttcccacctaattaggctttacagttgtgtcgatccagttggatttgtgcaacattttccatgtggtttacagtgtccattgaaaagatgaagtatatgtttggcaccttgtatattgagttgttcactgcatctccatgttgcattttgagattccaatttattattttggaatttaaagtcaaaccttcccttgtgtgctcaaaccagaacttgccgagagtgatttggagaacttcaaaagt

SEQ ID NO: 5044 - DNA, 997 bp, Zea mays
  Intron number 2 from transcript AC233870.1_FGT006 (locus A C233870.1_FG006) derived from phytozome v7.0 (chr-ID 6; po s 167015265 to 167016261)
gagaccactgaacctctacaggtaaagctattgacttattctcttgctgtttctgcatggtactggcttccttatgcatctgttagtatcatgatgattatttagcatgggcttgagattgaacctagaaggtttcagagcctatatttaacccatgcagttcatgtcatgaaccaattgttctatcactctagatagggcaccagcctattaacagaaaggttctcaatcatctatgaacgcttaggttctttgcttcattttttttcgttttcgtttccaattagcttttttttcatgttatctccagacaaccgataccagcaatatgttcatcttacttgtattcctaccagttttatcttattagatactgatttgtagtgacttcatggtttttctatcagaagagcaacaatatttttcccccatttaagttctacagcagcgtagccttttggtatacaatatttggattgctatgtcattgctatgctgtggagtacatatatgcttacacatggtatcttgggccctattacatctacagccaaaagccccaaacaacaggctcaagtgtttgtgaattgagataaatagtaaatactgatagaattgttccggatactgaacttatgctacttctatgcaaatttagaagccaacggctcacctctgctggctgctgctactgcacatggtacttaaacatgtcgatatgccacatctgaagtctgctttcatttcaaactggttatgttaagctgggcaatgtctctggatttgtttggtgctatagttcctcgtggtagataatgcttgagagttttacattcagtgacggagcagtggccagtgaaatctccatcagttgccagaatctgaatgatctctatgtttaaaatttgcaatctcattgctttgttgttacaacatataagctgttaaattggcaattgtatattaatgtattttttgatgtatttgtcaggatatc

SEQ ID NO: 5045 - DNA, 939 bp, Zea mays
  Intron number 1 from transcript GRMZM2G150631_T02 (locus G RMZM2G150631) derived from phytozome v7.0 (chr-ID 3; pos 2 10850247 to 210851185 reverse strand)
ctttcgcgtccttcgccggcgacgagcaccaccaggtatgcgcaccttttctcttccgttcctgttgtgcgaaaccgggcacgcgaaccctaacttaagctactgtgtttggtcgcatctaatttcaggtgtaattaatggaaaaattaatcttttgccatcgggtagaatggcataccaaatgtcagcctatgagttgaagcctaacttaagctacttgcctaactttgagttcttttaccaaaaaatattgggtgtataagagtatctcaagagctaacgactcctcaaaatcagttttaagggatatctaaataattagtgggggtagattttaatcctttctccaacagatcccttaaagcggcagattgtttctggggagcccaaaaaatccctcatttttagctacaaatgagggagttttaagggctatgaaaaagttgggagcggtttatgggaactgttggagacacgtttttgtgtttttcctaaaaaactggatttaggggagacttctggggagctcttggagatgctctaacgccttgtttggaacccttagagctaataattagccagctaacaatttgttagctggattggaccagctaatgaaatactgggggtgtttaagttatcgttatttaactatgatttagctaacgattagctgggggtgtttggaacctttacaactaattttagccgctaactattagctctagagatcccaaacatggtctaagtttacaccctatgttctttaccaggtccgcccctaccaagaatcccgttgcttttgcttgcatgctgtttctgattttatttcatatgttaaaggctcaaagccgagacgactgccatgaccttaactggttccaacctgcttcgtggtttgcagttcgtacgggagcacaatcagaggtgatcaccatt

SEQ ID NO: 5046 - DNA, 777 bp, Zea mays
  Intron number 3 from transcript GRMZM2G111086_T01 (locus G RMZM2G111086) derived from phytozome v7.0 (chr-ID 6; pos 5 7050325 to 57051101 reverse strand)
gaaaagtggaacccatatttaaggtatgtctagctgagtagaagcatgcatcttatctcatgattggatctgtgctgtcacttctaggaacattggtatgatctagtcatgcttcccaagatcatatttagtcgggtgtttcatactcaaagatgaatgttagggaaatcttcattcaactaaacttgatgctgtgattatgttacatgttccctgattgtattaagatatctgttttaactgaaaaaacaatgaattacaaagtgcctagtcatactgttatggtcgctagatcggtgagggattagagaggtgtatcgatgggcaggaacaccggccgggggcctctgcccacgaccgagcaagaggagggtttctcccttctaaataaaaaaatgtatgcatcgaacaaaaaggaagaatttacaacacattggtgcaacgacaagcaattcacatggttatttctagaaacaaacgtagttggtcaattccaccagcaatatgcattgcaatttgtatacatgttggccggctgaaatagatacgtgtctcgacttcacgagcagagtaggagagaagaggagcaaacctttcagttgaattcagaaacacaaggtaatgttaatccaagtcgaagaaacaattaatcgttctctaaagatcatcacctagttcacatgctgatgagatcttacggctaaatgacttccaagaaatggtaaaagttgatgcaacaagaagagacagtataagttggaagcatagaaaataata

SEQ ID NO: 5047 - DNA, 962 bp, Zea mays
  Intron number 2 from transcript GRMZM2G088590_T02 (locus G RMZM2G088590) derived from phytozome v7.0 (chr-ID 7; pos 1 49762186 to 149763147 reverse strand)
ccgaggcgcgctgtccaaaaggtcacgtaacgacggtgaggcacttccccactctgatctgttgttcgctcgcttgttagaccgggagttagggtttagtcaagttgcaaacgggagatcttctcgtgcaggatttgctcttttttgtttaggaattagcgattgatcaatcgcaaggccagctgaggcataattgagagacaggagcggctctaatagatgccattaggagaatgtgcgctaaagctgacataggttcaccagagtcttttgtaaggagttcgtctcctttgtaaggagacaatgagttcggggaaatcgactatgtttcactcttctactgaattgttgttgtttttttgttagctttaggcacttcatggtggcagtgggtcgtcgttaccattttagggcttgttcggttagctctcaatccatatggattgagtgggattgggtgggtttaaattccaactaagtcaaactctttcttaattttttccaatctcatccaatccataggtaacgggattaaccgaacaaggccttagtctatccgagtcctcatggataacaatttttagttctataaggggatatttcatactaccatgccttttatctaatttgattctgattagtaccttgttagttacactcgtggttaatcttatgcctgtctaaagtacttgctggagtttgagaggccgtcacgtgaaggcggaaggatgattttgtaaagctatgtgacacaataaaatagcttctttctttgtgcagagttcatggatgtataatgtattcattgaactccctgggttaaatgtattatactgtcttcttttcccaccccttttgaagggaaactaattacagccttgttttgcctgagtcttgttggttaagaaaaagttctactattttcagtgtctgtaagggagggggactggaattgtcctcag

SEQ ID NO: 5048 - DNA, 467 bp, Zea mays
  Intron number 2 from transcript GRMZM2G081077_T02 (locus G RMZM2G081077) derived from phytozome v7.0 (chr-ID 3; pos 1 70112184 to 170112650)
tttatctcggcttcgaaccctgattgctcttaaaggtaaaagaatctaatgttctccaagttatgcgttgtttcagaaaaggaactatagatctgttcaactaatttaagaaccatctaaaggggtgtttgtttgggattataatctgtccagattatataatccaacaaactttgaaagcaccccctaagtgaccatgagtcacatacaaatcatagcgcagcttcataagagctcatatgcttccattttaacggggtgtttgttttttagggactaatttttagttcttccattttattctatttaatccctaaattgccaaatacggaagggactaaaaattagtccctagaaaccaaacacccccctaggttcttatgctgccttatggatttcatttccatgatcattaatggcgcggtgcttcagttaggaggccgataaacctggaagactacactcca

SEQ ID NO: 5049 - DNA, 656 bp, Zea mays
  Intron number 1 from transcript GRMZM2G349560_T01 (locus G RMZM2G349560) derived from phytozome v7.0 (chr-ID 6; pos 1 38981053 to 138981708 reverse strand)
catttaacatcgcggcttacatctcgtctggagcggtacgtgcatctctttcctcctctcccagattcctgagtcctttacttttgcgtctcgattagagcttgactcaacagctagatttggggctagggttttgctctattttgggtttgttggggaatgctatgctaatttgcttggataaattagtgtgcgcattagcactagttctttgttgctcagtaggccatgaagctagtgccgccggtggtggatggatgtgcgcggtttctgttctgatcttcataatcagtactggctggattacttgctgttgttgctcctgctgattctatctctatgtcacagtagtaactagtaactgtgggggcaaggcatggggtttatctgcactggtaacgtccttccgctttggtggtatatatgcgttatatgttgattgtaacgctccttcaataaccttgttacgttaagggtttatttccaggtttaagttttctggattgctaaacctctgaactatttgttatttggcatgattcttttgttccatcaaggcgtcaacaaatacttcatgctgatctgtacactatattctcttttttgtttatgtattctgtacctatatgtaattgtgttttttgattggccctagg

SEQ ID NO: 5050 - DNA, 908 bp, Zea mays
  Intron number 1 from transcript GRMZM2G134753_T01 (locus G RMZM2G134753) derived from phytozome v7.0 (chr-ID 6; pos 1 52151527 to 152152434 reverse strand)
gggtggctgctggatctgacgccccgcacgctgaggtaccgatatgactcgaaacatgttttatttatttattatattgtaagtctagcttatgcttagcttccagttaatctccactgattatgatgggttggcttttgctgtggatacggtctaatcaggagtcgcatagagcagtcccaaccttccacctcatccagtttctatagcattaattcagctaccacatatgctaaaagatgctgtggcaagcaattaaatgaagaaagagtaagaaactgggtcttgcataagacttgttttcaacactatattcaacacacaatgagagaagagaagtattaaattcagttaagtaatattgatgtttgcattggagaggtagtgtctagtagtagtttctagatgacgtggaggctatagaaattataagtagtgtcttgggttgggactgctctaagtgtgtgatatgtgctaattattatttggtcacagagaaaatcttctacctggttgatcatgcaatttactgtgccaaatgttttttgggaggggagaggtgggtgtgtgggtgtgggtgtgtgtgtgtgtgtgggggggggggtggcttatggttatctttatagaccatatatactgattaaataattatttaagagttgtatttgtgccgtttttacctctccgaaatgttattctgtcagtatttgccttgctatgcttcggttacttgttcgaagtgttatgtagtgtagaatcttatggaattctagccatatattttctccttcttgatttttcattggtcataatttgacttctgctaatcccctctgaaattgccatttaatttagagtgtatatacaccgtgaatgaccactttacttggttttggcaggttgtcagt

SEQ ID NO: 5051 - DNA, 775 bp, Zea mays
  Intron number 1 from transcript GRMZM2G135027_T02 (locus G RMZM2G135027) derived from phytozome v7.0 (chr-ID 3; pos 1 90928376 to 190929150)
caggtgaacaccctttcccctactcgttctatgcacgcatgatacgttttttgtcatgatgtttgtggcactattgctcaaggatttctttttgtcttctcggcagaatcttcatgatcaaataactgtcaatctaccatatatatccattacattaatggcaattgtgaaaaatatatattaaatctctgtcaaactattatattctctggagtatgttataaacattcttagaacccatgtagaatggaaattattcacactctgaaaattgttatacttttttccttgagtatgttataatcactcttaaaatctatgaaatttcttaaaagttcacgttcagaaagttacatgggttatcaattcttgctatataatgaaaaatgttcttcactgttctaggcatctagtaacaataatttcagggaatgtaactataatttgagttaatgaaaaggatcatattatgctttcagagggaactaaacgagttagtactggtgttgtacaaatgtagtctctgtgtggtccaatagaccaatatatacttgcattcccaaaatatctcaccattgttactgatcaaaacaactacatcgaggaaactaagaggttacagccacatatacttgaaatccatgtaacatgaaacataattgcaactgtacctattaagttttcaatcccctagctacctgtagtttttgaagcgtttcttttctgtttctgcaatatttgactcctgagccctggcatgccgtccttgcagttt

SEQ ID NO: 5052 - DNA, 848 bp, Zea mays
  Intron number 3 from transcript GRMZM2G163291_T01 (locus G RMZM2G163291) derived from phytozome v7.0 (chr-ID 3; pos 1 4470804 to 14471651 reverse strand)
ggtcccacagaactactattgctaattacatagaggtgtgcattcttctcttgtttttgtttctttgaatgagcctacagggtcccacagaactactattgctaattacatagaggtgtacattcttctcttgtttctgtttctttctagaacttatagacttacaatatgctttatttatggtctgtctacgttcccattttcctttacttttgaacgtcaacattatttgccttttctgtttgtaattagtcagccaaaaaaatttatactcatgatatcttgttaatagtaaatgtattgttcttatttttgacaaaagtgtatgataagtcaactacgtggctacccaaccgtcatgaacccatgattttgcccaaatcggaagggtaggcgtggtgtagtgatgagagctgtctcgctgagtcaccagatcacgggttcaaagcaggctctctacatttacagggaaaaaacttgcatcggtttatatatcataaacatctaaataatcagtgaacacttgtcatgccagaaacagaacttcagcacacctgatctgactgtataaaagttatatatcatagatatcaaatagtagaatccaataaaaaagcatgtctagttaattagattagatttcctcttgttgtccaaagcgttagctattgcactgtcttctcgcagagttctgatttcattttgaaatcatcatgttctttcttatttgctaataaaagttattggtgaactaggtcatggtcgtcttattttctatgtgcacaatcaggctcttaccttggttttatgtaggagcaatattggccacctagtgattttgatcactt

SEQ ID NO: 5053 - DNA, 701 bp, Zea mays
  Intron number 2 from transcript GRMZM2G105996_T01 (locus G RMZM2G105996) derived from phytozome v7.0 (chr-ID 7; pos 2 0165946 to 20166646)
gctcggcgagatcgtcaccaccatccccaccatcggtgagctccactcttcccttcggaacgttgttggatcatgttcgtctcggttgtgaagaatgccctgttaaatgatggatctgtaggatccgcgataaactacacatgattgtttgttatgttctgatatttgaataagatcacagcagccattctgcgagccgtttgtacttcatagtacaacataatgacccacatatttgatttgattggagcaaaatgcatttaatatcaccctaaaatcacaattcattgtattttaatgttaatgtcaatctttcatggatttttttaatgtatcatatttgcctcctgtctacacaaactctgatagggtcaaacttaatgaaatcctgccaggtgaccgcaataaaatgctcgtcttcttgcctgatctgttgttaccaactttaaatttaaaatactattattttatagtagatgatggaaactacagttttctttctgttgttgaaatatactgttttggcttttggagtattggaaaaatcatttagaaattatcatcggggcgaagaaagaaaaaataagagaaaaattgtagctgtttttgtatgctatcatgacatagctgttttatttttatgcttcagcaccctttgtcttacaagagaaatgattttttttttcgaaatgcaggtttca

SEQ ID NO: 5054 - DNA, 1004 bp, Zea mays
  Intron number 1 from transcript GRMZM2G331811_T05 (locus G RMZM2G331811) derived from phytozome v7.0 (chr-ID 3; pos 5 7229047 to 57230050 reverse strand)
tctcgaggtcgaggcccctcccctttcgccaggaggtgcgcacggcacgactaatctccacactccccactagcttttcttcccagtttgctccgattttgattccatggtaatcgccgcctgttcctctcgtcgtctcgtccctacctttcctctgattgcgtgggatctcaactcaatctctccttatatagttatatgtagctgttgagttcgttccggttttgtttgacgatagttgagtagacccctggcaatccacccttgcacggttcttttaggttttttgttcgtcatttgcagctgccattctgcctaaattgtttaagcgaacctcctccggggctctctttgttgaagttcgccacggtggcccatgtcagtgtgatgtaaggttggagttggagctgcaatgacataaaacatagaagccttgatgcatgattgaatacggtacatgttattatgtttgaaatacccgtgtagtttgattaagcgcgtatcagtaggtgacatacagtgcagatttgtacattttttttaacacataaaaggcaactagagaatatgttatagactcatagtgctctttgttacaatttctgttgaagcatcattctttcttggtcaaggtctcatggatgctgctacttcattttttttaataatgctcggcatatagtcataggccaccatgttcttcctgttgtttcgattttcgactaggatattttaaatgaaattccgtgtcttggtattaccatgctgttgttttgactttcgactgggatatttcaaacaaaattctgtctcttgctattaccattgtatgactgcctccttagaaaattggtgtagggttttaggtaaatgacacattcttggagaaccatattctggtgaccgtactatctttggcatgctaaaatttcgttgtgtttgccccagcattttcccatttttgagacaatgatgtacttacccgtgtttaactgcagaaaaca

SEQ ID NO: 5055 - DNA, 639 bp, Zea mays
  Intron number 1 from transcript GRMZM5G813007_T03 (locus G RMZM5G813007) derived from phytozome v7.0 (chr-ID 7; pos 1 61663109 to 161663747 reverse strand)
tcgtgtgcgggccgcacttctaccgcgttctgcaggtattgtaatggttgcttgtgatgttatattttggatcttcaaaggatagtacatttgacgtcctgctatgtaattttaggttaagcgttgaatttgatttagctgcttcgtactaattggccagcttagcttttgtttttctaaacaaaaatggtccgaccgaaataattgaatcatttgcatcaaaaaattatgttggtagattataatccatttcgttcagtggtgtagaccacaactgttgacttcaatggttgggatgagacttgagcatcacgatcgacttgacaatttgaggatcctgagttcctgactgggatgacaattgtaggttgagtctattgctgtgtcttgtttggaagcaaaactctattgtagaccatatatattaagtaacaacagcattactaaggaataagggggtaggcaacatcagttttctagtaggtattagttttgtgttaatcttattctaaggatgagcttatagtgttttgccacatatttatattcttttgttgtcatgaggaatttatgttgtcatggattcctcattcctaaccacactttcttttaaaaatacgcaggacatatcacttctcc

SEQ ID NO: 5056 - DNA, 595 bp, Zea mays
  Intron number 1 from transcript GRMZM2G054658_T01 (locus G RMZM2G054658) derived from phytozome v7.0 (chr-ID 7; pos 1 60440567 to 160441161)
cctttgcaggtttgtgtcacgcgcatcctccatgcatttctttcttttctttcttttagatcataggtataagctcatatctatatgttttaaatgagaacaaactaattcatacactttgctagcagtacgtaactaaagagttatatgccatgaaactagtttggtatgttaaactcctgtcatcagccattcagcctatgttatgccagcaatccttctttgcaagcgtacaagcaagctatttgattcattagattacgatccaaccacagatataactatggtttgttaggagtttttttataaagattattgagctggtggtggaatgatttaagtgttaaatgtgacatacggttggatcacgatctaatggatctgattgtttgcttgcacgtttacaaagaacgactgtttgcatagccgtcgttgcccatatttttctctctctctatcagatcagagtataaggtgctagaggccttaataaattctaagatctatatagatttgatttccgtccacgcgtctgtccatttgtggatgatctcgggcaggtcacgtggaaagcgagcatctgggcggaaggcaa

SEQ ID NO: 5057 - DNA, 603 bp, Zea mays
  Intron number 2 from transcript GRMZM5G899926_T02 (locus G RMZM5G899926) derived from phytozome v7.0 (chr-ID 7; pos 6 6533085 to 66533687)
gtcagccacctccagccttcatcaaccctcaggtatgctcattttatgatgtacatgttctccctcagtttcaaactataaactttttggcttttctagataaatagtttttgctacgaacttagatatactttgtttaggtacatactaaaagtaatatatgtagaaaagtcaaaatatcttacaatttggaataaagtaggtcccggtgtatttttgtttggtaacatttgttattaccatatactggtatgatctttggtaacatttgttattaccatattctggttgcttgcactacggctggccaaatgtaaccagagctatgttattttaattttttacatccattacaataaacctaatgtaacctgaaatcttgacaatcatacatctactattgctctctaattggtttttttttgctttgaaagttgatggatacatatgaaattatgttttgtgtaagatgcgtgaagaattcttccctgatagtctgtactaggctagatttaaaggtttatgttatgttgttgcctccatatcttttgagctgatcaattctatgttgtttgttaggctggatttgctttccagcaacct

SEQ ID NO: 5058 - DNA, 1018 bp, Zea mays
  Intron number 1 from transcript GRMZM2G384679_T01 (locus G RMZM2G384679) derived from phytozome v7.0 (chr-ID 6; pos 9 0473512 to 90474529)
ccaaggtggacaaggttaccatcctcaggactcaggtctgcattaatgctacattgttgtgttgtgacatttggtacttgccaatgatgtcaaggtagccatgtgataattcgaggcatataattttatcactacctgcattgtgactagaatagtagtagtagtaaataactctttctaaagtcaaaattgtgtttaactgaaaatgatcctaaacttgaaggtactacagacattgggttgtgttgtattgtcgttcaaatgaaagatcttctaaggtacactcagatggggttgtaaatggatgactgccaaattgatgctatggaaaactcagtgactcggatgaggttgttaatggatgactgccaatttgatgctagggataacacaatgacttagatggggttgtaaatggatgactgtcaaattcatgctagggaaaacacaaagtatgacttaaccgtgaacaatgatcaacgtacttgattcataggatcttagtcttggtatgatttggttctgcaaattaagatctaacatagatagatggtgctagataggaataggatagtatacaaagaaacattgttgggtaaaaactgaagtataaagtgactaacctttggctcaggaaatcataaccatggtcaaccatgacacttttagtaataaccatttccaaatggatatgtagtgatgccttctcatttataaattctgtgctatgactacgaattaactgaaagaaaaactccaagtacatatggcacgattataacttacacagttattagtttagaatttcaaacataaagctacatatatatatatatagaatgttgtattgatcattttcaggttcagagtattgattcttttcttctaagtatcatatgtagcatggttggataaccaatttgcatgtgtacagcagaatgtgtttgtgcctgtgtagtaaacatttcttctttatctctaccataaggaacttctttgtctcgaccatcaggaagca

SEQ ID NO: 5059 - DNA, 712 bp, Zea mays
  Intron number 1 from transcript GRMZM2G020401_T01 (locus G RMZM2G020401) derived from phytozome v7.0 (chr-ID 7; pos 1 75349075 to 175349786)
cgtccactgctctctcgacgtcatcgacgagcgaggtagctaagcgtctcacccgccgccgccgctgaggaccatcgtgatccagatctagacgtccttctttttagcccggctgtgaatagctgggagctctagttagtttatatctgttcaaatctctagtttgcagtcatttgagaaacggaggagatcatgttcgttaaattgtgtgcttgttgctctggagttaaattaaaactgaaatttagaagctgcatcaccagtttcaggtcagaagaatcaaaatctactcttccaattatatggggcctggcatttgcctgccaggcctccaaccaaaacaggcccttagttactggaatgagcattaaaacttgagaatcgatccaacttgtacaaaagggggcaaattcaaatcatgtggcatatgcggacaagagcagacctgccttgtgagggcttggatatgcatagaagcttagtggttctagatgattattatggacaaatgcaatggttgattcaatcttattagtgtagttttaacccagtgatttattggcatacagaaatatcaatctcctttttctcagtgctgttaggctattgcttttttttttcatctgagagacattctgtcgttttcttatctgcctcaacattcgttctgttgacagtgagcaatcctaagaggagtgcacctacattgaat

SEQ ID NO: 5060 - DNA, 566 bp, Zea mays
  Intron number 1 from transcript GRMZM2G300437_T01 (locus G RMZM2G300437) derived from phytozome v7.0 (chr-ID 3; pos 8 7405290 to 87405855 reverse strand)
cgagaggttagcacacattgaagcagcacacattgctcaaaaggatactggaagggacatgcctacatggcagaagtcagttcttgcttagtgaccaaaaaacaaataattttgtaacttccatagttgactttctgaccatatatatgagctacatatgcagcataacgaagttctataatcaaatgcactaatggtgataatgataagggtcacaaaccagcagtctacatagtggtggaaagataccaaaggtatgcaaataaaagaaacgaaaaccttgtctaaaaggcaaacacagtaaggctatgtagcatgatcatatcaagaacacattgaagattgtagcatatgtctggattgtagcaaaatcgtgttgaaaatcaaaatgattaatttaggtagtttttgtttgtaggaaaagcagagagccaaggcaaaagagaagcttgataagtgtgtaaaagacactctgttggacccttggtattccaactccgaaagcaaacattagaaaggttttgttttcctgccttgtttttgaaattatattttgattaattcag

SEQ ID NO: 5061 - DNA, 982 bp, Zea mays
  Intron number 4 from transcript GRMZM2G072767_T01 (locus G RMZM2G072767) derived from phytozome v7.0 (chr-ID 3; pos 1 98817925 to 198818906 reverse strand)
tttaaatataccctggtgtcactgactctatttaggtgtctttagctttctcagtatttaattgcttataaatattagctttatgtttgtctccatttggtagattttggcatggcctatatgtagacatcagatacttaacagaagctgcttatgtttcaggcaaggaatcatctgcatctccattctccaagaatgtgtagtcgcataaccagtttgaatattgatagggttggcatgaaggtaaacctacaacatcatacaaaattgatcggtttccattatgttaaaaaatataagagaaaaatctttgcttaaagattatagcttacaatttatttgatcgtcatagggaatattaatctgcagttaatctgatgaaatttgttaacaaattactgctataccaaggtcctctgcagttagtcttggcatggcaatggcctcgtagctcgcggctctctaataggaataattttactcaaaatgaagctatagcgtcatgctatcttaggttgtttggacagttccttaggatactgaaactgtcttagataatggagatgatgttcactcaaacatttctcccgatagatatacaattgtaattacaccagaactgtacttacaattaagaacaacatcagctgtaacattagtagtaagaaatagttcagatagtgtgaagaagttcatctgttggcctgctatttcaggtactttcacatctaggaaaaaacaatgatttctaatgttatcttgatggagttcttatttgcctcaataattgtgtagatactgtgtgtgttcctgaaacttcatggagacttccatatctccaccaggcacatcaaagcagtcagctgtccgcaaaccttctcctggaagctctcttaaggatctgtgccttgtttccaaacaagggtcaatagctgaagtagaatctgctttggccttgttgaaaaaagtggtgggaacattg

SEQ ID NO: 5062 - DNA, 1001 bp, Zea mays
  Intron number 2 from transcript GRMZM2G093789_T01 (locus G RMZM2G093789) derived from phytozome v7.0 (chr-ID 6; pos 8 9242060 to 89243060 reverse strand)
gcctcatatgtaagtgttgcgctcgcttctcttctgcagtttcctgcttccttcctgcatttgcattcaaaacttccttttctggtatctaatattgggttccgtagatgtctaacccagcttgctttggaataagaggctacaatgttgcacctgctgctgttcttcttctatgtattttcgttcacattttagcaacacctactctgtagtcattatcctcacctttgcatttctctttagacaattcatcatttgccatttataagtttaccttttctctttctcctggattatcctttaatatgttattcgatatcattacctttgtatttctctttggacaattcatcatttgccatttataaatttgtttgtttctcttgcaccatccttttaataggttaatcaatgctctgatattcccatatgcttgagagctcgtgcaactatcatatattttaacacttcgaaggtgttcttgtactttttaggttgtttcgtctcttactagatcttagcctacatgacctttaagatgccagcaccattgtagctgcagttacttttcaggatgccatacttaatgttgatgttcattttacctgtgtattttgatcatggcacatgcctcgaaccttgctacctattgctttactaacttgatatgtgtggccaagtatcccttgttggattgttgatcgcggtggtagatgttgaattttgtagttaaacgtggacaatgtcactttatataactattccatggctagttatgggaagtagatatcgatgctacttttaactattctgataaactgaaatatctttcatttgtggtgtttctattatttgtgttttgaaggcatttcatgatattttcttattcttcactcacagtaaattttaccttgaatttgtaaaccattttcactaattcaatttgacctcgttggacacaaacgtattgtgtttatttcagttgcctggccgcacagata

SEQ ID NO: 5063 - DNA, 296 bp, Zea mays
  Intron number 2 from transcript GRMZM2G704368_T01 (locus G RMZM2G704368) derived from phytozome v7.0 (chr-ID 7; pos 1 1729491 to 11729786 reverse strand)
gacataccaccacttcgctagagaggtatgcatttgattatagtcgaaaagaatttatagagatgcatacttttcctagattaccgtccatccatttcttctgcatttatttatcttcaggtttgacttcatgagagcatagatggaaatgtagttgccagaaatgagattatatgtgatgattctggtgaggacccgacctatagcaggtacatatcagtctatctattttggacatttatttcttgtgtgtgtttcatattatttgtgttttcttgaaaaagtgggtctatggg

SEQ ID NO: 5064 - DNA, 1044 bp, Zea mays
  Intron number 1 from transcript GRMZM2G105307_T02 (locus G RMZM2G105307) derived from phytozome v7.0 (chr-ID 3; pos 1 83259506 to 183260549)
cccaagtacaagtgcccttcttgtcgcacgccctagtgagtccagccacaagctttatctgccgttgtgcgtggttacatgtgctctcgccaagcgtatcgttgaggcgtggtttctttgtcagtagagtagcaggggtatctctgttgagttatctagcgttagttcagactgtatttgctcaatttcttctttgaggagctgacgggttggctagggttcatggaccaaagtgactgggcatgtttggactatgggcacctgaaatttgcatgtagcctccgactccagattcgagtttactgttcatacttacaatcaattaagaaagtaagaccgtattaaacagttcacctatatggtcacacaaaaacactgttttgcatggtagactacattgcagagtggagtttgaatatggggatgggcattggtaagctgctggagatagcctaatatcaccacaattctagcattaaacatagtgttgtgtttgatgctcatcttatctttagcggaaatttaaagtacattagtgggacatataactatgaaatgctgcattaatccaaaacccaaatgtcagcaacttttcctaaatgaaagtagcgtgcacataaggaataaggttgctcttaccttgaggagatataaagtcgggccactgagtcctttttttaagaatgcggcttcaactggtgatgctaccatagtatcattattttgtaacttggggtatcatttattaattacaacataacggtatcactaaacatgccagccttcaatgccattaggctttcttaacctgttctactttatcatgtttctaagttcatcatctgttaattaaatcaagtcatacgatccttgcaatcactttgggctcattcaaaattatgcctggaaaatgtaaattagtgttgatactaagtattttgttacatatcatatatgctacagattaactaaaaacattctctcatttttttattagttgaacctaatttactgtctcattattatttgcagttgctctgtcac

SEQ ID NO: 5065 - DNA, 985 bp, Zea mays
  Intron number 1 from transcript GRMZM2G357734_T01 (locus G RMZM2G357734) derived from phytozome v7.0 (chr-ID 7; pos 1 62061728 to 162062712 reverse strand)
cgcggctttgtgtttgtgtcccaggtgaccaatcacaggggctccaatcagatattatttttcccttcatcacatgtatgcagtggttgataagcggtgagtactgtcacatgcgccagacgatgcaaaatatacgaatcagtggttgataagcagtgagtgttgtcacatgcgccgaaccatgcagtggttgataagcagccacaggatcaggtgtgttttctgtaatgctcctctttatcttctgtaattttttacaactgctgatgtgactttgctttttatatgggctgtaagtttcagtaatattttttcataacttctatcattattgaatacttatattttgtatccctttttcgctgaaccttcttgccttatgtttgaacatgcaacatttcaattggggtaggaggtaccaaaggaaatgagcaaaacatagtatactgtctcagatgctgcaggtgcacatcatgtccatttttttaatcattcaagtaatgccatttgccaattggttataacttctttcattctgtaactgtttagtttgatgcaaataaattgcaatggtgttcgtcagagccaaacatagcagacaacactgctttagtttgatgcaaataaattgcaatggtgttcgtcatagccaccaacttctccaaaacaaatgtcacagaaaaatatctatacctagaacaatgatagatgtagtggtgtcactgacttcttcatcctgtgcatgacttagttcaatcatagactgcacattaacacacaaacacaattaattacatgggactcgcaacatgaatcatagattgcatatacgattaggcatatatatgtggggtctcgcaacacaaatccatccactatgaagttatgaatatgtagtggtcgactgataatttcataccctttctggatagtttattgtccaatttatgatttaattgaagaaatgctattcatacaggagcac

SEQ ID NO: 5066 - DNA, 462 bp, Zea mays
  Intron number 2 from transcript GRMZM5G831584_T03 (locus G RMZM5G831584) derived from phytozome v7.0 (chr-ID 3; pos 1 76524227 to 176524688)
gagattctgctaatcttcccaaacaggtgagaggagccactattagttttttggcaagatttaatcaaagaaaggttcaaagattgttttgctttctgtaactcaaaatgtatggtaactgtttttctgtggagaactggaatttcatgcttctatatatagtttaacacttagtgcatttgtttttattttttcttcgaatttgaatctgaatcacagtatggttagataattcctttgctgtttctgccatgaatgtacaactgtcctattctttacttctcatcctttgttttagtatcaccatgtatagttcatttctttgaactgtgggattgtggttgtagtggttcatgcatacagtacatattactggataagaggacatagattatgtatcactatgttatattttcctttgatgcagaacagctctgggtccttgattctgtccctggacaa

SEQ ID NO: 5067 - DNA, 961 bp, Zea mays
  Intron number 1 from transcript GRMZM2G136918_T04 (locus G RMZM2G136918) derived from phytozome v7.0 (chr-ID 7; pos 1 64071364 to 164072324)
atctgtagtcagccagtaagatttctgtatacagcaacaaaacacttcgcttgtactctagatttgtacgaaatgtcaaagccatgcttattagttaaagcaatgatagattcctcaagttctaatcttctttcttgtggctcttttattgatccagctagatttctgccagttttattttacatagaaaatttatgatccccaaatctacatgatgcaatcatacatgttcagtcgttttggttttctttctaggaaacttatccctttggggcctttggtcaagttctacaaaatgtagtacctttcttatcatttaataactcgcaagtttataagcaaaacataagtcgtaaaaacatattaaagaatgcagcaaaaggaatcacatactagtttctagatacatgtttgatgttactatgtttgacttccagtcctcttggttgttgctctcctgcattctagatattgtaatattttgttacagaacatatttaaagcttggagtaaatgtgtcattttttggaaatatttggtaataaacaaaaagtctagcgaaagacccttactttcgccactttgctttgatagtgttacctctattaattaaatgggcaattgttcttgtgatatcaggatgggtaagcttaggtaatgctactgtacatgatagaatatcctctgtattctgatatttccgtcccattttggtcagaaacattatattcaagatgttagagatttagaaggtagagcactagagtctcttgttgaccaaaatattacttttattataggtgttatagttgtacaagttagagaactagactacattttttaaaactttttatattctaatgctaattagataacttcttctggaattactttcattgcttatttgctgctgattctttttgcaggagaatattggtgaagcaataacttgatattgggt

SEQ ID NO: 5068 - DNA, 943 bp, Zea mays
  Intron number 1 from transcript GRMZM2G174479_T01 (locus G RMZM2G174479) derived from phytozome v7.0 (chr-ID 3; pos 1 45364354 to 145365296)
gccccgcgcaacctctggcaggtacgcctccgttccaagttggaccgtagactagattaggttaagccacccctaatcccttgttgcggtagcgattgcccggtttcctagtgaatcactgtttgtggatgttactattgcagtgggcattcttctcgctcctgccatcagaccgagatggaattgggtgcagtatggctgtccacaacattggccatatttgcttgattggagttatggtttcttgtactgttatatctgttggggattagcctgctcctcattcctcagcacataaattagtttgtttcagaaccacatctcctagaaaccatgtgaccgatatactatgcaatagactgtccggatgcaaaaattgctgactgattgagttgcaagttaacacctacacaatatgccgttgtaggttgtgcagtgtatattacgctgcaaacgttgtccgctgtcaaagtagaaacgtgcatcatctagattcagaatcacttgtaggacaggtacgctttcattgttagttttggcagggtggtaagatcaacaaggtcggttgcatgtcttcaaggccctctcatttgctatctatgttctacagatgttatccaacactaacaagatttaagcgctttatatgctgcatatcgtattactgttattagccttttttttgtaaacaaactgtggagtttagctccccagcactttattagaaaacccagacaaagttatgagcctattattattgtgcacctggtacaaaccattgagatatagtatgttaccccataagagaaagtctacctttgtttcctggggttatttcattatgccaaatatttgcttgtattttgctttctctctaactattcttgtactatatgatatattgtggacttgtggaaatatgacacttcctttgctcaggtgt

SEQ ID NO: 5069 - DNA, 408 bp, Zea mays
  Intron number 6 from transcript GRMZM2G126048_T03 (locus G RMZM2G126048) derived from phytozome v7.0 (chr-ID 6; pos 1 61032297 to 161032704 reverse strand)
ctgcacggccaacagaaaatacctgtcctgaagaggtagccacatgcttatcatgatgtaaatcatacattcatacagtatatgttaagtgaaaatgtgaaatcatgatttcctttaagtcttcctttgcctttgacttcaatgcattgtactcatgattggtgttctgctttgtaattcttagttcacaatttttttaattaaaacaaaaaaattattaaaggtagtacaattcatattctcagttcttccttcatatgcatttgaatcatatatttgaatttcctaaaactttgtcattatctataagtcactagactcactggctgttttactgctaacttccaaccacataatgttttttcaaatgcagcttgctgagtcttcagaggaagtaaagacagacac

SEQ ID NO: 5070 - DNA, 734 bp, Zea mays
  Intron number 5 from transcript GRMZM2G050645_T01 (locus G RMZM2G050645) derived from phytozome v7.0 (chr-ID 6; pos 9 3868552 to 93869285)
gctgtagataccgtgttcctgagcctacaaggcaggtatgggtaggtctgaagaagcagacctttggtatatgcatcatttatttcttgaggcgccaataagactggcctttcttttattctttgtaggcggatataagatcaaaggtcttcctgcagaagctccaaaagccacggcagtgacaggacttcctttttgttttttttcctcaagtatgttacaaactgggatcctgaccgtcttgcttgctgtagtcgagttttcagaaacaaatatgtaacatgatagaattgtcacttgcgaggttgccgcaccgtagtttgtaaaacagaccgatgatttctctgaatttgtaaaacatcaccaggcaaatagccgacagcagttaatggcggcgtcggcccaactgagcccgcatcagaggacgcgcagaaatcgcctcctgattttgtgcgtggttgtttgggcggggcgtgcaattccccgattcgagcggaactcctcccatccgatccggcggaggaggacaatataaaagcgagccaatcggcgtctagctgtagcacctctgcgtctcaagattagagatccattagctgtagcacctctgcctcccacgaatcgattcgacgacatcttgctggtgagctatccccaatctacatacctgttttgcttagattttatagttacgcttgcaatttgaatcatggcagcaggtacaacctaccatc

SEQ ID NO: 5071 - DNA, 668 bp, Zea mays
  Intron number 2 from transcript GRMZM2G110044_T02 (locus G RMZM2G110044) derived from phytozome v7.0 (chr-ID 7; pos 1 61127782 to 161128449 reverse strand)
tcttgggttctttgtcttcgttgttgttggatcatgtaagtccttatgtttctgatgttttgtggttgatggtcttcctggacactctttcgcctttaacagttgaatgcatctgctgtctgccatcctaccaaatcagctcggaatcatcatcaatcctaagttcctaacacagtttcttgtcagttgttatttgtattacagtaacatgcttattattctgaagggtaatgctttatgtgccttggccagctaaattgtggtacatgactaatgagcagcagttctttgcaaagtaatcagcacttctgtgctttgaattttgaatttggaagtttggacttgttggacctaaaatgttctcttggtttactctaagatgtattggctaacaaccatagccattaactgtaccactctgataacgacttacagtggaatagagaagtacaaaaattgcagggcaagggttttataccgtagttatatacttgctcaatctaatatgaatatgatgcttccagagaattgtgagttttatgtagcctgatcattttttaccctagtgttagaaaaatgcttatgagctatttgaatttgcggtctgagttatttactctctccttcatgcagctctctttcagatcatcaagacagcatcaaacgct

SEQ ID NO: 5072 - DNA, 483 bp, Zea mays
  Intron number 2 from transcript AC191568.3_FGT010 (locus A C191568.3_FG010) derived from phytozome v7.0 (chr-ID 3; po s 26085909 to 26086391)
cagccagagcccaggaggtgggccggagctcgacggtgaggtgacggtccaaccgaaccaccgaatcaaccggccggatcgtaccgtagcagagcaggagcagccactggccgcaaagcaaatgaaagaaactgaattgaagagagagttcttcggcctacttacaaatctccaccccccaacaagcttcgttggatgttagcccgtttttttttataaaaaaaatcaaaattaggctgcctaatatttaccaatgctatcgactctcttcttcttcgcaaattgtcattttcttcttcttagcaaattggcccacggtactttccaagctacaactaacaactaattaaataaagagaaagggggcttccgtccgaggatattagtaccggttgatttagaatcgatcctgacttgacatctttttttaatcgtcgtgtttttgtagaggatattactaccaatcagtgtccacaaccggta

SEQ ID NO: 5073 - DNA, 725 bp, Zea mays
  Intron number 1 from transcript GRMZM2G041171_T01 (locus G RMZM2G041171) derived from phytozome v7.0 (chr-ID 6; pos 6 4100884 to 64101608)
acagaggacgcacggcgtgtgtttccttgccgtcggttgtaaggctgcaccaaatctgggccattttttcacttctctgagtactgctgcatttcatagcagtttccttatactttagttcaagtaaccttgtactagttcttattgtttctgtagttagcagatgtatagttcctctgatttttgtaactagatattcatagcagtttccatatacattattttacagaatttcaaagtgaacatcctctatttctatagtttcatgtttcatggatacgatggtcagatatcaaaggtgtccaatatattttgcaaatctaaaatgtcaactaccttttatagacatttatcaagaatagcagagcatcctgttaggtgtttttcagaaactgcaatgcagacacattgtccatagttgtgggatacttggagctagtggtactaatgtcaacttttacatgacttatttttatacgatgtctaaatacttgcagacacattgtactttgtttgaagttttagagatgttagtaaaacaatttttcctcattgagatgggctctgtttcagactccaagtgttttattaaatcaagtctgttgataaattcttttctatgttggccaatgtatggattaatgctatgttttactgaactccatttacatttctagaccagctaattacacatgataagtttttattttggtatgccagcagac

SEQ ID NO: 5074 - DNA, 928 bp, Zea mays
  Intron number 1 from transcript GRMZM2G145814_T03 (locus G RMZM2G145814) derived from phytozome v7.0 (chr-ID 3; pos 1 53921731 to 153922658)
tctgctgtgcttccttgctgcttgctccgggagaggtgagagcagttactccccttttttctgtctcttggttccacaatgttctatcgagaggttatgctcttcgctgcgtttaaagaattatggtttgtttgggaccaaggggattgagaggctaaaatccattacaattcaatcaatttttaatggtaatgtattttagccccataaattccctccaatccccttcttccaaacaagtccttagaggtgtctgtttcacttaatttgggtagatttcctatgagagtgggagtatccgtgagaaaaaaaaagaagaaaccatatgcaaagaacagacgagatacttttagttcgcctgtttctcaggagcaccttaacgaactggaaaggcgtttcgatttcaaaaggttgattaaataaattagcggcaaattatcatgctacttagtacttactatgcagacacacgttctgccaatacttttacgctgctgcattttagtagtataaaattggccttgtccttgcatttcgattcttcaggttttctttttagtagtataaaatctgccttgcccctgcatttcgattattcagtattttaaacaaaaagttggagccgtgtcttgtcagtatggtttgtagcgtggtcatagtcagtttcactctaacaagcgacagatgcgtacagatttgattcaaagacatcaacatatacccacttaattcaaaatttctgtgcagttatatttatgtgtcatttttccatgttttacataccttcttttttctgctagttggtttgtctcaacgtattcattgtgttccatattactccacggtagtttcacaacgaaactttgttgtaacgctttgctttcgtcaaatagaacttacgatcaaacagaacccttccactaccata

SEQ ID NO: 5075 - DNA, 707 bp, Zea mays
  Intron number 4 from transcript GRMZM2G435338_T01 (locus G RMZM2G435338) derived from phytozome v7.0 (chr-ID 3; pos 5 435070 to 5435776 reverse strand)
tttggcatccaagagcacattgatcttggcatcaagtaagatgatctcatgtcttattgtaaataatttgaatgtggcctgtttgtttctgtgaacggatgttttatgatgggcactgttgcttgcctgtaagcaggggaaaagatatgtaactttgtattcatgtagcctgtacccactatgggtcactacgtactgggatagcttaaggctaagtgcttaacacagttttgggaattgagactgctgattggctgtaagatagcttttgggcagccttttccattcgctgatatactaatatggctgagtcataagaattcccgtgcttcattgaagtaataattttctgtcaagattcagatgaagtcaagcttctaattaattacctttttggtctttataatatgcacattggatttttgtagtactgtggtgcaccaaacatattttattgtgttgtttaaggaattattttcttttgatcgtttgagaatattgtaatagtgttttctttagtgtacacatatgtgtttgtggctattttcttcatttagggatttgggattttggagtacatcacttgttaccctgttcctgtgtatagttcctcttttttttccgcagtccttatcatagcttttgctgagatgtgctgcgttttgttaataattggtaaccttcctctttgctgcactttgtaaggt

SEQ ID NO: 5076 - DNA, 497 bp, Zea mays
  Intron number 2 from transcript GRMZM2G435338_T01 (locus G RMZM2G435338) derived from phytozome v7.0 (chr-ID 3; pos 5 436031 to 5436527 reverse strand)
gcgagagcggtgatcgcctcacccgcgccgccaaggtatatatgcccattccccagaatacttctctgtaggttctacctgctgtttctttcagttcgctccgcgctcgtgtgacctagagcaaatgtgtttgagtcgcatctagttgtgctccactagaccacttccattttttgtgagaattagttctgcactgcagcctaatctcagctcctcaagccgtccaatctctcgtgttgttgacaccacttaaattgtgctatccaaatgctaagaagtagtaatatgattattttcaacatcagctgtggttagttattgtttccataattttaattagagactgatcaatggtcccaattttgcttttatttcttagggctaaaatgaggtttttctttgtcgcctattgttagtgttcatactggactgttgctctaacctctgttggttgttaattaggtactggagcagctgagtggtcagtcaccggtatt

SEQ ID NO: 5077 - DNA, 577 bp, Zea mays
  Intron number 2 from transcript GRMZM5G813858_T01 (locus G RMZM5G813858) derived from phytozome v7.0 (chr-ID 6; pos 1 57828958 to 157829534)
ttcgtcggcttgcagggtcagtatcgttcatctgcctaattgttcgttacatcttattcttacatataatgttgaattgcttgtctccattgattgtgcaaagtaccatacacacagtagaagatgcatgtcttcgttcagtgtttatttccacacacctggaatgaaacaatagaaggtgtttgtttgataaatcattagcaacaaattatgtagttatttctttttcatgtttaaattgggcgtatttgtcactaatgattactccctccgttcttttttttattttgtcgctggatagtacaaaattacactatccagcgacaaataaaaagaaacggagggagtatatgtttgaggcctttatttcaaaggtttggggctgcctattttttcggggtgtttgaatctcgaaatggtacagagaagcattctcttttgctttcggctgtccattcaaacagcttgtctcttccaatcgtgtcgctgtgccatccaatgtaccttggtcttctttgcttctgctctggtgcaatttgcagaggacggcagaagaccgaaagcattcgatcgcccg

SEQ ID NO: 5078 - DNA, 693 bp, Zea mays
  Intron number 2 from transcript GRMZM2G164862_T01 (locus G RMZM2G164862) derived from phytozome v7.0 (chr-ID 7; pos 5 9685503 to 59686195 reverse strand)
aagaactcctgcagcttcagagaaagtgggaggaggtccgtagccttcatcttccaaaatctaacatttagagaagtattttcctctgaattgcttatagcactgtaattcaagctttgtttcttgtgtatttgcaagacaaatagcggctcttaatccattttgcatcagtccgtatggcctccgttcatttgaattttgatatacgaagtcaattgagccgtaaaataatcatattgtcttcagacactgtagcatattatcacgggcttttatgtaacaagaagagctgtctaatctgtttgaattgtaccagtgccagatctactggaatatccttatgctgtctgtgacaaaaaggaaaattaagtgtcccagactctttcctagcagaattcatccatctcacatacttactagctagtttttcagtttcttcagcatccctttagctatttacttttgtttgagtttcagggttaggactcatgagtttacttgtacggttgtaccagttttggagaaagatgttaattctacctagcatcccagaattatgtgttgtcttacatacagtagtaaaaatcttcgggcgaagtttgttttttcttggttttttccttacagtatttttcctaatgagttgtctcaaaattttagtattgatcacaggagcagcaagttgaagccaaa

SEQ ID NO: 5079 - DNA, 718 bp, Zea mays
  Intron number 2 from transcript GRMZM2G173943_T02 (locus G RMZM2G173943) derived from phytozome v7.0 (chr-ID 7; pos 8 3269118 to 83269835)
tgttgaggctgttactcaacttgggggtcctgatagtatgttctcatactactgcttttctgcatccagttctttagattgattttactgaacatttaagcaggattttcttcctgtatattcatactctctctctctctctagatgtcatgaacttatattccggcaaaagattttttttaatattatgaaagtatgtttctctgtggggaattaagttttacatgattctgggctctacagatatggatgagctgcaaaagctaccaatctaagatgccttggccttgggatttatgatacactaagaactcactttgaagttagctacaagaactagcgtctgatgccctcctattacttggtgttcaatttgctgtattttttatagcgatgcaatctgctcaaaatttgggttcaccaatttcaaacattctttttgggtcatattcttggcaaacgcttaatcataatgggtgtttttcatggatgaaattacttgaactatccacaaccaagcaaaattcgcaacttaggctgccaggatttttgacgccaaagaaaaccaacaggatttttgtgtgttattgttgtacttatctggatttatagccctttcaattttacttgtactatgtggacatgtaattttctgcttctgctaacacttagttgatcaaatgaaataggggcaactccaaaaggagttctgagaatt

SEQ ID NO: 5080 - DNA, 776 bp, Zea mays
  Intron number 2 from transcript GRMZM2G464212_T01 (locus G RMZM2G464212) derived from phytozome v7.0 (chr-ID 3; pos 1 2514513 to 12515288)
ctcccaagaaaagtactagggctgaacttatcacggcttctctttttgttcatcatgctgattcttcgtaatggtatagtggcgtagtgctcctcatcttcggttctgcttgcttgcttgctcggaagtcaagattttctttaaacctgttgggtaggcaatcaaccctgtgaatcatctgcaggcatcaacttagttttttcaattagttggtccataaatttggaggaagcctcaaataaattgccgtgaagttgtcaaacttggtttacctatgcagtaggcaacaactctcgaaaattgttcatagatcagtcaattcagtctttggtgaaagcacgttatgttttgttcgagtaagtaaatgatcaaataattaactacaaacagtgttgtatggaaagtaattttgtactgctatctgttgaaaagaattcctatattattgagcgtccttttatttggttttttatccattgtttcaaaaggttcatatgcattgccagttttgttatcttactgtactagctggtactctttggattatattgttatagaatgagaaacttgtagaaacgattttacaaaatcataaaaagcaactttgttcattactagtgccgtgactttgttctgttaatcaatttttactgtatcatctttaagcattctttttttttgtcgtacttttttttgcaatggtattttctagctttattttgatataatttgtgttgttaccttaattatcttatgatttcatatgttgtcagaga

SEQ ID NO: 5081 - DNA, 952 bp, Zea mays
  Intron number 1 from transcript GRMZM2G110277_T01 (locus G RMZM2G110277) derived from phytozome v7.0 (chr-ID 3; pos 1 71439816 to 171440767)
gccgccccacatcccaccgcggcaccgccccacaggtaaaccccctcccctgccccttcttctttctcccgctttcgctctgtgctctatgctcggcccgtcggccactctcccactcgcacttgtagctaggcaggctgcaggctgctagcactggcgacctggcgtcctgtagcaccaaagcagagttcgattcttagagccgattagccgaatgggggcagcagtctgttgttccgcgtaagatgttcgacgaaatacaccagcccatagaatttcagttaacaactggtaactgttgtgtgttatcaaatattgtttctataattttcagcaaatgcgaaggtttttctagccactttcaagaggctctggcactggtgctaataataatgtgaataacacaccaactgttggagggacgttcaatccggatgacatagttatagatcccgctttaaaaagataaattgatgaatatgataaagatgtccaagaccaagtgagaagggcatatgttctgaatggtccatgccaatcaaagggtttagatttctcttgttgacagtatggacaaagttcaaggccttttaaagaggccttgttattacccgtctcaacaaagtgttgagagaatatttttggcaatgaacatcattaagagagaattgcgtaacaaagttgaagatgattggatgaatgatttgatggtttgctatacagacaaagagatattcaaatcccttgatgatgagactattactagaagattccagcgtcttaaaactagaagaatgcacttgcctcgagtcataactacaagattaacaacttagtggtatattcactgcactattttcatcaatgtacttttcttgtattgatgttcatctaatatacatcttttctaactgtagattggatttttgtcggtgattttggtgccgcactg

SEQ ID NO: 5082 - DNA, 744 bp, Zea mays
  Intron number 1 from transcript GRMZM2G300031_T01 (locus G RMZM2G300031) derived from phytozome v7.0 (chr-ID 3; pos 2 09334368 to 209335111)
agataggtaatagggtcagtcttcaaagttattaatactatctctgacttcatgacttggaacatcatcttttgtttttttcctcaaagtgtgaggtgatgcctttgcatgttattaatgccgattgtatcatattatttggatgcaaagtaacaaccttacactcacatattcaggcgaaatacgttgcttgggtgcaggccggtgggcagcagcgaaggcaaagatgacagctgtgggatggagattgggttgcccatggacgtgcagcatgtggcgcacatcacgttcgataggttccatgggttccttgggcttccctgttgattccgagccgaaatgccccgcctgctcccagtgcgaggcatgcctcttcttcatcaaattgatatcgagctcatgcttccagaaatctgattttctttattcagaatttacttatgcaataacatgaactcttttctagctccaattttagttttagcttggatggtgtttgcaccttttccccttcttctaattcctaatatatgggcaacagttgcacagatagtaatattatattatgttttgttagaaagttgtaaaatgtaaatgatgtttgcttgacatgggggtggttaaaagttttaatttgatggcatggttgtttcagtactatagttttgattcatgtccttttgtttgtgttacaacctccatgttgtagcaaggttgttgtggagcatcgaccacctcgaccta

SEQ ID NO: 5083 - DNA, 1024 bp, Zea mays
  Intron number 2 from transcript AC233871.1_FGT004 (locus A C233871.1_FG004) derived from phytozome v7.0 (chr-ID 6; po s 1831034 to 1832057)
gtccgcacccgcgactgattccatttgctggtaaagtaccatagcttgcttagatgtcttgttcttagaattgtcttctccgggatctcatctttgaattgaacaatcaaatccacatctttcgttagttctctccgtcggttagcatcggatttgcttgtttcgtgagacgctactaatccaatccacccgttgatggttcggttaggctcttattcgtcagcttgcgagatcgatctcacttgaccccgtacaacttggtcccgaagcgcgggtgcagttcagtttccaactcgaaaaaaaattgggggatcaattgaataccatgtccaacgtttaagttttctcctggatggtgtgattttgataagagcaattgtttgttagcttttttatgctgatctatggatgaagactagtcaacaattgctttcactgctaatgcaaattgttggtgggggtgactgcaaaatgccgccatattagtttttacttagagctgcagaaagttttctccattggcaatagaataccttttaaatttggaagttggaaacgctggaatgcaggaaccatgtatgctttccatgacttctaaacttgctgtgtttaaatctaattttggtacatgctttatttattagcataaaacagcattgcaaatatggaacttcttgttcatttaaaataaaggttaggcccacatgtcatcgagcaatcaagggcatatccaggctgcgttgtgatggattagccattaatttgacgtgccacgtgttattctgcacttcttgtcattttacctggaattttggtcctggtaaagctaattttgtgtttccactggtcctttgtccttatagtatgactaagttgattaccccctcgccctccatatttttcacatttcatgtactgcggacttgtcttagggttatattttttctgtttcgatgatatgcatgcaagtctggtcgctaactgatggttaatacgattttgaacctgttcttctttttcacag

SEQ ID NO: 5084 - DNA, 713 bp, Zea mays
  Intron number 1 from transcript GRMZM2G102851_T02 (locus G RMZM2G102851) derived from phytozome v7.0 (chr-ID 7; pos 6 3300274 to 63300986)
aaagagggcgatcccaaggtgcaattataactactctttgtaagcggtttaggattgtgtgcgggaatctaggttgtgtgttggcacgcttcaatggttaaaatagaaaatcaatgtgtctggacacatttcgattgctagctatgtacatgtgcttagaaaattggctgtttgtgtttcaagcatggctgtttgtgtttcaagcatggctgtttgagttcaaatgtgtacttcataattgtttgagttctcatggttgtttcgagatgtttgttagctgagggggttcaagtttgcttatgtacgtgcatggattcacctgtttgattcaacatccatgttagtctgtacggttccgtttctcagaaaattgtgcctcatttcatgccaatgctagttgtcgtgctattgggcccatgttttcctctcggtgtatgtcataactcactggtgaggtcacttgttcagtgaaactgtttaatctggccgctttattatgctataaattcaaaacataatctatctgaaaacagcaacttaaacatttactttagaatggtggatggtatggttttccatcgtctttgtataggacaattgttatagcttaaatcaatagggtttcttcttttgctttgggaagaaatagttctatcagaattgttttccttgcatctgatgtctcaattttgaaatttcaggtccaccataac

SEQ ID NO: 5085 - DNA, 812 bp, Zea mays
  Intron number 1 from transcript GRMZM2G078895_T01 (locus G RMZM2G078895) derived from phytozome v7.0 (chr-ID 3; pos 4 5036831 to 45037642)
attcttgcaatcattgtgctcctcttcaggtcttcaccctctttcactccactgtttttttattgtatttgttggtactaccaattcaaattgcattatcacgtcctttctgttattgggtttgttaactcactaaagttgaaaaagggatttaattatagcaagatgtttttatctctatctaaattaatgaagcaaaaagtagcattgctgacccatgatcatcaggattacctatatcctccttgcctcttagaaggttcttagcctcaggatttcctctgttaggaccgatgagcactttgtgttaccttaaatgatacttggagcacatcgagacaaaaaggaacaaactcaagcagaacactataccgatgcatttgctgagtatgaactcataatcttgtttctttcagtctgcaagatcttcctcttgagacattttcttgccctgtcagtcatcattttgttatagcacacatgtacattaggagtcaaatgactgaaggaaccaacctagattctagagtatgacaggatcactagttattgtcatgtagtcacgttaaaatgagctgcagctttattagagcagcgctcattttttttaatatctgcgactaattcacacttttgttcaaccatggttcgtaagggcaagtattgttagctgccattcatgtccttcattttttttctaggtgttttattttaaatgtgatagttgtatcaagttcgaaaaagatgcttcttacagctattcttcttttcgattcatcagtttcgtttcttcctgcagcaccatcacagtg

SEQ ID NO: 5086 - DNA, 968 bp, Zea mays
  Intron number 4 from transcript GRMZM2G011932_T04 (locus G RMZM2G011932) derived from phytozome v7.0 (chr-ID 6; pos 1 65345090 to 165346057)
gtggagcttacccacacccccttgtgcccgtaatgatgcctatggacattttttgtttaattaagcacactatatatgtccaaacttggctgatcaagtgaccaagccattcaatgtaggaaatggaaagtaaaacttgattatagttggacaacatttctactcttttggtctgtagttcaccattgatgcacagcatgtagaatgttgtccataacctgtaattttgtagcctcatcagaacaaaggatctgcactgtgcatctagctctattttatattagctgcccgaggcttgccctaccagcagaagatgctgcgcacttattaatcatccattgccgctactccattcggatctgggacaagatatatgcctggcttgcggctgttttggagcctcgtggggtatgtgaaaattttatatcggtgacagagtggtggaatgaggttgtacactcaaaactcaaaagggtgtcctagaaaggcattttgttcgatcccaattctgtaacctgggaaatctcgaaggagcgaaatgcaagaatttcaatcggagacactctttggcaatctatcttgtgacaaagataaaggagcaggccacgacttggggcagtgcaggtgcaagacaccttaaggagatcctacagagcacttagctttttgctgtaaattcttgttagtctttccttcctctcgtatttatgcatgtttaacaatgtatacagttgttggcttaagcctcttcccctatttttaaataaatggcagatcctgcctgtctacgttcaaaaaatatatatttacacttcatcatgcccttggacgatctactaatctcctttagttccttctaaagttattatgttcatctttgtcttaatcactaagaataaatcattcgtttttgaagttttccattctaatcaatgttatcaatttgatgttctcatgctgctttcaag

SEQ ID NO: 5087 - DNA, 447 bp, Zea mays
  Intron number 3 from transcript GRMZM2G477539_T01 (locus G RMZM2G477539) derived from phytozome v7.0 (chr-ID 6; pos 1 25265710 to 125266156)
cggacgggtacttttaggatatccactgaacgcgataattatacttcttataatatttagtgttggatttcatttgaattaggagctgggtttcgaatttcggtccatttttagggaattgtaaaattgaactaacatttttttctttatgatcgaaacagacatgatagagcgaaggttgtagatattcttgtcaacgatcttaaagtcttttcgacattcaatgaggagttatataaggagacaacacaacttctcactcttgaaaatttttaggtttgttcatccttttccactctatggcatcatatcatcaagaagcatttaaaataaatatttcttacagcttcttactccctcgattttttaagtcattaaaaatgcatcatgtttggtgcaatgcaattaatgtatcttcactggtaatgaaaataggactaatagatc

SEQ ID NO: 5088 - DNA, 739 bp, Zea mays
  Intron number 1 from transcript GRMZM2G089461_T01 (locus G RMZM2G089461) derived from phytozome v7.0 (chr-ID 6; pos 1 54371642 to 154372380)
cctgagaagaagagcttttcaattgattatttcaggtgaattctcgccaaatcccgttcatctggtcactatctgcttgcgtcgtgtctagggtatgtattgtttgatattctccttctcgaacaattatgttctacgaatgttcgcgtcagctcagttttcttacttccgtagttcccttctcgggcagattcgattctgttctgagaggaaatagtttgtgtcttcgtcagtgcttaaacatcaattccacgagtatctgctgcctgtgctggtttagttggcatgtcgtgattccaaaagtaggaaagtgttatcgtcagtgtagttgaaataattagcagtgacgctgggcaatatatatgctcaaccaaaaaggggttcggtttcatcgctctaagctatacatgcttctcctccccggccagttatatattttattttgaacagactgttgggccagacaggttgttagaacatggtaggtgcactactgcatgtgactatatcatatttgcatatctggccattatttccccgctccattgaaaaataagcatgtcaagataaatatttctttccctgatcgtacaaatccacgacatgaagaatgatgttactactaatcattgtttttatatagggtcaggcgattctcttttcttggatacatatatagcaattgatgttttggatatttcgctgttgggatatgacaatttgctaattttctaggagg

SEQ ID NO: 5089 - DNA, 676 bp, Zea mays
  Intron number 3 from transcript GRMZM2G089461_T01 (locus G RMZM2G089461) derived from phytozome v7.0 (chr-ID 6; pos 1 54372698 to 154373373)
tgacagaattgtacgatcagcacttctattttatttgttcatcatattttgttttttttttctatccatttgtcttggttaccatgttgctcttgttgaataaaaatcaacagtcactattattatcaaaggtagtttttacggtcaaatgccaacttcatccgactccgtgagggattttttttcctgcatttacacataaatccaactgtaacatgaactgccttggttgacaattgtccaatcataaaaacatgaaacatcagtcctgtgagttgtatcagactaagtttacaaatcctagcaccattgctctctgccttcttttctaaggcatttgttttgcttgaaatattattggttttgtaaagtttgtttattttattacatcagcacgatatggaatataacaacccagtaactcattaaggccttgtttggttattttaattccatgtgaattggagtggattgggtgggattgagacgtattttgacttgttatggatttaaaacgactcaatcccacccaatccacatggtttagcatcaaaacaaacaagtcctaagtcgtttctgtaagttaatgaatggtttattcccatagctgttcctaataccatttttttatctctatacaggcagttatttaagaggaatctctcaggaactctgg

SEQ ID NO: 5090 - DNA, 638 bp, Zea mays
  Intron number 3 from transcript GRMZM2G129415_T01 (locus G RMZM2G129415) derived from phytozome v7.0 (chr-ID 3; pos 1 74448332 to 174448969)
tctttccaccttcacaaggtactgtccttttttctgtggatgtctataagccattaagtatgcatttactgttaatgagtcctacaattgaaactctttagagttttatttgtttaagtcagtagctacgaaaaactgtcaagatactggaaaactgttcaaagtgcatgagagacgaataaactttatgtaacatgcaaaagttatccatttagatcctataagaacaaataaacagttccttggtttgaatgaatctcttgtcatattctggattcctgtattttcctggtgtgtgcaagaaataaagcaaaaatggttcccttttgctgcttgttcctgtctagcaaatgttctctgtccatatcctgttgcaacaataaatagttccttgctttgaatgaaactttcatcatactttgtttgacttggtgtttcctatgtaaagcttcttctactggcatttatgaaagaatatgaaaatggttataaccttttatttctgttccaatgcttttgcttcactttcttgccttgtatgcctttaattaacctttttacatgttgattatttcctccataacagtgtctgtttcattgcagttccctttactttcaaaaagtgcctttcttgaacg

SEQ ID NO: 5091 - DNA, 998 bp, Zea mays
  Intron number 2 from transcript GRMZM2G139688_T01 (locus G RMZM2G139688) derived from phytozome v7.0 (chr-ID 3; pos 1 87003964 to 187004961 reverse strand)
gctggtcacgtaagtgccatgtccagtatttgattccctgttctgcacatcggtattttcgtatttcatctgcacatgccgaatacttgattccctgctctgtgtgttcgttgggtctttattacgtacgtgcagtctttaattcaagatgtgtatatctgtagttatatttagcgaactattctatttcgcgtcacgtactggaactgtaatgatttgtccatattgctaaatgttgatgttctgcagtaacttatctgatttcccacttgaattaagtaaataccgatcttttggttcaaaatttagggtgctcacgttcctgtagcaacctgctcaaatcctcctggctcctggtataaaagattctggtgcacaagtgctaattttctagtatcactcctgacctgatgtgtaataccaagccttgatcactttcaaatatctttttagctttgaccttcaactccatatgacttgtcattgttactcttttatggataaagacgtcgtaggtagtcatattcaaaggtaggaatacttcacctgagcagcaaaggtaggcagatagctattgcagactctgactctaatttctgtcactaaaatcacgttaacccttgataccaactttttcttgaaatttcacaatcatctggagggcactcaacaggagccattaatagagcaggtcattagatgcttcagaaaatcatggagctggagctgtaaacctttaaaagatatttagataagtcattttgtttattatttagattaaaaatatttttaaaactaattaaattgatattaaaaagtacagctccacactagagctggaacctggagctatcccaaacaccccttaatatgccttacctgtgtgtatatgttcctagggacttcctatttttaccctgaacaatttgtacatatatttttctatactggcgtcattaaccttgaacactcttctcagttgccagggcgtactgaca

SEQ ID NO: 5092 - DNA, 797 bp, Zea mays
  Intron number 1 from transcript GRMZM5G886775_T01 (locus G RMZM5G886775) derived from phytozome v7.0 (chr-ID 6; pos 1 67559369 to 167560165 reverse strand)
gtcctcacagccatcgtcgaccatactttcgcaaggtaaagcttatcgtacatgtttagtcgagctatgtacgttagtttgtgctaaattaggaatgaaactaatgctttgttttctctgcttgtttatttccattctgttctacctgtatatgacgagtcacctaaggcagaaacgacacagactgcagagtctgccagatatacacaaactggcactgtgctcaactgaaaataggcagctttataaaaaaatacaaaaaaattcatgaaactacgctgattgaaactaacctggtcaaactgagtaatgatttatgcatatggaaaaaggactaaacttatacactgctcagatgctgcacaaactacaccgcgaactcagcagaacatatgctaaaaagaggttactatgcatcatttgtcaagaacaccacatgctgcgcacatactgcgcacagaactggtgtctatctcggaaaattacttgaagcaaccactgcattatagctcgggtagattttcagaatatgttccacccatattaaagactcgacagtattacactgggacaagccatgctagcgtttaggccatagtattacagtttagagtcattttttccatctacagaacaagcattccccccttctgactgagtatgtttctttttgagtgtaggtcttttcactgcgccctctccccatcaactgcaactcttctggctctaacctatttttttgtctgtctgctaactccgcagcaggacaaggatcaggtgtcgcacaaaacaagggg

SEQ ID NO: 5093 - DNA, 906 bp, Zea mays
  Intron number 5 from transcript GRMZM2G069147_T01 (locus G RMZM2G069147) derived from phytozome v7.0 (chr-ID 7; pos 1 6698402 to 16699307)
ctccaacattggaaaggtttgcactacagcttggtttctgatggagttgtaccagatttttttgttcaaactagcagttgacgcattgttggaactttagcagtctataaaggatttttttcttaaagtaagttcacagttacctagggtacattgtggttgttgttgcatgagtaatcctacatatcatttcatatatggattaaccggatggtctcactcttgaaactgtgggagtgttggtgcaattcttatattagtttcacttaacttaatagtgccatgtgtggggacctattaatcttgaacatttactcgctagattatatgacatttaaaccatgtactcgtgaataaccagcaagggacaccttgaaccacatagaatatcatttacccttgctacccaaatgcttacatggctacatgcttcttggattgtattctatcttctctgatatcagtatgatcatcaaagcacctaaaatgtgctgctgtatgtatatagccagtgtaatgttgtttcttaggatgcattgcactaataaaacagcaatttcatcaatgatatgctctcctagtctgtagttataggaatagctcttgaacttcccttgtgatagagcagtgctctatttgaagacactgctatatatggaatattctttttgctgaatatcccctgaaatctgcttcagttatatgtgtatattatttgattcaccagaatttttcttcacgcatttctggttgtgttacaaatattcatgcagtatggattacaatcgtttaccatgttaagtagttatgattgcatcatatatgatcttctgaggatcagaattaacccttctatttttcttttatacagtgccgttggaccacatacgattgttgattgttgat

SEQ ID NO: 5094 - DNA, 603 bp, Zea mays
  Intron number 6 from transcript GRMZM2G342386_T01 (locus G RMZM2G342386) derived from phytozome v7.0 (chr-ID 7; pos 1 74447770 to 174448372 reverse strand)
tggtatgtcaataccgttcttccctatatttgactaagtattatggtttgagaggggggggggggggtaatttctaatcatcttcgtgtaaccagctcaaatatcatggtagcatcatattaacccagaacactgtaggatggaattttaaatagtgcgccagtcaatgattcagtacgctgtatgaaagcctttaagaatttgggatctttacatttataaattagagatcaatcacatatgaataatagcaaaaagatataacactatctaattgaccattgtatattatctggtttttaaactatgtttgaatcctctgcatctcatgctcttttttgttttcagcgtgtccttttgatgtttttacatcattttcttttaaaaaaactacaaccatgcaattttgctcatgttgcaaaacctatttccatttgggatattaagtttggaccagagatcaaccttctttatccctgtgcgacaagtgtctactttaacaaatactttgatatgaagcttttaattttaactaatttattccacttccaatcttaaatttgtacctaccatctttttcatgcattcaggtgcctgtagttg

SEQ ID NO: 5095 - DNA, 601 bp, Zea mays
  Intron number 2 from transcript AC188753.3_FGT003 (locus A C188753.3_FG003) derived from phytozome v7.0 (chr-ID 3; po s 159541850 to 159542450 reverse strand)
aatcaggtcatatcactccgtgaggagacctctgggaggacacacgtagaatatgccattttcaatataccatttctagctgttacatttgtattccttttttaacatcactagggaagggattctcgcctggataaggtgcaaggtcagagttcacgatctcacggaacaccttctcgtcgatctgcaggcttgttttgtacttttttaatgttttgtttctagtttcaggaatacggttcatctcatctatacatatgttggttagagcaggcacacccaacgaaagttacaagaacagtaataccaatcttctattttttctctaatatggcgtaccatctttctcatactgcataattcatgcattagaatattctgaaaatagaggtaatttgtacctttttgtgccatggttatttagtagttgatttatgaattgcttccactttatttgtacaacaaagcaaattagtagctgatatatgaattgcttccattttattcggtgccaaattggttcactgtcgtttcttgtttacatctattttatgttgtttttaaagcaagtttgtattatctcggtctccatctcgctaca

SEQ ID NO: 5096 - DNA, 956 bp, Zea mays
  Intron number 3 from transcript GRMZM2G117410_T01 (locus G RMZM2G117410) derived from phytozome v7.0 (chr-ID 6; pos 1 55459697 to 155460652 reverse strand)
cagaaaacccctgtgccgatactagtgagaatccattactcccatgcctcttcaggaacaatggtttatggatatgcatgattttagtgcgcatgctccttcgagagagagaaaacatcgtagccaaattgtttcatacttccactgccttttgagttttgacacatgattaactgcattgccagctttatcaatagccttaatctgttattagattttaaagtgagcatgatagtttccttgtgcaatagcgctaatggatattattcatgttaatggaagaatgggagtgtttacatttctagtccatggcctaatgctgagcacatccctgattttctgctctggtctccttggcttccatgcctttgttggcagtctagttcagtatctgatatgtttttctaattgggggcatcactctctgcaccccaaagattgggataattgaagggtcgcagctcccactgggatttgagtcctatatgaaccttttcctatgtatccctttcaaacaaaggattggacatcctaaattcctacaaaatacaaaattcatatgccatggctcagtccatagaaattgtggagaaaattaatgggaacaacctcttggaaacttcggtttctatctctttctctctccttaaattctcatgtcgtgtccaagtgttttgttggaatgtttcttgaattataaattcatgtaggaattaggattgaagttaccaaaccaaccttaattcatgtgttatggattccaaagaggtcctcattcaaaattccatctcagttcttatacaattttgcttgtggttgtggcattcctatttaaggatctatgttgaacatcttcatgatgcattattttctacaagagaaactaagagtgagggtaatgattcctaaatctcctcaaaccatttgatgagatggcataccattttcaggggagc

SEQ ID NO: 5097 - DNA, 932 bp, Zea mays
  Intron number 1 from transcript GRMZM2G139691_T02 (locus G RMZM2G139691) derived from phytozome v7.0 (chr-ID 3; pos 1 87021513 to 187022444)
ggagccccgtgcaccgcctcatcgagcaggtgggcgtgcggtgagatcgaattgcagttttcttccatcttgcttgcacctttgtttagctgcgatgctatgagacgcgtacttcgcaatttggttgtatatacagtggcggagctagtatcttttaaaagccccggcgattctcattatgcacaaaacttatttttacatcacagaaaacatatattttatctaaaaaatataaaatctatactgtttgacgcaaacaaaaaatccatttacgcttagccgatgggcccaggtggtccggcactggctgtatactgcggtgaatcgtgacaacagtaggtgctctacctgtaatgttgaaaaaattcagcacattgattcacgcggattgttttcggttggaactgggatacttgtacaatcctagtctcctttctgatgtatctgctctctgatgctttggaatttgggaggcttggagatgttgctgaactgggaccagcgaagctactgctttcagaaatatggcattttgactagtgagatttgattttttgatatggaaagtttctgctgtgaggtgaatgtgaattagattagagtacaatggagtatattttgtattcttaaaccagtttcagaattcctttttcaggccacaaatgaatctttgcattgttttggttggcgaggcaaagttcataccagaatcaatgcattttgatttcaaaattccacgctttctggattaaaaaatgatacatctcttacatgctactgtttaaggcatattgtgttacagctaatgatcatgtgtgtaatcatgtaattaaatatcacatgctttttaagatattgaactttattcatctgtccacacaatgaaattgctttttgtgttcacattttcagcattctattgactactggct

SEQ ID NO: 5098 - DNA, 896 bp, Zea mays
  Intron number 1 from transcript GRMZM2G398137_T01 (locus G RMZM2G398137) derived from phytozome v7.0 (chr-ID 6; pos 1 908510 to 1909405)
catcagttacgtaatttggttttcttcttggtttatgtatccttaacttttcttcttatattgtgtctctaaatctattttagattttagaaatgaatgtacgcatatcttaatgagtgaagtggtactatcatggcttgttgtaattataacgatgattttagttgaacctctacactttggataaacattagatctttaggctaactgtgattgcagtcagaggtttaaaatggatcaatagtatatttgtgtaaacaaaaaaaaggatactgttcttggggttatttcattagacactaaaccaaaaccattttgtcttgtgaattgtacttctgtagggggcacgttcatggacattagagttaactgatgtctagtctggtatcaaggaagagatgtttttaattgtgtttacgctaatcaagttaatgaatttggtacatgtaataacatctaagcctttgtaagtttgaatattcatgtgtgacttaatcagctacttatagcttttattaggctgtatattgctcagtcctgtaagtttggtgttacacattgcacatttgctttaaaccaatggcttttctattaataagaaaaactaggaaaaagtagttgtgattctgataattttgaacggccatacttgggataaagtttgaatgttttctcttttcttaccaaagttctaacatagcattttcacatttcttccatggtatacagtttgctacaggaatccacaaactgagtcttttcttatgcttctggaactcccatcctcgtaggcgtccacattcgaggatggtgcacgattctaatgccttgtctgttctaatgccttgtctgttctgaatcttctgatgccttgcctgttaggagtgctttgtcta

SEQ ID NO: 5099 - DNA, 962 bp, Zea mays
  Intron number 2 from transcript GRMZM2G542497_T01 (locus G RMZM2G542497) derived from phytozome v7.0 (chr-ID 7; pos 6 599548 to 6600509 reverse strand)
ttaaagaagcaggttagtgaaaaaatgtgcatcattttgtttctgttatttgtttgttatgattagcaagcttatctgttgtgaatttgtgatgagtctccgtggctcatattatatatatttgtagaatatgctagtacttttattgctttcagtgctttcgttttggctcacacagaacaaattttctcttatctgttgtgaatttgtgatgagtctccgtggctcatattatatatatttgtagaatatgctagtacttttattgctttcagtgctttcgttttggctcacacagaacaaattttcattgctcagacagacctcaaaaaaaaagacaaaatcacatagaaaatgcactatgttaactgaatttgtgagtgttatttggagacctgtctttgaaacaatattatcttcagtttgtgctatcaaagtgaaggtaggcctcacatattaatgtttgttttggatttaaattgtcatgtcatgggccagacatggtcatgtctatcgctagtcggagggacaagtcttgaatatttgttgttcacttgcttgagtgttgggggatgtgtttttcctggatttggacattaatgatgaaaatagaactacatgttcctgtataacttaagaaattaaaccacacaggttatggattgacatcttccttatattaatcttgctatacttataatttttgtgctgactagctcttgttcactagataattgtatttttatatgtttattttttgctgacttattgcatttttgcacctattgagtttgtatcaatgatcttgtttctatcaagatcctgcatcaaacaagtaacacagttaatttgatataggggtttccaggtttctatatatgttgccaatttccattgtctcacctttctgatttttcttgactttagggaaacggacttcataaccagggaaagtattcaga

SEQ ID NO: 5100 - DNA, 684 bp, Zea mays
  Intron number 1 from transcript GRMZM2G054645_T01 (locus G RMZM2G054645) derived from phytozome v7.0 (chr-ID 3; pos 1 14963014 to 114963697 reverse strand)
ccctcacaagagaaaaaaggtctctcactgccttttgttataattttattcctatgtttgtcaacacataggtggtagtttttagtaattggtcaatattggtaattattcttttgattactcttgatttttcttataccatcatgcgccttagagtttgaatttcttgttggcatttgttgtgggtgtcttgaattttaattcatcaccacatatcagtataatctgaatatcttctattcttattttttaatcgttgttaacaccttgaattgtctggactagcatattcattcgcagtctctgctgtgaattagtcattcagacccttctaggagcaatgaacatcatgattgtagcatgattgctagggtgggcttaattgatactctggatcttcaatgaaaccatctatttgcttgctcccaaatatggaagtagatgtgccatgcaaaatgagtactatatgtgtccctatccttcttcatgctatgcctttcagtacataacattatacattgatacctcagttatttttctatacatgttttcacttttcttcttatgaccatatatttgatctctgagaattttttccatatctgatactacatattttcgtttatatcgcagtgcaatatatttacatttctggtgtgttgattttacttgtttgctcatagg

SEQ ID NO: 5101 - DNA, 849 bp, Zea mays
  Intron number 1 from transcript GRMZM2G066290_T01 (locus G RMZM2G066290) derived from phytozome v7.0 (chr-ID 7; pos 1 0513790 to 10514638)
gggacctcggcggcgcatcctcggtcaaggcggaggtgagctgctctcttcaattcttcatcatcggtctgtgttgggcttgccgatgcagtttttatttttccagaccagagtgaacgcgcctcaccgtagaagtcttcaacgtattccgtggaacagtttcgaaggaaactgtgcaatgtggatgagggagaaaggagagagggtcaagggtgttcgcccgttagtcaatttcttcgctgtagtaattcataatacttgcaccaaacctagcaatcccaaattcaaccattatagaagggaaaagaatgcacatcttttatgaaacattcaatactgaaaccggcagaatatttcagggcttccaaaagtaactgaaacaaaacgccatagtaaaaggcaccatgtattatctttctttgcatttcaattttcagctgggcgccaagattttgttaaaagtgacagacagtgaggttctcgaaaatatcagttttctatatcataggctaacgcctaagcctcgaccctcatgtaggttcttgtacgtagctaatgttgatgtccgcaactccgcatagaaatgttactggatggttgcatctggtgatagttatgttttacataatacattctatcaatattcaaagaaactaaactgcttctatagttgtcagctgatataagtgattgggtcactgcccatagagttaaaagtttgactttgtgcttgtgcaaaattccttgttttcttcagctacattatttgcctaatggttaccattttctttgtatcgaaatgttcatgaagtaactatcaaatcctgtcacattattggatcccacagg

SEQ ID NO: 5102 - DNA, 621 bp, Zea mays; identical to SEQ ID NO: 4652
  Intron number 2 from transcript GRMZM2G054120_T01 (locus G RMZM2G054120) derived from phytozome v7.0 (chr-ID 6; pos 1 02291222 to 102291842 reverse strand)

SEQ ID NO: 5103 - DNA, 956 bp, Zea mays
  Intron number 3 from transcript GRMZM2G059393_T02 (locus G RMZM2G059393) derived from phytozome v7.0 (chr-ID 3; pos 1 40559343 to 140560298)
caccagattgcgttgtctcatcatccttggctccggtgagtctattgcgatgttgcctgtcaaataccttatggacaagttttaggtacagttgcctggtatataaaacagtactcaaaggtgtaagtgcatgcatttgtatggagatgtggcaatactgaataattgttagtaactgcaagttcatatgtgagttgattttcttctatggtaatgaaagtacaactcttggtgtccgtatatgggaattgccttttcactgacttgatcatggtagactgtcataaagagatcatgggacaaaatcttgtttcatccagaaacattatttctcccagtcaagtgtagctttcgtgctgccgcagttctgctttccagaagtcggtctccttgtgcaactctgataaccctgaactgagtcaggagttcccttttgtggtctctgctatccatttttcatctgcagcttctattctaaggagagcacatttttttaataatatttttgcattttggttgacttccttcagtttattctgttcatgtgcaagtgctatcttagttgccgatttgctagtggtgcagtatattgttttagttgcatattcattcttgccctatttagcatgtattggctgtttaatagcagtattaaaactgtcaggatcttaccattttactgtttataattacaaaacacacttgtatctctgaataataagtatatttatgcttttctttttcccattgggaaatcctattcttttttaacacatctgatcactatcaaatagcacatcacttgcattattactattttctggactcgtgtgcacactcttgcaagaacatttggtagtttctttgagttatcaagtacctaggttgtaagatatgtagcttgatgaaacatgtattgttttgtattttggttgttaggagggcataccgcagaa

SEQ ID NO: 5104 - DNA, 955 bp, Zea mays
  Intron number 2 from transcript AC207628.4_FGT003 (locus A C207628.4_FG003) derived from phytozome v7.0 (chr-ID 3; po s 202906624 to 202907578 reverse strand)
tcaggagaagctggaagctgcaacccaaccacagtgtacgtatcttcattctcagtcagacaatccagagtttgtactaactggtaaccgtttatctaatgtgtttttgtcattgttcttctagaaacccacatattaaacaatccagagcctctaataaccgtttgcatgtgtcttcatcctctacatgcacacatttgtgctttgaattgctcttttcatgtcctttgctgcggtctggtcatattcctaattctgcttagaagttcttgacactttatgggtattttgtatcatatttcaaatggtgcatttgcaggctgtgtggatgtaatattattgacaaactattgccagaaaatttgtcagataagctatggctctgatggcaaagttctgatgtaatatgcttttagttacagctgatggtacatttgaggatactgaagtagtgaagtctaatcttaccttctgaattatctacctgtgctgactttctaacttagtgtttttcatccttttacattaagaacaaatgaacaatagttttggggtgaatagagaaaccctgattaataaatgaactgcagtattacaatagtacatatagtctacgcctaatgggctgggctctaggcccataacacacacaagcagcaaatagttccttctgttcaactcggtttacatattgaaaaattaatttgttggttttcacatatttgtgatttacttgtaattggtctacataaatgctttttgtaaaatgcttagtagtaattttggaaagcaaccgatttgaagcagaaagagttgatgatgtatcttcacaatattctgataatatcgagtattcttgtatccatcctcctttggctctgttttttcttttgtactgttgtttcttactccatgtttggtattgcagctatttttgactgcttcaacgggggcg

SEQ ID NO: 5105 - DNA, 918 bp, Zea mays
  Intron number 2 from transcript GRMZM2G011662_T03 (locus G RMZM2G011662) derived from phytozome v7.0 (chr-ID 6; pos 1 65350101 to 165351018)
accgcggcgaggagctcctcttcaccagcagcaaagtgaatccccctcccctctttttcttatttcccacactactcctaccgtcgtccagtaatctgtaatgcttacaggttttcagattttccttcctttttgcttcagtgttcttctagcatttctgtatgtgttcctgaaaccggcacctgtgaaaaggcgtctgttcaaccggggctgcaaagaacaacactgtgaatcgtattcatgtataattgccgttgtttctgtagtccatcctgacggctggagaagcgaatgacaaattaagctttgctatgtgcctacgttacctgtgagctgggactattttgtggtcctaaaatttcagtagccagttgttcattctttgttacggtttttatatatcatatagatatgtattaagatatttatttaaatataattattgtttattaaataataataaggtacatgtggtttggtggttagctccaaatttatagagtagggggtgaggtttgattgctcgctctgcactattttatggcgctagagtccataatttatagagtaggtggtggggtttgattgttcgcttatactattttttggcgctggggtccacagggcagtagctgagagagcgctgtgcgggcactgaacgtgggtccacagggcacggtgctgagacggggtgcatggggtgggtttagagtgtcagtatagagggtaaaaccgtaatagtaccaagcattaggttcttaataaaataatatagatatagataatggtttccctcggcttcatgtgctgacacctcctttttctcgtcttccttaatagggccagtagtgggactgtgtagccttactaaagcactttcatgtctgttgtttttgacgtgcaggcaaccttcaagcc

SEQ ID NO: 5106 - DNA, 981 bp, Zea mays
  Intron number 5 from transcript GRMZM2G008645_T01 (locus G RMZM2G008645) derived from phytozome v7.0 (chr-ID 3; pos 2 04292245 to 204293225 reverse strand)
ctactgtttctagagacgctgtggtaagttgtcatatcgtcctttgtttatagttaggatcgagctctattactattcatttttgaactaaaattaattaagggccctaactcattgtgaagaaacatttggatcgtgatccattaccacccctatttatagtggaaaagtgtgcaagatgagacaactcttcatgttgtagacttagtgtaataaagctattacattgcacaatgtacatagtgttctgggaatagcacaacgtagacaaactgttctgtgatgcgagcaatcaaactttttagtaatgtctgtgttcaaatatctatttgtgacataaaattgatactgtagatttatcagggaccacatcttcatggtattattagacatgggttttataaactttattataatagaaattagtggtcaaagtggcattgtggagacagttgacttcgtgatgatgttcttttgtgagcactgagcagatggcatgtcacgtcaaaaatagtgtggagaccactacaaaggctttatgtgttggtagctggcgtctttgggataatgggttggggaatttggaagcaacattcttatacacattactagatccttgtcagttgtggttctgaaagtttgccagaaattttggacattatcttgaacaagaatttggagattagtcaataccttagagagctctatatgacctcactatgtacaaactactcaattgctttcttgatcaacaaatgctggtttcgatgaatcctcactattgagttttgacctggcaatagtagcatacctcattgattttgtattttcttggttatactgtttttccttgattaatttattgcctccaccatgaaaataaacagcagaaatgatgcacattcttggggcttaatatagttgctggcttgctgcgtcttttcagatatctggaccaaatttcttgggaaggtcaagtgg

SEQ ID NO: 5107 - DNA, 774 bp, Zea mays
  Intron number 5 from transcript GRMZM2G064374_T01 (locus G RMZM2G064374) derived from phytozome v7.0 (chr-ID 6; pos 9 9685392 to 99686165)
gctaacagaagcacgcaggtactgtggtgttgaataattcatttattatccattgtacatgacttttcctttgaattgttgtcaattgttgtccattagaaaatatatactatagtcgatgataacatatgcgcaaaggttttatcgaataatttttgtgttctcgcaacttacgtgcattgtattatactaatataaagtaggagtttctccaccttcctttcatcatgctacttcttgctgagggtggcgtgaaaaagtcagcaacaagttcctctatggtggcgacagagaagacaagggaggctctggcgacattgtggcgacgacgagaagcgagcaaggatataaatcgatctgtttctttggaaattagctgtagtagaatatttacgtgatacaaatctctattctctatatctctatatctattacgtttctcatgtctctatttttattataatggtttggaaaaatgtcgctcatcttctgctctaatctttcgaaattaggtgtagtggaatattattgccagatattgctacactacaatagtgaaattattgtccaaaattgaagattgccgtatgccttaggtcactataaaatcgagttattttataataatagttttttgttttacataagccccactcttttatctaaaagcccataaattattgtccaaaatggaagattaagagtttgtttattacttctaaattatcctttctatatctaccatatgtaccatcagcgacaagattaccccac

SEQ ID NO: 5108 - DNA, 685 bp, Zea mays
  Intron number 2 from transcript GRMZM2G349651_T01 (locus G RMZM2G349651) derived from phytozome v7.0 (chr-ID 3; pos 1 81826480 to 181827164 reverse strand)
ggcagggccgcaccctctacggatttggcggctgaggggtcaggggtgtcccccagctgctgctggtcgttgcagaagtcttgggtcgcggtcacgaaatggagtgaggcgagagtattcttgcccatgtgcttagtttcgtaggcttatcactctagactctagtgccttggtccagtagtagcatacgacttgtactgcatttccttgttctgaacctctaaatatgatgagatgtggattcacttgatctcacaaacaaccagttaattcggatcaaatttgtactgactttctcgatcatcccagtttttcatctaaaagagcatttgtcaattgtgcagtgtcatcttggtgaacaagctgcttccaatctgtgaacaatgtctagtagtaagcaaccagtgccgttttggtaacttttgtgtagacgtggtaatggatcaagatccaaatgtttcttcataatttgtttgcgcccctaattaatttgagttttaaaataaatagaaatagaacccggttttaatttgatgtcatcttaaattttatagtgtaaaaatttagagctcattatcacccctacttctgtgttctgtaggtgttttcttctgccagatatgctgttttgtattgatgtgatctgacaatgatttctctggttgtttttcctaatcaacagagc

SEQ ID NO: 5109 - DNA, 662 bp, Zea mays
  Intron number 2 from transcript GRMZM2G064001_T03 (locus G RMZM2G064001) derived from phytozome v7.0 (chr-ID 6; pos 1 23767156 to 123767817)
aggtgctttctatatccttttgcctgttctattttgatttcctagacaacgaatgcattttcttgggttgtgttcggttagtttcaagaaatctgtcctgctctaggcgcaataaatgtgtcaaattaactgcggtagtgtgtcgaattatctcgcgacttctgaagtacaatttgcgcttctattttgaaaatcagtaccgttgtattgttcttcggtagaaagatggtactagctagctatgattagtttgaagcgccttctgattagatcatttctttcgttccagtacattagttagcaaactaaaagcgccttctgagagttggttccttcgaggtgaattcttttcagtagatatgactcacatttggtatgtaaatttgtgctggagcagttatgctgtgactgtgtaaccggttagctgctggagggctcagagttgacagttagtattttttccctgggctccttgtttgttgttttccatgggtatttctccataacttgattggtaatgttctgtaaaattggaaccaccaaaagccatgtctaatattggcccatgtttttttgtgagtagggattttgttatcatttttaaagttgcatgttaatgaatattctttttccccatgtataataggcgattggagcggaat

SEQ ID NO: 5110 - DNA, 853 bp, Zea mays
  Intron number 3 from transcript GRMZM2G055216_T02 (locus G RMZM2G055216) derived from phytozome v7.0 (chr-ID 7; pos 1 60559546 to 160560398 reverse strand)
gcgtggcagtgttctgcacgtcgcttcaacagattgtgagctcttctccttttttcaccagtcttcttgctatagcccctttttttggtattgtgtattccattatgatgatatggagaattctagttttgacagccataatgctattctgcaatttgcaacgagatttggttatgtgactctgaatttgagctgtcagccttatgtaaaccgatttggtcaataatgatgaaatattttgaaattgattagaggttgttcatcctattagatgccttcccttgtgctcctaagttgtgaaaaggggaggcaaaacatgccgttttgggtctgagattcccctcataagttgttctgttgaagatgcccatcactgcttagttttgttgcaaaaaccacccgctatgcacacattcagccgattatgccattgtagtgccatgacaggccaagctagccgagtgaagtttgttcaagtgcttggattagctttattatcatgttgcagtcctcttttttcccgcaaatagcaagcctcagtttgtcaacatttaagctctcatcaggattgttttggtcgaatccctgaaaagtgccgggattatactttagtgattacattgacagttcgtaattgataaaagcaggttgaataggttaagcatacctgggatagaaccaagtaggggagtgggtatgatgcaacaaaatggcttatgggaggaactcaaaatccagatgatatgggttggtttttgcaattttccccttcaaacaattgagctgttttgggcatcacttaattgatttatctgtagcttgtagcctaactggttataactactcagcaagg

SEQ ID NO: 5111 - DNA, 656 bp, Zea mays
  Intron number 1 from transcript GRMZM2G138074_T01 (locus G RMZM2G138074) derived from phytozome v7.0 (chr-ID 3; pos 1 87711473 to 187712128)
ggtcgagtccgtctacaaagccgtcaccgcgcctggtacggtaaaatcactcccactattgccttcctccgttgctggtgattaatttccaggtggattgaaagacaactgtttgctttttagatggattattactacccgattcgtggaaactgattttttttcgaaatctagttcatttcttagaaaataggaatcttactctgtaccttactgtataactcattattaattagagtggaaacttgttctttttttcctccttactgtacaactcattattactgcaactcctttctttgtcacttgcatattatttctattttttcaaaaaaattagtttatttttatttaagaaaatgggaatatcttaaaaaatgaagttaccaaactagctctaactgttctgcctacccagttcttctccaagtgtagctatattttgatttctgagacagagttaggttatatgtattatcttggtgggaaaaacacgcaatatattgtgcttaacagataggagaactacgttatcgatttcattgaatcattgagctgtttgttctcaatgaaatccttgcactcagagagcacacccttattttccctgcttacacgcaggcagtgcagggaagccgttggttgtaaagaaccac

SEQ ID NO: 5112 - DNA, 742 bp, Zea mays
  Intron number 3 from transcript GRMZM2G094614_T02 (locus G RMZM2G094614) derived from phytozome v7.0 (chr-ID 6; pos 1 31482191 to 131482932 reverse strand)
tattgttaaggctgaggaagctgaattgattgcaagtaagtgtgtattatatagcaagtacttgaattcattatgtattgctggcttgctgtgacttgacgaaggaaaacaaactataacagttcttcctagaatttcttagatttcttgcctttcaactgttgctattcgtgataatgacacttatttgtcattccaatatgcattcccttggtttataattaaagccaaaaaatttaaaagagaaaaacatagaaggctacttttactttctacacacgtgagggataagcacatacttaatttccgttcttatacactaattttattttgatttgtttggtgctgaaatttgctaccatgaaactctacttgtatgatgaagcatgcatgagtactttattgtttaactaaggccatctccagcagatccccctatcacatcccctatttcaaacttcactctgcaaacaatgtcatctacaattccgcgtccccaattttaccctatccactggagacagtctaaatggatctgtttcaggaatattgcttcgtggacagatcactgtgttcacacatttattgcagaatttaacatggtttattcattgtaattggttgattggtttcatgtgggtgattcctctcacaataggttctgctattaggttgtgcacgtcagtcatgtttcgtgtattattttaatcgctgaatgggtcatactggtactgcaggtaaa

SEQ ID NO: 5113 - DNA, 303 bp, Zea mays
  Intron number 3 from transcript GRMZM2G439201_T02 (locus G RMZM2G439201) derived from phytozome v7.0 (chr-ID 7; pos 1 71632870 to 171633172)
aggtttgttctccccatcccaagccatactgccacatctcttttttatttgtttacattaatctgtcttattggtcaaacaatgggccagtgctgttctgtttgatttagcatggtacaatttttcattgattggtcaaacaatggggaagaaattccagttgatctatgcttattttttattccattaaatatcaacctatttgtcgttgtgtgattaattgcatgccaagtatgctttatatcaatgcttcttttttgttgtcactgtcttctgcttttaattctcgacaggctgaggacg

SEQ ID NO: 5114 - DNA, 735 bp, Zea mays
  Intron number 1 from transcript GRMZM2G456568_T02 (locus G RMZM2G456568) derived from phytozome v7.0 (chr-ID 6; pos 1 47924617 to 147925351 reverse strand)
ccccatcgacctgctggcttcccttcgtcttccccgtaagcccctatgttcatccctactcttcatattctgcggcgatctgttcgattttaggactttgtgttcggattaggttgggattggtgtcgatctgattgtggatccgattggtttgggttgaggattggggcattaattcatcgtttatgcgattagagatggttgattgtggatccgattggtttcatcctcgatcgggtgttgttgcttggggttgcgaattagggtttttggttggttgtgtagcgttgacctagggtagacttatcttgcttgatgtcgatttggggatgaattagagatttgattgatcgcgacttccgtgcttcactagaatttagttgatttcctcccggataacatgacaaatgtgaatatgcctgtaaaagtttgattagatggtgaactagacacatctatctgcttgtgacaactgtccgctcgtcgacacttgtgtgggtagtttagaatcagctgtctactggcatgccttttttggtcgaatttgaatatgcctattagtgcaccctataggttttatggagggggttaatcatgtcatatcatcttagcgatgatacaagataattcttttaagtatcatgctagcttacttcgaatattccatatatgattcatctgtatgttcactatcctgttttttcttttcatgcaggacactgatcctcaccactc

SEQ ID NO: 5115 - DNA, 652 bp, Zea mays
  Intron number 1 from transcript GRMZM2G030235_T05 (locus G RMZM2G030235) derived from phytozome v7.0 (chr-ID 6; pos 1 24971999 to 124972650)
tcctccaaagcagaacagcgtattttggagcacaggttttgcttctgaagttgttttttcttggttcctgtatagaataattttgtcatggcacttacagaatctcatgtgaacaaaatatatttcatccttggatgtttgctttgattttattctttggttgaaactcttctctattgttgtatattacttgctcacaatttatttttatcatcaatgactcggttcaaaatcagttaaacttttttgtgtgtgcttaagcaacatgatgaaaaaactaatacattgtgattactctgacattgtggattactgaatttgtaatgtgccagatgctcgcaccttagtctcagaactagcacattttatttctggtttcctgtggtatctggacttttcgacacttcgtacttgcaacgaacaacttgtatttgtatatatgttactttgctgattgtacataatctcttccgtcctcacaatttttatctgctgctaactttctaaggaagtgtccttgtgtagtacaattttcttttgctgtaatatttataaacccatttattctttgaaaatctgagatatccaaatcatggtactgacaacttgatgtgatttttcatttgatcttttaccaggcgccagaaagaag

SEQ ID NO: 5116 - DNA, 588 bp, Zea mays
  Intron number 1 from transcript GRMZM2G122628_T01 (locus G RMZM2G122628) derived from phytozome v7.0 (chr-ID 6; pos 3 0130148 to 30130735 reverse strand)
agactgcactcccaaagctggtaagccttgttttagctattttgttaattttctttaaaattttgagtcacttatagcaacattcgctactttagctatcttgtcctgatttgttctttaattaccctataaaaaactcttgttatggtacatgatgttgagttagttcacttaatagtatcagagtagtcattcgtcaagcatacacgatttgccatgattcttaatccaaccatttcatcccatggttgagtgttcactcatgcttttgataggttgcgggatcgtcttgtgaaaattgtgacggattaccggacagaaacttcattgtgaaatggatgcaacgatatacttaaggtttactttctttcgtatactgtgctgctccatgcctcaaccatctcgaattttggacattttcatccgaaacttgctttcttcttcttgttttatatctgcatatataaaatattgtagcatgttaacaatgttaactttacactaatcaaatttctattcttactgatcatttaacttcctctgggcttaacaggctcagggttctttggatcgtcgaggcgttttttc

SEQ ID NO: 5117 - DNA, 497 bp, Zea mays
  Intron number 1 from transcript GRMZM2G070659_T05 (locus G RMZM2G070659) derived from phytozome v7.0 (chr-ID 6; pos 1 67574833 to 167575329)
agataccttccctgcctcacaaacaacgccaccctgtactagataccatcagggtcttcaaccagggcaggttctcttctcttcctgcaatcttcattctgctctgaccgagcatacgctatttgattgtctttgctctctctctctctctgtctgtggtgtgtatgcaacagtaactgttcttccaagtcctgtcatgtttgcaaatgcttcaaaattatcttgcttagttactttacaataagattttggttcctgaattgaaaatactgccgcatggagatggaattattaggtgctaagtattcagcatctgtgaaagaatttacttgatggaggtgcttagatgtttctttagctgttatcgttttatttttcttagtaattctggtcatcatacaacctttgttttttacttgttgtttagttgctagtactgccagctattaatctcagttgcagtgcttattcacactattaattatcggtagtagtaa

SEQ ID NO: 5118 - DNA, 856 bp, Zea mays
  Intron number 1 from transcript GRMZM2G381404_T01 (locus G RMZM2G381404) derived from phytozome v7.0 (chr-ID 7; pos 1 73252545 to 173253400 reverse strand)
acgagcaacgtacgagggaaaggggaaacaaagaggtgagtgtgagtcctccgcccccggcctgctgtgctcctgttcccattcttggaattgcttttctctctttgctctgcttgtttcttggtactgctcctacgctacttcggattatagatagatgacagaattccttgaaagatattgttatcacttgagaccaaaatgctccagcccattagtattattatagcatccatatagaaatggactcccgactgatgtttgaagtgtcccagattaaacctctttttttttgtcgatcgcaaggtaatccctagagaacccttggaacaagcaaatgtgtttgccaaacagtccaatctatcaagaggaacattggtaggcacgcacaattatagatttggagtagttatctctcaagccacacgagtctgcaactgtatttgttaaaaattttatgggactgctgacaagtcttgagttttgacaagattaagattggaacattggacttctgttttactgttaccctcattcttttcttttggttggcagcaaatgagcgttttgatgcatttattttttaccgaaaaagaacagttcaaacgtagcggggtcgcttttaccattctttctgtgtcaccaataccattcgccacctcgtcagactttgcctgctaggcatataagcacagaatttgtctgctagcgatgcccgtttatttatctcttcaattacaaggcgccagaatagacagatgaactcatgaacagaatgctgatggtgtttccctgttgcttgcttttgacgccacacgcagccttctccgatcgtcgccagctagctacccacctg

SEQ ID NO: 5119 - DNA, 829 bp, Zea mays
  Intron number 2 from transcript GRMZM2G314702_T01 (locus G RMZM2G314702) derived from phytozome v7.0 (chr-ID 3; pos 1 11188141 to 111188969)
gacaactggactggacaggtgtctgcacgcttcaggtttgtccaccttaaaaccttctacttccatttgcacagcttcaagaggtgcttctataggttttaatacttgttgattaaaggttggctgaggcctgagggtttggtgtggcagatagcaagcactggatctccatggattgcggttgcacctgtacatgcacaataagataattagaatcacattgatataggcattttgcaagggaaacaacatttaaaaaaaatgcacatacagattcaggtctgaccacaactggatcagtcaggtttgtgcaagctagttcggccaccttaaaaggctctacttccaccataaaagacagtggcatcatcagcttacttttggaaacacagctttcctcatgaggtgctgctgtcaattttgattcctgttggccgtaggtagatggtgcggcattcagattcatgttctgagtaggtagacactggatatttgaaagttgtggttgcacttgtgcaccgatgttttggtcaatataattctcctgaaacatacatatcaagattgttagaagcactaataaagaaaccacatattgcaagttaaagagtatacaaaactgcacatacagcatcaaaataaccaatcttgggtgtgggtctctgaagccccgatggcttaaggccttttccctggttggttatttctgcagtagcttttaaattatttctgcagtagcttttaaattatttctgcattcaaattattggatgtatgactcatcttccctacggtggaagcagttgaagccccagatatcacagagctc

SEQ ID NO: 5120 - DNA, 1031 bp, Zea mays
  Intron number 3 from transcript GRMZM2G314702_T01 (locus G RMZM2G314702) derived from phytozome v7.0 (chr-ID 3; pos 1 11189079 to 111190109)
acggacgaacagggaccctctgagcaggtctattcttgatgcttagtgttgttgattgaaatgtgatgactgaatctgtccaaatctggacagcaatgtttgtttgtattgactgactttgatatatattgaatcaacctaagatgtttataaatgagttgtagacaattttataagctttctagaaattcttggatcacctgttttggatgcctaaatctccagttatggagttttgaagtgagtagtcgaattccgtccaaatctggacagcattatcatttaatactgattgacctttttaagtgtctaatctcatggtgatgataataccaaagttgtataggatttcttaggctttccataaagtcttagttcactatttttggatgaatattttgtgagttatgaacaaaacaattgactactgtgtgctgtccagaaaatctgcaattgagcacttgattttgttcttgtttggctaagtaggaataattagtttttgattcttgagtgatgaagacttgtggcatttgaaatgtttctccaaatgtcttgttgcatatggttgagtttatgtaacatgcaaaagttatccattcagatcctataagaacaaataaacagttccttggtttgaatgaatctcttgtcatattctggattcctgtattttcctgttgtgtgcaagaaataaagcaaaaatggttatatcccttttgctgcttgttcccgtctagcaaatgttctctgtccatatcctgttgcaacaataaacagttcctttctttgaatgaaactttcatcatactttgtttgacttggtgtttcctgtgtaaaacttcttctactggcatttatgaaagaatatgaaaatggttataaccttttatttctgttccaatgcttttccttcactttcttgccttgtatgcatttaattaacctttttacatgttgattatttcctccataacagtgtctgtttcattgcagttccctttactttcaaaaagtgcctttcttgaacg

SEQ ID NO: 5121 - DNA, 920 bp, Zea mays
  Intron number 1 from transcript GRMZM2G430600_T01 (locus G RMZM2G430600) derived from phytozome v7.0 (chr-ID 7; pos 1 74286755 to 174287674 reverse strand)
ggaggccttcagcctcttcgacaaggacgggggtaaggttcccttccctcctcccctcacacccctgttcgtgttccttcggatcggatctcagtggtgatgttagacgtccgcggctgcctacgtagtggcattgccgcccgaaaggtttgtttaggtggggtagatccgaaacaggccggatctggaccatgtccgcggcggggcggcgggacttgatcgcgtagctgtcgtgtgcatttctccctaccagtggcggaatcggcgatgtggacctaagggctaaggcttatctgctgccttgaccatttcgtcgctgacaaaaacaaagtgacaatcatgccgttctctgtttgtttatctggatcgttattacgctgtgaatcctgcgatatgtggctaagtgatttttcttctttttctgggggcagtttagcctttgacccagtcctaggtgtggtcactaggactgtgtagcatgatgagtgaggttgcagcaggctgattgctagtggacgtttttttccccaatttgttaggttttcacgctccaggttgtgcaagtaattttgctagtgattgtgtgatccatcttcaacgttgaaccttgtttttccccctaaaacccccaacaggaaatcttgccccgacttctattgcaaaaattgtaacgcttagcaccctgattgactcaattcctgtcactaggcatgctcggtcaaaagcagatgatttaccacttagaaactgccctgcccctgctttccacatagcatttcgaactttttgactactattgacacccccctaacttgccgaactatttctctcttcagctactatttacctagttataattacataaatgtttgtgtgtatcttgtgcaggttgcatcacgaccaaggagctgggcactgtc

SEQ ID NO: 5122 - DNA, 988 bp, Zea mays
  Intron number 1 from transcript GRMZM2G339084_T01 (locus G RMZM2G339084) derived from phytozome v7.0 (chr-ID 6; pos 1 34111688 to 134112675)
gagctgtccgcgccgccgccaagccctagcgagcggtccgggcgccgtctcgccgccgcgccccagcgagcgggccgcacagccgccgcgccaccgcgccgtcggcccggctagcaacccccagccgctcggcctcacctgtcctgccggcgtgtcctgccggcgcgcagcgtcagcgcactgcaggctctgcagcagctccagctctggcgctcggctgcgggctgctccgctgttgcctgctcgcttgctgatgctggctgctcccgcctggccgcctccctgctgcttgctctcgtgcttcactactcagtgctcgctctccagcctccagctcaagtgctcggcggtgagtatttaaattattgaatatagtccagttcattagttcactgcgcagcacaattccaaatccaatttatttgattatgcgtgtgaatagaaacaaatcaacgtgtctaatcaattagatttttaatgtgcacattttctaatttctaaaaagcaatattggatagaaacaagccacgttaaggttatgtatggcaagctgaaagagattttaatcactagcttatcaatgcataattttcttctggatttatttgcatatctgatattatatggttaccatatggtaataattgcaggacaaactaagaaaagcacttgctgaacctgtggagtctctatttgatgatgcagaccaaacaacctagcaatcaataagaaacatttacaaatgtgagacaaaggccatcctaccagagtttctgaataacctttgtcagtttgaaatggaatacgctccagcagaagaaatggtatccaaattaaaggattatgcccggagtgttgtggaaagtaaagctaaagaggaatctagcaaagtattgatccatatgaaggagaggttgataaaattctttctttatttattttttttgggggaggggggattctgacactgtttcctctgttgccaggt

SEQ ID NO: 5123 - DNA, 664 bp, Zea mays
  Intron number 5 from transcript GRMZM2G045686_T02 (locus G RMZM2G045686) derived from phytozome v7.0 (chr-ID 6; pos 1 03590815 to 103591478)
ttgctggcggtgtgtcctcctttgcgttgttgaaggtaagatgatcctcaatttgttgtttcatcaactgccacactgatgagatgatgttttttctagtgtatcggttagccttctaactcatctagtttgcaccttctcatattcttgatgatactggaataagtccaaaaacaggatgaaatttgtactgtcattttttattttaaatatgaaacatttagggtaaattttcattctagaatcaaaccttgaaaatatttagtttatattctttttcttcagtcaccagttagcgggttctaagcagcatctgcatttgcggagcaaggcttgcattggtttttcccttccccagagcctccaccattgggtctaccttttttttctcattctttggtgtcctttatttttgtggaataagacttgcaaggctggtcaaataattagatgaagaactctgtggtttttggttatggcgtcactagaagaaccatctaaatttgtgccataccattatttcaattggatcactattggttttattacacctttagctttttaactaataactatactgctctgtgcaagtgctgaacttctaaaatatgttttctgctacttatcagacaagctccaagacagttaagaagcttgtcaaccc

SEQ ID NO: 5124 - DNA, 874 bp, Zea mays
  Intron number 7 from transcript GRMZM2G105750_T01 (locus G RMZM2G105750) derived from phytozome v7.0 (chr-ID 7; pos 1 51962657 to 151963530)
ttcaaacctgacaacatccttgtttgctacccgaggtagctataccatattgccattactgttagtctgttaccactttatgtctctctttagcagtatcagtaataaccatgcaatcttttctctgatattaagtgttcagatcgcaagtctcagatgtagatgtatcattattcccattcatgtttgcaaaggctgtatctttttgtcttgtttcttaggatgacattactttatgagttacacatacatattgaaatacttgcaactacaagtagatcagatgctggactttgttgtagctaggatagataatttgattggtgcaagtatttgagttgtttgtccatgaagaaagcatgaacttcataatcgctctattggctggccgtaacccataagcgttggatcggtggcctggtgggtgcagaaacatactgatttactgtatctgcattacctcagagtagtaatgggaatccccattttgatattcgtattcagttttcagctgaatgttgatgttctggtctcccgttcttttgagaactaagatttttgacaataatatcaaacacaaagtagttagagcaggcgttccatttggaagcataattttgaccccttttacccaaggtaactcataagaaatatttctaatgtgtccatttatagaagctcttaaaaaggtaagcacaacagtactatctagcattatagcctgttcttcgactttcctacccatgttctcgctcaacatgttacctttgtcaactggttttattttgagatatctagttgctcactaatcagtgtcattcttctcttggtatgtaaagtggagagatcacagaggacaatttccgaagtgaaa

SEQ ID NO: 5125 - DNA, 978 bp, Zea mays
  Intron number 1 from transcript GRMZM2G017157_T01 (locus G RMZM2G017157) derived from phytozome v7.0 (chr-ID 6; pos 1 62674180 to 162675157)
ttcgtcaggtacacttttgtccctccaaaagaatcaagctttgcaagccaaggtttcttgtttctatcaccatatcaaggctgctctgtagttggttagtgtagaaaactgcaaacgagtgtgatggagatggagacaggttggctcttgtcatctggagtagtatatgggtgtagttctgacctgaatatatatggactctactgaagctccccgtagcaacttaactcaatatatatgaatagcggtagcaggccgtagacgtatgtttgactcaaggtgcgcattggcatgcttcacatggccccaatctactattgctttacgctatacctgaactgacagtaaaattttcaaattcctcttgaatttgtccattactttgtctatggaaacatttccatcttgatattaacacttcaactagactcgtaatcaattgttgacttgaagattcgtaggtaccacagagttatttaagttgacgacacaaagtcaaactaagtaccctcaaatgtataaccctggtccgttcctgaaacaaaatccaaattgctcgtcctcttctccatgacagtggcgttcctattaatattgataacaatgacaagattaaaaaatgtgagcgaagaactggaccgcgatagttttcttaacacgtttcttctaaaatgaaggtttattgtctatttgttgaatagttagttcaaaagcagcagatggtggcagtagtggacctagctaactgctactgaggacgagataaaattgtaaccacattgcattgcaattaaacatgaccccttgggagtttatgtagtgatgatctcttcttaggaaaacttgatgttatttttaaggtacgaaaacctgatgtttactgatatactccgtacttggtctgcaccctgtttcgtaacttttccccccacttatttcgcaggaactaagaagaacaaaaaggcgattgcaataggt

SEQ ID NO: 5126 - DNA, 994 bp, Zea mays
  Intron number 3 from transcript GRMZM2G044265_T01 (locus G RMZM2G044265) derived from phytozome v7.0 (chr-ID 3; pos 1 60513244 to 160514237)
aaggcattctgcaggtttgatttctagtgcaaactcaaatatcatttgtgttgagcgtatgcttgctattaacaaattatgtttattgatccatagtaatgaactcatgcatcttaactttcgcatccaatgattccgagcaagtgtttcacattcctagggcttctgatatttgcattttagtgtagcaattttttgcaccttttgaagtgttttgcccaacttctcaatgatgctctcagttcaactgattacaattgaatgtgtgtgaaaagtacacattaatctgtcaagagccaaaacccttgttccatctttgctcaaatgtctctgaagcagaagcaagtagtttcctcgtgaaaataacctgaaggggttctgttgcttcctgataaattggattgttttggaaaatcttgcgcggcccaagttgggttctcatggaaactagttatggctgcctgtcttgttctcccaaattttctgcacataaataattgcaatgattttactggatggtaactgcaattactgcaactcatgcaagtgtgcaacatatgcattttgtttaaattttgttcatcctttttcctgcaattatattattttcaaatgaacctgtgttgcaaaagcaggttctgaggaacccgctaagcacttgcacgttaaatcttttttactgacaggattcagctgaaagcaagttcttttgctttgtccaaattctacgctaaattttcaacgcatccaatcaaatttgatctaattctgaagtcttcaaaaccctaggcgttggagaccgttttgcagtttgccactttaactgtagctacctcaagttgccttgatagagcatgctgaaatttgtgctacaatacacactccataggtcgaaaatcaagatgacgatgttttaactggataatatgtatctttcccaatgctcatcattctttttcgatgcatctctcttttgtcctcgtgtgtagggact

SEQ ID NO: 5127 - DNA, 874 bp, Zea mays
  Intron number 1 from transcript GRMZM5G831408_T03 (locus G RMZM5G831408) derived from phytozome v7.0 (chr-ID 3; pos 1 3502158 to 13503031)
gccaccctatttttttttttaaaaaaaatcctaaggtgagatcgagctgctctttgctttgctttgctttgctttgctgcttgcgcggaatctggcctgcttgctttcacagttccacttcgttgcgtgtttcggtttattgattgatagatttcaatcgaagcttgcagattaggtttcttttctagctagatcctgcagcatctacgaggccaggccacggtcgactggttctccttcgatctagtcttccttcctttccttcctttctttctgaatgcgcatggtagtaccaccataacacagctatccttttggtgagacatccagttttctctgtctttgccaaagacaaaaaaaccccccgctattggtaatacaggcagaggtcgtcttgagaagacggatagctatgactgattatatattttttttgctgcacatgtttattaccgagtccattgctctgacgaactgatctcctgtaccattgttacatgtacctttgtttgaattggaaatcattcataccatattactatcaatccaactaacaggactaactaccttcccaaggatcgtacactaacttcttcatccgaagtaccttgaactagcatgcttgctggcatcactgtctgttacacgctgatgccgcactatttctagccttgattacccaacgccgagttcacctcaaatgcttccgttataggaaaacatgattctatatgccatactcatttttcgctgtattttaaccattttaactctcatatttgtgactgctatagtcactgtctctctctggtgctgctgcgcatttctgaatttttcagatagtttcttcagtccgacaccgcttctagcttcc

SEQ ID NO: 5128 - DNA, 867 bp, Zea mays
  Intron number 3 from transcript GRMZM2G171078_T02 (locus G RMZM2G171078) derived from phytozome v7.0 (chr-ID 6; pos 1 00124694 to 100125560 reverse strand)
gttgcactctccggtgcgtgatgcatgatgatcatattcactgcatgcattcattctaaatgccatgttttccaaacaaaaaaacattctcaacaactacgtactaggaggcgtattaattaaaaatataataagagtattatcaccaccggaattgatagctccatttttgacttgggagcagcagaactctcttcataatataataatcaagctgtgcatgacatgaatatatggcctaattttgtcggttaccgacaaacactatatatatatatatatatatatatgtatatatatgtccgatattattcattactactaaagaagacactcataatcttacatgaaagttggtatgcctcaagttttttacttttacaacatgcacattgtcggcaatggctcccttgaagaaagaattttgtccaaaagcttcatcagttttgtaatcctgattattgtaaattaaaagtagcagctttaatgaactgtctgatggctgaaagaccaccatcagtctcttccaccagatatcttaattctgtggaatacaatgtgaaagcaagcgtatctataaagtagtaggtctggccacgttatacgtacgtgtatatatataatacaagttaggtacagaccacatacatgtggttcctaatatactgtctagaaccgatacatttttttagagagaatcaaaagaacagcctgtaatatatacgtttttaaaaacaagacactttattaaaaactaagcaatatattaaatattcccacgcatgtgtgcgttgctctaatttaatttggcactctcgatcttcttctgcaggagctcacaccatcggccaagcacgctgcaccaac

SEQ ID NO: 5129 - DNA, 352 bp, Zea mays
  Intron number 1 from transcript AC191037.3_FGT009 (locus A C191037.3_FG009) derived from phytozome v7.0 (chr-ID 7; po s 141806391 to 141806742 reverse strand)
tggcctgcctcgcaaggattcggctgctcggacgggtaaggccttgttcgtttgtgttgaattggtgggtcggaacaatttctaaccggtttgcttgtctaatttatataagctttgattagctgaaacgattccggatgcaatccgacacaaacgaacaaggtctaaagttttctttgccttttccgagagtgtcgacgagtggtacctgggttaatggagacataacttatgtttcaggaactcaatcaagggacactcaacactagtttagctctagtgtcaggcaaattattcaaaatcaatcatcttctcagctcccagaccaaatttggtttgctctcgccaccaa

SEQ ID NO: 5130 - DNA, 901 bp, Zea mays
  Intron number 2 from transcript GRMZM2G167243_T01 (locus G RMZM2G167243) derived from phytozome v7.0 (chr-ID 6; pos 1 46854140 to 146855040 reverse strand)
gtcctcttgctggcgttgaattccaggtacttgttatgagaattatgtgtgataacaacagaaccactcaaattgctgtagtaacttgcgtaatgtgtacctgtattcaaataatgtacattcaataagcaacacactagaataatcacaggcgtcacaacccgcaagagttctttttgacaacttggaaacatatttgttcctcatgtttgaactcaataatttaggctttatacaacctggaaatatatttagtataatttgatatgaaatataattggttggagtgatcttactggccagtggccactccatcactctgcaagcgtgcttgtagaagttctgtatccaagttgggtaggaaagatgtaaactatccatattgtctgctcagtttcatcttttcattaactaaaagggtaagttgaattgttagctgttctcaaaggatatcaaatgaataattctagggagttacgttagctaattctctgttatggtactgtaacctggtgattactgttcctgtatctaatttgaaataaagactcaagtgggtggaaaatattgaattttggcaaataatgtaacaaatacattgcccgcctttgttcatcaacttaagtgtttgaatggacttgctcatacatttagctcaacaataattaatgtaaaatgacagcttaatcactgtcagccatcttaaaatttacgatggatgtgcattatgttctagtatgaaatgttgatagttgtaaacatgcacaacacaccttactttttgctctacagatttttttcttcatttatagtgcattttaatggaaaaaaaattccctccttaagctcacaaaaaatgggtactcgtttaaatcagagacaatttgaaagaagagcagct

SEQ ID NO: 5131 - DNA, 644 bp, Zea mays
  Intron number 2 from transcript GRMZM2G459642_T02 (locus G RMZM2G459642) derived from phytozome v7.0 (chr-ID 3; pos 1 44339128 to 144339771)
ttatcaggagtagactgggaggtctggacataagggtaaatgcaatcttcaaattcatgtgttaattatgttttgcagcatttctcagtcttgattttcagacacatctgtataatgtagaagatgatttttttttgagataggcttgtttaatcatgtacctgcagacatacccattttatatttctttcaatgctagacacaataccaatcgaacatgcattattattttttgtttattggggtcgcagtcaaaaccatttgcaaagtgcaaaccaaaacggccaactaccaacacaacacagggttgaatgtgttttttgagatttggctaaaaatctattccatcataaggttttcctagtgggctctgcaattcacatctatttgtctcatgtatgtatgaggttagaaaatgcaaaacttctttagaattcttgtgattatagtccaatcgatttttttctatgtatttgacacatggtagcctttagaagtttgactaaaatgttgagtatatactgtttagtgtttactaatttgtatgaatgtttttattgctgaaaatgttctccaattcatctctgtgttttttttaatcttgaacaggtggttaagactcttcttgagattagtgtggagca

SEQ ID NO: 5132 - DNA, 832 bp, Zea mays
  Intron number 1 from transcript GRMZM2G431927_T01 (locus G RMZM2G431927) derived from phytozome v7.0 (chr-ID 7; pos 1 63671646 to 163672477 reverse strand)
gttccaacggcgctgtataaagaaagcaacgctgttagaattgtgcgatccttaagaaagcaacgctgttgattaagacacatgctgaatgtcatgcgatccttaatacagccatcggggccaggcctcagtgcgtgttaatttacgttcacgacgtaccttgcaccggtagggtaagagcagcctgaagaacctgaaagtttatagtagcacaaagaccatgtaagatacaggtaggacactgatggagtgatgaaacggacagtgtcacaccagcacagaagaacgtggaaggaaatgaacacagacaccatatacaagacaccggaatcaaaatgttcctttttctaatgtgttttactagttttaggcgaggccacaccactagccttaatgcagtgtgcctgtacagaactcgattccctaaagcttgcttgaccagcagtacacctagatagctttaacttagggttttttaagctggtgcccttatggtaactgatagcaaaatgaaatgtgccaaaaatgatcagatccgcattgttccatgtcaaaagccgagttcaggtgccccaagcacacacacaaaaaaaaactttagcaattggcaatggcaatggcagacctttaggctaaaatctctcgctatttaaaattgaaaattgaatagtgagagattctagtcccatcaatcctctccattacctacaagccctaaacctctctactcttcatcttctcttggcaattctaacccagccagcgtgtagataacgtaatgctctctaggcaaggaggggtgtggagggggcgcgtttacttgggtcgctgg

SEQ ID NO: 5133 - DNA, 502 bp, Zea mays
  Intron number 4 from transcript GRMZM2G168510_T02 (locus G RMZM2G168510) derived from phytozome v7.0 (chr-ID 3; pos 1 36408710 to 136409211)
cattccgtggtcctggtcttgaagaaggtcttaaggtgaggcatgttttattcttcacactaggcatttcctagttttgattacgttggtcttcagtacaatgtgcaaattcatgtcaagccatatgtgacactagtttagttctctgcaatatcatatgataattaaattggacatatttttagcatcagtgattatctggatttctgggaaggggctggacaactaaaatcacctgttcaaatagagtgggatattcttattttggtctaggctgagattctaggagaaacattaacagttagccataacttgggatttgatcaagtaccaatgtcactttactaacttctgttccatcaggtgttatgcctttgtctctgtatgactgtatgttacctatttgttggcacaaagcttttcacgtgcaatagtgtgtttatatgatattgttttacactttcctattttggttagatccttcaaaaggtgaaagcaacat

SEQ ID NO: 5134 - DNA, 652 bp, Zea mays
  Intron number 1 from transcript GRMZM2G701108_T01 (locus G RMZM2G701108) derived from phytozome v7.0 (chr-ID 6; pos 1 27769468 to 127770119 reverse strand)
gcccggaaagctcaggtgattttaagtcttcaacgctagctcgtagctttaaattaatgtgtttttttttcaagagtaaagatgagtgcctggccaatttgtctatgcaatgcacaagttaaggctcacagcttgcacggctgagtttgtttatgtactgcagcttactaatatctgaaacatagcctggagacttttcgttggcactaccgttccgtgagaattggtttgacttatttgtgctgccagcttaaacaggcgaccgtcctgttctctgcatggtagagtcatattttattctgtcttaaatgattatctggaagccgacaagttctgaattcttatttagtaactgatgtacgaaggaacgatttttcttatatctcgttgctgtagccactttgagtcgtttttgtgatatgcaccaatcagatgtagcaagaattgtgttatcaacctttttttcatatgcctttttattaattattaactgcggatcatctgccacatttaatgaattttgaaacatgaactagtacaggattgcaaattggtagtgttcattttctgatgaatagttatttacctgctcttagctgtgttcatgtatatttctgattgacattttccatcttaggcagtcgacataagc

SEQ ID NO: 5135 - DNA, 805 bp, Zea mays
  Intron number 1 from transcript GRMZM5G829291_T01 (locus G RMZM5G829291) derived from phytozome v7.0 (chr-ID 6; pos 1 45941974 to 145942778 reverse strand)
tcgttgacgccgcgtcgatacagacgaccaaaaaggtatcccttgcagcccttagaaactgaattcgcgaggcagccagcaatagccgggaacatttttgattggccggatacatgtatgttgctgtgactgctgagatgaaaattaacggacaggaaacacataaataaacgacagccaagccatccgtgcgctctccttgtggtttctgcaggctgcagcagctgccacccccgcgccacatggacgcacggtggacggtgctctgcctctcccgcgaacgccgtgaccgggtactagctagcttagcggagacggacggccgcgcgcccgcggatttgcggaagctgtgtcgccggccgtgctgctatctatcccatcgtctaacaggcgacccatccagtcagtggtcagtaggagagagaagaactaactccagcgtccgatcgggacgccactcgctcgctcacaagcaagacactagctactctcaactacaacaacgctagtaaagcctaaacacacacacacacacacacacaagcaaagcgagcaacgtacgttcgtcagcgcgtccttgtgagttgtgaaacagaaagcgcgcgctatagctatagctaacattattctattataatttagctaacattattctattatgattatttactttagaaaggatgaattctaaagttcaattatttatcaaaggtatttattttgattttgattattattattattattattttctctaaagatttttcttaaatcacaagttaagattttggttgttacagagcaa

SEQ ID NO: 5136 - DNA, 743 bp, Zea mays
  Intron number 1 from transcript GRMZM2G117357_T01 (locus G RMZM2G117357) derived from phytozome v7.0 (chr-ID 6; pos 1 38500348 to 138501090 reverse strand)
catcaacccgcccgtcaacgccctctcgctcgacggtattactcgtctattctccccaaatctgttcccattcaccgcggacgctgcgtgttttttttccctcgtataggttccttcgtttggacactcggtgatttccccctcgtataggttccttattagttgaaggattattgttggggaatgctcttggatcaatcgatcttcgcttggcgtggtaactgttgccgtgggggaatgaactgttctgtctgctagtggatgaacagtagtaccgcctcgcccatgcataaccagcactttgttctttgttcccgtcgttatagctgtattttggagtacattttatttgttttacgcaacaagacaacttatgtcggctctggcggactgactctttcctcatcctttgattgtcaatcctacatgctttgtattctacgactgctgtttgtctgacctgatccggtgcagtggtgagaaccgtatgtccgtatcaccgagttacagatcatgggttcgaagcagtctctccacgtttaaggaaaaaagcttgtcttggtttatctcttactccgtcccactcatgtgaagcctcatactgtcatacacttgtgaagctgataataattgttcatattcatacaactttgtatgatgtttactctaaatcaacaccacagaccagaccattaagccctctcgtttctgttttgcagtcatagctagtttgcagaggaact

SEQ ID NO: 5137 - DNA, 824 bp, Zea mays
  Intron number 1 from transcript GRMZM5G861541_T01 (locus G RMZM5G861541) derived from phytozome v7.0 (chr-ID 7; pos 1 55705196 to 155706019)
gagagttttttcttagttcaagacacaaaacagtctcgatgcagacagctatagtaacctggtattacaaggcaaccaagaaaattacagagtactctccaaactaacaaagcaaggaggctaacaggccataatattttattttactacgacgggtataggtagcacagaggattatgattcatcaggcgtgttactaattgaattctttgacaaaatcagttaagtcactcatgatagtcatgaagttagccatcaactacacactgaatggaaaaaggaaagccaacacaactacagttatctcgatcctttgaactgtgcaggcaataattcaaatatatatatatatatataatataatatatatattctcaaacaccaataaataaacatctccgagaagatcgatacctatgtaagattcttttttcgtatacacgcaatgcacaagcttcctacaataacagtattctcaagacaagtaattaataattcagtgagataatctgtgtttgttctcagaacaacattctgttcaacctaatcaataattcataatgttttttatagttaatgtccaagttagcaaaaacagacagcagtggtagactaaaactcgaattgtgataccatagggtaacacactttttctgtggtataaatgtgagagcaattttttacaacacacatggaattctcataaatatatgtagcacagtccacaaatgcataagcaatgtgattcaacaattgtgtggggcaagtaaatcagcaagacaaggtactgaaacaagattaactgaccttaagctagaagcaaa

SEQ ID NO: 5138 - DNA, 763 bp, Zea mays
  Intron number 2 from transcript GRMZM2G444958_T01 (locus G RMZM2G444958) derived from phytozome v7.0 (chr-ID 3; pos 4 6660802 to 46661564 reverse strand)
tccaagcgaaagtatgtcacaatttcccctttttttcttttgcaaaatattgctacttggtgaatcttttgaaatttttgcacgtgagaaacaacgtagtgatatgaaacagattatgctacgagagaagaggtcacgttaccagcttaactctggatcgaagtatttatacatatatatacatactaaaggcacattaattggtccagaattgtcgaacaaaccctcatgatcactactaaaaaaattatactgatatgatgtgcctgatacagctattgatatttcaacttctgaacaatttgtgctgccatttattagacactcatagaactacaagtctgtagctgacataacacacacccaatcacctgtatatagagtcatagagataagaaccttgctgcatgtatgagcgaaaatatccacaaatgattttacaactgtcaaaaaatttcagcagtgaaccgaaccaatctgctggcattcaaatgttttgattcaacatatggcaatatatttgagcctctgattctgctggcaattcattcacgaatgcattttgtttttatttgattcatggccagcaattgggactggatatcgaacattctgctggactcaaatgatatagcttgcactaggttcctcatgttcatttcatttccccgaacagaagtccatttaatctgctttgctctgctgtcgttcggttatcacttattgattgtacatatccatgcttatcacaggcaatcgaaag

SEQ ID NO: 5139 - DNA, 897 bp, Zea mays
  Intron number 2 from transcript GRMZM2G015881_T03 (locus G RMZM2G015881) derived from phytozome v7.0 (chr-ID 3; pos 1 95418575 to 195419471 reverse strand)
agataggtatgtgtatttgttcactatcatatcctctttggagcgttaaataaagatcctttttgtccgtgtccagcagttcacctatatggtcactcaaaacactgttttgcactgtagaatgcactgttcgcagagtggagtttgaatacgggtatgaggctactagagatagccttactggctaaatattgtgttgattaggaacatttaaaaatgttctagcgttcagctgtggaaatgtggaattcccttttgtgaagcttgttaactgaaaggtcaggggcgcatgtggaatatccttttgtgaagcttgttaactgaaaggtcaggagtgcatgttcgcctcttctttttttttttgaggaaaatgcactataagagttaggccaactagctattcaggtcagtataggtaacaccaagttagatagatggggcagaatatgaaatgatgtgtgtggatgatttttttatatagaatggaaatgtttatgtgaaggagcaggcctggtgcagtggtgagagttgtctcactgagtcaccaggtcgtaggttcgaagcgcctctccgcatttgcgggggggggggggggggggaggcttgccttactttatcacttgtctagacctcactcatgtgactcatatggatcctcccgcactgggtctgccctttaatcaaaatgtttaatgtaccataagctcacagaaatgttattcgttttcaaagtgaactgaaactatatacctattgatgtagggacagatatttcagccgttaaagacaatttggcaccaatacggaacattcagttttgtctgtttggtgatacataatggtattccaatttacaattttacatcttatctgttctatttgagtgcagaagctgaa

SEQ ID NO: 5140 - DNA, 999 bp, Zea mays
  Intron number 1 from transcript GRMZM2G026869_T01 (locus G RMZM2G026869) derived from phytozome v7.0 (chr-ID 7; pos 1 63114778 to 163115776)
cgtcatttcctgtgatagcagcaaaaggtgcagaggtgaagagtgaaactgaattgctacatatcacctcacttactgttgttcatttgtgtgtgtggggagaggcacaggtgaagagtgaaactgaattgctactcttttagagttacttcatcaaactcaagactgtgagtggccagtgagaatcgatgcgactctagaacctagtttggatgggatgagtttggtgcaatcagcaaccccattaaaagatttcaggctggtgatttttagagcaccacatctgcacatttttgacttcgagtttacttccgatctattattcactaactttacctcgcctccaaaatgagtagtagtttgcataatacactgccttctctatgttgaggtgccagacagctgagaagtattgtttctgggctcgtgcattttgtatccaatgagcttaaactacatgattgctgggaaatgattggtagctatgctgttgcaatttagaactgtgaaaacgaccctacataaacactaaacagaatgatctgcattcttagagttgccagattggttactggatcttactctcactaagggcccgttcgtttctgctggaacagaccaggattaattccaaatctccaaaacttatagtaattattgaaggaatccaagccagatttattccaccccttcattccatgcgaaacgaacagaccctaattagttttcaacttggatggatcatgaatctgacaaaattcgttcaagaataacgatatgcttattactgttgttctagtgttttcacaaggatcttgtgctttatttagatttttttagcatataggagtttatcgaggagtcgttaaactagatatccattaagggtgaaaattcacaagtttgatattacatccttttgaaatgataggttccactcaagtaaactgttcttcattcaaatgcttctttgctttttcaggtatagagacaacaggc

SEQ ID NO: 5141 - DNA, 611 bp, Zea mays
  Intron number 1 from transcript GRMZM2G171600_T01 (locus G RMZM2G171600) derived from phytozome v7.0 (chr-ID 3; pos 1 58901116 to 158901726 reverse strand)
cagcagcagcagcaaggtaacgccgagtcccacaacgcctcgctccaaagttgcaaccttctgttgcttttgagcgttccccgagtgcgatttccggcaaaagaacccatgtgaggggtcgaggaagaagggggactgcgccgccaggctgcctgaaagtgatcgacaaatgcaactggttaaccattgattttgtttctctgctatgctacttgtacgaaatgctactgctccctcactatatatgtcttttgatttaataacaagtttgttagtacttcttgatcgaagaaacgaagttactaggctgcgagaacattaaaaaaatgttcttttccgtctctgtcttctttatttctatctgagtgaaaccacccgccacccggagtggttacgggtacggttgtataccaattggtcatatttggaaattgattgatgtaccaaattgaatggtggttaaccatccacgtgacactctatttaattgtgaactctgagtcgcgatgtgttcggcgtgttgtagcttgccatctcttgttaacaaatacggctgcctacggttttactgtacaggcttagacataggcaagctacaagaggtagtgaag

SEQ ID NO: 5142 - DNA, 871 bp, Zea mays
  Intron number 1 from transcript GRMZM2G143955_T01 (locus G RMZM2G143955) derived from phytozome v7.0 (chr-ID 7; pos 1 36866724 to 136867594 reverse strand)
cggccaccgttgagaccatcgccaatctcctccaggtatgctcgcgagctcgcgccgtggggggctctgcttcctaaagttcggatcagtgccctgcggaggccagatttgtggcgtgcttttctttattggattcgggctatgcctggattcaagaggtcggatgtctggatctgaatttagaactctccaaacttgtgctacaatcagagctcctcttttgtgctaggatggaattgtgaaagaggaatattgttactccacaattctgtgccatgccctttgcttaagttagagctagggtgtagcttagttcgtgtttggtggattaaaatggtatgactgtcccggtcttgttagtgttgcaaagtggtaaatcgcccacagaaatttgctcctagtgtgcatgcaacaaattgaccactccaatgctaaaacctagtgcaattttctttgtctgccagtcctcggagaagcgatcagagccttaaactggcgtgccgaaatatctcatgggcaactatgagttgagtcatgggctgactacttagaagaacatggggtagttgtcaccggcaccaatttcctggatgtgcttgctttggcatgcacacacgaaatttcatatagggtacagatcgctggagttagtggtggtggaattggtttgtgatccaagttcaaaagttaaaatcacaccaaatgggacatgggcaactccattggttcggattttatcaattgattcttaagtatcaatattactgccatttatataaggcctactataaacaagtgtaccaatgtttttttattccctatattttttgtatctttaattgtaagcatttttgtaaatacaggaggtagg

SEQ ID NO: 5143 - DNA, 1001 bp, Zea mays
  Intron number 4 from transcript GRMZM5G896496_T06 (locus G RMZM5G896496) derived from phytozome v7.0 (chr-ID 3; pos 2 11876012 to 211877012)
ccattaggtgtgtactcccacttctttgagttttcctctgtcagaatgcatactcattgttcttgccatacacttatcattttgaagctacaatgaataaattgaactttgttggagtcatcgatgtgttgtgtttttttagatgctggtatgctggacatgttagtttttttttgctataatgctaacatctatgtgcttgacacttgtaaatagcaaaggcatgaaatttgctctttaactgaagacggtgtttagttggaaacagaaaacaatagatttatgatgtttttagatgcttgaactctgcatacatccacatatagtatttgtctaaacagtgaaccctcggttgtatatataaatgatgaaaattgccgtttattgacgacgaacatgcatatctatactacttcttaagaacctaaggagggcgtccaccatccggtgaagcctgcccccgctcgcgtggtccccctctgcgtctcctccatgtttggtctccctctgctggaagcacattctttcacgtctcctctcaccccatacgatgtgggcatgatttaggaggcaggtattggtgttgggattagcggcgcagaaggaatgcaagtttgttgctgctgctcgctaccagtttacatgctatcctgtttttacaaaaaaagacttgattacaatttatgacatgctaagttaaatcatgctacgtcttgtccggacttaaaaggtactccatgttatttaataaatgtatcatgtaaaaattattgggttttgtcacttcatccactgacagagtatgttctttaaaaataaggttaatgtgagaagtagaagttctaattagaagttagaactattgatgtcggccttgaggggaaggttgatgttgtaatattagaatggataggctatatgtttctgtacgaggcttttcattgcatttcaatattctctatcttttttcagttctaaattcttctgttttttcctatagt

SEQ ID NO: 5144 - DNA, 967 bp, Zea mays
  Intron number 1 from transcript GRMZM2G088683_T01 (locus G RMZM2G088683) derived from phytozome v7.0 (chr-ID 7; pos 2 2408200 to 22409166 reverse strand)
ccgccagcgccgggagacgctcctcgacaccgacggtgaggcatccctcccccctccgccagtttccgtttccatgtgcctaatcagataatattatcttcagacagaatacatctttatgttgaatcaaagtgtcaatatgaattttgataaccaagcattgagatttgcctaatcagatagtttccgttgtcatgagaacagtacgaaagacggttgacactggacgaactgttgtctgcacaattcatcaaccaagcattgagattttttaatcttttgatgaggtatgaaaaagtttagatggtatagccatataagtggacaaaacatagacacaacaagcaattgagaaacatgatagtccaatgtacagaagtaagtatgaaccgtcgtgtagtgacaacagcagcagtcagacctttgcaaccccggtgagaccagctgcttgcgctatgtttattcctcaccagtgcctatgtttgagtattaattgtgtatgtttgtgtgtgttggtggtggagctaaatcccggaagatttagataaggagaagaaggttttagcggggtacctgtcacgtgttcgatgatatgctcgaactggtggccatcgtcgttcttgctaaaaatcaagtcagatcatgaggtccaaatcccaggtatttctagcgttgctgtttgttctaaacttgcccctagttgatatttgaccactaacttgataaatgctgaaatctagaagcatgccataaacagtataacgattgtagacaacaattgcttagttcttgttattcgctttactatagaaatgttaacgacatatttttatgaagcattatttcagcagccatctttgtggtgattgggttcaaccatgttaggacagaaatcagggttagtttctcccagggagtacttcaagggtccttattacatctgcagattcaagaatcagggttgttg

SEQ ID NO: 5145 - DNA, 578 bp, Zea mays
  Intron number 4 from transcript GRMZM2G027995_T02 (locus G RMZM2G027995) derived from phytozome v7.0 (chr-ID 6; pos 8 7121278 to 87121855)
ctttctcgtggtttcaaggatcaggtaaacacttctattttatttctattctctctatgcttgatcatggtacctgtattctttgctagtaaagtgcagagattaagtttaaattgatttgccatgtttgatttcattggttagtttcttcgtgtttagctaacattttcttataattctatgttctgtcacagaaatctgaaaattattcttataagagcaactccaagagattagctaaaaagactaaccaaatttactgatttagctactctctaaaaaagattttagagaacaagtgtaggctaatccaacagactcggtaaacctacgaactgaataaagagtgaagtaggctatccaaaaaatggagggtgaatgtaaagggatagagagctactaaatttgaagagtcgtttacagagtctattggatacacttttcttctaatattagttaaatttacctttacaaaaccatatatccagtctcttggagttgctacaacgcgctatctgtttatggtactctgattcatttatgcctgctgacttatttctttggtggaatgcagattt

SEQ ID NO: 5146 - DNA, 871 bp, Zea mays
  Intron number 1 from transcript GRMZM5G826117_T01 (locus G RMZM5G826117) derived from phytozome v7.0 (chr-ID 3; pos 6 4132253 to 64133123 reverse strand)
catctactggaaggggagaagctcggctgggagaggtaactggaaacgggcttgcttgatgcaaggagctgggcgcctgctgctgctccatggagcctgtggctagaggagtgagagagcaaggacgtgcactgcgcgtagtggagaccgagctgtgttcctggcggccggcttggcgaggaggaagataatatccgcacatgaccaggtgctatccacgagcagggaataagggatggaaaggaatggttaattgccgtgtacaagaggtggccaacggcctgaggatcagcacaaaagttgagtatttaataaagaagagactaggcggtgaggaatatctccacggataagattgtgttaggaaatatcaggaactagcgtccactaaaatgtagaagatgaggcatggagatagagataaaagagagaggagtggaagataatttctaggaatttgaatgtatgtgaggataaggtttaaggaagataaaaaacctcctgataagcggcgtctacagctatagatgaagagatattttcctttctttttttacacaagaatatctttacgagcaaatatctggtgcaagtgttgttcggctgactttttccggtactgtagcagctataatactgtagctgtgtcatgcaaacaccacccgcggcaacccaaacagttacttttaagtccaaccgaacagcctagaattttttttgaattagagtttgagtgaattctaaatagattagattacgatgttattcgggctacttatattattctccgaatcatgaaacggaaatcagaggaataacggttctggctaaaactcatttggataatttttttttgactattctaggcaag

SEQ ID NO: 5147 - DNA, 1056 bp, Zea mays
  Intron number 1 from transcript GRMZM2G436804_T01 (locus G RMZM2G436804) derived from phytozome v7.0 (chr-ID 3; pos 2 07008593 to 207009648)
ccaaactatcccaggaccggctcgacaagtttaaggtgcccttctggcttttggtactgcatttctccaagcgttcgatattgatattttgctatccttgatccacgcatgggaatggttgttatagatttcattttttgtagccttcgtggatgtcagcaggctgagctcgttaggtcggggctattggtcccgacaattttgtcgcataaatgaacatgaacacgttggagatggagtagagttgctggtcgatgatatgtttgtgttgctattgttcaataattcactaaactctacttaatgaagtctagactttgtaccataggcatgaatcgttgcctggttattcagtatgtatgctattatggtccctaatcattgtttaaatttaaatgtgcactttactctttttataacttccaagtattttgaatagatcagatagagcaacataggaatgagatggttagattctttcagaaacatagtggtagttattattctttaatttaaatattgctttagaaaagagccaatgccagctatatacataaaagcacattgaatctatcaaatcgaagaagacatccaactaaaaatatgtaacagtagctcttctagccttctttttttagtcttttagaagcgttgattggacaccctgtcacatatctcttggtttgtacatggaagatagatttcaatccttatcttggcaaggctagagtcctagattggatgtgataaaggctcgatggttcactttttgacttcttttatctttcaaaccgaagtcttcagcccaattatatcagttcagtttcgtgagaaatctcaaatccttatatacaatttgtggatctctagaactcagccagaacaaaaagacaaatcttcagacatgtaatatgtattttcgtatgaaattatgttcttcgtaatatccattttgtatatagttgattattttcttctgaatttactaggctataagtacttaagttttcatgtaatgcaggaattacacaagaaacggttacagataactgaaaa

SEQ ID NO: 5148 - DNA, 1058 bp, Zea mays
  Intron number 1 from transcript GRMZM2G048561_T01 (locus G RMZM2G048561) derived from phytozome v7.0 (chr-ID 6; pos 8 5416561 to 85417618 reverse strand)
cggatctccgcccgctgcatcctcttctcattcgggtgagttgctggatcgccagacacgcttggatcgggtctggatcgtgaactttgtctcgttttgatttgatctaatgtgggcacctaataatcgcttaatttccaactacttgttttttaaataataaataaaaaaacaatagatggcgagatggggctttctaatcctgtatatcgatgacgcgattgtgcgatgctggttggtttgctggattttgagggctgctgattcgcagcacgtgcggttttgttgggagcctcagccatgtggtattttggttggtgggacgatggctgtagcggaaggtgaatgtccgtgcggtttatggcgtactgcaagctacctcatcaccaataggaagaggaggaagcacgaacgaacagctgttggaccgcagatgtgtttatggcgtgctactagctgtctcatgaccaattgaccgatataagaggaggactaggaagcacgaacggcttagaaaccgctgttggaccgttttaacaggcgtttagctggcctatgactggaactagtcatgtggagatggaatacgtgtggtactgataactgatatccgttgtgcatgtgcatgctggaatgactgtggggtgtctcctgtggtcctttcgtcctttgcaatgatttcaatagccccgaatggtgggcaatttccctatgccgaaaatatagcaaaggaaaaacagacgtggctatggtgtctttgtgtgtcaggctttcaaaatcacacaggaatggcaagcatttgattcaaaacttcagcatgtataacgagtgccatcttgtcttgctaacatgtgtttactttcaaaacatagttttcttctagccatggaattttcgtgcactgcttatttgctgcttgtttatgctgagttgatcggagtatttggatgtgagagtctctcttcctgtgatgctagtgtacactgtctgatcttagttgggcactcgctttctttgtatcaggtaccattggatcagaaagaaaggaaggcccgctc

SEQ ID NO: 5149 - DNA, 508 bp, Zea mays
  Intron number 6 from transcript GRMZM2G083580_T01 (locus G RMZM2G083580) derived from phytozome v7.0 (chr-ID 7; pos 1 70491431 to 170491938)
ctgtgaagaaaagagaccttgatttaagtaggtatgtgagcataacttagaatattttcttgttttattttcaactgctattgttttcacataagcgatgtattgataaccacttctggcaggttattttcgtttatgtttaattgtttgaatcatggctgaaacatggtgtaccattttctaacattaaaaaaaacagattattgcacacgtgcagtttgtagcatttcataaaaaatgataacttgtaggagactacaattcttcgtttgtcaaatagagttctgtttgtcagaaatagtacaaagtctttgatttctttatttttatttaattaatttgggaatcataatttcggaagatcagttaagctgcccttgatctgttttccaactcacctgtgttttcttgttattttaggactaactagtgaattgtttctttccacattgtaaagcataaccaaaataacagaacctcctttgcagtgtggaataccttgtcttgg

SEQ ID NO: 5150 - DNA, 1025 bp, Zea mays
  Intron number 8 from transcript GRMZM2G083580_T01 (locus G RMZM2G083580) derived from phytozome v7.0 (chr-ID 7; pos 1 70492250 to 170493274)
gaaagttgctaactcttcgccaaaactttcaagaggtatgtattaatccttctcgggttttgtatgtgttccaaatatccaatgcactttcagggttccaaatgatgggtaaacaaaggaatgcaaatgtatctgcatggaatttcacatgtgaattgcagttatttgaagtataaaatactgttgctgcacgaattgcattgctagcgctgagctagccctctacagttccatgtactactatttatgcactaatagtggcacagtgcacacataaggataacaaagtcagacatggacatagggcacgtttggttcgtggctaactatgccacactttgactaaggttagccgtccgaattgaagaactaaccttaggcagaaatgttaggtaaagtgtggcaagttaggcaacaaaccaaacatgccaatagtctgctgctgcaactatgtttttgaacataagagcatgtttggaacgtgggaatattttcctgttcctgctttttttcacatggaaatgaactgattcctgtgaaactgtgctattcttgtggcattcctgcattccaagcagaccctaatatttgaaaaacactgttatatatgaagggcactagggcagacagagctgaaggctcccatatgagggcttgttcgttttgctattaaaccatgtggattgggtgggatcgagtcggtttaaatccatagcaagtcaaaatacatctcaatcccaccgaatccacttcaatccacatggaattgaaataaccgaacaaggcctgagtgaggtctagggaagtgataaaccgaggcaagtctcccccgcaaatgcggagaggctgcttcgtacccacgatctggtgactcagtgagacagctctcaccactgtctcaggcctgccattcactgttatacatgaaggttttttttaatgacgatatgttaacttattgctcatcaaaaatttttctctgaactgcagtctctcaatcctccagtattgatttttgtccaaag

SEQ ID NO: 5151 - DNA, 644 bp, Zea mays
  Intron number 1 from transcript GRMZM2G126468_T01 (locus G RMZM2G126468) derived from phytozome v7.0 (chr-ID 3; pos 1 60086193 to 160086836 reverse strand)
gatctgcctcaggtgatgcccatttgtttgccatgctgtttttgtcccgaaggttgaaattgcacgacagctaaagctagtactgaagtacaccactctaggtttcagggcctctagttgattttggcagggttgctttatgtattcgtgaagtagtggtgactactgatttagcttcatgagctattaaccgtgcatcacttcatatattacgatggcagagttatgtcaaagtgcagcagtatatattgatgttggtaaacaaagctagtcaaattgtttggaatatgctacctgtcaactgaacactgcttttggtaaaatgcacactaacctatgcatttgcacttcttttctagtgtgcatttggttttctctcaatctagtatttccccctgaattatgcataattgaaaggctctcgttccgctgtgtccttcagttttattagggtctgtttgtttcagattatataatctaacttattttgaactaacacttagttcaaaataagttatattatataatctgggcagatcataaacccaaacaaacatgcactgagtaactacgttggctttctcatggttcatgcctaaatgattgcagtttcaaaataaccacaaggaaagtttgtattgggg

SEQ ID NO: 5152 - DNA, 747 bp, Zea mays
  Intron number 1 from transcript GRMZM2G110277_T03 (locus G RMZM2G110277) derived from phytozome v7.0 (chr-ID 3; pos 1 71439816 to 171440562)
gccgccccacatcccaccgcggcaccgccccacaggtaaaccccctcccctgccccttcttctttctcccgctttcgctctgtgctctatgctcggcccgtcggccactctcccactcgcacttgtagctaggcaggctgcaggctgctagcactggcgacctggcgtcctgtagcaccaaagcagagttcgattcttagagccgattagccgaatgggggcagcagtctgttgttccgcgtaagatgttcgacgaaatacaccagcccatagaatttcagttaacaactggtaactgttgtgtgttatcaaatattgtttctataattttcagcaaatgcgaaggtttttctagccactttcaagaggctctggcactggtgctaataataatgtgaataacacaccaactgttggagggacgttcaatccggatgacatagttatagatcccgctttaaaaagataaattgatgaatatgataaagatgtccaagaccaagtgagaagggcatatgttctgaatggtccatgccaatcaaagggtttagatttctcttgttgacagtatggacaaagttcaaggccttttaaagaggccttgttattacccgtctcaacaaagtgttgagagaatatttttggcaatgaacatcattaagagagaattgcgtaacaaagttgaagatgattggatgaatgatttgatggtttgctatacagacaaagagatattcaaatcccttg

SEQ ID NO: 5153 - DNA, 551 bp, Zea mays
  Intron number 1 from transcript GRMZM2G170302_T02 (locus G RMZM2G170302) derived from phytozome v7.0 (chr-ID 3; pos 8 1413955 to 81414505 reverse strand)
gatctctaggcaactggtactgaaattgacttcttccttcaaaattttcagtggtaatctttaggttagctatgtatgcccacggtggactgaaatccttcattatttctatggaataatgatctgtattgcattggcatggggacggatatgagaatgtggactgaaatcctttttctgcacttggaggtgcacaatattgtcaatgttcatacttgctacatacttatgaaggagtttgtttaatgttgtcttaatctatgttaatctgatagtactattattttgagtttgatatctcttttgattactgttgcttttgctaaaaagtaaatttggagtaatgaagcttggtaccgctcgtgtcatgtatatggaattttcaattggtaggggttgctgctaagtgctatttaattgtcttgtgtttatcatattgaactgcttaagatatatgtcagcacttttagtttcattttctctctgctgtcaccttcaatgctaaaatttataatggccattcaaagtgaacaagggaaccaggcatcaaa

SEQ ID NO: 5154 - DNA, 649 bp, Zea mays
  Intron number 1 from transcript GRMZM2G146190_T01 (locus G RMZM2G146190) derived from phytozome v7.0 (chr-ID 6; pos 9 2317527 to 92318175 reverse strand)
gcgctcaccaccaagaacttcctcaagctctgcaagtgagtttctcgcgtctagggcttgttcgatctctctggggttcgtctataatttctgacaaccagcactgcggatgatttatgtactgccctgtgtcaagctcttcagttggccaattcggcatagtagtgtcactattggtttgattgtattttttgggttgcagttgcaataggtacaagttggtgatcctgcatctatccgtagtttccacatcagtttcgtgggattcctagtcccaaatgtatttagctgattactgatttctaggctcgtaggtatgctaccagaaatttcgaaacaattgcgttgcgggtactggacctttatagcgttgatagagccacagtcttaggcgccatcaaaggattctattctgtttcttaggtttctcgttgttgatttttatgacattatgggaactggatttagcttctactgtggctcctgcactcaatttcttgcacagtcttgaattttcaccattggagattatgactgcctgctcttttgttatcactaaattatggaaaatactatctcacgagtttcagattatcgtttcagataattagggtacttattctctggttttcttctttgaccgatcaga

SEQ ID NO: 5155 - DNA, 757 bp, Zea mays
  Intron number 2 from transcript GRMZM2G374044_T01 (locus G RMZM2G374044) derived from phytozome v7.0 (chr-ID 3; pos 1 78723208 to 178723964)
cgtgctgctgaaattattggtaatgtccaaagttccctatatgtacaattctatgccttgatctgttatgacactttccaccatgttctgaccttaccttttgatatatcttagttagaataagttgtggacttaagaactgtgaacagagaaagtttatcttctagaatttacttgtttggatttggatgcagctttgaaagaacaaataaggctgagctaatagaaaagaaggttgtatgtttagtggacatataaatgggtcagttgtaaatccccaaatatcttgagtaatgaaggtgggacatataattaaatagcggacttcaatacaaaaccagattatgtagttggcgccgtagcttgaatcggattatttgcagctgcaataatgatgaaggttgaaggatataacaatctaggtgtatggtgtaattatgtgattgcacttgcagaatgtttttcttttttggattttcctttgatagcatgactttttctccctttgcatagtaacattggacaaaccaatgacaaattggtagatgtggatttgcccgacattgtgatgcactgctgcatcatattcaataacagatgtactacagtatacagataggggatttatgttgatttttgaatctttagtcataaatatatctcgcctaggcttgttgttattatgtcacagcagtgatctgattacaatgccttttttctagggggcattgtaaacgattccctacgtcctcaaatt

SEQ ID NO: 5156 - DNA, 746 bp, Zea mays
  Intron number 2 from transcript GRMZM2G164916_T03 (locus G RMZM2G164916) derived from phytozome v7.0 (chr-ID 6; pos 5 5603939 to 55604684 reverse strand)
ttcatctctgaggggtttcccgtcttcctcgcctggttagttatggttaccttgctgcaaaattgcaaacttccttactccccttctcaatccatagttttcatcgtcagttacatcactcaagtatacttgctttgcaaaagcatcgaattgcctctgttaggcagctttgttttgttatgttaccaaggacgatgggtcggcagtggcttttctcggctttctgcagttcactttcttctttggggacagcagctatacgtctgtgtccctccctttgttgctgcctgctggctgctgcttacctttgttctttgttgcctgttttagatttctttctatataacaaaacagatttattaaatacatcccactgaaaaatccacgatactggaaccatataccactaaaaaaatctaggttttccaaatacggcactaagtacatccgatcatagttagatgacattttgtcttgtaactagctactttttgcactccgaaaaacgacatctacttgtggctggagggtgcagtacagaattttctccttaatggcatatttctccttgtataaatagtagctgcttatctcaaaactgtagaaattataataacggtatgaatctcttaatcaccctgtttagctctccacggcattgccccctcgtttcattccttacctgtcatacaaaatgtattgtgctgtagtatgtatgcactcatttccagtttcttgcagctcta

SEQ ID NO: 5157 - DNA, 787 bp, Zea mays
  Intron number 1 from transcript GRMZM2G052893_T01 (locus G RMZM2G052893) derived from phytozome v7.0 (chr-ID 7; pos 1 41835977 to 141836763 reverse strand)
aggtatgttgacatgctgtcatccacccgcgacgcgcttgctggctccagcttgttcgatgttttgcctgcttagcgaacgatgcccatgctgtgatggttgtgaacttgtgatggtttcccatgaaagatggatcgctcacagcagaccgacccgtcctgtcctgcatgcagtcgcgttcagcctcccaaactgctgcacagagcgcagagccacggccaacacgaagcacgaaatgttgttatggggagatgcaatcgtactaagatgtggcccttatagcaactcaaaaagggcaatgactaatatgaaagtagtcattaggtgtaagtgtgcaagtaactcttttggtccgttctatctggatccactaattgtcatgaatagagttttgattgaaaaataccctccaacagcttctttacttggttacgtaaatatagctatcttctattccagatttctcgatagatagtacacgagaacgaacgacactctagaatgcacccaagataaagaaaaaccgttggagaggggaaagataaaacaattttttttttggaaatagctctcgagatgatgttttagagagggggatgcaatcaaagggatgatgtcaactttatatatgaataaagttctgcaatcatcgaaaattctttatgacgtgttgggaagacatgattgcatgatgtttttttggtctctttctttttcataaatgtttacaatgctgctttgcataaacaaagattgcagagtcccagcgggaattgcttcaagcaag

SEQ ID NO: 5158 - DNA, 908 bp, Zea mays
  Intron number 2 from transcript GRMZM5G841365_T02 (locus G RMZM5G841365) derived from phytozome v7.0 (chr-ID 3; pos 2 19779095 to 219780002)
ccgacctgaactttctctgattcctgattctattggttaggatgccctagcttgcttgcttgttttgttttctgcggaaacttcatctcgctgtgaaccctgaaatccaaatctcccttactgtgatggacgatggatcgcttggcttgttgcagatttgcttgtgcgctttggagtaaagctagtatttaccttccccaagaccagattctcgaggggttcagctgctgagccccccatgccctcgtgataacccgacgctgatagtgtactgtgtaccctgtgcgatctctagtaataattgtagtattcagccgtagatcacttagggtgcgttcgtttataccggatttggccaagaatcgttccagctcatcaactcttatataaattagacaaacaatccagcccgaaatcattccggatgctcaatccactggaaccgaacaggcccttaaggggaagcgtagttagcgcggacgtccatcaatttgcacactctgtacagtaacattgctgttctgctggttctaccccatttaatgcttctgatctctgccagaattttagggagatgggccgcaaaacatagatcaatcgagttggttattgtatggtttatacacatgaacctgccaataattgtttggttctgcagtataaaaagcacctgattattcaacagtacagcttgatagcctagtccttaaaagtccaatatattttcttcttgtgctgatgttattcactaaggccttaacgcttgtctaccattttcaattttgttttgggggaatgctggaagcaggcgaatgctgcaatcatattgcttttactatggtttttttcctttctgatcttggatgtgttggtttatgactcattcattcaaatcttgcagagcagaa

SEQ ID NO: 5159 - DNA, 945 bp, Zea mays
  Intron number 3 from transcript GRMZM2G146760_T01 (locus G RMZM2G146760) derived from phytozome v7.0 (chr-ID 6; pos 9 7943077 to 97944021)
gcgaaagaacatcataaatgtgaggatccaatcatcgcccttctattgattttgtatttgttgtctagatttgtctttgtagctttataggtagccctgttctgttcgtcgattgaagttgttagtcaaatgaatcagggtccatctcaaagtttcctggtacaatcatacaatttgtgagatgtgttatgtctccgactctccgtcttgtttcagtgactgcttcttatctgtgacaagtttgcaagactggatttgttgtatttggagtttctcataggaaaaggtggtcaaatcagatgtcttgtaactgaagaatttggttactggaagttttaatcccatggtgtgaactgtcgaacacaatcgcctcgagttatctctctgtttaatctgaagttgtggtggagatacagttcatcttggagggtctttgattctttgactgggagaacaggaagagatcatcaaagaagacagatctctttagtagtcatgtatactgacaattttcatgtgtagcaaaatctaactattggtcaacccatgctacaatacatggaactactcattttttagggatataggtagaggtcttaaactgaactgctcgtcatagaggaaggataacagttcatgtaagatatgctacccaaattgatgctgtgttagtataaaaaagtgggatggcagaaagatggtaccacacagtaagattcagggacttgggggaaaaaagggccacttgtgctgaaagaagttcacatttgccaaggtcaaattgtgaagcaaaggaccctattcttgacttttcaaataataatttccgctttgtcaagctaattatgacattactttattctgattcccttttgcgccaataatgtgctgttttattccaagtcccttctgactgtatcaagttctgctaatgtgaatctgcag

SEQ ID NO: 5160 - DNA, 586 bp, Zea mays
  Intron number 1 from transcript GRMZM2G070041_T02 (locus G RMZM2G070041) derived from phytozome v7.0 (chr-ID 6; pos 4 0637349 to 40637934)
gaggacgcacggcgtgtgtttccttgccctcggttgtaaggctgcaccaaatctgggccatgttttcacttgtctgagtactgctgcatttcatagcagtttccttatactttagttcaagtaaccttgtactagttcttattgtttctgtagttagcagatgtatagttcctctgatttttgtaactagatattcatagcagtttccatatacattattttacatagcatcctgttaggtgtttttcagaaactgcattgcagacacattgtccatagttgtgggatacttggaggtagtggtagtaatgtcaacttttacatgacttgtttttatacgatgtctaaatacttgcagacacattgtactttgtttgaagttttagagatgttagtaaaacaatttttcctcattgagttgggctctgtttcagactccaagtgttttattaaatcaagtcagttgataaattcttttctatgttggccattgtatggattaatgctatgttttactgaactccatttacatttctagaccaactaattacacatgataagtttttattttggtatgccagcggac

SEQ ID NO: 5161 - DNA, 958 bp, Zea mays
  Intron number 1 from transcript GRMZM2G021378_T01 (locus G RMZM2G021378) derived from phytozome v7.0 (chr-ID 3; pos 1 34087995 to 134088952)
cggaaccttctcacggtgcgcaccgccgctgttctcgcctcttgctgtctttgcgtgtcgtttggttgcggttttcctagttcctttctcgtgccaagagcccaagagtcaagtctaaataatgggttcatggtttgcttgtgctgtgaagatcgaggcgatcaaggttttcagaggttcttgctctggttgtggttttatcactggatcggccttggtggcttgatcggttcatgtatgccaacttgtttattttattttgatattgacctaatatgacatgagcatcgataatcttgttccttctgttcttccccgtcctgctatttatggaaatttgagatgttgatagtactacttcatttgtgaaattcagcaggagacgatgatcttactcgtgtagccacttaaggataatctgagatgttcggacctgccgtgctgcaattagtatatgtgtgtctgttttttttttttttgataaaaaaatttggcgccaactggtggtattcttcctgcatcctggtggagctatcaggagaaatctcgagttgttcagagcatgctctgcttgaacggtagaactatgagaaaaaaaatagcgctaaaatacttaatacattaatatcatgatttttggagattttttttcttttcctttcagctttcagttaaaaaaaggttagcttgagctttggcgtgatcacttgtcttccttgacgaaacatcatggtttgaaacattcaatcttgatatgtaaatggcagcctaggacttttctggtccaaccttttgcaaattcagagtcctgcttggctgctttgactttgtatataatacaagcggcgtctctctgtgatttggattttgtgaagaattagttgtgtgttctgcaaatcatatttttaacctcgatttaataggattcgtttgagctcggcaaacgggggcagtcctc

SEQ ID NO: 5162 - DNA, 998 bp, Zea mays
  Intron number 3 from transcript GRMZM2G086389_T01 (locus G RMZM2G086389) derived from phytozome v7.0 (chr-ID 7; pos 4 5540701 to 45541698 reverse strand)
gccaaggtatgtcttgcgttcttgcttctttgaaatttctgccttcagttatgaaagaatatgatttttctagtttgttgagaggatgcagtaaaaccaaactatattgtgttctatagtcattttttgagactgtgttctacaatcattttgagattgcaatacaaagatgctttgtgctatatagttaggatccacgtttttaagtcattgaggcgttttgcgtcgccggagcaccaataagtcgacttatcaggagactcggacgactaatcgatactaagtcgtccaacttattggttaagtcgtccagacgctaaaaaacgatacatgacgacttaccatgtaagaatgtactgattgcacaaaaaagctgattataatgaagaaagtgacttacttgtccaatatatgtagttaatgaagatgggttggaagcgggctggtccgctagaaccctaaggcctaatgggctggttgaatgctgaagcccaagttgcttcagctagtggtgcagaagaactgtagcagtagtattgttaatacaattctccttgtgtgcttatttgtaaatttcttattcatgcgttttctgcaatttgttttgattcatgccttgtaacactacaatcatttaaacctttcattggtttagtttaaagtcagaatgcatcatacctaacagattaacattatcattctgaatttccaaaagcaaaagcttagatctgctggaacatattagttgtctttgtatttaagcaagtattttgatgaaagcctgataggaaagccacatgttttgagacttttggttttgggatgcaaagttttgcgcgctgcagtatgctgtcatgttgagtacatgatgatgttcagcatattagtaaattttcagtcagtgtggcttacaaattctttggtcacgaatatcaacataatagagttttattgtaatgccaggtggaacatttgctctttactcgttgctttgccgg

SEQ ID NO: 5163 - DNA, 463 bp, Zea mays
  Intron number 1 from transcript GRMZM2G086389_T01 (locus G RMZM2G086389) derived from phytozome v7.0 (chr-ID 7; pos 4 5542298 to 45542760 reverse strand)
gggcattcattggggctttgttctcagtttgcaaggtcagcaacagattctctcttccattgttggtagatactgcggaaatggaaccagaatttgatcattccctgtttcctttctattttgtttgtcatgagaacctgaaattatgcatgcttgttttatttgatcaccttttttccccctcccgccgcactgtcccacatcatccggaagtagtggaaatcaactttgttctttggatggctttatgttcatctgctgtggatgtttgtcgttagaacaactatgtgttaatctcagatatcctgaattctggttgttacctcacaagctaatggaagtttgataccgaaacagattgccatcttatcccttctgttgctgctcaagattgttatcaccatctaatagactgatatgtttttgatgcctgcaggctgcaaggccgtgctagtttgaaccc

SEQ ID NO: 5164 - DNA, 606 bp, Zea mays
  Intron number 1 from transcript GRMZM2G022841_T01 (locus G RMZM2G022841) derived from phytozome v7.0 (chr-ID 3; pos 2 27939102 to 227939707)
ttttttatacttgctttccaggtaattctttctcctgaagtgcatgaagattatttttgagtttctccttatgaatattaagaagatatgccttgtctttccaggcaatgctcatagtttcatggagttcttctggatctctttctggaattaccgatggaactgttttaaaaaatgtattaagtgtttttatcacagcagctctactcaactttataacaggtacatcaatattttagtgcattgacctatgcacaggcactttatttatgtttaaagtaaaatatgtttacatggtataattcaaatttctggtttctacttctgcagtaactctggatataatgtttactgtacaagcatggggtagtatggagtggacaaagttagtcagatatttactaaaatttgttgtcgccattgcttggataattattcttccattgacctattctagttccatcaaatacccatccggtgctggcaaaatcctaaatagttggattggggattggtataatcaatcagtttataacattgcgatcgtcatatatatggttccggatattcttgctgccttgtttttcttgttgccacaacttcaga

SEQ ID NO: 5165 - DNA, 785 bp, Zea mays
  Intron number 2 from transcript GRMZM2G004382_T01 (locus G RMZM2G004382) derived from phytozome v7.0 (chr-ID 3; pos 2 13625858 to 213626642 reverse strand)
tcaaacagatcggtgtaatcggctggggctcgcaggttaaaaggccggcaaactctattttgtctgacggaattgttcttgtttgtgtcactaccgtcgtttacttctgtcaaatgtttagcgttattatatctgagcatagataaaattctttgtaagtacccaaatgatcgtgtactctttgggaactacaggtttagatttagattatatggctattaacatttttgctcggtcggatgaatatggtaggcccaatttgcttgatggtgaccttgagtgttcactgtgggcaaaagaataaaaacgttgtatgctattattaatcgattgaaactaatatcgaacaatacagcgcgcatggtctggcttggtccctgctattgacttgagtgttgctgtgctactgttactatatatgattattaggtatagtttggtttagtaggcattgatattgacgttgctatgtttgttggtgttggatgcagtgaatgccttccctaatggcagtatctatagaattatctagactagatgtaaatgtaccaatctgtattttcttgttaattaattgtttaagactttaagttatagttgttagtttgttaccattgatatttttcccatctacttttggacacgatcttttctttttctttttctataaattgtgtagaagattcgaggcctctgcacattgatgaaaaccatgtgcatgcagtgacatagtcattattaattttgcagggtcctgcgcaagctcagaacttgagagactcact

SEQ ID NO: 5166 - DNA, 914 bp, Zea mays
  Intron number 3 from transcript GRMZM5G838579_T01 (locus G RMZM5G838579) derived from phytozome v7.0 (chr-ID 3; pos 2 19782680 to 219783593)
ctaaacggcaacagcttgagtctaaactcctacaggttcgaccatacttttgaactattgtatttgtatctcaagcacatttgatccattgtgtgaatttgaaatatattgtacttctccacacttgcttcatttacccttatctctgaaattcctatgtacaaatacatactttctctgtttgtgaatgtatgttgttttctatgtgtatgtgaataatcttcatgggggtaactttggctactaatagcacttttaagctggtgaacattatgaaaatattgtacttcacacttgcttcatttacccttatctctgaaattcttatgtacaaatacataatctctctgtttgtgaatatatgttgtttacttgttttgtatgtgtatatgtgaataaccatcatggggtaactctggctactaatagcactataagttggcgaacattatgaaaataatgtatgatgagagtatctttttgatgatgaacatattcatatcagtctcggttattgtttatatgttgtagccaaaatttaatttctcactgacgtgttcaaatcaacatacacttataaactgagttcaagagttaccgtaagtatttatagtatcactcatgtatctggaatttaatctggggaacaaatattgatgtacatttcctgagtacatgtttttaacttgttagtggaagagcgggaaccttttatctaaattagtacccactacatttttgtgcattcatttcttgtcttgtcatgattcttcaatatatttttgcttacacgtttccaagtttgcagcctttttttgcatttttgatttatttttattgttctgcttatactaacataccaatgccttgtctttgtagcttgtcaatcctgcctatcaatctcttctaggtca

SEQ ID NO: 5167 - DNA, 771 bp, Zea mays
  Intron number 1 from transcript GRMZM2G001327_T02 (locus G RMZM2G001327) derived from phytozome v7.0 (chr-ID 6; pos 1 36694918 to 136695688 reverse strand)
tgtgcgcctccatttcggcctctgtcccttgcaaggtagctaatcctctgtcgctcgatctttgtccttgaggtgctcgatgagataggcagtggttcaaagctgtgctctgttgcctccccgtgcctgaagtgattcggtcttctgtttgcgattaattgtagctactgcgtctccattctcttagtttttgtggttttgtttgcttccgtgtttggatgacctgattcttacggatagttgcttctggatttgataaattacatacgcaccgtgccaccgtagttggacgacttcttaattgcgcttgcggtcgtgttacgtggtcttaataaagtcagatcgaatttttgaggtgtagagctgctgtagtttctatttgaccgatacttgtctttgtagttcatgcgcagtaagagttgtaacctcataatatgaccaaattcctgatctgctttatagagttgttgtgcctaattttgaattcgtcttactggctcaaaatcatgtgcgcacgcttattagtttgccctttattttctatgcctgctttattttttatattacattgattgctctgtttaatatttgcttctttatttttacactgcttatgtgtatcaagcttttttcaagctcataactccggcgacaacgttagatctagtttctgatcccatccgataaattgtgtcgttactggtagtattaatttactagtgtttctaatcattgattcgtcttgttaacagttcaatctcacctccaacc

SEQ ID NO: 5168 - DNA, 743 bp, Zea mays
  Intron number 1 from transcript GRMZM2G406315_T02 (locus G RMZM2G406315) derived from phytozome v7.0 (chr-ID 7; pos 1 39707837 to 139708579)
agaaggtagtccttgacgcgttcgagcttgagtaggcgaaggcggcactttgagagcggcgccacggcgaggagccacgccgccgcctcggagcccttctgtcgcttctgcttccaaccgacacgggaaggggcggcgggtggttcacatttcttctctttcttctcgtctccctatttgcggtcgcccgggagaccgggctgcttgcccatcccgccaggagaaccatgtcccatctccggcggccgtgaattagggtttggctttgtgatctgtgtagggatctagctatatgtgatggtgcttgtctagatctatgtttgttaagcctggttcgttgatctggtgagatggtgcatgatcgaggtttgattgttttaatctagaatgttggatagagaattagaacagggattagccgaaattacgcattattttccatgatccaatgaagttagtagttatgtagcataattgttgttgatttatgccaatatgtgtgttagatctgagtgccctgaaatcgtttaaatgcactggcattcacgatctgtaaattttcataggccaaattcgtgttgcctgtttatgcccttgaagtatggatatagagttagtatgtttaatgtaaaacgatgtatagtacatctattcgtactattattagatattcaaaaaaatgaatacatattagcattagaccctttgaaccaattttattttgctatttagatctgttagaa

SEQ ID NO: 5169 - DNA, 989 bp, Zea mays
  Intron number 5 from transcript GRMZM2G530440_T01 (locus G RMZM2G530440) derived from phytozome v7.0 (chr-ID 3; pos 2 09629500 to 209630488)
tttcagcggtttcgaaaacaaggtacaacatatgtttacgccttgcaaacacattattcactaatttttctttttataatgattcatattgaatatttaaatatgctattctagagtgtctcgaatcaactgaccatacaacaatacacttcaaactgtttcatcacaacacccattattttgaacgtaagtattttataagattacctacatcaaaattatgtacttgttttcattatattgtgaactgagtatacatgtgattaaatgttgcactcattgcagcaattcaaaaggctttggtggcacggaacgatcgtcggtttgccgttagatatcttgacgaccaaaggcgtagatagagtctgtaacttttgcaaatctgaattttatgatggaatacatgtactgttattgatgcaacttacatgtgtcaagatttgtaaaacattttgttctactgggaaatatcaatgaataagtggaacatcaaattgtttagtccgtacgttttccatttagaacactatattggtttcatgttgtgtcatgtttgacattaaaatcgtaacttcgctcgtgaaattacgtcaaatatacagatcaaatctggaacaaatttaatgtacattcggtataccgaagcccatctataggagctaggcgtgctctaggaagatattccacatcaccagagttttgaaaacaattacttagcgtgtcacccatatccatctatgcagttcaaacttgtaatataataaaatatcttatacggacaccaaaatcgttctcctatcacctctctctaggttttatctctgtactctcggttatgatgcttgtttctacaacctctattaccaagggcatctttttttatcttctattcgcttggtttattgcagtcatatcattgcacccttggttcttgcagtattattttttatgctcatgttttctcgggtactgttcttgttatagatcag

SEQ ID NO: 5170 - DNA, 839 bp, Zea mays
  Intron number 1 from transcript GRMZM2G402862_T01 (locus G RMZM2G402862) derived from phytozome v7.0 (chr-ID 6; pos 8 3537967 to 83538805)
gggagtccgcgctccgctccagggccaggaagagggtcagtatagtaaactcactacacaaaaacatgtacgtcggtctgtactataaagtatatatatacaaaacagatcgtacgtttgtatttggatacagtacgtttttgaatgctaccccggcctcgatccttcgtttcaaactatagatatattttttggagctggtggagagcacttatttccaagcctaaactaaagcatttacctactactatcacgaagatatataaatatatatatatatatatatatatatatatatatatatatatatatatatatgttttgtttggatatatatatgatggccaccatcgctagctctatcatcccagtagaaaaatctcaaacagaagctatagttagctaattattaacgctagctgatcaatgatcatgacgatgagttcagttgtacctgcccctcaaactagagtctgaagtctaagcacgaattgattcatcaatatcacacatgcatatcagcgactacgtactgatatagaatatagttacatgtagtatgtaatcagctatatatgctttaatcagctagctaattattagggaaccaaactacatcagctggccaaacaatctaccatagtttgatcagaactttgcattgctaggtcaatgaaaaccaacatcccaaccagcagcagcatggtcgacgacctgaaaacgaaaggcccatgtgttaattagtttatatctcgattaattgttactcattgctaagttttactctctgtgtggatattgcaggcatacgtggagaacctggagaaagaggttcgccg

SEQ ID NO: 5171 - DNA, 689 bp, Zea mays
  Intron number 1 from transcript GRMZM2G141289_T01 (locus G RMZM2G141289) derived from phytozome v7.0 (chr-ID 7; pos 1 67639889 to 167640577 reverse strand)
gatcctgcaccgctggtggtctcccggcccgtcaggtgactcctcgcctcgccactccctgcatctctctactagtctatttcccgtatacgtacatgcttttggccttttgggtgtgggggagcgcgggcggtggtggtgcggatagccggcagatctcgagagctcgatcgatcgtcccatgttgggtgagaaatgatgaagccgtgattggagagggaggagccggtggatttccgacgatgaaaagtttcggatggatcgccgcctgccgacaactagcattgcgcctgccgtctcgggcgtgggcgctcctgcatgcggtgttcggtccgcagcgtgtggcatgcgggccgaatccgaatcgggcatcacgattcaattttggtgggctaaatggatttaccactgggcctcgccgcataacaaaacatacgagcattcgggtctgtttggttcgctgtctaacttgtcatatttacctaatttttttatctaaagttagttctttaattcaaacgactaacattagacaaagtatgacacagtttgccacgacccaaatagtcccactttctttcagtctctggcactacttaacagctggatactcgtgcatttttttttacatttttttgtcacgcagatcctgatatatcttcaaagataaagagagaaaatcataacag

SEQ ID NO: 5172 - DNA, 618 bp, Zea mays
  Intron number 4 from transcript GRMZM2G099186_T03 (locus G RMZM2G099186) derived from phytozome v7.0 (chr-ID 6; pos 3 1413207 to 31413824 reverse strand)
cattcattgtatgttctactacactcaggctatctccaaccattccccctcccaatccctccatttgtactttctattcatatttaaatacattcccctcaactattcttccccctattttttctcctctccacccattccccctattcagctccccctttactctttaactgagctatttgccttatatatatatatatatatcactttttggattttttaaataatactaccatatttgtagtaccgtaatacacattgttatctagtaattatacttaaaaagattaatttcacagttaaagcactgattaacgaattgggaggatattagatctccctcgtgtacagggggcgcagaggctgatacccttttgagagggtccccgagcgtgctccgttggagcggcctggggtatacggctccctccatttggtcagggggagcggacgagggggttccgttggaaccagcctcagttcaattatgcaactgttagatttttaatgttagcttactcgtattatggaaattgaaaaaaacatttattttgcacgtgacattctttattttgtccgatgttttgattgcaaaacaggaattcagtgacccccgtg

SEQ ID NO: 5173 - DNA, 504 bp, Zea mays
  Intron number 2 from transcript GRMZM2G175782_T02 (locus G RMZM2G175782) derived from phytozome v7.0 (chr-ID 6; pos 8 8731811 to 88732314)
catcggtacagatcgcagctagagcaggaagtgtgttttccttggcttatgaactctacaattctgaatttcgtagcatgctgttttcagttgaaaggatcccgctttgtttcgagctgtgatgggctctgttcctcttaaatggaagctggctgatgttggccgtggtgggcatgtggttatacgaaagttgaaaattgaagtcctctgatgaaatccattctctaaaatttgttccctgattatacgaaagttcgtcaaaatcatgttcatttttaactcatgccttcccatgtgcctttagtttcatcattaacagcaccattgtagttcaagcagttttccttgggcgccttttctatgacaggagaatatttttttgcaagttcaaaagaacaaaaaagaagatatttcttgatgtggttgtgtactgactgtgtaatgctctactcttgacatacctgtacaggttaacaaattgcaaaggcaactccaagaagagat

SEQ ID NO: 5174 - DNA, 317 bp, Zea mays
  Intron number 2 from transcript GRMZM2G122595_T02 (locus G RMZM2G122595) derived from phytozome v7.0 (chr-ID 6; pos 3 0112696 to 30113012)
aaaaggatcacaagttatatattccgtcaggtaattttctgacaacttatactaatctacgaatccatattcttataagtttgaaagcgatcttccaaactcaaggggacgtactgttatatgcattgatgtttgcatgtcttgtgcaacctctttgattctgtaatctgattgagtgttttaatctatcttatagttggttctggttgcagtggtaccagaaaatgcatcataagctattttttggtcttatatccttagtttcgtgtgctctattcatagattcgacgattgagaatacatcaaagaataaaaat

SEQ ID NO: 5175 - DNA, 897 bp, Zea mays
  Intron number 1 from transcript GRMZM2G030902_T02 (locus G RMZM2G030902) derived from phytozome v7.0 (chr-ID 3; pos 1 51293896 to 151294792)
ttttttccgccgattagtgtccaccaggtacgcctctgtcactctccccttcccttcctgctgcgcggaactgaagaccccaaaccctaatgcgagttatctctattcggatctgccccaattgcgagtatacacatggcgcctgctaacttcgagttttcgcaaacttatcgggtgtacacgtgtcctatgctgtgtccgccccttgctactacaacgtgtttatgattctggcgcggctaattttctaaaaaaataaaataaaattggggtctcagttccacttccatcccccatgctccatgccaagccttccatgacagaggttgttggttgtgttggcacgggtgactcatccggaattgggattttgccctgggggatagtttctgaaaactatctgcgtttagtgtaagaactatgtgcttaggtcctgagagatcaatttggccttgggcatgagcccaaaatctgcggaccatgacactgtatggccatcacccacttgacttattgttggatattaactagctttattatctcagtggagctggatagagagataggttccagtgccaggcaatacaatgtttctgcttcagagcagcatatatttcgtagacattatcaatattaccgctgttctctccctttgcattatgattttgttgccatcgtttattgtatacccagttaaccatcattgaacagcatttatattattgctcattttctgtttcgtccccagctgtcgagctcagatacacatcctgcttatccagctgttatttgaatcttatatcttgccattgactggttatgtggccatgagacacttttactaaatcataccaactttcagatctagtgaaggctggtaacttgacgcaaggtgtt

SEQ ID NO: 5176 - DNA, 659 bp, Zea mays
  Intron number 5 from transcript GRMZM5G818058_T02 (locus G RMZM5G818058) derived from phytozome v7.0 (chr-ID 7; pos 1 45180215 to 145180873)
ttcacataccgtaacctcgtcttccagccagacaggtgaggaacactgttcttgcgatccccttttattgtgttacagtttttttattctgtacgcccttgtctttcttattccgacaaatatcatattgttcctttctcccccccccccccccccccccctgtaacttaaaaataatcgcaagtcatgacccgatatcagatagcttatcttctgaatcagtaaacttttcagttatgcaagacatgtcttgtcttgcttttggcagatatgatctttgatgactcttttgatgctgatatggctttacgttatgtcatcagtcgtggcacgaaaagatgtaatgatttatgcttcagtctctactgaaaataacatcttcagggacatgttgcttttttagagatgatcttgtactgattattttgttacgaacttctctctaaccaaatcatcttcacaacacaaagacagaaaactcttctcctgtgtatctagtagtagaaaaaaatactatcgatactatgcttgcataaattaaagagtaagaactggctatagtttggtagatttccatttatattcttatcaagttctgtgcactgatggattacatactcgcagggaggctctgatcggcaaaatcaagagcacttaca

SEQ ID NO: 5177 - DNA, 846 bp, Zea mays
  Intron number 1 from transcript GRMZM2G427337_T02 (locus G RMZM2G427337) derived from phytozome v7.0 (chr-ID 6; pos 1 44118372 to 144119217)
gttttattgtgagtaggttgttcgtattgttttgtgagatgaggtgcactttgacactgtacaatttccactttaagatgtgtaaatggtgaatctttcactgttcctttgcttgtttctttctcatcaactttcctcagccgtaatgcgggaggtgtactgtaggttatggaccattgccttctggctttttttgttattgttagtttttttggtgcaacatagtattttaatatatcagtacgcataggttggatataagtttgttaggaagtatacgtctagccattttcatttccatctttcacacaactgtaatttatgactctgaagaatactgcctttctctaatgaattctcaaagcctttttctgggtgaataatgccagcagccagctcacagaagacatgaaagtttttattcaaggatcataactggagcgaaatcacaactacaatagagcaaatagttacagctttgagcatctgctgtacatgttctcattgagaacctccctgaaagttactatacatttcttttgtggggttatgctgacaccaagcacaggcttttgtatgtgacaactcaaattctgccgtttaaatgtccattcaatctatcaatactctgttatagaaggacccttgctatatgctaaaggatgtgacaaatgaactgattttttttcatgggcaagatacttcatattttgggggcttagtgcaactaatgattttaaaagcttgactggatttgaattgaaaggtggaagtattaatacttcagtccgtcatgggtaatttcttgcagtgcttcctccaattcggaacactaataatcattct

SEQ ID NO: 5178 - DNA, 1021 bp, Zea mays
  Intron number 2 from transcript GRMZM2G054136_T06 (locus G RMZM2G054136) derived from phytozome v7.0 (chr-ID 7; pos 1 66377676 to 166378696)
acgaccagaagctgtgagtgtttcgcgtcctccatctgctctgtatttttcgtttctcttagatccgtgggagtggtgttttgcttcgagcccactttgtagctgatggtgccttgattgagtatttgagtgctagtacttgatgcatcggtttgttctatgtggttttgccaacttgtcccttgtctcattaataacccttcctgcttagattcatttacttaggctgcttgctgttgcccactggaccatcttatacttcctatattcatatatattagctttattatccggatataatataatgccttgtatgcaacagtaaattaggaatataaaaacatacatgattagcatagtcttctgaggtattgaatttttagatatacgccacccccattttgttgtttcttgaatggatcattgctggtttttttcgtgtccattgattaaattaggaaaacatcttgatttgcgttaaatgttgtttaaatcgtgttaaattcatgatttgttgaacttaggagcagggaatcgtttgattgccgtgttttaaattgtggtgagaattgatatttcatataggggcttagagcaacttagggtaataatttatttctagaaattatactgacttaattcaaaatggtggtagatcaatctgttctgttttatttgtttgaaagaggactttactatctagcttttgagttaatgaaaatgtcttctctgaagttataatctattccctctgtcctaaaagcatactactgtgttaaaccattttgaatttgactaggtttatatgaaaagtatcattatttctgataccaaataaatgtcattagatttgtcacacttttctataaatttctttacactttagaaagtttctctagaaatagagctatacttgcgttttttattggactgaggtatcaaataaacatgctatttcttcttggtcttccttgcttagtttgctgataaaccttttgtatcaactataggcgtgcctttt

SEQ ID NO: 5179 - DNA, 660 bp, Zea mays
  Intron number 4 from transcript GRMZM2G116939_T02 (locus G RMZM2G116939) derived from phytozome v7.0 (chr-ID 7; pos 8 8676681 to 88677340)
aacagagcccttcagtcccaaagttaacgtagttggtaaaccccttcttctgctccctcactcacagatattactgtagtcatagggttctgcttcctaactgctgcttggataatttaacgccgcttgtgcggcaacctccgcctatatcgggcctgcaatagataaatcattaccttgtgggtcaatcacaaagctttattagtgatgaactgatgatcaagatccggagcatcttcaaggttcagtttcctttatttgctaaattgggttatttgttttgttttgtaaaatcagaatttagaaaaccatgacctcgaaacagttacgattaagtccgtgtaactcttctgtgtgcttgttgtttgtttgctctatagtgattttctagtctttctgccgaactcattgcaaatactacagggcaactacaacttggatgcatacttttctgctcttaatgaactgacattttttaattgtttgccacatttggtgcaaatggatctggcaaatcaaatttctttcatggtaatcttaaacatgtggtacagtactgctatattattattattattattcgcatatgctcttatgcgagaatattattttgatttgtgtatgcttcatacaccagctatacgatttgtcctgagtgac

SEQ ID NO: 5180 - DNA, 944 bp, Zea mays
  Intron number 1 from transcript GRMZM2G083243_T01 (locus G RMZM2G083243) derived from phytozome v7.0 (chr-ID 7; pos 1 60032661 to 160033604)
cccaggtgaatgctcgactcttgtcgatctgccggacgcgtgcctcctgttccccccatttttttttgttggcagcgcgcatctgtcgcgcgttctagggagccgggtgctcgaaattctggcgtgctcgttcgtcgcatttccgagatgtttcggatcgctgcgttttgtgtgtgttctaattcggtggagcagacgatgggccgggtaggtgtgtagtgatggtacttctatgtcggctccgtaattttggttcgtttgcgttgtacttctagtctggtcctttgcgacggggtttgtttgggtcggatgtgttgtggtttgttgggttttggtacattttttgccggttgttgagagattgcaatgcatgagccggactagatgcgacgtttcctaattaagggtttgcgctagcattttttggattactattaatactaggcctgccaattgctgcatctgttcttttcctgcgaattaggcaggcgacacagatgacagaacgatgccttgaggtcctcagaggagcgcacgtctatgtttgtgtgcttggggacagatagagtttccaactatgtaagacgcaagatctgaagaattgaatctgtggggatgcttaataaataatataaccggggagctcggatgagtgtcagactctggatctccctggattcacgagtttcatcttgtcctctgttaaaagtggcatgcttctctctgtttgcctgattttgtagtagcatagaaaatttgccctaatgctactctgcttgataatataaaattctgtttaggaccctgaggagggaggttgcgtaagctataattactcctttagctcatatgccaatggttactaccttactagagttcctcgctatacatttttttaacactggtttgattatgatgcagtgatacctcggttggcgtcgcac

SEQ ID NO: 5181 - DNA, 662 bp, Zea mays
  Intron number 1 from transcript GRMZM2G138074_T02 (locus G RMZM2G138074) derived from phytozome v7.0 (chr-ID 3; pos 1 87711473 to 187712134)
ggtcgagtccgtctacaaagccgtcaccgcgcctggtacggtaaaatcactcccactattgccttcctccgttgctggtgattaatttccaggtggattgaaagacaactgtttgctttttagatggattattactacccgattcgtggaaactgattttttttcgaaatctagttcatttcttagaaaataggaatcttactctgtaccttactgtataactcattattaattagagtggaaacttgttctttttttcctccttactgtacaactcattattactgcaactcctttctttgtcacttgcatattatttctattttttcaaaaaaattagtttatttttatttaagaaaatgggaatatcttaaaaaatgaagttaccaaactagctctaactgttctgcctacccagttcttctccaagtgtagctatattttgatttctgagacagagttaggttatatgtattatcttggtgggaaaaacacgcaatatattgtgcttaacagataggagaactacgttatcgatttcattgaatcattgagctgtttgttctcaatgaaatccttgcactcagagagcacacccttattttccctgcttacacgcaggcagtgcagggaagccgttggttgtaaagaaccacctctcg

SEQ ID NO: 5182 - DNA, 942 bp, Zea mays
  Intron number 2 from transcript GRMZM2G533031_T01 (locus G RMZM2G533031) derived from phytozome v7.0 (chr-ID 6; pos 6 9082069 to 69083010 reverse strand)
gagctggtggagaaggtacaccaaacaatcacttaggttgtctccaatagagcgtgcatatggccatgtaaaacactctttttgtatcgtagattacactgttcatagagtggagtttgaaatagaaggtgagatcggaagtctgctggagactgcattaagggcttatttggtaaggttggactggagaggattgaagaaaaattaaatcttgtgctagttgaaattaaatagaaagagattttatcatgctcaatttccttcgtccccatgcaacggaacaaggcttaaggtggttcatgtggcatcgcagatattaaagcaacccctagcaggtatactatccctaaaatgatcctcttggacaagctttgtgatcaacgacgatcaagttcaaaaataccttccaaacgttgtgtgcagttgtagaagttagaactattcccttttacaaaaaaaaacaatattgcgatgaaagggcctttgatctagtcataggactggcctatgttccaacttggtgtcgtcgtacattattttctgaggatttttttggataaggtaggatacgtgttcggtggtattgtacgtttccctttgactggaggctacagagttccaacctttttctttacatacgtgcgtatgggacacgcctgtgtgtgtggcatggatgcagagtgtgtgttgtgttgtgtgttctgttgtactctaaaaaatcatttcaagacagagatacccttaggcagaattttaatgtgaattcttcggtattttgtatctatagattatagctgcagtagtatctatagattatagagtattttatatctggtttggaattttctctttttttttgtgtgtatgcgtttagttttgctttaaggcgctgtagcattgttcttaggcttcatataattttggccgcgtggattggtcaaa

SEQ ID NO: 5183 - DNA, 830 bp, Zea mays
  Intron number 1 from transcript GRMZM2G066293_T01 (locus G RMZM2G066293) derived from phytozome v7.0 (chr-ID 6; pos 9 184949 to 9185778)
cgtcgccggctgctcaaaccgcaattccgtcggaggtaatcgccagagctcttcccattcagaggatgcctgatgcgtgccttgtgttcaaaattcgatcttggtgattgacgagttgtctccctgtcggtttttttgggggattttgacttcactcctaaggtgttgcctaatcgccgttgattttgtcatacatagttgcggatgctgtaaggattgtagggaatactggatcttcacaattgagggagagtttcagggaaatagatgaattgtttgcataacagtgctcgtgtatgttcatttttcctcatttttcttaaaaaaaacttagcttttgttctatagatttttaaaaggctgtttgccattttgttgtccatcttgcttatttccgattatttaggttcctatggttgtcaatcatttaatgaagttgctgaagaggtagtactccttagtccttaccattacttgtgctaagcacggtgcttgtaaagtagtctggtaacttcaactgatgaggaaatacagcacaacatttacccatgtgttgatagcactgtggtttggactttggacttcctttgctattctagaggaatactgtgcccaaagtgcaacaagaatccatagttctgtacacaaaccatgtatgcttctgtaagctgtaacacagtatacaattgaaatatggtaatgttttctgagtgatattatatcattatctccttttttcccttgccacgttgtaatgtgggaacaatagcatctggcacaattcttcggtcaaagaaatacttaccactttgtcctctattcatcagaaa

SEQ ID NO: 5184 - DNA, 726 bp, Zea mays
  Intron number 2 from transcript GRMZM2G085005_T01 (locus G RMZM2G085005) derived from phytozome v7.0 (chr-ID 3; pos 1 89653600 to 189654325)
aatctcaaggtaaggagatagcccagtgtcaatttattctcgtgaacgcggcgcgctttgttctgtatgagcttggttggcgttgcttcggcgttctcgtttctgaatcgtatagatggtttcagattcagcacagttatgtttagacattatatgtattcgtattccattctcatggctacatttgaatctcaaaatcttcgatgtctgcattagactgacagcacgtattcgaggcagagttatcctattgttttgtttgttggatgaagttttatgaatattttgttgaagactgacagctaggaattctacaagaattctgatcatagtattgtagctgctaagcaagtaatgcacaatcgaatatattggcccctcgtctagtttaagctcatactagtcacctcagtaaaataactacatgtgatgagtgttctgtacatgcatatcttgcctgagccattgctaaactaaaccacaatattatagttgtttctgttttgataattgcttaggactcaactggtttgtccttgtcagtttagactgttggctcagaacttaatgtatggctgtctgctattattttctacttaaatactcttatgttgtaagcctattactgaatgctcaaggtgtagtatgcatcatatctgttgggcccattaaaccgttttctctgttccaggcgaggagggtggagctaaagacaaggcaagacac

SEQ ID NO: 5185 - DNA, 770 bp, Zea mays
  Intron number 2 from transcript GRMZM2G011169_T01 (locus G RMZM2G011169) derived from phytozome v7.0 (chr-ID 6; pos 1 50521085 to 150521854)
atatctggcagaccaccttcattcacctatcggaggttggagtgaaatagtaaatcgttgtcatcattgatattattaagcatttgcgtgttgcgttcttcatggtgttgttgctcgcttgctttttagttcctctgtagtaaagtgattaagtgactacatagtggttgttacttatacattgttatgtttctgttgatgctttactaaaacttagctgatgcattcaatttggctatgcaattctatgtgtttatggctggtgcacaaagtccaaaagaaaatagtactccatctggtccaaattatagttcacattaagttaaacttctttaatctctaccgattttttagaaaaaattattaacgcttcaagttcaaataaatgtcatatcaagacatattacattatgaatttaacgaaagtaatttcatggtttatgctaagttagtttgacttaagataaagttaaaggagtacaatttggaatggaaggggtatttcattattgtgaacatatgatgtatatagggaggcaaaagtagtttttcatatgtccaggaaatgtttggctcccattgtttcatttcagtattctgcaatttgtggccacacatatcagcttgatataccttagagatcctcatatttttaaattagggccttgtaatacaagataaaaactgcaatgttatagagttttatgactgtggttatctttctcagtgattggactattcatattgcaggcagttgtacactgttcgtg

SEQ ID NO: 5186 - DNA, 940 bp, Zea mays
  Intron number 1 from transcript GRMZM2G047045_T01 (locus G RMZM2G047045) derived from phytozome v7.0 (chr-ID 3; pos 1 88319687 to 188320626)
taaccaacctgactgctagcatcaggagcaaacttatcagcgacgaccagatcgaatggcaacataagggagacacccttctcctttgcttttctaaggagagaggtcgcaagctcaagcttgtcatcttcaaccaaggaagaacctattgagtgcccttgtgccttgtaaaacgtgaagatcataccaccacccagaagaaggatgtcacatttctccaatagtgattcaataactccgatcttagatgacactttggagccaccaataacagcagcaaatggtcgtttggggtttgaaacagctcctacaaggtaatcaagctcctgctatttttattttgtgtagaagatcaggaaactgaagagacaaacctgtgcatgtaagagaaatacaggaaaataaaaggaaataatagcatttgctctttaaacttttcatggttaggattcatatattgacataaaatacacaaaccttctgcaaaaggaaccctgcgactgagactgtctccagcaacgtcctctatatacatcctctatattcgtcctttacagtcttctctaaaagattctaccccctatatttatttcctctccaacaacgtcctctaaatcacgtcccctatatgtaaatacatatattaaagacatttttatttttaaatttttgtacatacgtgtttgtcatactctcaaatgtattgtacatattttagttttactaaaacggttgtttaaagtattcaaatagatagagaaccgtttagaggaactctatacatagaggatccagcagcgtcctctaaatttagaggaccgtttagaggacgctgctggaggggtagaggacgtcttcatcctctaaatttagggtacaggaccctttagagctcattgttggagctagtctgagggcttcaagaacttggtaactccct

SEQ ID NO: 5187 - DNA, 1030 bp, Zea mays
  Intron number 2 from transcript GRMZM2G098415_T01 (locus G RMZM2G098415) derived from phytozome v7.0 (chr-ID 3; pos 1 2036890 to 12037919)
ctgaccttctagccaaaagggtgtggagatttgaggtatctagctattaatttatatttatctataaaaacaaaaacatacttgtgacagtcttgtcaatagaagtatttgcaggtttattgtccttttccgatggatgtttcagctcatatataccaaaaagatttcccatggttaaaaaacaatagcagattaaagttgttctcatgtatggatgtgtgattggttgctctttttctttccgtagttagatgatatggtgaatcgaggataagtgacccaaacttagacatattatgtgttctgtactttcttatcgtgaatagaggacaagtgacccaaactttagacatataatgtgttatgtacttccttatcatgtacctatgtgcattgtggtgttgttgtagccttaacaaggggttatactttgataatgtgtagtagttaatgtcatatctttggtttatgttctacaggtcatcaaaaaccacatctttaagttgcttcccatgaaattcctaattaatcgagccctaaaaaccacacagacacttgacttatttttttggatcgtcatttttttattgacccaaacttaattttgaaaatatttaaactaacaaaacaaactaagatcatttcactaattgtaggtgctcatttgttatgttgttttggtacattctatatgactgttggaccactgcattgggagttgcgacctattcaactgttaggcacttattggtttaagacttaagggttctgttctgatatagattggaatgtatggacatagctggctctttgatgttgtatatcgttttcttatatgtttacagatgattttaatcagtttccaaagtattgactgattactaatcagtaccagttcgatgttggtttagattccctttttgctttagtgcatttaaattgtaaccactataccttcttgacttctatggatactttttaaaaactttttacaggtgatttttaaactctattctattatttcttttaa

SEQ ID NO: 5188 - DNA, 283 bp, Zea mays
  Intron number 2 from transcript GRMZM2G540292_T01 (locus G RMZM2G540292) derived from phytozome v7.0 (chr-ID 6; pos 1 00612163 to 100612445)
gccttgtgagtatatatatgctgaaaaactcttttactgattcttctccttctcgattctggccttttctgctgtgttatttttttcttttgaatattgttgattacatatcgccacaagttagcatcagtatactcattgtcttttttacatgtaattgctcgtgattaaataaaaatgtagaccaaaatcacctagagttcaactacttttgtttgatcgtctgtttggtctaatccttataacgaattaacttgcaggtacctccgggtcatcaagttct

SEQ ID NO: 5189 - DNA, 740 bp, Zea mays
  Intron number 2 from transcript GRMZM5G809292_T02 (locus G RMZM5G809292) derived from phytozome v7.0 (chr-ID 7; pos 1 45148667 to 145149406)
ggtcgtttttgcttcagaaaacgtacaaggtcagtcatttcatatcaaaatgtccgtgttcctatgaaatgaatgtcttcctataaaggcacacattaggcttctttgacaagcatattagatttttttaatgtaaactaatcatgttttactcctctgtaaaagtgtgaaaataaggtgtagcaacgtcatcgtccattctaatccttgttatgttcgtgctgggtatctttttggtagcacattcaccaaaatgttacctttttcaacctggaccgtgcaggatacgttgttttttttttggtttgtgaagtttcctatcttctttgatgaaaagtcagtgctcctgccatgtaacctcaaagaaaaataaattttatgattacggcctgtcaacaaatatcttacggaaacagagaaaaataacaaatggcatatgtaactgatatggcaatatacaatattccgaatagcataaatggtctcctttgcggtcagcaatctacctgagctaaaatgccagctgttgtaaatgcaacttactatctatcatacagttctttttttgaaacatgccatcgtccatagttcaatacttcaattgaatagtaacgagtgagttgttatataatatagtagtatttcaagttaagactcacttttgtacaattgttttcctgatatacaatatatgaactgtctttacctaccagaaatttcttctcaccttcctcgcaagg

SEQ ID NO: 5190 - DNA, 863 bp, Zea mays
  Intron number 2 from transcript GRMZM2G159741_T01 (locus G RMZM2G159741) derived from phytozome v7.0 (chr-ID 6; pos 1 56019363 to 156020225)
aagtaagaaagttccgcctgttttaattgatttacactttcgagtttgtgtttatggctatttgttaaaaaaaccacctgactgaatgttttgctgcagcgacacaaaatacattgctgtgcaatcttattctttataaaaccaagtcttgtccattactttattctaaaaaagattagacaaggcactatgtaacaaaaccatacatggtcgtttccactgcttgttttgctagtttcatatgaaactgaagtgttagccccattttcaaatttagtttctgcttactatcagatagtgtacatttgattagagctgcatgcacatgatttttatgttgacataattaattaagtatggtttaaaaaaaaaaactcggccggggagggaaagaccgccctcccggtattatattaagaagagaccgaaacaatggtcccggccgagaaaatccccgaaccctggccccccatcactaacgggccggcgtcaactgtccactctgcaacggcccaaccggagggtggcgcacaggacatcgtaacccgagagcggatggggcacagcgaggggattgttttaaccaagcctgaaaattcgctcccgaggggaatcgaacccaggacttggaggtgctactcggaagtccttaaccactaggctagaggccctttcgcattaagtatggtttagttgctccaagaatgggcttacggtttatgaaatcacgttgataattgatatactgcattcaaagcgacttgctcttgaagttggaggcacctctttttttgttacttctgaattgagcttgtatttcgattacaggcaaaagccgccgctgctgataaggctacaacact

SEQ ID NO: 5191 - DNA, 841 bp, Zea mays
  Intron number 2 from transcript GRMZM2G326270_T01 (locus G RMZM2G326270) derived from phytozome v7.0 (chr-ID 7; pos 1 71046222 to 171047062 reverse strand)
gggtcgatcgcgtctgaggtaagccccactcgacttgtgactgttcatcgtagtttgacacatgtctcgtgcttttgcgtaaattcaaacgaatcctggacctatggtattaaaagtggttacaagctgctgatcgttcacttcagaggcttcaatcttttggaacaaccagattcgaagtgcttccctgcatgcaaaccaggggaaatttagtgccgtaagcaattttatagctgggagaacaagtcagtaactgggatagttgtatcatcacaaatcttccagatctggtcccgagaacaggattcgctcccaaacagcatagttctgctgctttatttatgccactgctaaaaaataccccccacccaccaaaaaagaaggaacactcattcctaggttcctgcatctacaagggtgtaggtttatgcgttataggacaacaaatactgcacagttgacaaaagtcacttgatctggttttgtgtgattttcaagcatactcctacataatgataaagtacttccaggctctttctttacacctatcaagagaaatatcttggtcaataattatggccaccgatttttctcaacatatctgatcacctgggcggtggtccaaagtagtactgcttctttcatttcatttgtcttcagctcatcttgcctgcccacttatgtacaagcagaacgaactaatttgcgtttgttatcttactaaaaagagctgtgcctgggagccctgcactgcagccctcccgaccacgctattgcttggacttgaacagttggactgcaactgaaatcccaatcctaacgcatctgggtttctccaggt

SEQ ID NO: 5192 - DNA, 669 bp, Zea mays
  Intron number 1 from transcript GRMZM5G879101_T01 (locus G RMZM5G879101) derived from phytozome v7.0 (chr-ID 7; pos 1 53434936 to 153435604)
ttctgaaaaaggtgggggaaataatgtgccagttagagaataatgtttctactgaataatataggaaaactttttatagcatttataatcactagataccgtttaggaaataagaaagtgcatgagagtactccctctgttccatagattgttttgacttttctaaatttatagtttttattatatatctagacataaggtatatttaagtgcatagcaaaagctatgtacaaaagacaatcctagttgctttactttgcggtctctcattcttagcatacccttttgtggggaaaaaaacagcaggcactcatacagtcatactgataacgaagtgatgcataatgttaccatatgtttcatatactcatatccaattttcacatcttacataagttattttcaaagacgatactatactttatcacatctacactcgcaatttaaatgttgccagcttgccatgcccagttcttcaaatacaatctcagtttgacgacaggtcgaaattagataattcgttgtttcaaatttctaacaaagcaaaattagcatgtaccgtaggccacaataataagaatgttatatgccatagccgtagagtttgaaccctcgagcctcgattttttctcaccttacaaatttgaaacatcataaagagcacctcct

SEQ ID NO: 5193 - DNA, 721 bp, Zea mays
  Intron number 1 from transcript GRMZM2G085660_T01 (locus G RMZM2G085660) derived from phytozome v7.0 (chr-ID 7; pos 1 49852744 to 149853464 reverse strand)
ttttgcaggaccacctctttcgccttgaagacatcgtgagcctgcagagccagcacatgctgcaagtgatcaattcagcatcgagaaatgaaatacgtcaaccagatcagatcacactcttttagtttaatttagtaagttttgagtttttggttggttcagcagcacagtaaataaaagaaatgaaactgcattaacttcagtgagcacaactacaagtgcatgatgcaatttgtcctagttagagaatgtagaagggtgtgaaacaacatttccgaagaaaacaaaaaagtttctggtgtttcccccaacacggagctacgaaaacttgcatatcaaactcattgatccaggtagcagaaggaaacccacacattgatccactagcagtttatttgacaaaacaacaaatattgacgaagtccatccaggaagtgaacaacacagacgcaggtaagccaaggggagcacaccggcacacctagtccgaaaacgacacatcacacgaactgctcaattttctctacctcacagtttccgcacgtcttcattcgtcttggcaacgtcgtacacgagatcatcctttaccccaagactctcaaatggcaaggggcgatggggcaaccttctttttccatcgtggttctttcgaaatcgagggggagaaacagattttggggtgagaggacaacctgcttgagctggtcggaggcggagcact

SEQ ID NO: 5194 - DNA, 885 bp, Zea mays
  Intron number 3 from transcript GRMZM2G466822_T01 (locus G RMZM2G466822) derived from phytozome v7.0 (chr-ID 3; pos 2 13892587 to 213893471 reverse strand)
gggaggtaagcatactgttgtgccattgtaattttgtacgtgtatttgattttggcatcaaatgatgcgagggtgacatattactttgaaattgtcagaccaatatcttcttcacagcaagctttaggtttgtgcacttgtgattgttttagattatgatatgtaactgtgttgttctatgctgaacaccagagcatgaggagggcaccattagcgtcatagactcaaacatgcccctatgggggaggtaggcatagtgttgtgccattgtaatttgtacaagtattagatgcgagtgtgacatattactttgaaaattgccatgccaatctcttcttcacattacgcatcaggtttgtgcactggtgattgtttcggtctatgatatgttattgtgttgtcagaagcgattcaattgataggttgatcaaccaaagtcaatttgaagtcactgtcgcccatgtcgacatgcatgttcattgtcggcacgtatgacctctccaccgtatttcgggcgcgatcccacaagaagcagatatgagtgctatgatcctggtctagttgttatttaccattggctactaggcttggtcgatttctaggagaattctttcgagtttgtggcttcgtcttctccccctctttcctttttcttctttgggttactgctacccacatgacatggctttggtataaattaaattatattttcttagtataaataacatatgttttttgcgtgttcatttttttgtgttagtgtgaacaagattgtaggcctagaaatgaattcctactaatagttaccagtgaaataagtttgttaatgttatcttctaatttattatttctgaacaggtgccagtagtacctaaagtccagtaa

SEQ ID NO: 5195 - DNA, 792 bp, Zea mays
  Intron number 3 from transcript GRMZM2G331723_T01 (locus G RMZM2G331723) derived from phytozome v7.0 (chr-ID 3; pos 2 03865635 to 203866426 reverse strand)
gaggttgaggtacgaatacaaacatgacagcttaatcttctccctttttttcttcatttttttactagcaagattcattcgatccatccattgttttgttgtgttattactgctacataagaaacctcacgggaaaacgatgagcaagcaaagcaagaagaccaagttgttgctgttaaaaaaaattcaaaaataatgtatacagtgagagagagcagggccagctgaatccagcacagatgtcgatttcacaggcatatcatattgccagttttgggtatgaacatcaaatatgctcagtagccatgtcatcgtttagctctccttgctaattgtaagactggaaactgaaactggttcctacaagttgtatttcacaggcatatcagattttcagtctgtataccatacatgtcgcactctctaacatggattggggctatgttttattaaattctgatctgtaagttttgtgtattgaatgtctgttaatcaattgaagtttcatcgtgtttccaatccaacaaaatatttattatatttatatgaccagctatgttctggctatcaaacaattgaagtgttatcatgttttcaatcctaaacaaacggacgagatatatatgtttccttttttgcactgttaaagaaaagtagatataaatatcttactatgttgcttcttttttttatctctaggttatggacaatcagaaaatgtttaatacagtctgttaatctgaattgttcccatagagtaaaaggttcatccattatttttttgtttttcag

SEQ ID NO: 5196 - DNA, 694 bp, Zea mays
  Intron number 1 from transcript GRMZM2G093436_T01 (locus G RMZM2G093436) derived from phytozome v7.0 (chr-ID 3; pos 2 25547066 to 225547759)
cgcggccacagccgcgtcgcaggcatttgcctccggtgagcttactgcagtcttcctacctccaccaatgcgctgtaacctgtagtgaattttagaactgatgtgcatcaaggttcctagctcttgcttcgattttgtgcttcatggttgcatctgcatgttgatgttgctttcttggctggctttctctgtgagctagacggatgagaaagcaacatgagtgttgggcctttcactttttcctttccattgagatggtgagatttagttctgcgattgctccatcgtcacactcaatagtcattttattttgcccctcaggatgcaagatattgattttcttttgcaattcaaaatgttttttttttctgatttatctgtatgtgaggaaagctaatattgtcttgctttgattgtgggtaaaatcggcgttaaagcttcccatcacataacgctgaaagaagggttggttgtctgcttagctgtactttgtaaggttgcttgatgacgatttcgttaggttcattgaatttagaccacacaatgctgatgcatcctgcatttctgttcctaatattgtttaaactgtatattgtcctgactctcccctggaattaggtgtggactgatggcatgctgtaattattgtctttctgctgatatgttgtgagggttgtgttgtttcagattgggg

SEQ ID NO: 5197 - DNA, 643 bp, Zea mays
  Intron number 1 from transcript GRMZM2G104504_T01 (locus G RMZM2G104504) derived from phytozome v7.0 (chr-ID 7; pos 1 43215965 to 143216607)
cgacgacatctctcacctcgcccttgacatcggcggtacgtgcgtgcgccgtgcgcgtctcctcgtctccgtttcactgttggactcacctaacgttatcaacagtgtttatcgcttcgtagcagtgtaagtttctgtgttgagttggttaagcaaggtagatgagatgcgggtttcttagcaattttcagaagttggcacttccgcctgttagttgctagcactccacaccgaacgttgtcagattgctactgcatctcagctcaggacgactgtgtcacttagtgcttaccactcaaaatgtgaaccattcaccattgtaagagtgtatctgcgaattgatagtggtgataccgataacatgctacttgcaacagtaagccgtcaaggtggtactctgcatatggcttccaactcttgttgttcctcctgaactgttaggatatgtgcttgatggattaaaatgtgccagttttctataattggttcataaatttatttttcattgtcaacctgcaattgcaaacaataatttctcgactgtcatagggtctgacattttgtactctaaattttgaaaatgtatgttttgattgtttttcctctaggatctcttataaaactggtgtacttctcgcgacat

SEQ ID NO: 5198 - DNA, 680 bp, Zea mays
  Intron number 1 from transcript AC193379.3_FGT001 (locus A C193379.3_FG001) derived from phytozome v7.0 (chr-ID 3; po s 186069100 to 186069779 reverse strand)
ccggccaagtttcggtcagacgaacccccaaggtaagccttgatatattgcatttgacgaggatataggatgcatgctgccatctgtttagggtagaattatccagagtgcctgttgacctgaaaaaatgttcagctagattagttctaccaggacgatattgtgagaatgttttgattacaatgaacattagttaccaccagataaaaaccatttaaactgattcacttacatcaaagtttattcattttaaatttggctgtcttgaactccttagaattatttctattcaacaaaacaagaagattttttcggcgcaggtcagtttgtgttacctttgagttaatgtttttgcaccagttcattagtcaaggttgtgcagaactgtaatgtaatcaaacccacaagaccaaatggatcaaatttagaacgtaacaattatgcatgaagtgtgtcctcgtgacaaaacattaagcttaacactgaacatttcctttttttcttgctattctcttccttaggcttagctctctttcaattccttggaatggtacttgcctacattcctctcacatgaatttacgatcctaagaactaatcaactactagagttattaatgcagaaatgatcaactaatgttagcttaatgatttctacagttgctgcacttcaggctttg

SEQ ID NO: 5199 - DNA, 745 bp, Zea mays
  Intron number 2 from transcript GRMZM2G099086_T01 (locus G RMZM2G099086) derived from phytozome v7.0 (chr-ID 7; pos 7 8905371 to 78906115 reverse strand)
ggtacccgagcttattctctgcaggtgtgtttcaagttccaatttatggaagacagtgaatcaattatcgtgggttataccatataccaatataaattatgaaagcttcatggcgcaattagtctctgttacctaattgaatcggtttgtattttttttgtttcattaagtttgtgcaaattctgttgtatctgttcagttttctaatgtttctttgctgaaaattatagtgtgtctttattgattcagtttttatgtcgtattattaccaccttctgcttcatttgttttgttgttctttctctctttattttcctgggaacggtttgatgtagatcctgcatttgaatacgtataggttggtgttcctatgtttatgtttcgtcaaatatatattgcttcgattccttttgtgggccttgtttaaggggaatgaccttgcaaaggctatctattctattactcatcatcttgcctttctggccacaattgcaactggtgcttttaagagaatggacacgtatagaattcaatacctctattacaataccatctttttattctggtcatgttatttctttctcgagccaaactttgtttgcagattctgacctatttatttaaaatttgtttatctggagaatgaagatgattaaataatcgtttggtttggtcaattaatatgcatagcaatagaatgtgccattcatgttattgttgataataactctccttcaacacagtg

SEQ ID NO: 5200 - DNA, 669 bp, Zea mays
  Intron number 2 from transcript GRMZM2G133044_T01 (locus G RMZM2G133044) derived from phytozome v7.0 (chr-ID 3; pos 1 12758291 to 112758959)
actttgataaggtttgacagaatcttctgttctttagtaggtcgttacatgggaacttgaactttctcggcacctgccattttattgctttgtatgttgttataagtattactgtcatactgtgacattgtttctcttacctttatgtccttacttttcggtaaataatccctcagtaacaagcgctatgtaggtttctctctatgattcacaatgtacaaatcttagagtttatttatttctatttttgaatttgtttgaattcctgatagattaaatcggtaacacgtaaaaaagtgatactggtgttaggcagagtagtattgccttgcctaaaacataagaatttcatctaggtgcttgatgagatgaacaatgatcatgagactcaaggatgcatgacatggtatctcaatttttatgttttagcatgtcaaattttatgtactaggcatttaattactctggcctttgctagacaggttttgacctcctgcctagtgcctagcatttcctttgaaacattgatcatatggaatgccaaaatctatataagtatctaactacatacattatgcagttttaagggagataactctcaagtatattgatattttatccttgacttgttcagagaatagtagattggcttgctagcaacttcaagaa

SEQ ID NO: 5201 - DNA, 434 bp, Zea mays
  Intron number 1 from transcript GRMZM2G349785_T01 (locus G RMZM2G349785) derived from phytozome v7.0 (chr-ID 7; pos 1 37711415 to 137711848 reverse strand)
gagctcagttgcattggtgattcaagtccgatttggtgggtttccaatcttttcggttttttccagtttgtttattccctcctacaaatccaggtatccaccaccccttcttgttttttaatttactctgttcagaaaatttattttggacttctccttctcatctttttctgatacgatttgttaagaacagctcttgcaggcacaatgcgttaaaggcaactgaaaaatgtaaggtctcattaattcattgtatgttatgtaatgattggaatttatatctaacttagttttgattctctattcttctctttttttcctaatgccatgacaaactaaagcatgctttccagttttatttattgtatcagcaatggtgtgcaagagggttgaatctatgtttaaaatgttttgtgacaggatctttcggtttc

SEQ ID NO: 5202 - DNA, 632 bp, Zea mays
  Intron number 1 from transcript AC213610.3_FGT001 (locus A C213610.3_FG001) derived from phytozome v7.0 (chr-ID 3; po s 61008882 to 61009513)
ggacccacacggcagcgattgagaaggcgtgggtaagtagcgggtgacattgcgggcccaccagtcagatcaaaagggaaggcatgactgggccggcgccggaaaaagtgaaggtgggccgagggtagggaaaggcagcccaaagtcattcctagacttttctttttgtttccttttgtttcctattttcaagttttcaattttcaaacaaattcaattatgagttttgacaaataaaagaagtgtagcagcatgatatatatatatatatatatatgtattatattagttgcttttatttgctaagtaaatgcttccaatatgcaatgaaacaaatatatatatatatatatatatattctaaaattgtagtctaattaaatagatgtaaatatttattacttgtttaaaaatagtaatttctaggaaaattttaagttcaaatattttcaaattatatcatccaataaggataatttgagttagggtcactctcccaattagagaatgtatttgatttaaatttcaaaaagattttgcctagtcttcaagactaaatttttaggtgttacaaaattaaccttgcaagtagtaacacatttggttaacatgaatgtggtttgcagcacgtg

SEQ ID NO: 5203 - DNA, 864 bp, Zea mays
  Intron number 16 from transcript GRMZM2G429714_T01 (locus GRMZM2G429714) derived from phytozome v7.0 (chr-ID 6; pos 155014532 to 155015395 reverse strand)
gaaaggtatccaacaaaaaaacaagctgttttggccttcttaaagagggcctgcacctgcacaaatagttaaaaccattggataaaagaaatccagtgttaggtaaactgcctattattcaaatatattcaggcaactcacatatatatcaaaactggcaaattttaaaaggtgtacaagggaacactcgttgatggaacgcgggttgccataaagagagcagagcgcggatcaatgcaaggtgtggtggagttcaagaacgagatcgagctgctgtccagggttcatcacaggaacctggtgagcctgattggcttctgctacgaacaaggggagcagatgctggtgtacgagtacgtctccagcggaacgctgagagagaacttactaggtacatggacaaaaccacccgtccaccgcatatatatacaacatttcacagaatttccatctcccagttcagttgtaatcgtagcatcagttgttcactcaacaatctgtgtacgcatgcatgaacggccgccatgcagtgagaggaacgtacctggactggaagaagaggctcaggatcgcgctcgggtcagcgaggggacttgcgtaccttcacgagctcgccgatccgcctatcatccaccgggacgtcaagtccaccaatatcctcctcgacgaccacctcaaagccaaggtcgccgacttcggcctctccaagctcgtcgcggacacccagaagggccacgtctccacgcaagtgaaaggaacgctggtgagtcatcacaacggaaacacaacaccatactactagcaggaacctgaacgatcaaaattatcatcaaatataaacttaactaagcatgtggtgtattt

SEQ ID NO: 5204 - DNA, 654 bp, Zea mays
  Intron number 1 from transcript GRMZM2G480480_T01 (locus G RMZM2G480480) derived from phytozome v7.0 (chr-ID 7; pos 1 53434931 to 153435584 reverse strand)
tttcaaatttgtaaggtgagaaaaaatcgaggctcgagggttcaaactctacggctatggcatataacattcttattattgtggcctacggtacatgctaattttgctttgttagaaatttgaaacaacgaattatctaatttcgacctgtcgtcaaactgagattgtatttgaagaactgggcatggcaagctggcaacatttaaattgcgagtgtagatgtgataaagtatagtatcgtctttgaaaataacttatgtaagatgtgaaaattggatatgagtatatgaaacatatggtaacattatgcatcacttcgttatcagtatgactgtatgagtgcctgctgtttttttccccacaaaagggtatgctaagaatgagagaccgcaaagtaaagcaactaggattgtcttttgtacatagcttttgctatgcacttaaatataccttatgtctagatatataataaaaactataaatttagaaaagtcaaaacaatctatggaacagagggagtactctcatgcactttcttatttcctaaacggtatctagtgattataaatgctataaaaagttttcctatattattcagtagaaacattattctctaactggcacattatttcccccacctttttcagaacatcg

SEQ ID NO: 5205 - DNA, 617 bp, Zea mays
  Intron number 2 from transcript GRMZM5G850966_T01 (locus G RMZM5G850966) derived from phytozome v7.0 (chr-ID 6; pos 1 51638462 to 151639078)
gcgagctgcctccccgcccgtgccaccgcaagggggtaagccaaccttcagccttttgctggtcatcattttgatatcgcgggtggtattggtggtgtgattaagtgttagatgttgtggggtttaggatgcagagaagcagatatcttactagttgataaactgtgcggtgaaagtctttatacggttgtgtaggtttggttttaagtcttgtccttgttcatttctacaactcaacaaaacacaattcgacggatctgcaatgatagtgtaggagttccactgtacttcatgcggatggaaggtttgtttgctgtgaatagtgttaggcatgttggtctacaggttcgaagaaccgcaagtttattatagatgtatgttttgttttaagtagaactttttcctatgtgatcattgtttctacttggaaatatttggtttttctacgctctatatttggttttatttattaatcttgtaaaagccatgattgtgtctgtacatgtaaatgattagcacaagtatgcggtagatttacatatctttgcacttgattgttttctgtgtccttcattccaagttattttgttgttcagaaatcaacgaagagggtgtct

SEQ ID NO: 5206 - DNA, 748 bp, Zea mays
  Intron number 4 from transcript GRMZM2G104608_T01 (locus G RMZM2G104608) derived from phytozome v7.0 (chr-ID 7; pos 1 43190652 to 143191399)
gaccttgcctgctctaaatttggagttagacacaggtgcattttaattctattctttctggattgtatgttattcagtcaaatgtaccagtggtcaccaaacttgttctaggctgtcatcttggtccccgaactattaattttcagttccatgtctatgagcttcctatgccccagtttgtttgagcttttgtagctttggcttctcagaagccagaagctgaaacaagtagcctgcttctgagaagtttcttgagaagccacaagcctgcaaaactgactttatactactataaaatcagataagcccagaagcaggtctggatgagcttttctaagaaacctgcttttggaaaagctccacccgcagaaactcaaacagacatgcaagtgattctccagatgtcgggaacccgtggtaaatcttttgttgctggatgttaccaaggcattttatattaacgtggacgctaagtcgctaacaagccgtgaactgtagagaggccacaaggaagaagataatgcgaagggatgtcaaataagctgggtttgaaccttggatgttagcaagttcagggatgtgaaactgcaaattaatagttccaggacttacatgcatctctggacaagctcaaagatgctgatgtatttcactctgttattttacccatttgtttgggcatttttatgttcccatttagcttaacaatttcttattcaggttctctacccactctggaagaattaaa

SEQ ID NO: 5207 - DNA, 477 bp, Zea mays
  Intron number 1 from transcript GRMZM2G126435_T02 (locus G RMZM2G126435) derived from phytozome v7.0 (chr-ID 6; pos 1 31462366 to 131462842 reverse strand)
ccttcaagggtgtgtaggacttaacctgattcttcattgtaggcttgtagctgaccactagtttttcccctaacactccacataggtctgtttttactatgcaaaaagaacttctgagtaccttactgttgtgggcaaaagataaattctattatgataatatgtcgtactatttttctgtgaattgtaatggtggctaaaaagcagacaggggacatactatggtctgcatgctaaatattgcactaaatttgaaaatcagtgtctcaatcaatgaaaattaagtgtaacttatactggatccactcactaaaccatctagatcattatttggcattttggctactgatgtttctttacactaaaatttatctggctctaatcttaattttttttaatgatctctttgaattgtggcacttactaacacctatttctccagcaaacaagttctcgcaggctatagagctttacagt

SEQ ID NO: 5208 - DNA, 668 bp, Zea mays
  Intron number 2 from transcript GRMZM2G171010_T01 (locus G RMZM2G171010) derived from phytozome v7.0 (chr-ID 3; pos 1 04386650 to 104387317 reverse strand)
tactgctggtgtcacaggtttgcccactaatcttgattgcattttgcttcacttatctatggatttatggttctgcactacaattctaaaacctgtttttgagttggatcgtttagctgtattccccaagagctttttacttaagtatctgggacatgagagaacatagttttgttcacaataatgcaaccattacatcttttttatcacagccttgttatagcagaatatggctaaacgagtgaacaataatatacttcatttgatgctttgttaactgttatagcagtatgcaatacatatagatatagcatactcataattggagtagcaaaccatcttacttattgtttagaatgagaaaactatagacaacagaacattttgtctacaacatgacaatgtgctcgtggctgtgctccttttttgtgcttttagttgaaatctgatgctacttaaatctaactaatttctcagcagacaacttgccttctattgcactattttctgagcacataattgtatgtctctgcctttctgtttctaggtccataatgctttgttcaacctttgcaaaattaataaaagaagataggaacaagcagctgaaaatggaatcatccctcacttgatgaaatttgtcatgtcagactcacctctgcgacagt

SEQ ID NO: 5209 - DNA, 922 bp, Zea mays
  Intron number 1 from transcript GRMZM2G340444_T02 (locus G RMZM2G340444) derived from phytozome v7.0 (chr-ID 6; pos 1 38585030 to 138585951)
caaaaatgtaagtggctagcaacacgtagcatcgagtcacttggggggggggaagatgagcatgaacaagctcaataagaccagcaagaagataagtcaattaaaattgtacatgctctttacctagctgctggatcggctcgccaccgacacgaatgatgacatgaaaagggctcatatgttggccacaagaaaaataatcaatcaattaaaattagataaggaagaaaatacataaaaggtggaggatgatgttgatgagtagttttaatttattcgaactatgtaattttttatattttatttactttgtttgaattatatatattttttcttaataggttatctaccacaacactctagtgcacaccatttataccattatcttatttttagatcagtagatcagccatgtgatcagttttaggtacacatgtcatcatcgatcaaataaagggcaaagattcgtatgggataattaaacccagttgcatgcaatttaattgagaacaaatcaccccagtcaaaacattttggccttaattaaccagctcagcgctattgcacacccccaaggggcgaaatgaagcaacgctacctcccccgtttctaccttccttctataaacctttcttccgctttcctcatttgcgaccttcttctttgctgtccttttcctcttccatctttcatatctctctcgtttatttgcgcgactctttttcttggagacatttgtgatcttttccttcagaatttgatcgatttgcaaattaaacttgatcatcttcttgttgcgaagccgtcttggagatttcgtaaagcggttttacctttggtggtttatgcgcaccattggccgctgccgctctcttgggtttgggttgtgcaataccagcatctcgtcggcgcagaagccatc

SEQ ID NO: 5210 - DNA, 495 bp, Zea mays
  Intron number 1 from transcript GRMZM2G043623_T02 (locus G RMZM2G043623) derived from phytozome v7.0 (chr-ID 3; pos 1 32112074 to 132112568 reverse strand)
gtcagtaatcaaatgaaggtcaaagaaaacatgtagtactatgcattatatgaaagtataataatggcaaacagagggattgatctgatcagcttattaacccatatcaccagctaaaatgcaaacataaatagctaacaaaatgtatacagttggaggccaacaatttggtactaaatgataaataaaagccaatattagttactctggcatgcagttacctctgtgaatatcagagcatctggatctcttcttagtcagtagcaaaaaaggaaaacaaccatttcactttcccagatatatgtttcttttatctagtgtcaaatttcttatgtaaaaagttaatctgtcttccatccagaagcaaggcaaattttcaaagattcttgttcggttcagatctacagtatccaggcctgtattccaaaagatacagcttactttggaatcatgaatttgtgcaggcaaaggagcttttcaaccagccttttgatt

SEQ ID NO: 5211 - DNA, 809 bp, Zea mays
  Intron number 1 from transcript GRMZM2G034868_T03 (locus G RMZM2G034868) derived from phytozome v7.0 (chr-ID 3; pos 1 42955755 to 142956563 reverse strand)
tcatcagctcagatctagcagcttcgccttctcaggtaagggctccgctcacatcttcatatccctgctactaggttttcttcgtttatcctcgctcggattcttgcagatctcgctcaccttgtagatctcgctcagattcgtttgttctcgccagacgcgcccacttcgcagccgccgctatgcctatgctaccgcatgggcctctgcgcctgggaggcttgcggctgccaggcttaagtcacggggcagcaggagttcagtttttttaggcctttgaaacaaggctagcgcatattagcatcgagagtcaggagagtacgaatgggaagtaccgtcataaaattatctttgctactagcaataggaagcaccgtcataaaattaactctggtaataaaatcgattggatatatattgtttctaggaaactaggaaggatcccgtgtagaaagtgtggatagatagcctttttcatcggatcatttggttttttcttaaaatatttctttcaaaacagtctcacttttttcttaagttgtattggtgctccctaagatcgaaagcaggaatactacttttctgcaaaatcacaaaaatgcacacatttgggacctttcctaagctgtgtcttcgagcaaccaaaaagctgatgttagtttattttcatttttttgagagaagaaaattctttgcttgatgcttaatcagagatgaaaatattgatcattttttacatgtgcgctgatcatttttttactggactgctgtcaggtataattggagtgctgtcataagtggagtgttgt

SEQ ID NO: 5212 - DNA, 462 bp, Zea mays
  Intron number 2 from transcript GRMZM2G062654_T02 (locus G RMZM2G062654) derived from phytozome v7.0 (chr-ID 6; pos 1 37708043 to 137708504)
gctgcttcctggagttctctgtaaaggttctgcaggtaactgaaccattagaagatagaatggagaaagccctgttcagtcctccattatctaaacaaagagtcgaataatttgctgtgcggcacatcaacgagctgcatgctaccacacttgtaatttccccacctaattcctttttccccacctaatcgctgttatgagaaataaaattggacatgtctacgaacatctgtttcagagccctgaactaaaatagctccacgcctccactatttgtttgcatgaatttaaaatgtgcgttacttggtttacggagaattttaacctgtttttaattgaacatgccatttgacttactatttagctttacatttgaatgctcctcttattctaggatacttttaagtgtttcatcaacgatgtctgaatattttgttgtcaaattattgtaggactatttgg

SEQ ID NO: 5213 - DNA, 602 bp, Zea mays
  Intron number 2 from transcript GRMZM2G131489_T01 (locus G RMZM2G131489) derived from phytozome v7.0 (chr-ID 7; pos 8 1930839 to 81931440)
ggaagggatcctgttgctttcgcaaactacttcaagtatgtcaccgttgttcctttccttccgttaactatactgttttcttttcttccccatatatattagtattaagcggcagtggaacaatagcttgtttgtcttcttcaggtagtcatatggtgctcctaataccaaagtaaactattccttacattaattggcagaactataccatctttttcagtacccgcgtgttgtcgtttagtacttgtttaacttacaggcaatatattgttgtgcttgaccctatccggaaacgattgggtatttggcagttcttaagggctacttttgcttctgtaatcattatgtgaacctttttacattggagcttgtcaatccctttgatttctctgcaccattcatatttttccaggttatgaccaacaatgattactgcttttgacagcttcataaaatcagttatgtttctgaaattgtgatatagagtttcttcatttgtactagctttgtaagtgctttgctgttctctctagtttcctagttctgtcttctgaccaacaatattaccttgcagcttcgaaatcttacattgtcggtgggcc

SEQ ID NO: 5214 - DNA, 515 bp, Zea mays
  Intron number 1 from transcript AC208862.3_FGT004 (locus A C208862.3_FG004) derived from phytozome v7.0 (chr-ID 7; po s 126365553 to 126366067 reverse strand)
cgaggaggacgtcagtgtcgttactgccgctgaaggtgacgacgggtcccagtccaccgaccatttttttgtattttggtcccttttccgatttttttacctttagactcctgaacgacttaattctgtttttggacccatatggcgccgagctatgcacccctctagcgtcgagggctgacacaacgccattgtggcacctagctcggcgccacagatcttgacatcgagctagaaaggcctataaatcggttgtttcctggccgagagctgcgcccagccatttgaaaccttcgtttcaatcttcttccataccgcccagaggtgctcgtatcttcatattcaagttggaaaactttaaataccaaggtataatgtctcactgattcgtttgttacgtatattgcattgtatggtttcgatcaattagaattagtttgttacgtatattgcattgtatggtttcgattaattagttttgattgttgctcatattactattagttataattcat

SEQ ID NO: 5215 - DNA, 962 bp, Zea mays
  Intron number 5 from transcript GRMZM2G031688_T01 (locus G RMZM2G031688) derived from phytozome v7.0 (chr-ID 6; pos 2 7496497 to 27497458)
caacatagaggttaccctggaggtatgcaagccatgctttgcatttattttcaccactcggctgcaagattttaagagaatgtatatgaagttaacagtgcgtcgattacgatttattagaggtctacaccaatccattggtgtgcagtctgtcctattttgttttctgtttgttctttgatccttatcacacttagggactttgtagactctggaattttagtcactaaggtatacagaaagactctaaaatttattttttctgcacacaatccagaaaatgttttttgtgtgtttctcattttcatttggttaagtacatttatgtttctctaatctaaaatggaactatgaggcggcatgtggaactacaaattcatgtgttggtaattaaataactagcagatagaagaacactaggagtctggtatagagtccaaatcattgacgaaaaagaaactatttactataaccttcatagagttgtaaaaacatatgtttggcacttacaatttcaacatttatttttgctaacttgtttgcctaaattctaatgtttgacgctggtactatatagatcaggttgcagaataagacttgaagcataatttgtgggagcatggttggttttacttatattgaataaacttttagtggcttccatgctatatattatgcatcttttaaatgttgcaggaacctctcttctgtttagtagtcgagttttagtctggcagtcccattttactagagaaattaagttaattgtgtgtttaggtaatctacatgaacatctaatcatgaaatcgactatgggttgtttgggaatgcctctggtctggtgtttagacgtggttgtgcggattgtctacactaacattgtaatcgtctccactaatcttcaatttctgactttttgtgttttaggctttcctcttcttggacctactgaagcaggtaaa

SEQ ID NO: 5216 - DNA, 863 bp, Zea mays
  Intron number 1 from transcript GRMZM5G833593_T05 (locus G RMZM5G833593) derived from phytozome v7.0 (chr-ID 3; pos 1 49246511 to 149247373)
gagccacgcagccaaggatttcgaattcgtgacttgtgagtaaccaagtatcgattttctttttaatttaattcaataaaatgttgtttgatgaatggcaatgtctagtttccaacagtcatgttgatatttgcattttgcaatatccaaggtaagaaagatgggttgaagagtggcgcttctgaggactgaggaaccatatgataaatttgaatttgccccacgaggacatatggaacgaatacatattgtgtttttttccactccccacccacccaccgaaagaactatgaatttttaaaatttgtatgtaggattgagaatgtccaccagtatggtgtcggcgtgaaatcgttaagacatatatgatctaaatggctgtcagatgctatttatttgatattttctgtctccagaatgtgtatttgtttgatctatttgaattaatattatcattattcattatttatgtattttgttagatctattagtgtgtgtatatggcacgaaatttgtactcttctgttctatacccccccccccccaccaccaccacacacacacagaactatgaaattttaaattttgtatgtaggattgattatgtcgaccatcggctagtatgatgtcggcatgaaattgttaagacatatagatctaaatggctgtcaaatgctctttatttgatatttatctatccagaatgtgtatttgcttgatctatttgaattaatatcatcattatttatgtattttgttagatctattagtgtgtgtatatggcgcggaatttctaaccttgtattctatactccccccctgtcttcttgtcactggctctggctgcaggttggagtttctga

SEQ ID NO: 5217 - DNA, 863 bp, Zea mays
  Intron number 2 from transcript GRMZM2G091724_T01 (locus G RMZM2G091724) derived from phytozome v7.0 (chr-ID 6; pos 1 08451611 to 108452473)
tggtagtaagtatttccagcttatctaaagatataaaagatcttacatttacagttaaaaattaaagatggctagagctctcggaaccctgagtagtacctgctattagttcatatcgtctggtaagtagaatctatttcacttcagtagaagtacagatcgtctgttgttttatatcagcagtgatcagaaaatcttggcatgcattactttgtttcagtcccttcgcatttcttgtcaatggcagatttctcccagaagaaaatctgtgtctgaaatttgctaatatgaaatagtacagtatgcccaccagtacttgactttactggctcaatgggccaggcagaaggaaattccaattggttgttttctttgagttgaatcattataacaaacttagccctcattatgttgtatttgcagtttttgaattcaattgaagtaaaaggaaatatcatagtttggtcctttcgtgaattttttttgtccaattttttgtccttgtaggtttttccgttgcattagaaaacactgtaggcaactgattttctaacatgcccctatcagaacttcctccgagaccattgcttgagatcttggcacgagaactacggtaatgtgattcttgcgccttcgtttttcccctgtttagactttagagtgaattagtctcattttgctttttcctttcacctgattggtagggtcttagactattcaacattgatatgattagggagcacggaacaagagaccagttttatgtcatagacatgaactactttcctagtatgtggctgcttccttgcgttgcctctccgtttgcagggaagggtgctcccagccccttggcccctcccaac

SEQ ID NO: 5218 - DNA, 804 bp, Zea mays
  Intron number 1 from transcript GRMZM2G087961_T01 (locus G RMZM2G087961) derived from phytozome v7.0 (chr-ID 3; pos 1 466935 to 1467738 reverse strand)
atcaggtgctttctgtgcgaccggtacttctgcaagcaaatgatttagcagttattattgttgtgcatcatcaatgcatgccacatgacgaggtttctagctaactagctagcttgtggtaataatttcctttgaattcattcatcacaaactaaagaaagtctcggcagctggtgatccacaggcatgcagtgcagtgcagtgcagaggcgccccacaagcaaagcaaagcaagcaagcagctagtagtggccgtagtatgtaatgtatgtaccacctctctttgcaaattaaaagggatcggaaggaatatctgcagtccaatccagtccaagaacaagaagctacatgcaacatcgggatgcatgcctgcctgcccccggcccccattgacaatttgctttgctttcttgcatcgatctctagctgcctgcctgctgctggcctcctgcctctttgctcctgcgtctgcgtgctgctaacataatgcatgcatgcatgccaccacttgtacagttgtacgtttgtttttcaaattagttaatatgcatgctttcacttttaccacacctcagaatcgatcagatcatgctggtgcttgtacagtagtacagatttgtctttgtcgttggcagcgcgcggtaaaagtaaatatgcatgcatgcttgcttgggttgtacgttgttcacatgtccaatagttacatatatatatatacatatatgttggcattcgcaagaactaactaattaacaagctaggaagattcacatgctatgcatacgtacctggaggtggctggca

SEQ ID NO: 5219 - DNA, 1024 bp, Zea mays; identical to SEQ ID NO: 5083
  Intron number 2 from transcript AC225308.2_FGT005 (locus A C225308.2_FG005) derived from phytozome v7.0 (chr-ID 7; po s 158606926 to 158607949 reverse strand)

SEQ ID NO: 5220 - DNA, 837 bp, Zea mays
  Intron number 1 from transcript GRMZM2G078754_T01 (locus G RMZM2G078754) derived from phytozome v7.0 (chr-ID 7; pos 8 2563877 to 82564713)
tggtgtcgagggaatactacggccacaagaagaaggtaatacctctcaacgcctccccaatatcccattataatttcttctgagcccctataaaacccagaatctcgccagaagaaaggtttcgaagttccaatcattagggttgcaattcgtagggtgaggccctaaattccggccttgcatgcagaatgatgaaacaaggtgcggaagtaacaatctttgggccttccggtttggttcctgagaacatagatgggatcgtggacctatcttgctttcgattcgaagctataagcgtggagaggggatttagctatttcttctctttatatagagcatgaaaggagtcaatgttaaggcatgatgaaaacgaaatattgctgcagccacagttagttgcaaatgaatttagttgcaataggcaatctattttggttgtcctttgttgcagcaaaggggccgtggtgcctgtccttgcaggggagcaagagcagttttcctctggttctataaagaaatttgagattatcttagggcatgttgtaaagttgcaatgaggagaaataagaaggaatgatctttctttcaggatgaatatatgacattctgaggatgttttttctttgtttcttacattatgttgaatgtgttgcttaattgtccttaactcctcatagcgatcttcaaagcaaaaccactctaccctagtacttgtcggtacaaaatttagattgatttgtgggttcttatttttgctttgttttatgcatttctttggtaatcttatcattgtgttcaccattctgatagtttttatcattaggtgcactctgtagc

SEQ ID NO: 5221 - DNA, 1008 bp, Zea mays
  Intron number 2 from transcript GRMZM2G089562_T01 (locus G RMZM2G089562) derived from phytozome v7.0 (chr-ID 6; pos 1 21212322 to 121213329 reverse strand)
cagcaagaagcagcagccgcaggcggcagcgcctggtaatgttctgcctgccttttcagctagagcgtagaagtagcaaaacgtgcaaggctgcattgatgtcttcgatcgtatttctcttcagagcttcagatacacgtatatatacttgtagtacttcggaatgagcaaaatgagcaccagaaagagatactaattcatttatttatcctttcgttcattcttaattcttttggtttgctgtcatgcggcagcagtggcaatcaggggtggagttgtgggcggggaatgtaatgcttggtgataatgacctttatgcccttggccttctccttgcagagttttcattcaaaaaccgatttggcaagaactgaacatatatgagcttcaatcctttcctttgtttttttaaatacaatgaagattcttcaggatagttgtctcgttgctctaagttgaactgagtcacttagggaaaggttgtggttgtcctgctgggaactccagagtactttgttacgttactagtttgtggtagttgtcattatgtgatttattagcttattgtggttcgatatcgtgggaccatcttgaggtttattcgacaagccttcccctgcaaatatggagaggccgcttcaaaactatgacctggtgaccgtgcaaatgcggagaggctgcttcgaaaccacgacctagtgagacaactctcaccactgcaccatacctacccttcacactacaattattagattatatataataaagaaaggacagacctagtgctagcggctctcacatgaatggggactggaaaaggaataaccgagacaagcgttacccctacattttgtagagaggctgcgtcgagcccaagaccttttagctaagttggaaggcttctcgccaatgtgccaggcctgtccttctattagataatatataatgtttcttgaaatttttgttttggcaggaccaggctggactggattgaagcctcatattttc

SEQ ID NO: 5222 - DNA, 620 bp, Zea mays
  Intron number 1 from transcript GRMZM2G390331_T01 (locus G RMZM2G390331) derived from phytozome v7.0 (chr-ID 6; pos 1 41618297 to 141618916 reverse strand)
gggacgttggaggctggaggttagagtcattgagggatggtgaacctccattcctcagctcatctcattctttttttgctacttcatcatgaattatggtcattcctgctgctgatttctgagcatgccctccgtttgtttttccctatttattttggtttctttctattcttcactgggagagacttttcgccgactttcaccatcacgttcattcacctgtccatgtgtatctgttttcattggagataagattgtttttggtcattaacatgcgctttctaaagctagataactaaaattagttgagctatggattgatttgtcgaggagatttaagcttttttgttttgttttccaaaagagcttttttccatgcacaaacagttctgatctaagccagttaactaaagttagttgagctatagagatttggcgagatccgttaggtggcttctgtgttgtattggtgttatgatgatattttaccacatgaagtagtaaggcacctagaatatacatcatgaagtgtgtgtagttttttggatcttacctcaaacattaggcttcatgtctttattgcagataatcggaatcacccagactggaacaagattgca

SEQ ID NO: 5223 - DNA, 910 bp, Zea mays
  Intron number 1 from transcript GRMZM2G068081_T01 (locus G RMZM2G068081) derived from phytozome v7.0 (chr-ID 6; pos 9 5215397 to 95216306)
catccagcacctcatcaaccatcccggtaatggttatttttccctcattcactaatgcattggttgaaacacctaaaagccaatttgtttttgttgcagttctataggttcaacgaactagctttgctgcttgtgtctactattttacaatgtttgttgtgaatcgcagagtgaagctggctctctggtaatagcagattttagttgcccatgcttgtgaatgaaattatgattgtgactgaaattatctgtcttaacataatagcaattcagttacatagttcagtcacatacagacagttgagtaccatactaccataggtgaaaactaggtgctatgcttaaactatatatttgtaattgaaactattgaatctgctattttttagaatagcataggtgaaactatggcgaagctgctatttttatgcttttgatttgttttctggtttggcaatgaggttttagatatatatgattactagaaggcacttatatcatgtttccctatatttttcatattaagagtcacatacaaatttgcatccttttggaatagaaactatacaattagagcattgcaactagttgtgaggaacttcgtaatgataatagaggctgagaaacaggtaacatcatagctttaacgtgcatctacatatttgcagccttactgtcggcgcactagtcaaaaactccatattgtgacatttttgccatttattgttagtattagtatctttgcatcatcttttgtacttcttgaaaagaacacacaccaaattatgcataacgattaccttctcatcttagataaacaccttattctaatgtctatccattgtttctgatttatgattttttctggttctttcttgcagctgtgaaggacggtgtctgaggtcatttc

SEQ ID NO: 5224 - DNA, 741 bp, Zea mays
  Intron number 1 from transcript GRMZM5G889052_T01 (locus G RMZM5G889052) derived from phytozome v7.0 (chr-ID 7; pos 1 60150627 to 160151367)
cgctccggctgcgctaccgtcggtgcccgcctcaggtacatgtatcatgctgataaagctcattgcttattgaatacctgctgcattcatagctactagtactcctgttcagcttgtttctgaacttgtccaatcactgacgggtttgctttccctgtacggtggctcttttttgtggcagcttgcctgcaaattttatttttttttaaaaaaaaatagaggtagttttcctgcaatcacgtcaaagaacatgcttcgctaaattaaatgcatggtcctcctagtttgatcctttgtttgcattatgtttgaaacgtgacaagataagcatagattctcagctacgtctacgtatgatcaaattaatgagaacaagctaggatacgcctccagcctctcaagccagctgatattgacgcttcatcatgtcaaagttgctttgaagttatgcaagcctcaagaagaactttattcttgaggttatgaaattgttcccggccacttcactcatttctaatgctgcgcccaaaagaagcaaaacatgcgaatttacttgttggtttttgatctactggttgagatgaaagtgattgacaagcaacgtgtcagtcatctgaacatttggctatcgctgtagcctgaaatttagcttaggtttcgtccgcgctgaaactttcttagctcaccggtggcaccactgtctcagattcagaggacggaggatttggcaagggcagcata

SEQ ID NO: 5225 - DNA, 460 bp, Zea mays
  Intron number 2 from transcript GRMZM5G837511_T01 (locus G RMZM5G837511) derived from phytozome v7.0 (chr-ID 3; pos 2 25755116 to 225755575)
gggacaataacataaccaccggaaagatctatcaggtaagaataatcaatagtattttctttttgtcagaccttaattcattgcgctgaactggtatatgaatttaaatttctataatcataacttcaggttgttaaatagccatgtaatgacatttttttcatacaaacagtcagaagatgaaatagtccacttgatgatggtgttgacatcttgtactaaattcggggggaaaggacatccttgttgtctttatgttatttgattatgttaaaaatgcaaggaggaaataattaatcacaaggatatatgtaacaatgaacatctcgtatttgagacatcaaaaacacagttgcttttccctgcacaaagggctgcattgattttttcttattttacttataattttcaatggtttatgctagtctgtaattgacaaggagaggaaaggggaatactt

SEQ ID NO: 5226 - DNA, 700 bp, Zea mays
  Intron number 1 from transcript AC200143.3_FGT004 (locus A C200143.3_FG004) derived from phytozome v7.0 (chr-ID 7; po s 159176050 to 159176749)
ttggaagatactgtgatatcttgaaccggataaaggtaaagatgatggatcatggggatggtgatcgtggctgggatgtcttctctttggagtatgatgcaattgattcacatttgtattagttcttcgtaaatgtaaggtctttttttgctttattattaattagttggataaatggtgtccatttcggattgttaaactgcaatagctccagttaattggaaacagccaatgcagaataagaagctggtggtactcggcttcagattgatggaaagacatgtttattgcaggtaaatactcccttcttcctttataatcttgttgtctgattggataacgttgctagatttattttgtctgcgttgatgaactttgatgtcaactgccattttactcaataatggagacaagaaggacgtcctagattttttttggtttcgaccaataatttttgcattataaaacaagcaagacaatgtgaatcaatgtagctacaatgtatatatgcttgtatccattaaaaggcaattgagaccatataaagtaatgcatacattgccctcaggagctgatttaaaagacataggttcctacatttcaccaacactaacttatatttaaaagatgggttatgttgtttgcttcagcaggcgacatcatataagaaaattgtgattaatctttgttttcttgcaga

SEQ ID NO: 5227 - DNA, 886 bp, Zea mays
  Intron number 1 from transcript GRMZM2G003254_T01 (locus G RMZM2G003254) derived from phytozome v7.0 (chr-ID 3; pos 2 25701494 to 225702379)
tacgtgctcgtcttcgatcaccgctgcaattttagaagtttgagtgaagaagtggaactcacagggcgcttgccaggagctcgacagaaggcctgaacaagaatcgtcaacgttggcttggaattctagttgaatcggtaaccgttctttagttaactatttttattaatggattgaatagatatattaatcgcgacgattatcttgatcgaagcataaacatgtcatagttatattagatggttgccaaaatatcttgtcgcatgtgaggacatgattatggcgtactaattttgcaaggtaaaacttagatttaaaatgctagttacgtaggagtacccgaccggacgtgtctgtcgagtgtgttcaaattggttttacttatgaagtatgccaaattagtggcatgaagaattaatttagtattccaaatgattatccgataatgctgtcatcgttgatttttgtgaggtattttggtagtcaaacttgaaatgtttgattaattgttgacatgtaaaatagatgaggtgtgaaataaaattaaaatagttctttgtgagtgatgtggtataatttataaagcaagggataagtgtagaatttaattaattagctgataagttgtgtttaggctaattatattaaatgtgtatagtttgttgtttcgtgatatatgcgttagattcggttaatctaaagaagcgtaatcattgtacttaatcatacgtcgataactagtgttttcgtatgaaacgatacaacgcctcaccgctaggtgtttaattcgctatcgcgtagcactatttaggtttgtaatattcttgtctatatgcattcatgtgcataatgcatttcattcaggtacgttaattgactacctgat

SEQ ID NO: 5228 - DNA, 618 bp, Zea mays
  Intron number 1 from transcript GRMZM2G072205_T02 (locus G RMZM2G072205) derived from phytozome v7.0 (chr-ID 7; pos 1 65538496 to 165539113 reverse strand)
cctcggcgcgcggcgtcgcggcttggcgcgctctggtgagacgagatacactcagcatttggttgtctcatgtcctttgttcgctttgttggatccttgcatgcccatatgtgcgaatcctagtgtactttctcagcatcggtagtatcgcccagggtaaatgtgcgttttttaatcctgttttcggccgtcatattatgcgtttgcgatgcgtaatgcgtctgcagggtgaggagtgaggactattctctggattgtgctgaggatcttttgttagtttagtctgcgtgggttttaggttcgcctgcttctgctctgctgctgaactggtgtcttcaacatcattttcttccattcagtttgacttgagaatctagatagaatgttttttttcctcatttgctaatataaactattaagagtggttttggaagcctccaaaaactctaaaaataatttaagagttagggggtcatatttatcatggcacgtcttgcatcaagcaaacaatttatttagttttgtccagtgtgcatgttttctcaccctcttcaggctgcatttcgtttgtcactcgagctgacaagggtctcaacaaattggttgtggtttccagga

SEQ ID NO: 5229 - DNA, 1012 bp, Zea mays
  Intron number 1 from transcript GRMZM2G125081_T02 (locus G RMZM2G125081) derived from phytozome v7.0 (chr-ID 6; pos 5 161657 to 5162668 reverse strand)
ccccgccgagctgggccgactcggtagcctccaaggtgacgagaccttctgaacttttatatacatttgttttttagaaatttattagaatctgaacaagtggtttcgaacgtacggagagaaatccgggggttccgtttcgcccagctgtgcatccctgttcgtcagttcttcctgttgtcggatacggattgtttgaataggaaatacgtaaacaaacaaacaaacaaaagtacttgtttttttagggaaaagaaatttgaatagttccgaaattggtttgtccatattatagcctccacaactctgaactgacagacatgtcgtaaacttctcgtggtactcaaagcgctccttccttccttcattttgagttttttttttaaacataaccaggacatgtccttaggtcctttttttgttcttccaaagcattgtgctgcactgcacctgcacccccgatgattgcttgcctagaggatggaacaacgagggacaacagctcatgaatggaaggacataatggctgtttgtttttttttcctgtctgcacaattagacctttgtggcctcctttgtagggcatctgtgatgtactctgtatgtatcatggcatcccatcccacttttataatgacagagttttgcagcagtttggctgtcgtggatttgattgtacatgctactttggcggatgtttcatgatactccatcttatcctttgccttttgtgctgagtaaaacctggttattgaagcaagctagttatgaattctgctcaaggaattagtatggtttcattcatgttgctcgcagccataattgccattacctgtctgtctactttaggattaagctagcctgcccaaagctcagtagatcaacctaccgaatgtcagtttgcagccataattgtcctcctagcttgtccttctcttaacggcagattgattaacaagcttgtttcccctttgcagtgctgcagctcggctacaatcagctcacagggagc

SEQ ID NO: 5230 - DNA, 467 bp, Zea mays
  Intron number 2 from transcript GRMZM5G831584_T04 (locus G RMZM5G831584) derived from phytozome v7.0 (chr-ID 3; pos 1 76524227 to 176524693)
gagattctgctaatcttcccaaacaggtgagaggagccactattagttttttggcaagatttaatcaaagaaaggttcaaagattgttttgctttctgtaactcaaaatgtatggtaactgtttttctgtggagaactggaatttcatgcttctatatatagtttaacacttagtgcatttgtttttattttttcttcgaatttgaatctgaatcacagtatggttagataattcctttgctgtttctgccatgaatgtacaactgtcctattctttacttctcatcctttgttttagtatcaccatgtatagttcatttctttgaactgtgggattgtggttgtagtggttcatgcatacagtacatattactggataagaggacatagattatgtatcactatgttatattttcctttgatgcagaacagctctgggtccttgattctgtccctggacaagtaga

SEQ ID NO: 5231 - DNA, 871 bp, Zea mays
  Intron number 1 from transcript GRMZM2G573401_T01 (locus G RMZM2G573401) derived from phytozome v7.0 (chr-ID 7; pos 1 50741731 to 150742601)
aacctcctggtagaaataaaagaagcttcaggaacagatgtatcggatagtgccacaatgcggcaacaccactacaccagtagttaatagcccaaacacctcgaattctacaaacctttacattgagatattcgcctggttgaaagtccattatctgcatatgagagaaaaatattatataatgctcgtcatatgagctaaaagaaaagggcaacaaactttcaggcccttccaaataacatgtttaactcagcaatcagtatcatcactacccaactaccaggtgcattacaaaggacatttttgttcaacaccactccctgatatggaaatcttcttatcttgtttacagatgaaattgagtaatttatatacagctaagagtttaaaaaaaatgcttgagttgctgcatgtcatgtgcctgtcttaagcataataatgtgggatacattgagtaaataatgagcataaagtgaccaaacgcacatggatattaaagtcataggacagagaagtcggtagcagcttccttagttgaaatacctatttaagaaacaagatacaacaaattacatcagcactgaggacttgcgattatgacagctaaaataactaacatggtcagagcgagacaagattgtaagctgtcagtgaaagcagccattactttttaaaaaaaagtgaaagcagcagtaaatgtgtttgaataccctgattctaaaagaaaaggaaacaaatttgattatgccacttgatgtgcatggtatgaaaaacgagcctcctaagtggtaggaagtccaagtattttgggtgcatagagtagatgatgatcacagatataacgctattgtacctctcccggggtttcgag

SEQ ID NO: 5232 - DNA, 288 bp, Zea mays
  Intron number 6 from transcript GRMZM2G168190_T02 (locus G RMZM2G168190) derived from phytozome v7.0 (chr-ID 6; pos 1 16340483 to 116340770 reverse strand)
ggtaagaacgtattcaccgtgttgtcagtgacattatggatcataaagttttgttcacagtaatttttcatgtttaattgttgaagacatcaataatctttaagctctcaaaatgagaagttttcatctcgagtccttgataatttgtttttctgctagtatcttgatgggtttaaaactttagatagagaagctgactttgagccttggtctttagtttctgcagtagcttcatggttttaaatatatataagttgattggttctttttctttcagctggcagcttg

SEQ ID NO: 5233 - DNA, 721 bp, Zea mays
  Intron number 1 from transcript GRMZM2G168190_T02 (locus G RMZM2G168190) derived from phytozome v7.0 (chr-ID 6; pos 1 16342039 to 116342759 reverse strand)
cctcgtactactcaatctggtcactcttatattcggtacgatcatacagagcctcgccttcttgagaccgacggccggacgggttgtttatgattgcacctcacctgttcgatgttatggttgacaataaaatggtggagcaggtttggggtgggggctgtttcttctgtgctcaattccctgagttttgctgcggatattaatgtgtgtttgattgattttttcactggggattaatgtagccatcaaatcaaatttaccgatatgaatggtgatcctactacaggcttcaaccgtgtgagagctattgctgtacattccttttggtcaaattgtccatttgtccttttgctaaatgatgtggccacttcgttttcatttcatcttttgtggtgtcagcagaaaaggtcacatttggttcagtttattctacatttcttatatgtacaataataagaggatgcattttaatagtgttgagttcaaaacatacacacatgacacatatataaattttcaacacatagtaatcagcatgcgaaagttgcattatcttatcatctgctttgtgtgtgtgtgtttttcttacacggatatgttttgtgtttgaactagtgctggtagttattctgcatgctgaattgcctcgtacatattcagctaagactcaattttatttctttcagctagcaacatttcagttgtgaaacaggcagaggct

SEQ ID NO: 5234 - DNA, 1026 bp, Zea mays
  Intron number 1 from transcript GRMZM2G018589_T01 (locus G RMZM2G018589) derived from phytozome v7.0 (chr-ID 3; pos 1 70369446 to 170370471 reverse strand)
ctctttcatctactcttccatcgatcgatccatcggtaagaacatgcgatgccctctgtgtgcgtgtgaatctatgcatgcatggatctgccctcgttccttttcctgtccattttcccgtttctttcctgcttgctatttctttgggggtgtagtttcagttttgccgcaaatggggagctgcacttagaactgcgactagttgcaacgagccagaaaacgatctgcagcagcacctgcggggcgccgctggctccctgatctgaatatctgatgcgtagtagctagctagatctttcgcgtgtaaatttgttggatttggcgcttgctatatctttgcctctccatatatagatccggctatttgtatatcctcgacaacttttcttgcttctcttcttgaattacgtgctagctcctgcttaattttgtcatctccatgagtctacatatcttttgctggatgttgttgcacttcttcttgagatatatagctcctctctgctagctagctagatctttcagatctatgatgactttacaagttttttcccctctctcttaaaaaacagcatgttcttaagatctatttgatctgaagactgaatgaagcagcagctatagcctatagctgtgtgaacctttgagccatgaattgctgattagctttgtgttttttcctctgcacaatatttccccttctaactaagcacaaaactgaagtgcaggcatcctggcatgggatgggaaatatgtttgtgtttttaggtttatatttgttcctacacatacatatatctagttaccatacagtacagttgagctcctgcttaagtgcttagtttcgcaagaacatcaaactaaaccaatctttttttttctgtgtgatatgaatttgatttttcatattcaaagcatatatagtacaacggaatatactactgataaaactctcttgttcttctgataactatttgacatctatgaaagcaataatttctgtgactgttacagtactgcgtgagg

SEQ ID NO: 5235 - DNA, 550 bp, Zea mays
  Intron number 2 from transcript GRMZM2G154165_T02 (locus G RMZM2G154165) derived from phytozome v7.0 (chr-ID 3; pos 1 96937189 to 196937738)
agttcgatccctacttcaattaccgcgttacccaggttttttcccgtggtgcctctgtgtttgtccacagcctgttattgtcttattgggatgcatcaggattcaggtgttgagttcgcttaggagtcatgttctcttcaacgagttatggggttagggacttcagtagacatgcgagctccatttcttttgggtcactaggtcgacacaaaacttggtatgcaattaatttgaaaatggcattgccactgtatttaattagttagctgaccaggaaaaatctgggtaccacttgcatccctagacttctttgcaaattgtctattgtaatatacactgttgtatagtctcaggtgacatgtgggtgtattgaatggtcccaacatttgggtgaataaaatggcaggaatgttttccaatgtacatttgctgcttggatttgtgcacaaatgttttactagtgtgtcttaatgtttcaaaagcagttgtgcacatgcacttaaattttgattcattgtaatttcccccttgtctcagttcttgtcaaaga

SEQ ID NO: 5236 - DNA, 690 bp, Zea mays
  Intron number 2 from transcript GRMZM2G428197_T02 (locus G RMZM2G428197) derived from phytozome v7.0 (chr-ID 6; pos 1 68974398 to 168975087)
actatactcctccgtctccaatcatcaggcaccaggtgacgatagattgagccgtcatggcccccgtccctatatatataatatccacaaatgctgatgatcgatcgatatttttattgcaaaagaatacacatcttgttgtttattagaagctagtgtgtgtgcgtatatatatatatgtcaaacttggttaaataatatttcatttctctcctgaagcatgcagatgtatacttattcatttttacaagcagtcaaactaatgataaactagttagatcgttcgtttacacacctgctgtctgctgagtgacagacaataataatgagctaagcgcagaggaaagaaaagctttatatgtatgcatgtaccaatcagttagctgtagctacctttactgactttgatagatacatgtctgttcttctggtgtcagacaaaatttcatgtaataataagctactaagctagcatatcatcattttgttggccaaaattaaatatcaaatctaatgaccggattgtactttcctcatcctgactgcttgcaacacattctgtctgtctgtctttctgttggttctacaatttgtcagcacatatgaaattcttcttacatacctacttacacatgctcatgattgtgctgtgcagcttgcgacgcaacttggattctctcctctcctctc

SEQ ID NO: 5237 - DNA, 579 bp, Zea mays
  Intron number 2 from transcript GRMZM2G372484_T01 (locus G RMZM2G372484) derived from phytozome v7.0 (chr-ID 3; pos 2 18118490 to 218119068)
ttactgatagaagtgggaacattcttcctggttagtatcgtgatgttcatccttgtttaatgacaaccttagcattagcatttgcttgtcactgagattggaccctggttggtttaatgacaaccgccacattagccataatgtatctttgggagatctccacttctaacacaagcatgatactattttgaacacatacatgcatgttggctgtaatttgtgactcttttcttcctgttaaaatacacatgaactttggttgataccgagatttgtcatccgcgggagtttgatttctacctttgtagccatgctggaattcaggtatgttttagcaggtacttgatagtgtgttatattcgtccctctgaatgtagattcatttctccagggaaccagcaggccaatacactatcatgtcctctacgatgaaaaccgtttctcggctgatgggctacagatacttacaaacagcctgtgctacacgtaagcttagcttgatcctgatccccaatatatatttgctgccatctgaactcaagtttttttgttgttgttttgcaaatgcagatacgcacg

SEQ ID NO: 5238 - DNA, 748 bp, Zea mays
  Intron number 1 from transcript GRMZM2G157073_T01 (locus G RMZM2G157073) derived from phytozome v7.0 (chr-ID 6; pos 1 68353768 to 168354515 reverse strand)
gcgtgggaagatacattcagtttgttgaacaggtaaacattcagtttgttgggacagcttaactctgcagaggaattttgttaagtactttgatagacaagtgagttgcacgcatcgtgtgaattgagatgtttctattgtgtgtttcctttgataaatttcacagccttgctcgctgctcagtttgttcaatgtcatttgagtctttgctggtcaggtttgaacataaaggccttgcttgagttgctaaatataatctcgtatgctggggtttagtcattctatactcgagtagataagttttgtaacaacttgctgttttgttatttccttgtgacctaatgttgataatttcatctttagattatgccaaccatacaatggggaaggcgcacaagaactgtcttggatgttggatgtggtgttgccagctttggtggatacctgcttgacaggaatgccattactatgtcatttgccccaaaagacgagcatgaggctcagatacagtttgccctagagcgtggaattccagcatttatagcagtaattggaacacaaaagcttctgtttcctgataatgtgttcgatgttgtacactgtgcaaggtgcagggtccattggtatgcaaatggcaagtattctatttcttcacaatattcataaaagccaaaataatgcatccttattttccttgattttgcttttaatcttccactttgaatggcaggtggaaaaccattgtacg

SEQ ID NO: 5239 - DNA, 564 bp, Zea mays
  Intron number 1 from transcript GRMZM2G317189_T01 (locus G RMZM2G317189) derived from phytozome v7.0 (chr-ID 3; pos 5 3825406 to 53825969 reverse strand)
ggctgcaggcagaggagacaagggagctacggacggtgagttgcctcccgttcgatccgtggccgcaataccctgctcaaactgcatcgatccgtggccacattttgatctggtctccaatgcgtgattcgacagataaacacgtggggcgagatgatgtacgagaagatcaagaagctagataaggagctgaccaggtacaaggagcagatctgcaagacccacccggcccatcccaggaggtcgtcaaggcctgtgccatccgactcctcaagcacaagcgcttgtcaattaaagttcaatctttactctatctctgctacaacactgagtgtaatgttatttgtgctcttgttctagcttagtgaagccttcgaatgtaggttttgctttgtgattttggtatttgtgtaatgcagattttttttgtaaaatggattgttatggctacaaaactgttaggagcttgtcacttccttgcaatgtatacatgcttggtcaaatattatttgagtttcttgacaagtctgttttaatctcactcctgctatctctgccctaggt

SEQ ID NO: 5240 - DNA, 622 bp, Zea mays
  Intron number 1 from transcript AC213884.3_FGT006 (locus A C213884.3_FG006) derived from phytozome v7.0 (chr-ID 6; po s 140524444 to 140525065)
ggattacaactggtgagttgatacctggcacagattctcgatgtactacgagattcactaccattttttgttgtattgtagtcagctgtacaatatgccatctgtaacgaggcctgatcaatgactttcaaggagaaatgcaaacatagttctttaatggcctatacagcctgtagaatgtagcactgttgattcaagtcggaaaggaaatggaggagcaactaaccaccaaagtaaaagaagaagagtatctcttgctacaatcaaataagaaagttgaagaagttgagactacttccaggctaaaatcacagttatgggataagaggacaatttttagagtcacatggataatgaacaacaaattatcaatgtttgttcattataaagattccttttaattttagtcattccacatgttcctgttcttccaaaagctcgaaggaaaaaaatccatgcaaaggagctggaaaaaaaacaaatttctaggagaaatctaaggtgagagctacttgcacattatttgcataaaaatctatgggacacttgtatgtttcagttctgaaggttaatctatgcacactcaggagagccaagaggctgagatcaaactgctgaggaa

SEQ ID NO: 5241 - DNA, 1051 bp, Zea mays
  Intron number 16 from transcript GRMZM2G314924_T01 (locus GRMZM2G314924) derived from phytozome v7.0 (chr-ID 3; pos 8308757 to 8309807 reverse strand)
ctcttgctgaactatcacgtgcccttgataaaaaggcaagtgcagaaaggcctgtgcctcattcttgtttctgtagtgtttgaaagtagcaacaaaataaaacatggctagataccaaccgtgtttctttctttaaaaagttctgtcttgcaacaaagaactagatttgattaaaatccattcactcacaatacagttggcataactgagtttacattggtttttacagcagtgctattaactgactcatggtagtgctgacaattcagctggctcgtgtttgatttttacatcagtgttctatatttcagttgcacaatttaatgataattttgcacacatgcagtagttacctgtcagcagtctcgtatcaagtttttcagtttgttcagtttgaaagtagtcggcgcatgtatctaggttcatggtcatgcccaggtttaggggccactaaggctttacttagtcatgtagggccatgtcgtgaatatatttccctatttaaattcaatcaaagaactagaaagctgctgctgccgcagcaccaatttcctctgctgtgttcttcagacaaggaactcacctaacattcttctcctgcagcgttttggagctgcattttttttaaaaaaaactgttataatacatattgcgtctcctgtatttagccgtatattgccgagctgggctcctctcctgcaagcgtgcagggcccagcccatggtgtacgtaccagccctggttgggtaagccgctcctccctgtcttgagtgtgccgccaccaggagcccctcattagggttctcctccctataaatgtaacccttctgcaatataatcatcaagtcttgcggctctacaccttccaacagaaacgacagtttgtatttcactatgaaaaacctaattggcatggtattattgtttgtttgtacatttatcctttggatatttgcatcataaaaatatagatttaaatatgttttagatgttttggctataatgaattgctattttcttttaggaagctttattggtagagttgaggcac

SEQ ID NO: 5242 - DNA, 659 bp, Zea mays
  Intron number 2 from transcript AC188970.3_FGT001 (locus A C188970.3_FG001) derived from phytozome v7.0 (chr-ID 3; po s 202491527 to 202492185 reverse strand)
tattaatgtatgtagtaaacattaccctatgcggcaagtgaactagatcaattgatatcccatgatatgaaggcatgtatagtggtggtaatggactctaaattatacactatataaattaaggatcggttctgattagaattgggttctatctctatttattttttaactaattaaatcaattaaggactcaaataaattgtgaatagacatttggatcgtgatccattatcgctccagatatagaattatcacatcctactgatcaatttttctcattgcaaggaatttttttttctatatctcggatgcaaacatcctcttttacgcctctcacattcaccacttagagcctcacaaaaacatatcaaaatttgcaacttaaccctttaataatgtatttttcttctatttatatagactatcaggtggtgaatgtgagggactgtaaaagagattctttgtgtcccgtatgcaaagaattttttcccattgcaacgggatcgggtgcatgattttgtgttttgcgtgcttcggaattacatcacaaatgcatgaacggtacacattgcttatactccttagtagactattaggaaattatagcacgctcgctattaaaccatgatgaaggtcagaaccttgtgtgccaatatatc

SEQ ID NO: 5243 - DNA, 674 bp, Zea mays
  Intron number 1 from transcript AC188970.3_FGT001 (locus A C188970.3_FG001) derived from phytozome v7.0 (chr-ID 3; po s 202492196 to 202492869 reverse strand)
gggaaacggtacggggcaataatgaggcgggcgcgcgtacgcatggaaccgtgggacatccctcgtacccctacccgttgcactttgaatgccatgatggcgagaccgaggtcggggttcggattcatggatggcttcgctctcgtgtgttgtgtgaccactggctcccgactcgagttgtggtttggattgggttggttgtatgtgtctgtcgtactaaagcataaacactatctcaaaagagagagaaaaaggaattttatttttactctatttgcatgtggacttttatcaaacttttagacccttcataggactctatctcaaaaaagatagagagaaaaaaagaattttcattcttactatgtttatgtttttacttgcatctgatctactatattcatcatgagagacagagaggacttaatcgtcgatggcgtgtttcataacacgttatcagttcgacaagctccgcgttgacattatcgttaaagctgccactgctcttctatgttggagcttgtgcaaacatcctgttgcgactattttgatgtcgttggtatccccaagcgttgttagcgaaacgaatttacaacctctacctacaattaatttacactgtatacatcgttgtcgataaacatgtagatctgcaacaatcaggtacttgggca

SEQ ID NO: 5244 - DNA, 780 bp, Zea mays
  Intron number 2 from transcript GRMZM2G053086_T01 (locus G RMZM2G053086) derived from phytozome v7.0 (chr-ID 7; pos 1 38775222 to 138776001 reverse strand)
ttccttctttttccctaaatacccaattcttgaaggtatgactataacaactggggtgactggtcttgatggtgttatacttgagtgggttttgtagtctatatatctcccattcctttttctctgaacctgacgtcattcagaacctgacttcagccagcaagatgattaattcagtgccaagttactaataaaattcattttggtttcttatgttgcttttcctatttgttatttacaacgtaccaagaaaacaaatgatgtagttggggaccggttagagctcctcaaatgtgccagtgcagactaggagtgttgaccgcactgatgggcgttagtggtgccggcaagacaactctaatggatgtgttggctgggagatgaagtggacggttacattgcaggaaacattagcatttcagtatacccaaagaaataagaaacctttgcacgtgtatcaggataatgtgagcaaaatggtatccactcgccgcaggtgacagtttataagtcactttttttctcagcatggctccgccttcctagcgatgtagattcaaacaccagaaaggtcaaccaaacactatatttaacttctagcttctatactttatatgttaggcaacatttgcttacctttatgcatgtagatgttcattcatgagatcatggagcttgtggaattcaagccattgagaaatgattttgttggtcttcctggtgtgaatggtcttcaactaagcagagaaaaaggcttactattgctgtggagctggttgc

SEQ ID NO: 5245 - DNA, 985 bp, Zea mays
  Intron number 1 from transcript GRMZM2G055527_T01 (locus G RMZM2G055527) derived from phytozome v7.0 (chr-ID 7; pos 1 70026193 to 170027177)
ccaccacaggggaatacagatcgacgatccgctgggtgcgtctcatttcccggctcgcagatctgaccaactgttgtgtgttccgttcgttggtgtacgagagtagctggggtctccgcgggcagttcttgcgcataggtcttccccgttacggagtattgtgtagtcactttgcttcaagaaccattggggatcgagtataatttgatgattttagggcagttcacggtgcctgttatgtttgttctattgtgttttcactatggttatttatttgtacctttttctagcgtactgggtgtttgtatgcatgattgatccgctcatttagggggtgtttggtttaaggaatcactacatccaaattgaggtggtgcatcatgggtttattcctcaaatttggtgggatgaccctattcttcatattagtactaactaattaactatgaggaatgaggtggtgatggatcaactcattccattccacaaaccaaacaaaaatagtgaggagtgagaagatgatggactagctcatttcttaaaccaaacacctacctagcccttttacataatccatgtccaatgcaaccattggctttcattgccctcagcaatttttagggtattagttactaaggtgtggtttggttcacgaaatgtaacataaatggtaattgtaatgattcacgttcgattaccggctgtaacaagtttgaataagacggtattagtttctagtgttattacggacttaaacaaacatggttttttaatgttatctattaccgttcacgttacaaataaataggtgaatcaaacagcacctaagatatagtacgcttatcactatagtgctactactttccagctcctggagtagcgaatattgtttcagggaagcagagatatttcctattgttgctggttccgtcttatctgtgtactgatgacttttaggcatcccgtgcggtgcaggcttgcaaac

SEQ ID NO: 5246 - DNA, 817 bp, Zea mays
  Intron number 3 from transcript GRMZM2G451217_T01 (locus G RMZM2G451217) derived from phytozome v7.0 (chr-ID 6; pos 1 00460227 to 100461043)
gatcgtatgactggtgattggagaagctagagtgcaacgacaaggagacaatggagaataagtatttcaccccaatcaaaggtgaagactagcattctcatgaaaaagtcagtcattactgatattttttctgttcaggatctaattgctcatctgtaaacttacttattcgatccatatgttcaaagtcctcattcctaaataaatgtcttttctatatgcctatttatattacgcgcatacaaactgtatatattttgtatacaacctgtaaatattgtacatcttttacatagacaatgtacagattgtacatgtgatgtagtcgtgcattgtactactttggtatgcacaagaaaaatggataatgtaaatttgttcagatattgatgcacttatccatcatattcatgcaaattttctggtaattaagctgattaattatgttgcaaatttcaagtacatgatcttaaaaaaacaaatatatagcacatctagatccagttatcctctaattctaaaacttcaaaaggtgcaacctaagcacaagaataactttttttccaaatttgttgggtggactttgtccatcttgcattaatagagaatatgcaagtgataccgaatccaattatgtaaaaaggggaacatatgaactcaaaaaagtatgatctttcactgatataatttaagatttaattggttcaacgaggcacctttacaaattcaggaagatgcatttgtttcagattatgaaatatgcaaagaatagtgattttacctcattgttgttgacacagatcaaagggaacctggt

SEQ ID NO: 5247 - DNA, 360 bp, Zea mays
  Intron number 2 from transcript GRMZM2G003869_T01 (locus G RMZM2G003869) derived from phytozome v7.0 (chr-ID 7; pos 1 28138227 to 128138586)
gatcacatactaccaaagtaagcatcggaaagcgtagagatatagaggtagcgaagtttttcttcggtcatcactagcttgtctcacattgcaaagctctccctaatatgcaaaaagaaaccattttccaaagcaaggactgagctgaatatatcatatatttttggtacttaatatactaaaaacaggtttgctgagcatcagaattggttcctagcttggtctaggcgcacaaataaatatgggaaaacaatcaacatataaaattcaaataatttgaattgtccttttattcttgaccactgttctctgttctctcccacctcatttccgaagaattccttatgtttcaggagaagc

SEQ ID NO: 5248 - DNA, 496 bp, Zea mays
  Intron number 2 from transcript GRMZM2G130375_T04 (locus G RMZM2G130375) derived from phytozome v7.0 (chr-ID 3; pos 2 20656165 to 220656660)
gccttaccgcctagatcacatccttgtggcaggtttgccgccgtggttgtttggggctcgccttcggcaaatactttgccaccaatgcttgtggatgctcgtgtcatctccggttggattcttcatgtctttttatttttttttcacatgcttagcatattttttgggcgtcttggttgatgaccccctccccaactttttcttagtgttctaggttactttgggttgtctaccactgttttggtggtttgtaacctgcgctaattctattctaaatgaaacacatgccaaggcatgttcatgaaaaaatgtttttgcaatcaaaagcaaatgcatctagcacaatttcattactttgacggaatacattggggcatttggtacgtaatgggaactggttatatttcaatcctttcataattaaataatcccttatgttgatcaagttgactgagttcctccccttcacttcctcaggtttgctgagagaaccgaa

SEQ ID NO: 5249 - DNA, 375 bp, Zea mays
  Intron number 2 from transcript GRMZM2G152775_T04 (locus G RMZM2G152775) derived from phytozome v7.0 (chr-ID 6; pos 6 9570293 to 69570667 reverse strand)
tctgtcgctctggatctgtaagtgccattgtcttctaatgatagtgttgaattatgatgtttgagtagaagcttttttcttactttgtcggtttgtccctttgacaagttatataaatggatattccttgacggtagacggcttatatcttactgtttgatctgaactagtcaaacaacaacctacaagctagtagttattctcttctcattgctgtttttataccaccttattttgttttgttttaatagaaagtaattcctccttttcatggtgccagagatgacacattcctttttgcaagtttttagttcacatgtaaaactcttgctattttaataccacaggctgctgatacacaagtcatttcggatt

SEQ ID NO: 5250 - DNA, 369 bp, Zea mays
  Intron number 4 from transcript GRMZM5G874250_T02 (locus G RMZM5G874250) derived from phytozome v7.0 (chr-ID 7; pos 1 4905806 to 14906174)
gttaaactaaaattcttgacatacaaggtactcttctatcagtattttcagcttttttgtaggtattattggttgcttcttgaggtaccacgctagtgtttgctactccgggttgtccgggttcgttttggtgtgcttctaaaataagttcggaaatgttattgctacgcttattgtttcctattcctgtaattgtgatttaatctacttttatttatatgtatgtctacctttcgcttcaagctgattttgtttttgaattggaagaggactaaaaccattaaagttaacttttgttttatcttgaatatgcatcctaacaattatgttattttgtttgttgatagttgcgaacatttttaattcgta

SEQ ID NO: 5251 - DNA, 762 bp, Zea mays
  Intron number 2 from transcript GRMZM2G127160_T01 (locus G RMZM2G127160) derived from phytozome v7.0 (chr-ID 6; pos 1 23434458 to 123435219 reverse strand)
ccggtcacttcggactccatcgtcaacctcgatcagtgagtgatatgctttgctgcctggggatccgatccatcatcgataaatcactcgttattatttttaccgtctgtactgtatgtattggtctctcccactgctcgtccatcgatctattctgtcctgctggagtcactagtgaaggtccgttccatttggggaaccagatcgagccctagctatgcatatatgtgagtgaggcatctggaacgaagacgtacactagtgaagtcccgctcagggtcctgccctctccatctagcaaggacatgtgcatcgatccttgttgcctgattagttgttgattattagcagctagtgtttgtatacttttcctgattaattgcagatatatagtagtatttgtttatttcgtttgattattatatatatcgtgcttttgttctgtttgtttgtttggttggttaattatttaggaaatagtgcgaagttaaaatagagatgggttggaaaagatcgaaatggcatatatagtggccctaaaccaaaatatacatactgttagtttcagacaaaacagtacagccttgcaattaccaaccccttatacacatatagatgcatggacgagtactcttatttgaatcttaactttgttgactgttctctgtatgctatgaacttaatcgtcgtcgtccatgcaaagcatgcatgctactgtatgtttttgacttttggttggttggttgcagtggcgacccgact

SEQ ID NO: 5252 - DNA, 1021 bp, Zea mays
  Intron number 1 from transcript GRMZM2G020998_T01 (locus G RMZM2G020998) derived from phytozome v7.0 (chr-ID 6; pos 1 38754913 to 138755933 reverse strand)
cggatttagagttttcaatcggctctttgtccaaggtatgttttcgatcatccttttttgccaaatcgcctgcagttttacattttttcaagcacttggatgtttttccgaacaaaagggctttcaaatggaccggatttttttcggagcatttgttcgttgcagcaaaatcgctgagtttgttcggcatattttttttacagatttcgatttaacaacagcaaacctgagtaagaacaagtaaaatatgttcagcaataatgttcagtaataaacataccaatcaataataatgttcagtagtccataagcaatttgaacttgagtaacaacaacaaaaaatattcagtaataatatttggtaacaaccgtatcattcagtagtaatgtgcagtaagcgcatacgctcagtaataaatgtgatcttgcagtgttaatcattattcagtaatatttctttgagttattggcaccagcaatatatgaattttagcaatggggtaataataatggacagtcagtacaactttctttttttgattgttttcaaatttgataacaagtatctaactatatggaggagaatagccctatgcaattagcgcatatgatgagtaatatattttttcagttataatggtgatgagtcagttattatttttttgtcagtatctctttgattttattattatatatataagaatgattaatgttcagtaattagtattgcaaccagtaataatgtttagtagtcaataagcaacagtcagtaatactttcctttttgttttttcacattcgatgattagtagttgactatacggaggagaatagacatatgtaattatttattcttatcagtaatatccgtttttagttataatggtgataagttaattataaaattttctcagtagcttttgatttattattatatagaatggtcaataattcttgttagttagtaatatatatatatatattgtatataatttcttttatgttatatgtttgcagataa

SEQ ID NO: 5253 - DNA, 905 bp, Zea mays
  Intron number 1 from transcript GRMZM5G833593_T01 (locus G RMZM5G833593) derived from phytozome v7.0 (chr-ID 3; pos 1 49246469 to 149247373)
tgttgggcttcggcacctgcacagaggagacagaggtatacagagccacgcagccaaggatttcgaattcgtgacttgtgagtaaccaagtatcgattttctttttaatttaattcaataaaatgttgtttgatgaatggcaatgtctagtttccaacagtcatgttgatatttgcattttgcaatatccaaggtaagaaagatgggttgaagagtggcgcttctgaggactgaggaaccatatgataaatttgaatttgccccacgaggacatatggaacgaatacatattgtgtttttttccactccccacccacccaccgaaagaactatgaatttttaaaatttgtatgtaggattgagaatgtccaccagtatggtgtcggcgtgaaatcgttaagacatatatgatctaaatggctgtcagatgctatttatttgatattttctgtctccagaatgtgtatttgtttgatctatttgaattaatattatcattattcattatttatgtattttgttagatctattagtgtgtgtatatggcacgaaatttgtactcttctgttctatacccccccccccccaccaccaccacacacacacagaactatgaaattttaaattttgtatgtaggattgattatgtcgaccatcggctagtatgatgtcggcatgaaattgttaagacatatagatctaaatggctgtcaaatgctctttatttgatatttatctatccagaatgtgtatttgcttgatctatttgaattaatatcatcattatttatgtattttgttagatctattagtgtgtgtatatggcgcggaatttctaaccttgtattctatactccccccctgtcttcttgtcactggctctggctgcaggttggagtttctga

SEQ ID NO: 5254 - DNA, 694 bp, Zea mays
  Intron number 1 from transcript GRMZM2G005849_T03 (locus G RMZM2G005849) derived from phytozome v7.0 (chr-ID 3; pos 2 30001952 to 230002645)
aggtctgcttactctgctattgtgatattgtataatataaaatagagttcttgcatgttcttcgtttcatatggtgacatacttgttactgtgtgtgacattgcttgatggaatccttgcggtattgtattgtttgttttgttctatatagtctttacagttgtgtgtgcacatggaccattgaaaccacacgcctgtaccaacataccaacacttgctttgagctcccttcacatgggatgtccccttatcttccctccaatttttaagcagagaatctgccctttagaggctggaactttgttccattatctaaaaacaatttaatacttacgaatggttaccgcagtacattatttactgtttaacaaatggaatatcaagaactgccattgcagatctgcagtttatccaacgccagacttgaatttccttttctaatcatgtaatttttttcgcaatactcaatgttagatttcaaaaattgatcctgtgtttatggacatttatgacactcaagtctgaaccatcatagacttcaatgtatgttatcatgtgcatcctcttgattctgttgtgaactaacgtggcaccatattatacttggtaaatgacaagtctaacttgatttttctctcatgtctgttgattctgttcaggtcttgaaagagacactaactaggcacggcttcac

SEQ ID NO: 5255 - DNA, 627 bp, Zea mays
  Intron number 3 from transcript GRMZM2G069405_T01 (locus G RMZM2G069405) derived from phytozome v7.0 (chr-ID 7; pos 1 63918360 to 163918986 reverse strand)
atttgtgtaaccacaattgatgtaagttctctacaactccatgatgctactgctatcaatggattctagggactttggaatatgaaagttttgtctggtttcaatgtcagtatataattttccgtgacatgtttcatatctgtcttattaattagaaactaatcaaatatatggttgataggcttaactacggtagtatatcttggccaacaaactgttcttttacgatgatttctaattgtttttatggatgaggtggtgatggatcaacccattccatttcctatactagaaaaaaataggtggtgggccactccataccttaaaccaaacattcccatggtctcttttctggatcaaatcatggtttaatattgaacaaacttggcaatgccttaccatgtttaggagtaacaagtgaattaagtcacttcaaatgtaggaataacaagtgaatgggtggagcgtggactagttcttcaaaacaatttttagcactaatttactgttcaacttgtataaatcagtaatgacttattattattatgttgattctgatgggctgattaatttattttatgtgtttgagcaggatatcaaggagcaacttgtgtctacagattgtgc

SEQ ID NO: 5256 - DNA, 752 bp, Zea mays
  Intron number 3 from transcript GRMZM2G087714_T02 (locus G RMZM2G087714) derived from phytozome v7.0 (chr-ID 3; pos 1 478036 to 1478787)
aagagcagccggggaaaggtgaccactagaatacctccaacagtttcgtttaattgctatttgctatggagttgaatcttacaccacaaataaccttagatgactacgaaccctattctgacttgtgaatatgaaatagcccaaccaattaataaaattgttcaacgggatacctggttttcaaaagtaggcataggtggaggataaccgttgccccacaaacatatctaccaatgacctttcagagtgttgtgtccccaagaaaggatggtatccgtatgcattaccagaagatgtgctgttaaatacagtgtgtaagactcccagatggctaaatccattttgaagaatgcattgacatcatttataaaattgggtctagtacaaaattgaataaaatggttttatagatgttccaaattaactggtaagatgaaggaatattgatgtgagaaatactgcaaggattgaactatatgctaaagcagtcttgaagaaaaatgttttctatagatgtttttaatacttcgtagcactttcctttgatgtaagagtccttgaattgttttctatgttttatcagttattttattagaatattagtgaatagtgcagttagctttgaaaaatcgaatgtgctaaagttggtggtactgcataagttttctagaatcttagagaagctttgatgaattaatctttttttttgtactacagctgaaactgacggagtataacgccccctgtgggtg

SEQ ID NO: 5257 - DNA, 794 bp, Zea mays
  Intron number 1 from transcript GRMZM2G093766_T01 (locus G RMZM2G093766) derived from phytozome v7.0 (chr-ID 7; pos 5 074533 to 5075326 reverse strand)
caaaacgttctgagcttcgaaaagctgaatctgaggtatgttttctgtatgtactcgaattctatacttctttgcactatatgtttttttcatacagtttagcacaaagtgatttatctctgttttttttttgcacctttgtgctgctcggactctgtctggagggtgcttttttaatttaagcatgtacataaactctttcctatcttaattgaaaggcagagctcctgccattgcgtttcaaaaaaaatgatgcatgcagacatttaaggatcttatcaatggctcatgctcattcatgtgtcaaatagctgcatataagagtgtatcattatattaagaagacagactttagaacctgtacacattagaacccactcacaccataaaaacagagtgacagactactcccagctctgtttatttttagaaacagatcagatcaatttgagcaatatgctaggtgcatctaatttatttggtccattatgtgccttattcattttctatagtaatgtgcacattataaagtaattcttatagatgtttaggcaggatttcatacattatctttttagtcagcatgacaattatttgaaaagcaagataacgtcaattagatatttctgatagcatgtaagtgagtcactgatgatctgctttgatgtttattcctgaccggttgttgttggagtatgcttctatttgagtatttgactacaagaacacttgttgtttcaaattaatgccacaacttgtttaaatacttttcctgtttcatttaggttgacatt

SEQ ID NO: 5258 - DNA, 494 bp, Zea mays
  Intron number 1 from transcript AC209738.3_FGT003 (locus A C209738.3_FG003) derived from phytozome v7.0 (chr-ID 3; po s 219098920 to 219099413 reverse strand)
taccctaaacgcaggaattcgaagaggtaagataggcagaatggaattcgaagaggcaagacatgtccaatagacagaagaacaatacaaagagtgatctaaccaaaacaaacctcgcaaagaagagcgggtgaagggcggtggatggatgtatgcgcacgcacctcacctgacacctggcggtgatgaatccgctgttctccctctcgtcctcgtaaccgctcagagtaggtacaaaagcattaatacacaatcacaaattaaaccaaagcaacgccaagctactaagccacaaaacatctataggtatcttagatacatcaaaatcctccctggcaattgcatcaaattaaactcttgatttaattcatgctctccatgtgctacatgttacttcaagagacaagcataaacggcgatcaataagaaaacatataatacatatataataacttctacctacattgctgctgcgtttagcggtgcatcaagcc

SEQ ID NO: 5259 - DNA, 753 bp, Zea mays
  Intron number 1 from transcript GRMZM2G332258_T01 (locus G RMZM2G332258) derived from phytozome v7.0 (chr-ID 3; pos 1 72855416 to 172856168 reverse strand)
ctgatccgtcagaatttctgcgtttggccgtgagatcgaccgagctcacgaggcgcgcgctccggtagcctggacaagacgccggcgagctcatcacgaggcgcaggttccgctaggacaagacgccggcgagctcatcacgaggcgcgcgtaggaggaccagacgacggcgggccgggggtgtattggtgagtttccatcgattcgattcatcgcggctagtcggctacataatctacgccgcacgaggcgctatgattttttttgaaaaaaaaacggaggatcgcgggcatgtggagaatcctcggttacgttcgattctgtggcggaaaaaaaatcaaacggtcgtgaaaatcaaaatttagggttagtttgacaactacatttttcgaaggaattttttaaagagaaaataaactaatttatttttaaaaaataaaaatctcgtgagaaaatcgggttcccaaactagactttaatctccttactctagacgtttggaccggattctcgcttctctctatggagaatcagattttaagtggaaccaaacatgcacatggatcaatgacccattgtctttctttgctttttttttaatcacagcagtacgaagaacacacggcctacttgacgacaaggagaggcaggtgacagcaaaggaaaagtgctccgcgctcaagtggaagtgagaagacatggcacctacggctggaagagaaagttggttggacgggaccgagagctccggca

SEQ ID NO: 5260 - DNA, 1027 bp, Zea mays
  Intron number 1 from transcript GRMZM2G022279_T01 (locus G RMZM2G022279) derived from phytozome v7.0 (chr-ID 3; pos 2 25123238 to 225124264)
ttactccgacggccgcaacctgctcgacttcttcggtaacctccgccctcgtcgcgccaagcctctccttgctttacgtgtttgttattagcgcttgctgctcgtcctcaccctcgtcctgattaatggggatggaatctccagggctcctccgtgcgaattcaatctcactcctctatggatttatttcctacagtaatattacatttcgcagaaataaacagtatttctggtgtcaactctgcctacttagattgtttattatcttcctcctcccttcctttcttgccgcgtactcgtccaccatgtgatagcaggagatgggagtcgctagtcctttgatttttcttcaagcaatagtctggtcatcggtcctttttcggaggcgccgccagggccatggtgttgaggcaaatatactatggccagttgagttctgctatttttttggaccctctctccagcgagaatatgttcctcccactgaggttgggaatttgttaactgtggggtttacacaaaaacaggtcttctaattgcagctggaaacgtccatatggggtcagtgaaatgtttgctaagcacattcgagaacatgctcggtttcagaattcatgaattataggcagctgcaaccatttttctgccttttctaatattatatactagtcacatatgatgaaatctggagatctcaagagctgggaagaaacattctagtgcaaatacgcagtttatacagggtgtatcaacataagtttggttgcctttcccagttctccccaaccactcgacactggtggcatcatctccttgaactagcacacaattggtagctccaactaccagttaaattggtggcactcatcacgtggtcaacacttattatatcagcctttcatttcccactcatttatctttctgtgccttttcatgtttccacatctgatacttgtcctgtcctaactgtgttcttgacatgaatttgttctcttgttacattcagcggaggcatttgggctgccgt

SEQ ID NO: 5261 - DNA, 491 bp, Zea mays
  Intron number 1 from transcript GRMZM2G048192_T01 (locus G RMZM2G048192) derived from phytozome v7.0 (chr-ID 6; pos 1 00143864 to 100144354 reverse strand)
gttctgtccagctccagcctcgcggctcggccaaggtaaccgctgctcacttgatgatctgttccttgcggttcctggtccagcttttctttacgtacgtgtctgagtcttcttgtcccacccgattgttccgttcctacgtcacaatcgtaggatgatggttgacgtacgtatgcttcaactcaaaggtattctctagaattgatggcgggatgctaacggatgcttgaggtttgcttaagcaacatcgttacatgtatatatacactagtacgtcttgcgttagaacagccgagatttgccttctttctgcagccagcagcagggacgctgaacatgtatcgaaattatttctgtttgatgcaaagtttaactagttgctgacagtgaattcagaggtggtgctgatagaaagggctttgaataatggctgacagaactctgtttttttcttctttttgttttgtttaattcaatgaaggggctgagag

SEQ ID NO: 5262 - DNA, 753 bp, Zea mays
  Intron number 1 from transcript GRMZM2G130749_T02 (locus G RMZM2G130749) derived from phytozome v7.0 (chr-ID 6; pos 1 32471317 to 132472069 reverse strand)
agagccctctgagctccgacgccatcttcaagcaggtcagagcagggacctatttgattgccgcgcccgcgcgacctgttcgtcgagatgtcagctattctgcggccgattttaatttctccgccatgcttgtttggtttcatcagtaacgaatttgaaactgatgtgtaaccgattaatcgtagcaggggaattctcgaggtgcatctacgcatgtgggataaaggcgtcgccttttattcagagaatctgggaggggaatttaacttttcgtgctgcatatgcgtgcgagaagctcgaacgtagcaaacagcgtgctgcccacagttcattctgttttattagcacaccaaccgtttggtgacagttacttagtggcatgatatgtcttgattagtgtggataaaaggaacttttttactagttgggagctgtgagttcaaatcacgtgatctcctttattggcatcgtacgtgacctgccattttacaaatggatccagtacatgataatatgatatgtgtgcttcagctcacatggtaaggtcatagtgaggtcacttaggaactaggaaaattttcctgtttcctgtgttttttatgtgaaaataaactgattcttcctgtacgattcctaagcaattcatgtggctatgctgttttccctcaaaattttgcttcatcagagaatattgttttaccatgagattgagagctgttagctaatacttctattttggtttctgacagagtc

SEQ ID NO: 5263 - DNA, 520 bp, Zea mays
  Intron number 4 from transcript GRMZM2G136219_T04 (locus G RMZM2G136219) derived from phytozome v7.0 (chr-ID 6; pos 1 63507683 to 163508202)
tttggtaaggatagttggtcttaatattttgtattatgtatttctttttggtgatttttaagataaatattaagaaaaataaatgacttcacatatcatagattaaatgtttacattattttatgtttattgttattttttgtcggttttgataaaagaatctctataaagttgaaggtggttttaacaatgttgctcaacaacatatttcttaaaataaaacatataagtatattctgtattgccttttgttaaaactcaaaagatagtatatccatgtagctgctaaaaaagaatgtatacagatacattttttgttgtcgctattctatatcttctttgttgtttttgtttgacagaatacacatttctaaagttaggttgcattatttgttataacattctatattttaccttaccatactattggaattgatgcattgttattgctactatgccaatctaatgctatgcattcttgttactatgccgatctaatgctatgcattcttagtgtagg

SEQ ID NO: 5264 - DNA, 612 bp, Zea mays
  Intron number 2 from transcript GRMZM2G378452_T03 (locus G RMZM2G378452) derived from phytozome v7.0 (chr-ID 3; pos 2 3844989 to 23845600 reverse strand)
tcctcggccgcggcggcttcggccccgtctacaaggcaacctcacttcggccttcacacgtcccttgtgcctttcacaggatttatttgcttatttatttctcgctagattatttattgcttcagaagactatatactatcgtacttatgtaccttctcctaaagcccagttggctggccggccaatctgttttatcctgtgtaccttggtcatctactatataataactgattaattaaaagaattgctccggaatttgtttttctttactctctgcttctgtccgacgctattattacctgtttgggcagacaactgcatttcagatcaaattcggcgcatatctccggcccactataacacctgttaacgctgtctccgacttcgacatacagtctaaatcatctactgtattttatatgatctgccgcggataaaacactatgtctcgaactctcgatatgaaagtgttattttgcattcagcattgaagtttctttagataaacatactgatactgtatctttctttccagggaaagaacataactcctttccaacgataaaactcacggggggaaactccctgcgctctatcctttgcagggggtg

SEQ ID NO: 5265 - DNA, 735 bp, Zea mays
  Intron number 2 from transcript GRMZM2G066197_T02 (locus G RMZM2G066197) derived from phytozome v7.0 (chr-ID 7; pos 1 61619582 to 161620316)
gaagggtatgttcttcatcctccccgttccctccactcatgtgccgctcttcgaaatttcctcgccgtattagatcaaaagtagtcggggctaaccggccagatccgtccggcgccggcggccgccgtgctggtgcgcgccttggccgctgtagcgtgggtggggtcttgactcgacgcgtgaaccacccttggaaaagggagccgccgcccacgtgggtcgcctggctttgccgtggcgacgtgtcggttgctacacgcaaggtaatgaggtatcctaggccgtccgatctgagactggcggtgctgattgcgagctcccgcggtcacatttttctgctgccgttttgcatgcgttcggttcggtggagatagctatccaacggctgggttgctgccagttgcccagttcctttgtttttttgggtaggtttggttgaatggatgataatacttctgttgacgcgctaataccagtgagatagatgacgccgtagcacccactttagatttaacatatgaccacaattggagatcggaatattattgcaattgatggctaggcgtttggaagaagcgtgttaaagctcatcatcatagtgatctttagttgtgcactttgacaacgcatattctggaacgggaatatatgctcttctttactttatgtaaaatggctgactgtattcttgcttgaacagcttggctgccctctgctgctgctgcctcctggacg

SEQ ID NO: 5266 - DNA, 838 bp, Zea mays
  Intron number 5 from transcript GRMZM2G031568_T01 (locus G RMZM2G031568) derived from phytozome v7.0 (chr-ID 3; pos 6 7692938 to 67693775)
ggtacaactcctcttagctcttctttgaaactatgaaacactcaagaatataggtcatctttatcctggtcttcttttcacccctttcccctataagaaaacatagtcttaaatgttcacgcggaatttcttcttaaatatacttgatgtcaaattcgattgttgctccacattttcttggtagagaaatcgttaccttttttcaactcattttagtattattatccctttgttatacactaaaaaggatagttccttttccttgacaatacttttgctgctgttttaatctctaataatctccacttatacactaacaaaattctcttatctctttttcgcattattatgtatttcatttcttttcatgccacccctgctaggtcagttctgtttcttcatcaactaaacaaagagcagagaattcagaacaattcaaaaattaaaggcacataaatgcagatagtatagtatagtatagacagtatggaatcaacgaaaaatgttgtcatttataaaaatactcaaactttttgatgaaccacaatatgcatggaacgtactagggaaatcacttgaaactttgaagacgttcaaatagaactcttggatttttagggtatccaacatcttccttccacaaaaaatcttatacataatagcatctatattttaatgtattatatatatttttttgtacttagtggcaaaagagaggcatgtttcattggtaggaaatatattagagctgtaaccatgtagaaataaaaaataacttatatatatatatatatgttcttacttcagaagatatgtttcaacaggtgacccactgaag

SEQ ID NO: 5267 - DNA, 881 bp, Zea mays
  Intron number 1 from transcript GRMZM5G815377_T01 (locus G RMZM5G815377) derived from phytozome v7.0 (chr-ID 7; pos 1 44799917 to 144800797)
ttgaagcggcttggtctggatcactcgcggagatatttggctacttatcggagaggctcagcaggcaagactttgaaaagctgtgcttgcagaccctggggcaggagaacctccagctgcacaaccggctaatccgtgcaattctctacaatgcctaccagggaaagtgcccgcctcctccattggatgcaggcataggattgtggaatttatttttttcatctggaatttgagtatgccaaaggagaagatgctttttcaaaacctctaagttagttgctagcttttgattacatatatttccacaaccttttacactgtgattagcagctctttttacctaaatattcactacacctttttgtccactctcaagtgtttcccctcttaattaattgctacatgttgggtgtatagtgtatacacagccacacaggtttaattgagcatacacaggcctcctaaaatggtcctcttttgggatgttgctggttgcacaaagagttaacaggaaaaggaatggatgtttgcaagaaggtaatagtgaagaagctaggaagtagagcgaccgacataaactgcaaattcatatattttcatttttaatcattttcttgatttcagtttacagtagaggttttaaacagagaaaaaaaatatatcacagcataaggatgcctataacccaagttggtccgtagcccggttgtatgtcggtagcgactctaaagccttgtcgtattgtagtataatttaatttgtatcagtttagttctagaagataatatattgggtgtttgttttattttagaccattggatgggtcatgccatcgatgggataacagctgctaagttgtttttgtttgtcttgttctagaa

SEQ ID NO: 5268 - DNA, 1062 bp, Zea mays
  Intron number 2 from transcript GRMZM2G164418_T01 (locus G RMZM2G164418) derived from phytozome v7.0 (chr-ID 3; pos 8 9037512 to 89038573)
ctcccggccgacctgttctcaaaggcacgggagtgagacgaccgtctccctgtttttcttgtgttccttctcattactcttcttcctttgaatggctgtatgataggcaatgcctcgaattccccacgagtttcatgtctgagcgggcgtagtactcagcaatgcgtaggatgatcagctcatattgacctacatgcctaatgacaggcctaggtgattttaggtagtcagctgcctgcaattctgcacaccacgatggtaaccctgatatacgatttcgtacatcgaatatgacattcctaggttttcaaggcgttagacttgctgctgggtacaagtgaggaggatgatctagggtaactgttcattttcacggcggcgccggttgccgacgattggttaacgtgcatgttgttcgcgcggcaacgagagctgttttccggttggatggatgtgaatccctacatgttagtgttcggttattccgacattctagtaacggctgcatttaaggagtttccaaaaggagcccatagtgcaacgctggaagccttcttcctttgctgagctgtgcaataaagcactggttctttcctcacgtgtcagtactttgaacgccgatgtggtcaacgcaaatgcaaagcttgtggtgtattaataggctgtagttgctccaactccaaagtttaagttgccttgaaggggtgcatcaaaggctcaagcaactcagagcaagaaatctggcgttgccctgtggccttcaccaggatggatggctgctgacagtaagaaatattgtgctacctcgcggaacattttgaagtctaggacaactgaaacatatctttctgactggaagaaaccctttggattttagtaacatcttattaatgcagtgttgcattgtatagttatcttaaggctagcggtctttaaactatatatgatcagctgcctgagtttagttctcatttatttcttttacttacatgatgatttgactattttcttatttttttccttgcaggtatattgtgcctgccaagtctgcagtcaaaaacg

SEQ ID NO: 5269 - DNA, 1029 bp, Zea mays
  Intron number 1 from transcript GRMZM2G420697_T01 (locus G RMZM2G420697) derived from phytozome v7.0 (chr-ID 3; pos 6 2048197 to 62049225 reverse strand)
cagtcgagtttgttgcggctccctccgtgagcgaaggacggggatgaccaagtgcgtggacgcgctatgaccgacgaatgggacccgcacgtcagcgacagggtgagaaaagaaaagaacgaggacgagatgggctggcgtgggtgaagtggaaatgggccgcgcgggagggaagccgagttgggccgccagcaaagactttaagcccgagagccagttctggcatttccctttttcttttctatttctgtttttcttttccttatttctatttatttgtattttggaaatttcaaattcaaatttgactccggtttcatatttaatattcagaatcaaaaaccaacatgtgatgtagtattcattttactttatttatttatttgtttattatcctacacaagtaattacttttggacatgttgctctacataattattttgagaaaaatagcttcgattgtataatctcgattaaacgatgctctaatatttatccttatacaatacttatcagcttcaataaaggataatttatataagaatcccttttattgtatctttattgtaaaacatttatattaggagatgtgacttcaaaagttttgaaagaagaaagaatgaaaaagaaaatattctaactcaaaatctttggaaatttttacataattctcaaaatgagattttgaggtgttacagctaatacctttaatgtttttctattgaacaaaatgagtggtaggaaaacaaagcacactgcgagggggtttcttaatgaggctagcaggatagtccctggtgcacgttcccttttccaagggagttcttctagccagagcagacaggaggcattgctaagacacgccaggccacaaatatgtgatacacctatcgctctacaaaggagtaccaatgtaaatgtttatgtaattgatcttatttgtcattcacttatatataaatgtgtcttacatgtctctatttcatgaccataggaagaggaggacgaggaggaggaagtacagcacca

SEQ ID NO: 5270 - DNA, 1002 bp, Zea mays
  Intron number 1 from transcript GRMZM2G117298_T03 (locus G RMZM2G117298) derived from phytozome v7.0 (chr-ID 6; pos 1 44864422 to 144865423 reverse strand)
ctgaatttccaaaggttctgttgcttctctcagcgtatcttgacaagacagttcagcagaatgaagagttactagactccagtaaaataaaggagtcgaccactatctttcatggtcagagggtgcctgaacttagtataaagctgtatgcagagcgtattttcaagtatgcaaagtgcagcccatcttgctttgtgctagcacttatctacatggagagatatctacaacaaccaaacatttacatgacgtcatttagtgttcatcgcctgcttattacaagtgttgttgttgctgccaaattcatagatgatgcgtaaggacccaccataacagctttaagttacatttgtgcatatgtactttgtatggaagtatgatcttacatactgttggccatagactgatatcaggtcttctgtgtgatactgatcatagatgcaaactcaaacttagctgagtcaataaactaatgtcactaggaaatgtctaaatatgatctttaaccatctggaacaacctgacatggtttatggtcagctatcttctttggtatgtaagcaatttacctttttttatattatataagaattaataagcataaacctctttatctctaaatgctagacttatgttttctcagttgtcatttttgtatttcggatggatttcatgtttcccgtagtacttttttttgttaaaccaccagttaatagggatgcatcaatcaattagttgcaacagtcggtagcctatggtggaatttaataggatagtaatgaggtgaggaaaggtcggcaagagtcagatgttgatggccaatatgccccagattagtaagtgaattccaccctgactttggaaaataaacttataatggcacttcaagtagaaggaagatgatattattgttcagggttttgtttattccataacaaatgtaaactgaagaaagttttcgaataacttcttggatatattttatttgcaggtttttcaata

SEQ ID NO: 5271 - DNA, 1015 bp, Zea mays
  Intron number 1 from transcript GRMZM2G109429_T01 (locus G RMZM2G109429) derived from phytozome v7.0 (chr-ID 3; pos 1 68491540 to 168492554 reverse strand)
ctgcaacgcgctctccgagttcgtcaaggaccaaggtacgcccggatcgtccctccggcgcgcgacaccacgcactcggtgcgctgctgctgagtgctgattggatttccgatctcaaccgggaacacgtagccgtaggagcagggaggggtcgttcggatccgaaattccgaatatgtcagctttctcatctcggatgtggaatctgcgaggagcggtttgacgttcgctgcgtatcttgcaggcaggcttagaaatcggatcactttaaatgccaaaccttcttattgagggtggttactgttgagagcgatttttagacgacataccaaccacgacctagttgacgaatcgtattaaatcacgagagaactttaggattagctcactgagcattgatggatttcagatttccccacgattctttttttttgcagtcctgatgagaggttcgttttttttttcttttaataaaacttgaaacgggcagcgaaatggatttctgggattagtggaggctttatgaacctatgttgattggactaaaaaactttaggttttgctcttagctcagaaattgtagatcaggtggtgctggttatgcattgtcctcactatttgggttagccccctagtagcactctatactctatagaactctgaactcgtgttatccagatgatgcgaggccttaatctgccttctataaaagccgagcaatattagtcttgaagacagagtcaaagagctgaagctacctgcatcagaatggactggaaacaaccttattgtcaccaactgaacactttaatttggaggaatatattttgccagctctgtttgttgcttcttgcaatatcttttgttccagttgctacatgactccattagtcacagcaaagaaactaggggtggactcatttccacatctgctatttatgcgttatgccatatgattgtttcaaatctaaacaacactttggttctgtgcagagctggtggaggattgccataa

SEQ ID NO: 5272 - DNA, 964 bp, Zea mays
  Intron number 2 from transcript GRMZM5G896756_T01 (locus G RMZM5G896756) derived from phytozome v7.0 (chr-ID 6; pos 2 2311365 to 22312328)
gaagaaactggtcactgtcttgctttgagcttcaggtaatttggttgagcttgctttgattaattgttatttttgttgaaaataaatagtattccttaattccacataacattgtatcatcccagcttcatgactatgcatgatctcagcctttacctaccactaagtcagaataaattctctagtgtgtatccctacatatatgatttcttgtgagaaataatattatctcagtatcacctgcatgactacattggctcaacaggtgggctgctgatcagaccagtgaccactggaccactaacctcaatggtctgtggcttctatctctatgcttttgaaaagccattgcaattcaaatgcagccttttgtggtgctaggattcattgtttcaagcgatcactcattgaatgcatgatcaatcgattcacttgctgttgagccattgaacagtgaaataattaatccttgttactagaaagaacataaaaacaaatttctgaagttgctacatctgcattttttatcacaaacatgaatttttaaactctgtacggtgactagttcacaaaaattattacgcaaaaatacacaaaaaaatgcggctgctctttttttttccacaatggaaaatccaaatttcattaccaaaacactactacattacaaagtagtttgagtaacaggcaaactgaaaaccatagatgtccacaaaaccaacacatctaagcacccacggctaaagagtgtgtaacaaaaccccatactatcttagattatactatattattcttctacggagttgctgaacttgtcgatgtgtactgaaaattttctcttatgtttctagccatgctttaattgattctttgtcagattgtgcagcttgtgcaaaccatatgattgattacttagtattgtgtatattatgttttgcagtgatctttcagtttggtgtttctc

SEQ ID NO: 5273 - DNA, 842 bp, Zea mays
  Intron number 1 from transcript GRMZM2G118378_T02 (locus G RMZM2G118378) derived from phytozome v7.0 (chr-ID 6; pos 2 242559 to 2243400 reverse strand)
tccttggttcgtaactcattatgctctgtcatacatatgcaagttctgtactgaaaaacagctccattttcagtccagttattatttttttgaaagatccggttgcccggctttgatttgtaataaggaggtctagcgaccattttcagtctgggttatttcgatcgattgtcaggtagtttcagactttcagcaggtctagtgttctgatcaataaccatcaattgttttaccttgttttgttcatatacagtatgttcttctgaggggacttttcagtagatgtgatgttattattctgaatcttgctttgcattgagcaaaggggaaaaaaatggttgtttctgtatgcaggttctgtgtgcaggtgttgtgggtcaggtttagcattcctcaacgtgttgtcatatatgggatgtgacaatttgcacacacactttgtgccctgttggattcttggagggaatggatacctcaactaaataagtggccaagaggcatttaacctttttctgtcatggatcatgatgccaccaaattggacatgtgctgatatatttcttttagcctgacaggcagtgatcagtgatgtagtgccatagcgcttcccaaatgatttctttttcagacatcatagggcttgttattaaaccttttttttctgtagtggaagtctttagtaaaatttcctagaacagtacattgagaagatacaaagttttgtaaaaagcaacatattccattggctgttgctttttcgtgtgctactctctccactatatatctctctctttctgaaaaatcagagtaaactgacaaactctaccctctgttggatgaag

SEQ ID NO: 5274 - DNA, 1004 bp, Zea mays
  Intron number 1 from transcript AC213800.3_FGT003 (locus A C213800.3_FG003) derived from phytozome v7.0 (chr-ID 6; po s 136261543 to 136262546 reverse strand)
gtggagcaaaatttcagacttggttagcagtcttcttagaagaagacttaactctctatcatccttgagacttggaccttgtggcgccaaagaaacgactgtgaattcaacaatgtctctcctagtctatccaaaactcttgtgatggctaatgaggagctttggaaatgggacttggctggtgccaaaggtttttctgctctctcagttgtagatcaggagggtttccattgagagggtcgttgttgttggtcggtttgttcagattatcagcgcaaatgtagcttaatgcctatggaagtgtgtgttctgtttgttctgttcttgtaaatttcatctatttctcctattaatgaaataatgtgcaagcacaactctcctgcgtattcaagaaaaacaaaactgctatataaattcatattatttttttagcattgaccttgtaaagtttcataaaaagtaaacctcaaatttatcatatatcttctcaaatgatatatataaaattcgaatacagatacggataatttttcattttttttgttgtagagtgcaaataatgtataaaataatttatgaaaaaaaattattcttacatataataatgtgcttgataacacaagaaaagattaacatcaaatttcgtacatatctattttaaaatattagatttgtcctaacagtttgggtacccgttttcatccctagcaaccatatatatttgtcatcttgacctgggtaacaatgtccagccagccgtaatgtcccatacctttaggaattgagtcaagattgttactgtaatagctcctcttatgcaaggttttaaagtcgagcgactagtcgacaactagtcgaaaagtcggtgcagaggtgatagtcgatcggagcgactcgactttctatgctagtcgctcctaggtgacgctgcgtcgtcgcccagctgctgaaatgggctctaatgggccatatgtgtatgatgtgtgccctatgcgcccaggtac

SEQ ID NO: 5275 - DNA, 1004 bp, Zea mays
  Intron number 1 from transcript GRMZM2G073045_T02 (locus G RMZM2G073045) derived from phytozome v7.0 (chr-ID 3; pos 2 07483284 to 207484287 reverse strand)
tccgccaacttcccctccgccgcctccgattactggtacgagaccattttctgccgaatggcctcatccgtgtgcgaattggatgctactgacctcgagatatagatctagcaaattgcggggatccgacaatgcttgatatcgtagagagcttgttcgggttgtggtctcttgtggctgctgttagtaccttttgttttgtgcacaatgttttgttatgtttagcattgaatctgtggaaattgagggaatatgatggatgccttttggcaacttgtcgattagtatcattgaagacagttgcatgcccgatcttatgtaatattgttcttaatgttccgtgtttatcaagtacagtctattagtataaaattataaaaaaacataccttttcttcaactaacagatacccccccccccccccccccccccagattgtcaacttgacatgtagcactatcataagggggactgagaccaagaggctgaggtgtaccactccacacttaatctaaggacctgtttggttcaaccattttagacccgtatctattccctctcacagctgatgtcgttccttggagtttggttagcgcactccgtaattgatagcagcgttatcggattcaaacaaagggcggtaatcattactctgcatcggacaacaccggctactcatcccactgtcgttaccgctcctttcacccaaccaaacagcacctaagtggtatatgtctggtctctttaatagatacaccaaattctccagagtccagataatgtaatcctatggtacaatctcttgttagaggtcagatgaatcctagatctggcatactctgaatctgtaatcgtgtgcagatggcaggaatgggaaacctggctgttgcctgcctatttctatccttcaatgttttttacatgtatatttaaatagttaacaaatatttatccttttttaatgtgttctaaataacccttctattgaggcagctctgataagg

SEQ ID NO: 5276 - DNA, 760 bp, Zea mays
  Intron number 1 from transcript GRMZM5G865562_T01 (locus G RMZM5G865562) derived from phytozome v7.0 (chr-ID 7; pos 3 2094287 to 32095046 reverse strand)
tggccgcccgcgtcgaggcggtggcagcttgcagggcggcactagctctcgcgccagcgcctgcggtggcatgctccatgtgggaaactctaaccctaatcagggttaggagtaaaatatatagatcagatagctggactaagcccattacatagaggtagtttggtaagtacaagaggggctaagtctaaccttaaacaggagtctaacaagattctcgatacaaatatagcaaatatatgttatgaatgcaaccaggaatcagatcatggactagtaacacctcaatacagtatggaaagaataaaaccacaataatataagtaactacagtaaaaacatcaggggaaaatagctaagaatatgcaatacttcaatacattaaaagataagtgacacatccaggttccttctgcttgtattgctaacagcatgatagcatcctataggctagcataaaacttcttcagtcttcactgtaatactaatactcacggaagaacaccgacaatatttccagctaacccatcatacatgcctttccattgaattttacttccgccttgtgcagcctatataaaaaatgagaaaaagaaatctcataaagttgatgtatgaacttgtatgaacttctgtgttgctccaggaatttgattcctcggcaatgggcaagtaaataaaactgatacaagctgtcccactacaaaaacacatgagccttgtaggcaccacaagcacatccaggagacttggtagcgaa

SEQ ID NO: 5277 - DNA, 703 bp, Zea mays
  Intron number 1 from transcript GRMZM2G152686_T01 (locus G RMZM2G152686) derived from phytozome v7.0 (chr-ID 3; pos 2 11977719 to 211978421)
tgccggtgtcgcccgacgacgacgcggccgtaaaggtagcgtgaccctcctctcctcctctcctcctcgtactgattcattgggctgttaccgcgagctggtgtggtggacactggactgggagccccgcatcccagtggatttgggacgggtacgggatttcgaccgcttcaggttaccgccggaggccggactgattgaccgtgaagattgcggttccgttacggtgaaatcggatttatgcgatcctttcgtgcttgtgacgctgaattttggaggacggaatcgtccaggggatcttattataacttgacatcaatatatatatgcacacggaatcaattaaacttttgcgtctagtttgctttcactatttgatgtgcatgcgtctctactggaccttttgacatcttacctcttgttttttttttgttaattagagcagttcaactctggtaacttgacatgtccttataaattgttgatttttcatttgttttcctgttcgccaaagtggcaccaacatcattgaattagttatagaaccatttgtcaacaagggaagcgtttccaagtgctgcatcctacgtagattagtggtgaggtacctttggaattccgtcccgaaatttggaaacatggtgtcagtaatatgttttcttttacaggaagaagcaaacttccagcaccttaaggctatcca

SEQ ID NO: 5278 - DNA, 764 bp, Zea mays
  Intron number 3 from transcript GRMZM2G308689_T01 (locus G RMZM2G308689) derived from phytozome v7.0 (chr-ID 6; pos 8 5518251 to 85519014 reverse strand)
ggtggggtgagtgagctcaatcctctaacgtccactgatgactgattggtagaaagcactgttttgtagagacagcagaaaatgcatacattggctatgtttactggacagcttctatgcttttctcaagtcaaatgttatggttaagtactgtttcatttttttccatttacacagcatgtcatacatcttgaagtcgaaatgttcctttatttgtttgagtcacatctgtggttttaaatagcccgctatagcttagttatagctctttagaagatctaccgctacgctattatcatttgttcttctattgccgctaatgaacttttagctcagctaaacactgttatttgatttagacatgatatatttttagctaatcctaattgaggtagatacaatatttagtctagaggattataatctatgtctctcctttagattttttacttcataaatgatgtaataaaccattgaataattattgaactgttgaatgttgagtgttgatcgcaatagtgtgttgatcgatatgatgaacattgattaatggacttggaaatgtattctcctagatattctaagtatttatcttcataaagaatttgcctagttaaatgtttctgtgcatgattcatgaagaattttcatgttttctataaaaccactaaatggatagctttctttattgcacgttgtttaaaacattggtcgcatctgagaaattgtgcttatgctttcagttttcaatcaaaagaccttgt

SEQ ID NO: 5279 - DNA, 1023 bp, Zea mays
  Intron number 3 from transcript GRMZM5G845096_T02 (locus G RMZM5G845096) derived from phytozome v7.0 (chr-ID 7; pos 9 7966508 to 97967530 reverse strand)
aagcttccattttgtgagtgaatttaagcaagaaggtaaatatttcatacggaacctgattatatatgcctaaagcttcacctgctgcctattccccaacaatgttgtcatctttgttaagacagttttatgccaatttcacttcttctcaccagcacgtacaagatgtctgtcgtgactggtcatctaacaagcagaatccataacatgcttctttggtaaagagagacagtaaattggtactgtcacttacgtgaatgtttattattgaaatgaaaatacatttgattatgatcggacacttataaaaacttgacttgcggggctaagacaacctccgagcattgtgtgatagagaagacctctcatacatgccaaaacaaccttgcccacgtgagcgaccgcgacctggtccgggtcatagtcacaaagtttgtggatcgatagggttgaggaacatcgtacgctacgtgtgagagatttttacatggtgggaacaaaaatgaccttgcgtacccgggtcgagggtcgctaccactgtacccatttcttgtgactatggttttggtcttcgacccgtgctttggtgtggtggcaggcgaggggattttttaaccccagtctgaaataatgtgtttgtttttatgtaatctttgtgctctaatatactgctccgattgatatgttggcctgctaaagctattattttcagtttgcttgcatggaactcattatttttactagctctgttttatttaaacttatagtagcacatgtgtccattattgatattgattaatctagctcctatcattatgttcactatattgaattagttttgacaaaaaccctggtaagctggaatcacattgttttgtagatatttttcttcaatataaatgcttaaacttaacctgataaattcatctacatgctctttcaaatggcaagcccactattgttgagttttatgcaaattggtgtgaagtctgcagggaacaagctccatatatctacaaagtt

SEQ ID NO: 5280 - DNA, 1055 bp, Zea mays
  Intron number 1 from transcript GRMZM2G035820_T01 (locus G RMZM2G035820) derived from phytozome v7.0 (chr-ID 3; pos 1 87173418 to 187174472)
atacgaaaggaccgggagccaccgtccaagtgagtgttctgtcttcttatccatttactggaaagtggggatttccttgttatgctgaaaatgtgcaactggaagtttagagatggaacctcgtgtgtgatgataatttgagtagcgagttgttggcgtgtggccgtgtgcaaattcaagcaaccacatttgtctgagttgttgcattgtttaaccagacacaaacagattaggatgttaaaacatagttgttgctgcatcttagggctttaagattatatcccattggtcatcggattttaaataaacttcgctagtttgaggacgataagaaggtcttctcccattgttttaaggaccacattttttttcttttgtttcacgatattattcaaagttgcaagctgaacattgtgtagcttttatcatcatcttcatgtatgtgtaaatgctacagtgatacattattacaagtttgcaatgttccatccctttattttgtattgggttatactcctttttatgtgctaatccactggaaaacttagagcaactccaatagttatgtaaattttagctctctaaatcacagatttaagaagttgttaaatggattttggagtaaaaaaatgtgagttctccaatagttctctaaatatagtttgtaattttgttttgtatttatccacataaaaaataagtcacaaaaactatataatgcagtcaacatttttgtttagggagttgttaaatggttgccaaatgtagagagaaaatgaggttagatgacaagttgttaaatttagaaagttcatttagagaactgttggaaaatagttttcatgttaactacctaaattattgatttaggaagtcttttagagaactactggagttgctcttagtagcatagcatgagtatgcatgctgatttagagtcctgtaggaatgtgtgctgctggttggcatgcctatttgagtatttggtgaacttaagtaaaatgcctatttctgttgcagggctgtattctgggcaatatttggagctatatatt

SEQ ID NO: 5281 - DNA, 1032 bp, Zea mays
  Intron number 3 from transcript GRMZM2G008061_T03 (locus G RMZM2G008061) derived from phytozome v7.0 (chr-ID 7; pos 3 193005 to 3194036 reverse strand)
tgcgtgacaggaccgaggatcaaagggaaagagtggtcagtgccctgctcgcatacaagatattacaaatacatttaaacatttgcgcgttaaagtgattctatcagcctttttttctcgaacgcactcctgcgtatcattaagaaacaatttctattaggctggatacaaccataaatgataccgactgctgaagcaagatcgctaccgatagtgacggtttcaatgtctgaactggtaggtagcaatcgcgttggagtcgagccagtcgacaccgaccactgtattggacgaacttgtcaatatcgacccgaacacggtaacgaccgacttaagaggcctagaatctaatccataaattagattttatttataatttatttattatttttatgattaagttatgtaattttatttataaattatatatttttaattattatgtttgagttatgtatgaattatgtaattagatgtatttgtattgcaataaaacgtcgtgtttcatgtcaactaaaagtctataaaagaaaagctgatgtggtgatgaggtgactataggctgacggtaaagaccgtgcacttgagtgttgtggtagataaggtttgacgatggttgatatagaccggtcggtagctgatgtggcggtaaatatcacccgaaaggattggaatcaaccttagcctattcactgtacagccgttaggtgtgttgttattactcagttgcttcttacagatgaacataaacttctggaaaaaacaacagtttgtatggactattgacttgggaaaatgttagtatgaagcagccaaggtcatacatggcagcaagcaatatttcctcatcaacttttcttttcccagggagaactctaagcagaagaaaactttgatatgaccatataaagaaccatcttgcaagttggtgtcactatattagtcacatttcgttcatttcgtttgcatgctgattcgtttcaactaatcctgagccaacagtactgatttctgtaggaacgcatacggcac

SEQ ID NO: 5282 - DNA, 572 bp, Zea mays
  Intron number 1 from transcript GRMZM2G159899_T03 (locus G RMZM2G159899) derived from phytozome v7.0 (chr-ID 7; pos 2 2628182 to 22628753 reverse strand)
actacggcgtgcggctcgcgctttcttcgtccgcggtaagcttcgcgtgtgctatactatctcggattccgtgtgttcgttctatgctgatcttgttccatctccttcgcgttggtttcggcgtgttgctttagctttctgtttccgatgatatttttcttgagaactccgaagggagatacgcacgtatatgatatcacaggctcacagcgttgttctgtctctcttttgaaacccgtacgtcaataatatgatgcatgcatgcattaagggtagcagcgatcctattggatgcatcttggctgtttgtttctctgattgtcgctattcagttgttgtggttttgctctcccatggcccatggcaaagaacagatctcccattccgatggcctactggatgcatctttgttgccagtccgatgtctttgagtgctactgatttgttagatatgtcctttggatcctattattcagcgttgttctatatcttactgatttgttttttttctgtttccttttctcttcttacgagcaggcagcttctcccaaagagttcgaggtcgcttgcct

SEQ ID NO: 5283 - DNA, 1027 bp, Zea mays
  Intron number 1 from transcript GRMZM2G005278_T01 (locus G RMZM2G005278) derived from phytozome v7.0 (chr-ID 6; pos 9 6215379 to 96216405 reverse strand)
agtcgcctctccacctccgacgtcgcgcttacccggtaggtttgcccgtcccgcttccctggcctacattgggctgcagctctcgccctggccagtgacggtagcttctctggtaccaggaaatctagtggcctcgtgtgaagtcgaactggtgcgttttatttggctgctcggtgtctgaacctctgtctgcgtgctctcgccttggctgtcgattttactaatttggttgcttggatgtggaccgttggcttagatagtcaattaggtactcatgttgcggattgaagggtataaagttatgccaattcagttttcatgaagatccatgttttacattgctgccagctgccagttacatgccattgttcaggcccgttacggtagcaaccctgattaaaattgtattactatttgaatattgcaataagtttgttctgaaaaaatgaataactttagctacacagttattttgaggaagagtgtgtgggctgtgttgccatcgtaccattttattctatctcctgaatcctgatacaatgccatgtagttctcctgcgtgtttgaggcaaaaaagatactgctaattttcctttagcagtaagtgccatagtttgctgtcttaggttgtttccacatgtatcggatatctgttctttggagaggaagaaatgagctacatgttgcttagatgttaacactatatcgtgaagggaagggacaggtaacagcaaattcaatgtttttctgcctgaaatttttgtgatcatttggaaaacagtgttttctggatgcttgcatgtgatgattggtgaagcaatcggctttgttggttcagtggtgctttattgatattataataatcgaagttcagttgttttgtcattgtctttcactctcccttcgaaatgccataatatacacagattctgaagtggctatattttcacttacaatcttaccatacacatccgttgattgattatattcttcaataacaggtctgacaataatccagcaagatacc

SEQ ID NO: 5284 - DNA, 551 bp, Zea mays
  Intron number 1 from transcript GRMZM5G809019_T01 (locus G RMZM5G809019) derived from phytozome v7.0 (chr-ID 6; pos 1 56689650 to 156690200 reverse strand)
gtagtgggaaaagtaggctattttctatagaggttagtattattaaatttgtgacttaccagtatttataatgtatattcttttgtcaacaattgtatccatcttgaattgaaagagctatgttaccatacttcctcagtgcacatcaacatcttcgtctagaagttttgttttgtggtgattgataaaatatttcacccttgacaaaaaaacatgtagccttagtgtctacagctgctccagatgtaacaaggcttgaaagatgctataggtttaaattatgtggtgcttagttatgcatttttaggtttagagtaaaacacactcaatatccttagcttttccactcaatatcctcaattttcctagatttttacctaggtgcataaactctcaaagcgaggattataggtccttcaactttttctaagtgtcctcgatatggacctggtttcctcttggagtgaacctcctaataggtttaacgacctaaattctcattttgagagcttatggcctaagtgagaatccactataagtttaagatctcc

SEQ ID NO: 5285 - DNA, 1013 bp, Zea mays
  Intron number 1 from transcript GRMZM2G110858_T01 (locus G RMZM2G110858) derived from phytozome v7.0 (chr-ID 3; pos 2 28938853 to 228939865)
gtccagcaacgaagcagggatcttaggaggccaccccaaactaactaggtgaggtgagatactaaaacgcgtttctcacactcttctgctacttatactgtgtattcaaatttcatctcgtggtcattatgctatgttgaggcaatgtcgatcttacagatcctaatttgttgatgatgtgtctccatttgagtgatgaacaagttcagagtattactaatagatttcaagcatttcgacgaagctagtctatctagttttaccattgcagtggcatcattttaatgatccatgaaaaaccatgacaccttgaacgtgtggcttttttttgcaacaactccagtttgagttgagtggaatctgctacctgttttggtggacaattcaacactggaatggttgaattaggagatgaattcaagatacttgtgttaaatgcactctgctacacataggaacaatcttgtttcctatggaataaatgtgtatccaataataattgctaggattttaccttactgttcttctttcaaaagtttaatggcacaccatatgtgtggtaggattttaccttactgttcttctttcaaaagtttaatggcacaccatatgtgtggattttcttgctcagttgtctcgagacttgataagaaacccatataagcccggaatttcaaatttgcaatctatctatttctattagatcattagctgttagatcattgatgttataagatcacacagactgaatgtaacacacatgtacattagaattgattgttgaaagctcattcgattcctgtatttgttttacatgcaagcttttgtagatgtatataatgcatatgcctaagcatgcaaaccttcacctattagttctcttgtgatcagttttaatttcagtcaaatgtttttttttcatctgtatcaaatctgtgtttaaagatgtttggtcatgactaacagaaatttttgcaggtgaattgtctttagaactccattcacgtttaggt

SEQ ID NO: 5286 - DNA, 925 bp, Zea mays
  Intron number 1 from transcript GRMZM2G004458_T01 (locus G RMZM2G004458) derived from phytozome v7.0 (chr-ID 7; pos 1 27113471 to 127114395)
tcgccccgctactcggcgggtccctggccggcttcgtgtacgagtcgtgtgatagtcaagaacacggtaagtgtacccccgtttaggttcagcaggggtctagacgcaccatgaaattacctatcggctaccacgacatgttgaatctaacctaggtaactcaggagagatcgcaacaaacgcaagagcaccgtgaaggagctaagtacctgaggcgtagtccaaggaggaggcgcgacgctcggggaggaggaggcggcgcggcgctcggggaagaggaggcggcgcgggcgcgggcgtgctcgggaaggaggcggcacgggcgcgggcggcgctcgggaggaatctgtttcctcgttttagggtaggaatgttttttttgcttctaatttcagcccaagaaatggatggaaagttaatttccaattctataacttgccaaacaaatcagccaagaattaaattccaattcaacccaattccaatcaaacaaacgggccctaaagtgaacggatccaaacgaccctaaaaagtaaatcgaaatgctttcttttcgggtttcattttggtgcaatgtatgactcgtatgctgtagtcgctataagctagtaaaagacccgcgcatgccaaaacaaaattgagtttcctctttttagagtgacgaatcacaactctgggcctttaaactatgatacttctgctgtatgatctctcaatgttggtattgctaatggagaccttttaatgatgacactttaatcatgacaattcgctcttggacactagatattaaaaaataatggatacctttttttctctatttggattcttcctgtattctacgttataaaatattttaatttccgtagttctggtatgtccctaaatagatatagtatatctgtttggcacaaaaagagccaag

SEQ ID NO: 5287 - DNA, 348 bp, Zea mays
  Intron number 4 from transcript GRMZM5G866954_T02 (locus G RMZM5G866954) derived from phytozome v7.0 (chr-ID 3; pos 1 75692730 to 175693077 reverse strand)
atccacttaccatctctacctgtgccttagcagtacgtcacatgatttgcacattttcaagattcaatagcaatgttcataagtttatactgttttattggagcatatgggattattgttagccagatatgtttctcctttttgagtgtttgattttgtgattatatctcgtatcttgtaatcctcataaattctgaaattgtgtggccttttaatctcatattcatgagagtatttacagttaaatgatcaatggtctgtttatcttgtttcactttatcaaatttgttgactcattttcttctgtgcacagttgttacttcagaaagtgggaaattcctcttatca

SEQ ID NO: 5288 - DNA, 890 bp, Zea mays
  Intron number 1 from transcript GRMZM5G866954_T02 (locus G RMZM5G866954) derived from phytozome v7.0 (chr-ID 3; pos 1 75693825 to 175694714 reverse strand)
ggtggtggggcgaggcggcgccggcttccaggaatgtgagttcccgctacacaaggggtggtgccgtggtggtgagtggttttggtccggtttcgatctccctaggttttggaggatttgcttggtcagtcagtgtgtgtggtgactggtgagtggagctgcggtgaaggcgggggcgttcctggccagatcggtaggtcgtatgcgctgattcgctggatacggtgttgtccagggcagatttctggaggggaatctggacttctagcccttttatttacttgcggagtcttccttctgttcgcttcgctggttacattgcctgacccgttgacgagcgaatcctttcgatttctacacttttaccgtgcgtatttcgtgtccaagtttgtaccaaactaaacatttcccgaaataaaataatggatccttgtagtagagtcgtagtttctacgctggtatcgtttggttctgtacgtggcggtatttacccggcgaaatggtatgtatgtcaatcaaccactgcgtttattctgctgctacgtccagaagctcccatgcgaattgggcactcacatgtgcccatgtttgtgtagcttaagctacagatttcttcggttcaaagtgatgctcgctccggacctaacataggttatggagtcaagtcaaaggtctccgcttgcatcccgaccaatgatggatttggaacctgatttagtttcttgttaggctatgcccggtagttatgatgtctatgtttaatcaactaaaaggtgtgatgatgcggccatatgccaatcaattccatccatgttaaacattctctcattaattattttgttttttttttcttttgcaggggcagcttgtagtggctgtttcttttgcat

SEQ ID NO: 5289 - DNA, 892 bp, Zea mays
  Intron number 1 from transcript GRMZM2G060505_T02 (locus G RMZM2G060505) derived from phytozome v7.0 (chr-ID 6; pos 1 60602622 to 160603513)
gaaattggatccacatattgtacgaggtaattatactttaactattgttgttcttccttttttctgttttaccatttaatttaatttcatgtaccaatgtctcgcaaagtagtcatattagctcaggctgcgctgtagcttaccagcgagtttagttgccagtgaactgaagcaaactcagttgggttcccccatttggttgaataatactgttcttgtacgggtttattatagtgtccaattttagcggcacaacatatccttgtgtgtaaatgtgatggtatatgtttttggttatcccttgaacatgaagcatataggaaacttgccttgtgtgtaaatgtgatggtatatgtttttggttatcccttgaacatgaagcatataggaaacttgtttttgggtaggttttcagcgtatcatcctcagggtagcatcacagggaacttataaaatgatgcattgttatgtgtctgctgacgatgggtttacaaatatccttgttaagatgctggaaaataaatagaaatgtcatgtgctttctgaattcccttggcacagtcaagttattaggcttctccagatagcaactattcagagcttttgttgatatcagatattcagtttgttcttttgttgatagtgtcaatttgttgtacatattttctatattgaaatcctgtatggtcactaccaactttaccattctagatgtattgttcggatcgttgtttccagatctcttaattttgagatgttacaatctgtatttatttgactattttgtcacttctgatgtttacatgcatcatagtaaatgtttctagattgctatctgacagtcttaaaactgacaacttcaccatcatgtatgtggtcctgcagcgctcgt

SEQ ID NO: 5290 - DNA, 997 bp, Zea mays
  Intron number 6 from transcript GRMZM2G123482_T03 (locus G RMZM2G123482) derived from phytozome v7.0 (chr-ID 6; pos 9 7231140 to 97232136 reverse strand)
acccttctgatccaaggttttctctacaccaattaatctcactttcatcatctttactatataaagcaccagtttccacggttccacagtcgtcgtgcgccacgcgcgaagcgtgtaggtcgtgcgtttactccctctcccccacgtgatgggctgacacaatcggcctgaacggccccacatgctgcacctccctcctcccgtcgggccccgcagccgctggcccctactaaaattaggaagagaaaatatgaatattgttttcatgtaatcgttgtgttctaacattttacaaaataatttgtgtgctgtcgtaacgcacgagcattgtactagttgatcataatgcaccacaaaactgtgattcataagaaagtggagattgaatatgagatcataagttgcctttacaacttcctatttttataaacaaagtattccagcatgcctttgcacattgcatttgttgtacggtagaacccagtacatgaatttaactgtgtaactataggatataaaattgatcgcagttgacaggggggatttatgcgaagttcaggtgtaaatgaaggcaccttatgcgcactgtttaaccagtggggcttctaggccatggtccatggagggggagcccttcctgcacttgagttgctacacatatgttatattgcctatattagtctctggagtaagccccggtgtacagatgaaaacaagggcagaagcatcctccagaaaggtggtagctggtcatagcctcagatgtataagcacctttgttggctacacaaggagaactgatgcatgcaattattttgaatttgtcgcactcttttgcatggaggtcgtaggttgttcacctgacagtaccaatttatagaatcctcacatagacattaatgtagttctctaactcccctatgtaattgcttttgctttattcaagtgtttctttggcacaaggctaattccatgttctgtggtgcagtcggtattt

SEQ ID NO: 5291 - DNA, 582 bp, Zea mays
  Intron number 2 from transcript GRMZM5G867510_T01 (locus G RMZM5G867510) derived from phytozome v7.0 (chr-ID 6; pos 3 3858702 to 33859283)
agaaaacctcctcgaagtcgacctagtcatgattgattacggtatttataagagggtgccgtgaatgaagagtaatctgtaactgcaaaacatatgattcatatggaagtggaagggagaaaattggaaaaaaaaacagaacctgacaagttcaagctacagaactgtctgaacatcgcagacaaagaaaataagaaatatcaacaaacaattagtagaaaagatactgttgtaaataaatgaaaaggcagaccaactgaaaaagaaggttttgaatattgaggtgtgataaaatgacgagcaaaatagggttccttgttgcatatctagctagttagtgatgggtctatagagccttagtagcatattaggttgtgttcgactttctgcgggagcgaatttacatagaccctcggttggttgcgtttctaagttattggtgttagaggttatgctaggtaacaatttgtgaaaatgacgacacatctctcctcccaaagaggttatgctaggtaacaagttatttaccacgagtgaacatagttacctccggaaactcatcagagtcagacggctcactga

SEQ ID NO: 5292 - DNA, 997 bp, Zea mays
  Intron number 1 from transcript GRMZM2G446981_T01 (locus G RMZM2G446981) derived from phytozome v7.0 (chr-ID 7; pos 8 0253612 to 80254608)
atctcatcttcgtgctcctttttgtaaagccgaaggtatatttgtaatcattcacattgaaagaaggtgaaattgagttgattgcctaagatgttttgccatgtcattcttattatgattagttgtataattcctttacactcaatatgttttaagaattcattcttatgcaactttctccctttagtcaactccttcgtagaagggaatttactaaaggggaagaagaatcttctcatttgtgttgccttgttcttgtattctcttaggagccaaaatcaagtaaccaacaagaatgaaacacaagaactggttgcaacaaaactcaaataaatgctctgaaagcactaactcttctctagctcaattctactaaaagtggcacttgggatgagttgcatcacttggagttgatgcaagcaatgaatgcgagtttggtgtagctctatttatagctccaactaccccttgtagccgttggagaaatacaacaaaaagtgctctgaatgtgggtgcactagaccttctacaatgccggtttggtgcaccaccagaccttgtcaatctgtcctagcaggtgattgttctaacaagttaggtgaacagtatcggtctagtgcaccaccggggccttatcacgtcaactcggttgttggaatcagaaatgaagtcgttgatctctgacagtccggtgtgccaccaagctggacttgtgcgccagctctctttcagcttcaaaatggcctctctagtaaactggtccggtaggccaccaaaccggtctggtgtgccagccagcccagaccactttacagcccctctacgcacttggtttggtgcaccaccggacctatccggtgcgcctttgcacagctcaactttggtaggttttgatatattttcatcaattgagtttaactagacatgagggtgttcctatgacttcataccatatgatcaatatatggagttagtaaaaaacaattattctattagg

SEQ ID NO: 5293 - DNA, 925 bp, Zea mays
  Intron number 5 from transcript GRMZM2G132944_T01 (locus G RMZM2G132944) derived from phytozome v7.0 (chr-ID 3; pos 3 7356018 to 37356942)
gaaacttgggcaacttggaaaattcctcaggtaacatagcttatatggactgttttgaagttgctttgacttgattacatgatttagttgcatttcaactttctagttagagcatctccaacaatgtgacctataaaaacgccctataattttaaaaggagtatggtttgtagaatttaggccaccaataaaacgttccgctccaacaggaaagcctcaaatctagattatagggcggcagtccactacggtgtagtatatttgacacttgagagggtgccctataattctttgaccaaattttatgaaatgagacactgttggagtagttttttccgcgtagagctccatatttcaatttaaggcaccagtttgaggcattgttggagatgctcttacccatactacattttgggtaccattcactacaacttcggccagattggtttctctgagcatcatctttatcctatactagagacgtcaatggaaccaattgcatttccatggcaaagattgtgtcttgatctcatttctatttattagttagtgtttcataacttaaacagctggaattttagcttgttgtgaatctactcttctaccaatttccttatacaatccttgcatcattacgtgatcagttgttatttatgggttcttaagaatataaattgaaagcaaaagtatgacttacggtctcttatgtaagtaagacagttctcgtcatcaatatttaaaagtttgatcactgaatgaaatttccttgtcagctttatcatggactcatctctcataatgccccattattaaatagtgtcactgtagtcagtcgtcatgtggagaacatcattgtccaattgttgtggttgtggcaaataactattgatcacctacagctaatgcactttgccagggaaatctt

SEQ ID NO: 5294 - DNA, 889 bp, Zea mays
  Intron number 1 from transcript GRMZM2G119239_T01 (locus G RMZM2G119239) derived from phytozome v7.0 (chr-ID 3; pos 1 79693288 to 179694176)
tctcctacgctagctccctcctccaggtgcctgggcttgtcctcaccatcgccgtcgtatcatattgtacttaggatgcactgttctgttcgagtctcgtccctgtagttcctaaactttcagaagaaaactgcattttgcaggaaaagctggagtttatttgtggtattaggcatgcatagcaaggtttcagaaacaatttggtcccctctagcagttctaccattcaggtcttgcttttatagaaagatccttgttgcctgcaatatactttctggaaagtataccgaccagaattttgatctcattagtcttgtgctgttgagctatccatgtatactacagggaaaagaaatgccttacagtttattttaaacatttacttatttgcactaacattttggctggatcattgttattggttgcaaatatttggattctgtcattctgaaacctcaaatgcattaaacctcattgggcacggcattattttggctaccaggaaaatgaggggttatggtttcacttttttttcctcagttgaaatccaatttactatgctcaattgcccatcatgaagaacatacaatttatgaatcatgaacttcagaatttcttcatttaccgtcctatgaaacatgaggacaggtttcacaacacattttgacattatatatttatcaagtcagttgtggtgaactgtgaacaaatgtgtttgttatgcatatcagcacctcttgtatttgcattcttcccctagcagtaaggtcaacggcactcagatgggaaataaccgaagcatcttatgctgtggcagttgcgctcttcttctttggccactgactcttactttctctttctggtcaaatcttcattctttcagacctct

SEQ ID NO: 5295 - DNA, 958 bp, Zea mays
  Intron number 1 from transcript GRMZM2G040881_T03 (locus G RMZM2G040881) derived from phytozome v7.0 (chr-ID 3; pos 1 94698936 to 194699893 reverse strand)
ctcgcctcctaggaaatcacggagcttccgaacaggttctgtttaggaaaacccccagattccctctattgtgttttcttaggacctggcaggaaaacacttatgattaacactatgctcttctgattcactggcacagtagtagtttgaataatactcactgtctgttctcccagttgcttcatttcaccccgatgactgatagataggcgtattgatactcatatatacattcaaaagggacgacatttcctgctatataggttatatggagtccctcttaataaattgtacaatctgaagtatagtgtttccaagaggactctacctcaaccttgatcgaactggggagttacggatggggttatcatcttaatggcattatcctatgttttgttttgttgggtttgacaaatgttagatgtttctgtatcaattctctccccaccgtttaagtagcctactgtattagtcttgcatttgtttttccatggatgattgtatagtcacaaacaaaagaaggacgtatattaggatctttttatgtcgctgtgggtacgaggttatggggttaaatttaattatttgctttccaatgaatggcatatacgtatacaattgtagatgcacttctaccaggaagaaatttatagccgttgttgttaggtggctggatgcagcaacatgtaaatgttgcaacttgctatctctagctttcatgaaaatagcccttgacagtttcagttaagaatgctaattgaaagttcatggttctgatttcggctaggaagattatgttacgagagattttggagtcaattctgtaatgcctcataagtataaagggatgtgtgatgtggtctacgggtggactggaagggtgtgacatcccatccagcatttgttaaagtcttcctcagcatatgaacggaccaatgatatcctctttctcagattt

SEQ ID NO: 5296 - DNA, 563 bp, Zea mays
  Intron number 2 from transcript GRMZM2G155321_T01 (locus G RMZM2G155321) derived from phytozome v7.0 (chr-ID 3; pos 1 86383075 to 186383637)
ttaccaattcatttgctcggaattgttcaattaatgtatgtttctaatttaccttaaagttgattttctttcattctttgcatatatatgttgtcagatatttgctccacacttatattattctgatatctagttactagtagctatgcaactcaattttcaatcacatgattatgtatagttgtcttcttgtgttttagcacctttgataactgaagcacacttgaaatttgattccatttatttatcctcatgtttggctgattatctctttgaaccaattgatcatgtgatcctatttttgtgaagcttaatgtttttgggagccgatgggttttggtattgttcctaattaattgcaattatggtttcttagttcactatagctagcagccttattggtccttatttatttgagtgagcaatgagtgtagcatctcatggggtggttacttccatattttatttgctgattatgtaaaacaatgcatgaaccaattctattttgtcaacttgaatatgaatttatctccatgtagggcactccaagtttagtttctgca

SEQ ID NO: 5297 - DNA, 559 bp, Zea mays
  Intron number 1 from transcript GRMZM2G303139_T01 (locus G RMZM2G303139) derived from phytozome v7.0 (chr-ID 6; pos 7 4333128 to 74333686)
aagaaggtaaataatccttactgcctgagaccttatgggccggtttggtgagaagggaattggagatcccctccaattctcttgtcaccaaaccagcccaatatatggttaattatgatcccgtgtgtatagaaatgtgcatccctattcaaactcaaaaatttatgaggaaactggatggctgtctaggttactacatgtctagaagatatttaatagtgttaaaaaaaacattggtgtgacctcttcatcttgttgcaattatgtatgacaaatgcaatgatactatgacagggaccgcaaaagaaacgtcataaaaatgtttgtttgaatgatgcaatgaattttacaacttactcttcttcgaagacacttatttgcttcacaaaacatttgttcctgcaaattgaataagtgaagttgcttgagtgaagtcaccaatattatttttgttaaatcatgaagagtagcatactttttttctgaagttctgtcagttgatcaaccatgtgttgtgtctacaggagaaaaagagaaggaaaagaactgggtcagaaca

SEQ ID NO: 5298 - DNA, 871 bp, Zea mays
  Intron number 1 from transcript GRMZM2G126774_T02 (locus G RMZM2G126774) derived from phytozome v7.0 (chr-ID 7; pos 1 68449752 to 168450622)
ctaccagggcctctctggaggcccgcttcggcaaggttagggttttgtctgctccgtagctgatttgggggtttcttgttggcgcagtggggattggctcggttatcggatattggacctatggttaatgcattttggaggttcttctccttttctttttgaaagaccggaattcttttctattaccaaactcttcgtattctgtagcgatttgcccctatcaaagaaatagaggggctcttgctggataactgttgggttcataaagcggttgaaaatgtagtacgaatttgggtcaatgctgcatatatacaattgggatggtaatcttgagagcgttctcatcgagccattctgtggtactgagttatttggacaactggattttctgttggaagaaatgacgaattttgttgtgttctgtgttctctaagctcatagtttgatgcgcagacactgtatctctttatggacaacttggacagtttgttgaaacgttgggagatctgtggttcaagtatcagcagagtttgtgttaataagctaaatcttagtattggattgttatttgttttcttcatctttgctccaagagtgttttccgccctattatatgttcttcattttagtgtgcaattttgaaaaccaaaagtggggacttttttccttgttgaaataaaactgatgtggctggataatcaataacttgtgtagagagtgtcattgttttagcaatagttactcagttaggcatagaggggttttgctgctgcaaatcttagttccttttatatttgtagctaattttgctaataagtgcaatccctgtccttctcaatttctcaggtagaagcactatctccctcgagaa

SEQ ID NO: 5299 - DNA, 924 bp, Zea mays
  Intron number 1 from transcript GRMZM2G067530_T01 (locus G RMZM2G067530) derived from phytozome v7.0 (chr-ID 3; pos 1 6317029 to 16317952)
gaatttttgagatcattggtatctcgcctgaacaggtacgacttcagctatcggctcgttgttcacagtttatatgatctggactgccctcattatgatagcaatcatgctttcagttctcaactcatatatcgtgttattaggtaaactaaaaacacagctatattttcttttgaaaaaaagatgtcttaggctgctatttttttgcgagtctgctacatgcctacatttctcctgcttttgttaactcagagcataacaaggcatacttaaaataatgccttgtttattttttcttttataaattcatcacacatgcccttttctatgccctcccttccccttgtgggtacatatgcatgctaccaggcataaggccatggttttattttactgattgttcaattcaggtgtagtacctctaaattcaggtgaaatctaagtccacttatgtgcctgcatacttgaaaactgtttaggcaccaagagtttgctgttaacttgacattatgttcgtttgggcaatttgtctacttaatatgctagcttcaggtgggctcccatcaatttattgtgccccagggaattcaaacatttatcgttgaaacatgaaagtctaaacgagatgctcccatctgttactaattgtttcgcagcctcatattgtttaacatgctttattagatgctcaagttaatagaacgaaagtcatgttgtaggcgtataactgtatatgtttacaaatttgatggccaaatttgtaattggcaactttcttcgaaactgtttttttattcttgttttgctcaagatcgtggagaatatgatgatgctgtatttggtgttgctcattattttgtgatctttaacatattattccttgtttccaatgcaggcagaggagaaatttggctaccttttaga

SEQ ID NO: 5300 - DNA, 307 bp, Zea mays
  Intron number 1 from transcript GRMZM2G302293_T02 (locus G RMZM2G302293) derived from phytozome v7.0 (chr-ID 3; pos 1 88538334 to 188538640 reverse strand)
gtctggagttttaatcgcataatatctttaattagatttgtatgttctttgtttttttcttcttttctcctcttcttggaaaaaaaattctttgcataccagatgcaaagcccaacttttgcagcccctcacataccccattgctggtccatacaaataaattaaaaataaattactaaagggttattttgtaaattttgatctgtctttgtgggccttcaagtggtatatgtgaggggctgcaaaaggtagagtttgcatccggtatgcacagaattttttccccctcttcttatagttgcattgc

SEQ ID NO: 5301 - DNA, 408 bp, Zea mays
  Intron number 6 from transcript GRMZM2G003225_T02 (locus G RMZM2G003225) derived from phytozome v7.0 (chr-ID 7; pos 1 20316192 to 120316599)
ctgcacggccaacagaaaatacctgtcctgaagaggtagccacatgcttatcatgatgtaaatcatacattcatacagtatatgttaagtgaaaatgtgaaatcatgatttcctttaagtcttcctttgcctttgacttcaatgcattgtactcatgattggtgttctgctttgtaattcttagttcacaatttttttaattaaaacaaaaaaattattaaaggtagtacaattcatattctcagttcttccttcatatgcatttgaatcatatatttgaatttcctagaactttgtcattatctttaagtcactagactcactagctgttttactgctaacttccaaccacataatgttttttcaaatgcagcttgctgagtcttcagaggaagtaaagacagacac

SEQ ID NO: 5302 - DNA, 1050 bp, Zea mays
  Intron number 1 from transcript GRMZM5G869690_T01 (locus G RMZM5G869690) derived from phytozome v7.0 (chr-ID 6; pos 3 1393590 to 31394639 reverse strand)
ccgcgtgtgccgtgctcggttttgatccatcacctgtaagcactcctttatccatctcaagaccttctctgtttcaatttagagcggaattgagtgttctttggggtcggataccgccccaattgttcgtcggtgtgacacctggccgccaagccgccttcgcgtgtagatgtgattccctgtaccaaaaaacttagtatgaacttgcgggatcaattagccttgaaatactctccgtatagcaccattttgggagggattcagcgcgtatgagcctggggcgcttttcaacagcgagttcaccggcgggcgccgccgttcaggtggtcttggcgctgtcatgcgggagttatttgagtttgtaacattctcgtcgcgcggcttcgccactttattactccacagctgcgcatcgccattttggtattctggagctcacagccgcgccagattgggacatttaatgccccacgctctgttaccttccattaggcatggtaaaagtcaattttgtccctgctgtaaccacgaggctggtgaaaacctaactcctcctcactcctcccttccacgggagttttccttccacggtgccgccactcccactcctctgtctcctctttgctcgctcctccgagagcactcttcctccgatggcgactccggcgagagggaagaaatgactggtcgtcgacgtcgatgtcgaggttgacagtgaggtcgaagtggcttccgccttcagccgattgtctgtttcatacgttgccaagcgtacaggccacggttgcggcttggagcactccaccatcaaagagcacacaaccggcaaggaactcacctgcgtggccacatcaggtacctctttctgtcatcaaggagcactccccagcagcagaccccttctgtcgtcaatcactgctcggcacctcgttcagtgtcggtaagggttgtactaagttcaatactatgcagtactactcgttcaattccaacaacattttttgtgatttcgcagataacccgatttgaaacagttcgtagtgacctcgc

SEQ ID NO: 5303 - DNA, 1005 bp, Zea mays
  Intron number 2 from transcript GRMZM2G575546_T01 (locus G RMZM2G575546) derived from phytozome v7.0 (chr-ID 3; pos 2 18162634 to 218163638 reverse strand)
tttctgtggctgcacctcgtgtgaccctttttgtggtaagtggtcggtcgataggattgcaccacgtcgtcgttaatctgcgattaatgagtatgtattaactttggcattagatatttgattcattccgttccagttatattaaccgtgtaatgatcttgtacgcacgttaaaattattatgttgttaccacacatgttttagttaaataattaattattggtttacttgagggttattaaaataacaatttaattagaacgagtctatagttttaactcatgcttttataaatataaatgttaattaacttgattaataccagcttaaatacttttatttaattatttatttgtcattgttcgcgcgcgacatcgtatgcgcgtcattgagctgttcgcgcgcgtagtcacgttggttagcacgtgtcgcgcgtgctgttcgcccgcgttgtcatacgtcgtgtgtgtgcgtcgcgtgtgtcatttactcgtgtcgtttgccttaccgtggaccgttagcgtgtatctcgcgtgtcgatcacgtgggtcgtgcggcgtctgtgtgtgataataaattgtttttgcttataattactcatgttaataacgttaattcgtcaggtcatatgttttagataattaacttaaggttcgctcgactaatatttattagattaacattctaactagattaaatgcgtagtattccacttaggcttatataataaatatcgattaatataatcaggtcgaatcaaatgttttaattagtatttgtttagcgtaaacccgttaacttcttgaccatagcttcgatttcgacgcttcttttcctcgtgtgaccgtagtaacgcactctacttcgttttgcatattttgttatttttttatttgaatggtgtaatgttcttatgcatatatatatatatgtttgtttgtgcctgtttgtattcgctgtgcgtcacgaatagactgtgatccgtttccgagcttcgagggatcg

SEQ ID NO: 5304 - DNA, 832 bp, Zea mays
  Intron number 2 from transcript GRMZM2G173756_T02 (locus G RMZM2G173756) derived from phytozome v7.0 (chr-ID 7; pos 7 9008919 to 79009750)
cctttaagcctccaaaagtgaacttccaaacaaaagtgagctagtcttattgatatgatttcctctccttttgatatttctttattctgcacaagtatttgaagctctattctttagacaatagccatggttgcccatggccttgttattgacatactaggcaataggagtggtctgacattcaatgaaaaacacccattccaaaatcatatgagtataattatgaaaactctcttttgtgcagaataagtcatgcttagattcttctctacatcaccattttattttcaaaactttggtttttctccctagtgtgaagtaaatagttaagatcattctgaatccttaagtacttgttcccaataaccccgttttacttgcttcagcagttccatagagtcatttttcttcttgaaatttggcgctagtgatgcttgaaatgcaatggataagttgtcatctggcagagctcaaatatgtgtactttctagcatcctgaagttcagacatgaaagtatgtctgtcagcaacaggtttcacaaaaataagtactaatagtttgttgtagtatttctgatataaggggcagaatggttgtagtcccatgctatcaacataggatggaaaattttgtctaagttcttagtttaaagaaccagccattgtattatatcactttgatcggtactactgcatatataaactttgcatattgagacaagctgaactattggacaattctggttctgtttaaagctatttatccttgaaactaattcagttaactgtttcactgaaacaatacaggtttatcacccaaacatcaactcta

SEQ ID NO: 5305 - DNA, 664 bp, Zea mays
  Intron number 1 from transcript GRMZM2G060373_T02 (locus G RMZM2G060373) derived from phytozome v7.0 (chr-ID 6; pos 2 2305862 to 22306525 reverse strand)
ccaaggacattggcttcatcaaggtatgcaatataagcttcaaactcctgtgtgaatgatgcttagcatcattaatgctttatgattttgtattggatatttagtctgaaaagttgctatcaaaaaacacgacaagaaaaaagtgaaagaccgataaatccattagttaatatttgtgaaatagctccatttagacactattctgcttttagttagcctccatcgtaaacatggaaaaggctccaagattctatgatgtaaagtgtctgatacttatctgttgttttatcatctttaattctttaatgaattagttactgccagcttttaggcgacatcttgcagtttagggcattcctatgtatttagactgtttctttggcactttgttccctttcttgcaagtgcagctgtggtattttgttgaaacatgccctacactttgctggtagtctttttttattcaaagaatgaattgtggttacatgtttttcatgttgacatgaaaacattaatgtatggctatggcacataaagtgcctacaattattttgctgcccatggcaatatttttgaaatttctccaatttggttgacttactattgctctttaaccaatgcaatgcctatatttttgttgcagtaccgctgaaatcaggtggga

SEQ ID NO: 5306 - DNA, 819 bp, Zea mays
  Intron number 3 from transcript GRMZM2G062066_T01 (locus G RMZM2G062066) derived from phytozome v7.0 (chr-ID 6; pos 1 52903637 to 152904455 reverse strand)
gaggcttcggatagtaagatatcatatgagtgcaagagaactactcccaccattaactataacaaattttgtcaccagtgaggattacatgattactgctcttttgggtgactatagttactggccaccctgatatttgatacaactgatcttttttatctcatgctaaagaaatttggtggctggtggatctgcttaagaatcaaaagtcagacaaggtggacatcaccatccaaccggaggagtaggaagccatgaatgatgttctagcagccaggtgacgcctgatgtctttgttcagttgatatagttgtctgatttttttcccttcttcttccaagttagaacagtctttcttatacgtgtatttctacttcttgaacatgtggaggcttattaggctcactttatcatttgatttaatatgtgtggagtaatccttttaaacttttgccttatccgcatgtactgtgggctactaagactcattttggtgtttgaacatgcatgaagctaaaacccatcaaaatcggttcagtattggttgttggtaaagattttagcgaggttgatgacaatatatatatatatatatatattgttcattttcatgtaatcattgtgaattaatatttcattgaatgatttatattctatcgcaatgcacgacactctactatcatatatagaactaatgattgcaatgtgtgaaatagttagattaaaataacaatataacatacatttatacataatttaccgtggtattatacttgtgtaaactggaaaacgagaagtttctgaagtaaattagcttca

SEQ ID NO: 5307 - DNA, 695 bp, Zea mays
  Intron number 2 from transcript AC233866.1_FGT008 (locus A C233866.1_FG008) derived from phytozome v7.0 (chr-ID 6; po s 137406767 to 137407461 reverse strand)
atcaaggtatattagtgataacttgatgtttgaatgaagctgtagtttattttacaattgcaatcctatcactgtgttagacacaatagtctacaaattcagttatttgagtttaacattataaaaacaagattgctagctgggtacttgtacatgtttggctaaaaagcattatgatcattatactgtcaactgtcactgtgttagacacaatagtctacacattcagttatttgagtttaacattataaggagaagattgctagctggttactcgtgcatgttttcaaaaaacagcaaaagtgctaaactattatgttcaaacaacttaccttatacgacttctgttgtctaatgtgcaacttgaattaatgagaaaatattgtgtatgtggatgtgtctccacttgtcacatatgtcttagatggttacaatgtatgcatctttgcttacggacagacaggaacatgaaagacttttaccatgaaagggactgagaagggactgagagtaataggggtgttaaaatgatttcttgcacttcgctctgtaggtctactcagttgaggacagtgatcagtgtctcgtaggcactgctgaaattcctgttgatggattttaatgatgctaatttgctgatgtagctactggtgcacttttcttctttgataggagattgttcttgtcacctaaaa

SEQ ID NO: 5308 - DNA, 618 bp, Zea mays
  Intron number 2 from transcript GRMZM2G041328_T03 (locus G RMZM2G041328) derived from phytozome v7.0 (chr-ID 7; pos 1 72572914 to 172573531)
gcgacgagtcggaggctaaggctggcgtggaagaggtaccttgttagtttcctgtttctgcctggttgaatcgcttgtgctgactttgtggaactacagcttgtgtagcatggcaagagtatagcatgttgcgttgcattttgtttacgaagaatatgtttccttgacatatttccttccaagctcgccttacaactgtacaattaatatatagctggtgtttaataatcgatgcttctaaatctagtttgaatatagcttcaaatctgggtggcaataatgaattgacactttttacccactgcgcacaacggatttgtcccatgctttgaattctcgctgaagaatgaaaaaatcatttatttacactgactttcttgaattagaacgtaaacaacactaaatggttaatatattctgacatgaaaaaaagtcaccatgtttttaaactccattgccatgcttgctgacctattgacaacttatatgtgaattcaaagatcatgctttgtccttgtacattaaaactttcttgtagtacatattaaatggcttcatgttaactctcagttctttgaggcagaagtcattttcaagagcaattaaggttgttcttag

SEQ ID NO: 5309 - DNA, 668 bp, Zea mays
  Intron number 2 from transcript GRMZM2G095354_T01 (locus G RMZM2G095354) derived from phytozome v7.0 (chr-ID 3; pos 1 04056599 to 104057266)
tactgctggtgtcacaggtttgcccactaatcttgattgcattttgcttcacttatctatggatttatggttctgcactacaattctaaaacctgtttttgagttggatcgtttagctgtattccccaagagctttttacttaagtatctgggacatgagagaacatagttttgttcacaataatgcaaccattacatcttttttatcacagccttgttatagcagaatatggctaaacgagtgaacaataatatacttcatttgatgctttgttaactgttatagcagtatgcaatacatatagatatagcatactcataattggagtagcaaaccatcttacttattgtttagaatgagaaaactatagacaacagaacattttgtctacaacatgacaatgtgctcgtggctgtgctccttttttgtgcttttagttgaaatctgatgctacttaaatctaactaatttctcagcagacaacttgccttctattgcactattttctaagcacataattgtatgtctctgcctttctgtttctaggtccataatgctttgttcaacctttgcaaaattaataaaagaagataggaacaagcagctgaaaatggaatcatccctcacttgatgaaatttgtcatgtcagactcacctctgcgacagt

SEQ ID NO: 5310 - DNA, 952 bp, Zea mays
  Intron number 1 from transcript AC205122.4_FGT007 (locus A C205122.4_FG007) derived from phytozome v7.0 (chr-ID 7; po s 2149855 to 2150806)
gcaacagtgagagagctcaccggagaagacgacctcgccagagccgaggacaaattcgttgattgatgacgaatcgtcggtcggatcgatgaatcgaaagcatgacaaagctctcgacgagacgaacacagtggtaccctcgaattccgccgacgacgcacggatcaaaagtaattgcttgccagagttggaaccgtcccgaactttggcgagcaattccgggagtttcggatctaaactgggaaaggagtttcgaaattcggaaagtgcttgacgagaggattccagccgtgttatgctaaggggtgtttagtttgtacagactaatttttagtctctatattttatgctattttagtttctaaattgttaaatacggaaactaaaatatagtttttctttccgtatttgataatttaaagactaaaatagaataaaattgaagtactgaaaattagtccctaaaaatcaaacaaccctgaatcattataatttgtgtcgtgtccggcctatttagcacgtatacttggccatacatagatccccaacagacgatgtcaactaggactgatgaacaatgtatctcttcggggtcgccggagcgtagagttctaagcaccggccggccggccgggaagggcaatgcgattgatcaaaagggatgaattcatcaagtgaccacaccatgacaccacacggtagccaatgaaccaaacgtacatcagagccatgtaagatcatgcatgtgacgcacgggatgagcatcatgatgagattaatttataagagtacgatcgatcaaatcgagaagattgtctgcctgcacctcgaatcctacgcacgcgcacccggccggtcctcccaatggcgtaactgcgtaaagcaaactagaaaaccctagctctgtatatactatgtgagtgactgtgtgtgttgtgcatgcagtttttgg

SEQ ID NO: 5311 - DNA, 1009 bp, Zea mays
  Intron number 2 from transcript GRMZM2G164852_T01 (locus G RMZM2G164852) derived from phytozome v7.0 (chr-ID 6; pos 1 68232832 to 168233840)
tgttgtctgagctcatagacccaattgatcaggtaagaatgtcctggtttcttagggggtgttcgggatggctctaggttcagttccagtgtggagctgtagtttataatatcaatttaaatagttttaaaaatatttgtaatctaaataataaacaaaatgatttatctaaatgtcttctaaaggctccagctccacgattttctggagcacctgctccaccaactacactaaattttttggagctatatagctgtcacaaacagggccttagtgcatgcctaaatgccattattagcagtatttctttgctaagttttgtaaggagtatcaaacattgagtattggaatcttatgcatgtaattaaataattagtactatttcagttcaaaatatgtaaaactacatcatgtggtatagtagtagaccattatgaatatttttccccttcaaaactttctttgttccactgatggcatgtactagaaataaaaacaaaggcggaccaaggtggttgtttaacttctaatagtctgtccgtgatgtagcatcatagtatagctgtcacgtccctgaggatgtagctgtgggagctcgctggccaccggtttcctgcccgtggtggatggtggcaaggtagatagcagggagatgagataacagagaaaggaagtgaaaatgggattggctgtaattgcttgtttattgctgaaccagaccttcctgattgatcccaaatacccctcctgttgcctaattagcccctgttacgagcgcctataaatgttcccgaccgtaacaatagcttaaggttacactaggaaactggggagaaaaggaagatgtaattcagtctgagttttataatatgttatttaggtgatcattaagatagatggaaatcacaacttgcttgttagatcatttcaaattcaaatgtgcattttcaaattcaaatgtgtctttattgcaacgaagccgtcttgaaaatcaaataaaacaacacaa

SEQ ID NO: 5312 - DNA, 672 bp, Zea mays
  Intron number 2 from transcript GRMZM2G110922_T01 (locus G RMZM2G110922) derived from phytozome v7.0 (chr-ID 3; pos 1 74774371 to 174775042 reverse strand)
cgctgcgccatcccaacattattcgcttcaaggaggttcgtcgttatggaccggaacgtttaattgcctgcttgatcatttcctttcgctttttatttttattacagggtgtttattgccgttttagtgttattagggagcggcttcaaaggagggcggataaaggatttttgaatatatatatatatatatatatatatatatatatatatatatatatatatatatatatatatatatatatatatatatagttcataattcgggatgttgctaattcctcttaactgcatatagtagggggaatcttttgattggtgctgcttaattaggtgccaacttttgctgttttcctatgtcctttgcccctttctttttaggctattccccttgtgcttcttgcgtatttagtatgagttttagtgtcagggatgcatccgccttagacagtcgttaggcagcatgctttctgtctcagattgttcacacaaatctcaaagttataaggtgcagagtcttctatttgaactgttgtgaattttaaatgtacgaggaaacagacaatgcctccactctgtttgcttcagtagtaccttttctccttctgaatcacatggttttaattgttttgggaaaaaacttctgcaggtgatacttacaccaacacatctt

SEQ ID NO: 5313 - DNA, 1065 bp, Zea mays
  Intron number 1 from transcript GRMZM2G333990_T02 (locus G RMZM2G333990) derived from phytozome v7.0 (chr-ID 7; pos 1 1140774 to 11141838 reverse strand)
agatttccgtcggagtgttcttcagcttcatcttagtgagtttcgtatagtattgttattttaggtgtcgctgttgcgattttggacgacttttgtgtcgcggtagtgcaagatttcgccccttggcagttcaatttgtgaggatttatgcaggattttggggctggattagcaagcggaagcacatcgtttgctgcgctttcccctttccgttactaccatagtgaggactgaggagttatgattccgtggattcaggatgagagcactgaagagggttggtgcgcctgttgcctcgggagtcgtgcactcgtgcgtgttctcttttttgataatctttgctccagtcccccctccgcatctcacactgttgtttctggcgtgagctctggagatttgtaaagagtattcgtggttcttgggtgtagggccctgggtttccatatgcttaagtttgtgaagttcacaactgccactactggtaataagtaggaaatacgagattgtttggaaacaatttttgggatggttgggtggaagtccaggggcagggaatgctttgttttaggacatacttgggagcattgggaatggggtggataagatcctgttattccattttgagcggcaagcagatttagccctttcaacacccttgctgccaaaggggctagagtgcctgtaattcttcatgtttggggttgccattgcctcatgttcgtacaggtcttaaatctgtgtgagtctaacgctccttctggcagtggctgctatctgtaattcttttataaaccttaaagtccttttcacttgtctggtatattcttcctagaagtctaggaatagatattttggagctgttgagtggaggtttgcactgcattgattaacctttcgcccattatgtcttcctcactaatagcgtaggctgcttttgccttatttgttatctcctagtgtacggttaagtagatatttatcctagtgtacagtgcactacttttgatattgtaatgttactgcactgcaggagcagcagatttttgcgtgggggattcctgttct

SEQ ID NO: 5314 - DNA, 844 bp, Zea mays
  Intron number 2 from transcript GRMZM2G094765_T01 (locus G RMZM2G094765) derived from phytozome v7.0 (chr-ID 7; pos 1 65418243 to 165419086 reverse strand)
cacctggcaaacaatctaaagagtgcccgctcgtgggtgtgtgttgtgtgtgggtcgtggtgctgggagggaggcgcatgttagacggctggacaatccaaggccatattccatatagatccctaccactttcttacagcagttgctccatcgccaactgctttctgtcagcagataattgcatgattgcatacagagaacaaccaaaacgaaaaatacggtgctcactggttatcatcctacaccaagtgacttatcaaaagttaatgcaatgttgcaccctacttttcaaagaaacagactaaggaggtgtttgaatgtactagagctagtagttagttggctaaaaaattcctagtggatttagctagctaataaatacctagctaactattaactaatttactaaattagctaatagttggactattagctatggtgtttgtacgtttccagctaattttagccactaactattagctatattgcattcaaacgtcccctaaatgttcctcaagtctacatgcctaaagcgtcagtttgatttgaacttttgcttgtgctaggagatacctgtagtcctagaaacttatactcctaagctacaatctgaacgtgagtccccaaaactcgctactggaatccagtttttcatatccaaagcaacaaataatgtgttttgacatagggcgagagacggactaagcaagcatcccagtttaaccaagcaccacagagtcagtaaatacatagattctagatgcaagggcaatgagaaacattcctttgatttttctttttctttgcaggccaccaccaccaccaaggctgcacggttaaacca

SEQ ID NO: 5315 - DNA, 913 bp, Zea mays
  Intron number 1 from transcript GRMZM5G811469_T01 (locus G RMZM5G811469) derived from phytozome v7.0 (chr-ID 6; pos 8 8028374 to 88029286)
cggcgacgatatacgggtgttccatcgttgttcttgtaagtttcatacttaatatggcaaatcttttattagattaatcaattgcaatctaaaaatacatacatatattatgtttttacgttcatttgcatatgactcacatgatatatatatatatatatatatatatatatatatatatatgttatgtagctgtattatttggaccacttgcaccatgctgcagctcccaacaacaaaagtggcactacgcgcatcaagtattttaacaagaatatcgtaagggtgctatcaatggctgataagcgtaagcctcgtcagggtggcgaaccatttggtttttgtcctgtgagtattcaattcttctatcataattttagcttaatgcacattttttcgatactatattgttgtttgtagtgtttccattttgcacaatacaaggcgtcatctatgataggtgtcatcaatcagattttttttgttttttacaacaatgttatttatgactatttttaaatccaatgattttagtagtcatatcatgatctcaattcatggtacgagtcaatccatatacataattcttaattttcattcggtttcatcagtttcagagcagcagtgagacttgtttgtctcaaaatcagcttctattggtcagcttgaggttagatcacatacccactctgttctttgtgtgtctgtttctttaccatacttattctatcattattatattttttacttcagtctacaatgaggccagaaacagttgaggcagacccaaatgaacatggtcgacttcccaacataaacatccaactgcctcttatgcaagacctgatggcaactaagatatagaggtttcttgtacatcagcgctccaagttccaagctaagttgattgatt

SEQ ID NO: 5316 - DNA, 905 bp, Zea mays
  Intron number 2 from transcript GRMZM2G031420_T01 (locus G RMZM2G031420) derived from phytozome v7.0 (chr-ID 6; pos 1 33667179 to 133668083 reverse strand)
cagttcccggcaatcctcaacgaccgcaccgggtaattttctttcttccgccgctaccctaccaaatcacaaagaatctgggaatttccatcttgtgcgctctgttacgctcagttgtagtaattgttttcgttatggtggcaaaatattgaagtgtcaacatcagtgtgaaggatataaccgtctgattgttgtgagttgtgtttaacaccgtcaggcgcccatccatgagctgattcagagatatatatttttttctgaacttatgattcagagatagttaaaacctgtaataaggatgaaccttattgtgagagaaagtaagctaatttattttgactttgattgataccagcaaggtattgtttattttgacctagattgataccagcaaggtattgatgttcatagtacacctaaggtatttggttagcacaggacctaaagttgttctattttgcactgcctttggtgtgccaaaatgaattgatgtattagatctgcgcaagtgttttatttttgtctactttctttttttttggggcaacaccagttgatttgcacttgtgaataagggaacctcagttttgacaaagttgatagcttgagcttcatattttttatccatacatataactttataacttataaggaataagatattgcatgttgtttcctgttctttacaatcattgacacgcgctgtacttttaaacaattagatttatttttaattttttaatggccggaatcccaccaaatttagaggcaacatagggctgtgaaggtaccaacatctgtacatggttagttgtagttatcatctgtttttcttatattctcacttacccccataatctctaatggcagattccgtggtttcttttggaaagctgccaggatag

SEQ ID NO: 5317 - DNA, 992 bp, Zea mays
  Intron number 2 from transcript GRMZM2G517884_T01 (locus G RMZM2G517884) derived from phytozome v7.0 (chr-ID 6; pos 1 28757661 to 128758652 reverse strand)
tggtattggcattggcattggcatttccccgcagggttagaagtacattgtagagatcttgtttcagtaatgccgcatttaataatgtgcccattttcatgatctgagtgttcaactgttcatccatctatcacctgtttcttgcttttttgttctttctgtaagctatcatggcatagtagtttatgcagctgtagatcactagcttggcagcgacagagttccttgtgagacctcggagaacctgttcccgtgtatctccatcatattgttgttccttccatgagtttaggtatcccttggtccattctgcatcattttattatatgatcataagtagaagaaacatagggaaaagtgtaggaactaaagaaatgtctcttagattcttggtgccaaagctgaggacatgttgatattggggactgctttccactgacattgttctaattgttgaatgatttaatttggatctcagttttacttggcatctaaaatgtctgtgcagcaagttgtcgagaaaacctagtgtacgataggcgacacagaagaattctacgtgcatgggtgcattgatgttttcatgcatgtatattgtcgttttttgagcgatacaacattaattaattaatgactattttggcctgctataattttcgtttgtgctactgaaattatttgagcaggagatgtatttattgaatctattctgtttcttccttctatatagttctttatttgaattgcgtgcaattttattccttgttacaacatacagacatatatggtatatactttttgaggctagaagctaacagatgctcaagggatcctttcaattaagattaaggtttctcttagacaacccatcagttagcgctaaattcactttcctagcacctagctcactgcaccagggaaaaatatatcttgatctagattttatatttagtttgcaaaattcacctcattcctttgtttttctcttgcag

SEQ ID NO: 5318 - DNA, 441 bp, Zea mays
  Intron number 2 from transcript GRMZM5G808633_T01 (locus G RMZM5G808633) derived from phytozome v7.0 (chr-ID 3; pos 1 6515125 to 16515565 reverse strand)
gccatcaggatcgtcagagacaccagagttaggtattgtactattctgattgcagtgtgtatgcttgaacatatatgaataagcaaagctgcaacattttttcatcagaaaataagcaagccaaactgatctagaatacacagtttttgagaaattaagtagcaacaaagaagtctatgtgccccttcttcaatagcaatgtattgttgtgcattgggttagatgatatgtttatgtgatcgttacagtgttgggtcttgaggttatggctaaatagtcaatcatcaaaatggcagttacctcacaactttgtaagaaaaacaggttatgtgatcttaggtaacttctgaaatgttgttgcttagtgtaacagattgccagggttaccttaccttttttgccctttttatctgatactaataatgtatcatccaatgcagg

SEQ ID NO: 5319 - DNA, 601 bp, Zea mays
  Intron number 1 from transcript GRMZM2G339513_T01 (locus G RMZM2G339513) derived from phytozome v7.0 (chr-ID 3; pos 1 95055453 to 195056053 reverse strand)
aaaatagtgctgagcatattactggtatgaacagttggaatgaattgagggatagactaagaaaacaagaaacaatcgataaagatttgcaacgacaaattacaaaggagaaagaacgcatgagacaagttttattcagaatagttgccatcgtgaaatttctgggtaaacgcaatttagcgtttcgagggtccaataatcatctttacaatgaacaaaatggaaatttcttggcttgtgttgaaatggttgcagaatttgatttggtaatgcaagatcaccttagatgaattgaaagaaaggatattcattaccattatcttagtaataaaattcagaatgagttgatatctcttttggcttctgatattactaacactatcataaagattattaaagaggcaaaatacatttaactgtgaaatcatcaaggagtacagaaacggttgcttgataagaatccaagagctttttatatgccatgtgcttgtcacagtcttaatcttactctttgtgatatggcaaaatcttgtagtaaagctgtttcattctttggaattgtgcaaagaatatatacattgttttcaggttctacaaaaag

SEQ ID NO: 5320 - DNA, 1021 bp, Zea mays
  Intron number 2 from transcript GRMZM2G444029_T02 (locus G RMZM2G444029) derived from phytozome v7.0 (chr-ID 3; pos 6 5709636 to 65710656)
tatacaagagtttgcagccaagattccttattgaggtatatcggagaccttcaaagtgtcattagctgtagttattcggtaggatgttgattaaattcattgctctagaatctagatgaaatgccaaacgacattgtaatcaatatcatacttaagcagttaaccttatgccaagcttaggatattccacattagcttgtatgatgccctcatgaggggctagcaacaggcagaattttctgttcgtctactgttatgttctaattatctctgcttccacagcaaccttccatttgtttctggaccacatatggcacaatgccaacaactgtaagtaataaccacatcaataagtcaaaaagaaaaagttctacagccccatgtgcaccatggtcacaccaagccaaaatgctagattccctttgctattggcctcaagttatctggtggttggtaggattgctcaaaacatactttttattgcccacaagttattgggtggtggttaggatttcatatctcaaaaaatccatccccacaatgttgggcctcaaaaaatactttttattattagtatgcacaacacataaacaagtatttccctctcttcggacgaggttgaggtgtcaagcctaggcacggtggttcaactaaggtctaaagctgcaattatgtggatagacttggctgcccataagcatttttgtgtatagaatatagataggtgttcctacattcatatgattcaggtatattcaaattatcgagaactgttactataactttcaatctgtggtcctattgatatatatagaaaatctagccactcaagcaattgataagcttatttccaggttaaggccttggatagtgaatttatatgggtatattcaaattatctgggacacatactacaaaaactaaaagaaaatttatattgacatgatacatgatgtccttgtgtatttgtgtggtttacattctggctcagtgtaccattggtcttcttggtagcaggtat

SEQ ID NO: 5321 - DNA, 833 bp, Zea mays
  Intron number 3 from transcript GRMZM2G027603_T01 (locus G RMZM2G027603) derived from phytozome v7.0 (chr-ID 7; pos 8 685907 to 8686739)
ttgtaagtgcaagctgcaaactcaatattctactctcgaattatctttggtctatcctttatgctgatgatcaatagtattagatcttctctgttacacttatttagttgttagcatttagcaatcattgtaagtgatggtatgctccagttgtttattgatacttgttcttcttcaatggtcgtatttatgttagtagattttttaacctgctatgccacttaatattctcaatgaacgtgagaaattggtttccttctatactgagctttttattctattatatatagtccaagtggatctgtgatcattgtttgtacaatatttttcgttgtattgttactaagtgcaacctcatcgactagttttagaattagcttgggttattttattttaaaaagtaaaaacagctacttcatacactatttccacttcaaggctcttgttcttactagctttctagtttgaattataataatgcacctttctggcaaaccaacactgctccttcaagaaaatgttggtcaatcccaacatatttatatttccagttcaagttttacacggtaaggttggccacttgaaccaatttttagttatttatgctattcaaattaatcaaatcattggggcctgtctagccctaaattggatgtatctggccaaatgtgccaatgtgataaacttttatccatgtttattttttattgtataaaaattatcatcatatcatttccacctcatgctgggactgtagaacaagaacttttgcatgtatattgcttcaaggtttgtctcagccacatgtgggaacactgtaggtagtggattct

SEQ ID NO: 5322 - DNA, 879 bp, Zea mays
  Intron number 1 from transcript AC191261.3_FGT005 (locus A C191261.3_FG005) derived from phytozome v7.0 (chr-ID 3; po s 176359184 to 176360062 reverse strand)
cggcgggtgcagcgccggagcggcacagcgcgcaggtatatatgtatatatctactgtgctcgcaccgtgcaagccgaacagtacaagtgggctagctggcccagtggccacagcactctggttcacatggaactcttctgcactctgtctagtgctagtgcctactactgtacgatcgagtatgctgtatatctcgagctgcagcagtaatcactgccacacttccgggttattttcttttggcccggtatagtatactccctccgttcgtattgacactgcaaggggatttgaatgacaaaggctaaaacagcaaaaacattagcggaccaacgaagcttacctagctagctacagaccgtttgaatcgaagctgacattattcttcatcgtatatagaccttctgaataatacctgttaagaactatcgagagaaagagcatgtgaaggttgtacgtaaaacaccatcaaattttgataggaaaacatgacaaacaacaataagataaataatatatttttgactgattggatgttcgacaccccagtcatgtaatccctatttttgtaatagagcgagagggatggtcttattccattgaaaaaaaactaatatagtgctactatcatatcgttttatatagtaataaggggtgcagggagcagacctttttttttttgaaaattacgacatggatacggattgatctcgacaccctctgcaaggagccaaggagcaaagcttggtacgagtagaccttgctactctgcaccccccccccccccccccccgagatacccccatacgtcgctttcttcggtaaatctcttggcatgcatagataatatttggaatcaagagagaaaaattcaaaca

SEQ ID NO: 5323 - DNA, 555 bp, Zea mays
  Intron number 3 from transcript GRMZM2G036465_T01 (locus G RMZM2G036465) derived from phytozome v7.0 (chr-ID 6; pos 1 33898534 to 133899088)
aaagaaaagaagctaaaaaagaacacaagggagaggtagttcacttagtactatcaaagtcaaagttgcagaatatgattgagattcatatatctacttatacagtttagtaagctacagcttggttcggtaaattgcagaacatcatgaatcatgacctcttatgcatggatggtaaattatttttagtttacatctcagtgttcattttacttaattgaccatcaatagcatggagtaccaaattttcttcgtcttaggaaatatatcctcattacttgtgcgaacctctcaacttatggaatgatacttagactgctctctttcgtctaggttcatttgatcgttcttttactgtattaatacaacttctattttcaagctactaagaaagctgctgaaattggacagctgaacgatggttatatgtttgacacatcaaccgacatgtcatgaatgtgaagataatacaccctgccctccattgacccactacattttttgttatattttgcgttttttgacattagttgcttataggttagattccccaac

SEQ ID NO: 5324 - DNA, 971 bp, Zea mays
  Intron number 7 from transcript GRMZM2G036465_T01 (locus G RMZM2G036465) derived from phytozome v7.0 (chr-ID 6; pos 1 33900062 to 133901032)
gtttcaagactgccttcaggttttggtaaggagttccttaatacctatcatgaaatatgattcatttaggcacctgaaaagtgtcattatttttttgcttgccacatgcattggccctcctctctcaatatccatcatgacccatttgttcattccaccgctatggttagtttgtgactcctagacccaatataaactagatttaattaacaaagacgaattaagagtaacgttcaggaaccctcttactactaattcagaatttatatgtgtatttacagaaaacttgctaggctagaccatctgtattttcaaaatgtcatatgagaaggtttgttaatccagtgtgtagagtccagccatagtttagtttacctcctcaaactccatcttctgcattgagttaaaaagtgaggaggtcaattaagtgttcattagagaaaaagaccgtagcgtacagaaggaatgataaaatagatcacaattgctatcaggttttatgatagataaaaatctattgctgattcaaaacgaactatacatccatctttaaataattcaaagacaaatgacgcttctattattttgagggcaagttaataatacaatttattacaataaaacacatctactattatcaaaaacacttgcaaactagatcctgcttttcccattgcttgatgatgagggtacgtaaggagacaaatctgcaagccaagaacaggtggtgcttgatgagataaaggtgagaatgtgcctattcagagaactctgaactcaacattctcacaatatctgtcgtgatccgacatctctctaagttatctcccaaattctttctaaattcccttcaaatctactctagctatctatgattgtgataatcggtactcagacaatgctgattcttgggacaaaaattatttgctctcgtaggatccttggaactcattcgctgcacccagtcactg

SEQ ID NO: 5325 - DNA, 711 bp, Zea mays
  Intron number 8 from transcript GRMZM2G036465_T01 (locus G RMZM2G036465) derived from phytozome v7.0 (chr-ID 6; pos 1 33901180 to 133901890)
tgtagctaactgattgcaatcaattgaactcaggggtaagttcacctcttgacctattttctgtgatgtagtttgtgtccgttttgatagagatcaatatcatatcatgattgattaatcactaaggcctggtttgcccttttgttttactttgattctctgagtgataataaccatatggattgcctcttactcatctcctgatgctttgttcactgaattaatatgtattacttacaaccgaaggaatctgttataaacaagctttgagaagacccttgccttcacacaaaacatttatgtacaaacaaaccatttatttatttttcttattcacaactcccctcaacctatatagcacaaacctaaattcttccttacttttttacaatcacttacttcttggaatttttaggagtcaatttatacagcctgcaacttctgtccaaaacatgtatgctttactaataaacctaatttaacatgcttcttctccatattcttcaacaaattacacaacttctgaatttttcgcatgcgatgcttacctggagaaatgtacaatcaccatgtttatgtggttggtcattcatacatatttatgtacagacacaataacatccctcctcaacctatagaccacaaatctcatttcttccttactgttttttcgcagccactcactatttggaaacgtcagcagctaatttg

SEQ ID NO: 5326 - DNA, 541 bp, Zea mays
  Intron number 2 from transcript GRMZM2G366797_T03 (locus G RMZM2G366797) derived from phytozome v7.0 (chr-ID 6; pos 1 65028511 to 165029051)
tcaaccactgctccctacatccgcgccctcaataggtgtgttttgtgttttttaattatcttcaattatatcttcaattatatatgtttgatgacccgtggggattgagcttatatggatttgcttgttcagtactgttcaataggtaatttgacttggatcccccctcatatggattagctaactgttcagtactgtagccgttttgtgttttagatctggtttagcaaatcatgtttggaacactggttttacttcctgaagtttcagaaatttagaactacaggactgtaaattataactcaagttcaggagcctacagctatggttaaactggcttgttccgtagcctccttgccggatcaggcttcacaattctagatagataaattggtccaaaccctccatcgtacttgagcttacaaactctttctgaattttcttagattttcttaaatctggtggtctaccgagtgacttattaagttgtttccatgtcaaatcagacgacagtgacctcctggtggcggtggtgctagat

SEQ ID NO: 5327 - DNA, 991 bp, Zea mays
  Intron number 1 from transcript GRMZM2G057579_T01 (locus G RMZM2G057579) derived from phytozome v7.0 (chr-ID 6; pos 1 36591722 to 136592712)
acgccctcgttgccatcggccgctgcgacgtccacgtgtgtgcccccaaatcatacgtgttgcgacttagaaaaccaaggcgtcttaatttccccttacatttgctcttatgatcgcaaagtactgtttgctttccattggatttgttgggagataaattaagtagtcccgatttgggcgccctgcgcctgtttactccattagggcatgtacagtggagagacaccaaaacggttctccaagcacagaagacaactaagagactctattgtacaatggagtgtctataaacgtagtctattaataaatacagaattaaatgtatttgtataacatcagatcgatagaacagacgacaaattcgtacagtgggaagtgaggcgtctgttgctacttggtttacgagccagaggcgtctcttcacggagagacggctctaagatttttttgcaaataacccccttaaacaccttaagagcctccacattaaacaccactgtacatgcccttaatgtactaatttggttgccatttccctatgattgtggaaccgaactgatttggggccctttgtttatttgaagggacaagcaagcctgtggccattcaattgccatctgtgaaaccatcattgcgtcatccgtggatttcataggcactaaagcttttgagacatcaggtgagggccattcgttcattcaattgtgcacaatttgggtcacacattgctgagcctggtggtcccgatattttatctttgcttactttaatcattgaaaacttaggcacgccagttgactgcgtctcgttggccttatctgggaggttgtttccttggtcgtctcctgctttggtaccgtgattgtttattctttcggaattggatttccaagtgttactatcttgaaggtaatttgatttgtggttttaaaaaacaacatattttgtttatacaggtgaccagtggtatcaacacgggatcaaattgtgg

SEQ ID NO: 5328 - DNA, 1023 bp, Zea mays
  Intron number 1 from transcript GRMZM2G159841_T01 (locus G RMZM2G159841) derived from phytozome v7.0 (chr-ID 3; pos 1 77590636 to 177591658)
cttcgagacttccactggcgatacacacccactaggtacgtgcaccccttctcctctattcctactatgcaaaaccaagcactcaaactctagttacgtattcaaatatgaagttgttgttccaatcgatgatcaaggagcagacacaactgatcgagctcttattggaattccaaacaccgctccactaaatatttccccataggtgtacgtgcaccccttctcctctgctcctactatgcgaaaccaaccactcaaactctagctacgttttcagatctgaagttgttgttcatagaaaggatcaacaagtactgattttctttctttttttgttgtttaagatttttgggttaattctcttttattccccctacatacaaaaatatagtattagaaaatatacaccaaataaaaatccaaaataactccatcgcaacttttttgcttcatccttccttgtatactcctacttaaatgcacactaaagattgatgtgcaccatggtcattgtacccagtgtggtgatattactgtgatttaacctcactgttgtaattataattaatagcatgtcaattattttacagtttcaagcggttcggggaatggtccatacaaatccacaaattttgtagcttttgtattctttgtttgggattacattctacggcctcttatgtagcacctgcctgaacattttgctggtagcacgttatagcctatgttggttgaattgagcaagaataatcctcaaaatctaaggtttattgatagtatcatgatgagtgtcttcaattactaaatgagccctttgagggcggaggggcaatcattctcttatttgattaaatttaactattttccgcttcgtttttggttttgtctacttcattacaacttgccaattgtcatagatttttggtattttgtgaattgttgtttagcgattttataaatagatagtgttatctcatttttctgtccatttcctcaaaatctctagggaattcttagaccaac

SEQ ID NO: 5329 - DNA, 444 bp, Zea mays
  Intron number 4 from transcript GRMZM5G881296_T01 (locus G RMZM5G881296) derived from phytozome v7.0 (chr-ID 3; pos 1 49229892 to 149230335)
tcacattgcagccaactccagcagctgtcctggatgtatgttccttcactcgtaatatgttaaaaaaatggagcggcagttgcctatgctatgagtattgattggtttaagctttagaagatagtacctatgtttgataaataccttcatctgtatgaaatcacgagcaatcagatgttatacgaaattcttacggattgaagtgttaaatgtgaatctagcatacaatggacacaatactattgtgcaccataatagtgaagttcgacaaaaagtgcatacgaataattatcatgctagtaattcttcaattaatcttaacatggatagttactctatgttagtatgttatgcagaaaatcccgttaatcctaataaccaatcaaagatcttgatgactagttcttgttacaaacttattttgatagctttaacgaattgcag

SEQ ID NO: 5330 - DNA, 768 bp, Zea mays
  Intron number 2 from transcript GRMZM5G839592_T02 (locus G RMZM5G839592) derived from phytozome v7.0 (chr-ID 3; pos 1 76450095 to 176450862 reverse strand)
tgcagtcctacatctcctaccgcgtcatcaccaaggtaacaattgtttggcctcggtaccataccactcgtgactcgtgaatcgctcctggtttagtggttgttttttgtaacatggtgctcacagactatatgctttgcttgcacccatgcgtgcttgctctgattttagagcttttttttgtttgcacagtgtgtgtgtgtgtgtgtggaggtataaaagcaggatcagtgggactctgattttggatcacggcctcctaatatagatctggaactaatatcggatgtaatccagtagtaattggaactcattggtttacaaaactcatgtgtcgttctagatttgatagagcattaatcagtagagctatcagcaatgtatttgctgggaaaagaaaacagtgggaaatcaagtcgtgtttctgaaacatttaagttgaggggcaatgaagaggagttgtcgcactagttctatggaggaaggtggtgttatgactagacaggtggttgtgtgttgagtttgtgaaaattgtatgtttaagttttgaattagaaaccaaaactgtatcaattatacgaaagattctatctaggcaacttacaataggaatggcatgataacttttatgtctaatagccagtgactatgcacttttcttgtaccgagatatggaacttgttcaccttcaacacttgttgatttgctaatctagtaacatttgtttctgcagaccaacctccctgaatttgagggaccagagaaaat

SEQ ID NO: 5331 - DNA, 781 bp, Zea mays
  Intron number 1 from transcript GRMZM2G066313_T01 (locus G RMZM2G066313) derived from phytozome v7.0 (chr-ID 3; pos 1 2639510 to 12640290)
tttcttctaaatatttacgaaagcgcattgtagaggtattgcttgcacttgtcacctaaaatcccccccctttcttatgtgatcaatagcaggatgcttacttctttctattatatcgacttgctaggtttttttctgctaaaaaaacttgttacttgttggagatctagctttatgtccatatttctgaactgcactgttgtggtcattgcaatcatgataatatctatcttgactcatcatggattttcagtgactgcatttattcggcatacatatatatggttacgtctgtgtaaaaacaataaaagatcatatgtactttctagttcttactacaaaggatctgactttcttcctatatgcgcattgtgttttcaaatgtccctttgaactctttctgtagaatgtaacattattgtccagcaactggaagccaatgcgacaggtattaactgccactggccatccaaaagtaaagtgaaaacaaaattatagtcgccatatttaggagaaaattctgctatgccgaaacatgatattaaagaaactaataaggtcagtttagaataggggtcctctcacagtctagcattgtgtatgtgcggcaatgcctgctatacatggctttgttcttctattgtgactgattattgatttttctagtgagctacatcattctgtctggtaatcacagttccttgggactttcatgtgatttaatatggaattttttgtatggaatatcaatgcctcaaattttagggaggaaagcgaagtg

SEQ ID NO: 5332 - DNA, 432 bp, Zea mays
  Intron number 2 from transcript GRMZM2G151087_T01 (locus G RMZM2G151087) derived from phytozome v7.0 (chr-ID 3; pos 1 7432259 to 17432690 reverse strand)
gaggtcagatgtttttttttctcacccatttttatttagcagtagtttggtggtgcatttcagtttgctcggttacagtaccagtttcatatttttgctcagctcctgaagtctggatctatcctaataggaatgattaccgctttaaagtttgagtaagggtactacaaacaaaactgtcttgtgattcttcgtaggaagaactgctaatcaactagatttgatgtgtgcgattacataaatgttactcatggtcgcagcaaaatcttgcagtggttcatgttcagtaatatgcttttgctgtgctagataaactctgaaatttctagtgctatagttcgagtctgtgttttacctacatggagattgtgagttactaactgacctttctgtatttttctggtggtggcgatgatgcgcttcagatcgttc

SEQ ID NO: 5333 - DNA, 573 bp, Zea mays
  Intron number 3 from transcript GRMZM5G817551_T02 (locus G RMZM5G817551) derived from phytozome v7.0 (chr-ID 7; pos 4 3576874 to 43577446 reverse strand)
agaccttgatacgcttgggtcctttttatatcaaggtatgccgattgaaatagatctgtagaatgtagcaccgatcttttctattaaattttgatgcttaacttttcagtatgtctccttgttaaggtggaagcaacatcaatgtaacatgtcttatgaccatcaaaatcactgcagctatcactatggttttgtgacatgattgttatcatccttaagcatctgtacaaaatcaatcacattggtggttgtgttgactgcatatttagtgtgccattgttgtgtccatatcctgtttttgaactacaatacttcgttagctaccaggtcgtgggttcgaagcagcctctcagcatttgcggggaatggctttcctcctcggtttatctcttccccagaccccattcatgtgggagcctctggcactgggtctgtctgtcctgcaataatttgttagctaatattgtcttaggtgtaatattgtcttattacaactggggatgatatgctgttttatcaattttctttcaccgcacagcttggccaagcattgagcacacgccctgatatact

SEQ ID NO: 5334 - DNA, 615 bp, Zea mays
  Intron number 1 from transcript GRMZM2G312075_T01 (locus G RMZM2G312075) derived from phytozome v7.0 (chr-ID 7; pos 6 8981813 to 68982427 reverse strand)
tacgacggaacttctaccggcaggtgtggcacgtgctctccaataatgagaccatgcaaatcatgacagatatcgaagtctgcatgatattgatggttgcaatgtagtagtgaaacaactaaattaaaataacaaaatttatgtatggctaggatcacaaatgaattatgaaatattttcttataacaatataagacacattttgtatataagttatcatggtattatatgttcccgttgcaacgcacgggtactgacctagtaatagaataaattgtgatgaggaaacttttttctacttgttaattgcaccttcgttcactgatccttggaagttggataaccctgccatagcaaaactgtaaagtgcaaggatttagggtttgtttggtttgtggctaaatgtgacacactttgactaaggttagtcgtccaaattgaataactaaccttagacacaaaagttaggcaaagtgtggcaacttagctagcgaaccaaacctgactttagtactcccttttcttcttgtactactttattttgtaaataaaaaaggcactattacttatcggactaagtagtctgcaggatcaaattactattttccctacagg

SEQ ID NO: 5335 - DNA, 776 bp, Zea mays
  Intron number 2 from transcript GRMZM2G051338_T01 (locus G RMZM2G051338) derived from phytozome v7.0 (chr-ID 6; pos 7 6237184 to 76237959)
ccaagcgacccgaaccttagggagtacctacactggtaaaatatttatacgtactcgtcctgcacacactcgatcgatcccttcactatctatatatgtatacatacatatgttatatgttacaagtaaaatctcatactccctccctccgttcttaaatatatgacaccacggttgatcttttttcttcaaaaattttgaccacttgttttatttaaaataaatcatgaattattatttgttttgttgtgatttgctttatcacttatgcaccgtttggttccttggaattgaatttcattctaataatagtaatttggttttatgcaaaatatatttgtatactattattagcaagatgtcagagatatttatgtgctacatttttaatatagaggagtgagccgaagagcgtcctataatttgtagtgtagaaacaaattctactaatacataaaatcatttctcatccttcaccaaatgaatttgagataggtttatatctaaactttagaaaacgatggatattaaatttcaagctaaataggttacttttcaatttctttaaaatgaatggatacaaacgtcccgttaagataatcatttaaaatttttacattttcgaataagtatttttaattagacgagtggtccaaatttttgaaataaaaactcaacaacgtcatatatagttggttggttggtcatgtcatctctgatctaccgtcttctttcatgcaggctggtgacggatattccgggaactactggggcag

SEQ ID NO: 5336 - DNA, 829 bp, Zea mays
  Intron number 2 from transcript GRMZM2G426553_T01 (locus G RMZM2G426553) derived from phytozome v7.0 (chr-ID 3; pos 4 9056919 to 49057747 reverse strand)
atcagtttgacacattacaccaacaagtccaacaggtaaatgtgctgattactgaagatgtacatggaccgtgcacttttaataagcaaaccaatgtggtaatatcacttatgtttgatataggtcaaattatcaaccagaaaaggcacattaatgagtgcttatcattcaccgatcgcagttaatcttcagtacagttgtcttgcagtgtatgaatatatatgtatatgtattttgtttggtgaatctgtaaccagctaacctgaaccttcttattttgttagtgacaagtttcctttattttacatgaggttcatgtttgcttcataggttatatcctccactcctttcgtgctaatgcatgcttctatctaccatcatgtagagcctctgtcaacaaatacatttacctaattgttgattatttgtttgttgctggtctttgtcataacattcacactgtatttcctaatagacagtgctgcagctgtttggttgcatttttcagtatactattttatattaaatgtgaattgatgcctattttattgtacagtcacaagccttttttctctacaagttcaatgaaatttgaatatatccacaatgagtttctcttagtcaaatgccttgattattttttgcacgccaagtgatctagtggctccttggtgatctattcaagctcgcaaccagaacatgtttcaagtagagaagagcttgtcaaggatcaggtgaggcgactcactttgtgtatatgaaattatgaatgctttaagcgagtatttttattttatttttttagttttagatagtgacaaaatttgag

SEQ ID NO: 5337 - DNA, 1040 bp, Zea mays
  Intron number 1 from transcript GRMZM2G009464_T01 (locus G RMZM2G009464) derived from phytozome v7.0 (chr-ID 3; pos 1 09174300 to 109175339)
tcctcgcatctcaccccctttcccgggatatccacgtgagcactcatttccgatcgaaccctcgtcttcctattctttcgtgattcgtggtgtgaatcttttacactcccgaacttaccctggacgcggaggacctagcagttaaacagtttattttttccccatactacgccacgtcagatttaggacgtttggagtcgctgcttccatcgatctccagagatctcttctgctctgttccacagcaaaccgatctctggttttgatatgcgcactgacctttgttctctgaattagattattgtttattttattagatatcgtttcgcaaacatggtgatgggcaaatagctctagggggcaacggatggaaaattagaattatgtgttgtttgtgaataaagataggcatataaagggacaaaattaacgaatctctctgataatccagtatcattgaatattatgctatatatctgaaagcagaggtcagaaaaaaatcaatcgataacgtttctctcgtggatatcttgcttttacttttttttaatttggctggaacttctgctcgcactttttaactcttcctgcctctagcacaatctctatatcctgtcgcaagtgctacatataccattgatcattgccttcaatgcatcgtggtccaaaataaatgaatctatgtgcatcattgaaattcaacgaccatgtgaatggtagtcagttggctgatataacttggagcagactgccttgctaacagttccatgtgaagttcaagtttggattctgtgtagattgttactatgaaatacaggcagtagcttttttcatataactttttcctggcacttccttttgccattataatgaagtgagaaagaggtctttggcctcttttaaatttgaactcttgtttctatttttgggtgctgcgtctcctgttaatttgtttagccctttgctgattagtgatttcttagttccctagtaatatatgttttggatgttgcagatagagtctctttctttaacattcc

SEQ ID NO: 5338 - DNA, 775 bp, Zea mays
  Intron number 2 from transcript GRMZM2G367181_T01 (locus G RMZM2G367181) derived from phytozome v7.0 (chr-ID 6; pos 9 6042784 to 96043558 reverse strand)
ttgccatcacccttgataggaaaactactggtccagtatgtcatctatctcacttttatttcattgcttatttgtctcagaacatcagtttattccttattacaaaattgtagatactaatcaattaacatatccttaattgtcagtacacgaaaggagtcccttcacttcaatgaaccatggggtcatgagcttaaaccatgtgtcctgctgactgattatgtgacaaagttctattacatctggtctaaggttatcttccccataatgctcggcactgctggatgcacttgatcattgcatttctgatcctttagtagtcaacactcttctcaaaagctttcgtgttattctacaactcgcgatagaacatactctagcttcatttgaattgttgggtgtaattacaagagtccttaaggctgcttgtcgtcaggcacaagagctacagaacttcagcatcatttgaatcgttgtttgctttccctattagtattgtatttgcacttttacagacttcttggctacagccagatggtctggttaggcttgcaagctttttgaccaatcacatgctcggatgaggcttacctccctgctcctccaacatacgcgaatattccaccacgtgtttgtgatattatctacatacaggttagatagcacccctatcattttatcttttcaacatttcagtttttatgcctttcatgttccgttacactttctgttttgttcaggtcaggcccgcaggagaaaaaacgaaggtaattct

SEQ ID NO: 5339 - DNA, 831 bp, Zea mays
  Intron number 1 from transcript GRMZM2G075900_T01 (locus G RMZM2G075900) derived from phytozome v7.0 (chr-ID 3; pos 1 18172231 to 118173061 reverse strand)
cgcgcggcgcgcaacgagctccgccacctgccgtcgtgaagcagcggtgagaacccaccctgctccctctcccgtagccatgtcaggcatgtcccgctctacagtctagacattgaactactgtcagttttgctcggtctgctgttgtttctatatccatgtggttacgaacacaggatgttttacccctttatttactggttctgaacttagaattactacgtgcccgataactattcctcacccgacactagtcctagtcctgatcgcagaagtgagcagacaatatttctgctagatgtttaacttacttggttcgctctgaacttagaactgctacctgcctgaaaattattcatcacctgacactaatcctgattgcagaaatgaagtttgaacaatattttctgctagatgtttaactgtgcaaactttcagagaagagatctgttatttgttagatctcgcccaactaaagccttccagctataggctgctgctgccactattacaattacgtgccttattgtttaacatttaacaaatactgaaacatatctctgtattgtctatttttgctaaatgccacgttcatgtatgagtgtatccatatctgtgctacatagatttcaggtgtgtccaatgaagactatacttttcagttgtctttattatagaaggtgtcttggtactctgttgctgtactttattttatttaaccggagtttatgttttaggcaacaattgtactttgtgtttgattattgtgattctatagaagattcactatacctagcttcgtgctaatatcatcttgtagacttgacggca

SEQ ID NO: 5340 - DNA, 1007 bp, Zea mays
  Intron number 1 from transcript GRMZM2G026869_T03 (locus G RMZM2G026869) derived from phytozome v7.0 (chr-ID 7; pos 1 63114770 to 163115776)
tccgtgcacgtcatttcctgtgatagcagcaaaaggtgcagaggtgaagagtgaaactgaattgctacatatcacctcacttactgttgttcatttgtgtgtgtggggagaggcacaggtgaagagtgaaactgaattgctactcttttagagttacttcatcaaactcaagactgtgagtggccagtgagaatcgatgcgactctagaacctagtttggatgggatgagtttggtgcaatcagcaaccccattaaaagatttcaggctggtgatttttagagcaccacatctgcacatttttgacttcgagtttacttccgatctattattcactaactttacctcgcctccaaaatgagtagtagtttgcataatacactgccttctctatgttgaggtgccagacagctgagaagtattgtttctgggctcgtgcattttgtatccaatgagcttaaactacatgattgctgggaaatgattggtagctatgctgttgcaatttagaactgtgaaaacgaccctacataaacactaaacagaatgatctgcattcttagagttgccagattggttactggatcttactctcactaagggcccgttcgtttctgctggaacagaccaggattaattccaaatctccaaaacttatagtaattattgaaggaatccaagccagatttattccaccccttcattccatgcgaaacgaacagaccctaattagttttcaacttggatggatcatgaatctgacaaaattcgttcaagaataacgatatgcttattactgttgttctagtgttttcacaaggatcttgtgctttatttagatttttttagcatataggagtttatcgaggagtcgttaaactagatatccattaagggtgaaaattcacaagtttgatattacatccttttgaaatgataggttccactcaagtaaactgttcttcattcaaatgcttctttgctttttcaggtatagagacaacaggc

SEQ ID NO: 5341 - DNA, 707 bp, Zea mays
  Intron number 1 from transcript GRMZM2G320810_T01 (locus G RMZM2G320810) derived from phytozome v7.0 (chr-ID 6; pos 1 48503110 to 148503816)
ctattgtgaggagttgcttctccgtatggaagccggccaccgagactacatggtattccttattttgattggtgttaggcaattctaactcttctttggtttctagcgtgcctcgcaacaacaaaaatgattgccaaaaccattttagttccttcgttttattctattttagtcactaaattgttaaataccaaaactaaaatggagttttactttccatttttaacaatttagagactaaaatatattaaaatagaggaattaaaaattaatcactaaaaaccaaacacccccacagaaaagcaactcttgcataatagactgtaattattgatatttttcctttcctcatgccaaaaaatgttttagccattaagcgtagggcggcgaggaggtctgagttgaggcagtgctcgcctgtgcctgactgcctgtgacggtgacgaggtgcatccgtgcatgcgactgtgcttctcaatgatacacaacaatttatgtcttgcacagttatgatgccctgccttaaatatcctctctattcaaccaaatccatttcctcaatcaaaacacactttctttcctttgttagatctgatttaagagtttccataaaaaagatgtcacacatatatttcaattttttatataatatattattttaacttattccaggttctagctgatccatactttgcatcccttgctaa

SEQ ID NO: 5342 - DNA, 1023 bp, Zea mays
  Intron number 5 from transcript AC190883.2_FGT005 (locus A C190883.2_FG005) derived from phytozome v7.0 (chr-ID 3; po s 200196203 to 200197225)
tgtttggctaatctcttcttcgcagcaagcattaggtttgtgcaccagtgattgttttagtttatgatatataactatgttgttctatactgaacatcagagcatgaggagggcaccatcagcatcatagactcaaacctaccctctatggggaggtaggcataatgttgtgccattgtaatttgtacaattatttgtttttggcatcagatatttagatgcgagtgtgacatattactttgaaattgctaggccaatctcttcttcacatcagacatcaagtttgtgcactggtgattgtttcaatctatgatatgtaattgttttgttagcagtgattcagttgataggttgatcaaccaaattcaatttgaagtcgtcgtcgcccacgtccgcgtggatgttcattgtcggcccgcatgacatctccaccctcttccgggtgcggtccccccaagaagtggatatgagtgttgtgatgctaatttagttatcactggctttctaggctttgttgatttctaggagaattcttccgttttcgtggcttcgtcttctcccctctttcctttttcttctttgggttattgctacccacatgatatggatttggtataaattaaattatattttcttagtataaatagcatatgttttttgcgtgtttatttctttttttgtgtgtgttaccgtggacaagattttaggtctagaaatgaattcctgctaatagttaccagtgaaataagtttgttattgttatcttctaatttattatttttgaacatgtgctagtagtacctgaagtccagtaaagttgtcgctctaaatggaaccggttaaggaccgacttgatcctagaatcaatatggttttctagagataaagtgacaaaagaatataagggttgtcaatgtaggattgttcttttcatggtataactaggtcagtgcccgtgcgttgcaacggaatgatataataccacgataacttatgaacaaatgtgtattatactgttatgag

SEQ ID NO: 5343 - DNA, 867 bp, Zea mays
  Intron number 1 from transcript GRMZM2G484086_T01 (locus G RMZM2G484086) derived from phytozome v7.0 (chr-ID 3; pos 1 85834026 to 185834892)
ttttttgtttgatttgtgtcatggaataagttgatccatcaccatcttatttctcatagttagttagtactaacatgaggaatgaagttattccaccaaatttaagaaatagactcatgatgcaccaacttatcttagatagaataattcctcaaaccaaacacccccttatttccctagtatgtgcattgtgttataccgttaaaaaataatgtcaaactaaactcaaatcctctttgaaattgaaaggggttgagggggaaacctttaagggcatgtttggtaatggagatttgaaattctgtatttttgaaataccatagtttacaattatacatgacacaaatactacaatattaccttacggtagtaaaatcatggtattgcttaaaacctacatgtgtttagttccattagaaaacctaagtatttaccgagagaacagaagaaaactgaggtcttaagtggattttttcaaaactccaaaaatattacgtttttgaataaaccataatatttaaaactgtattttatctatatcaacctaacatcttttggctttcaagttccaataccacggtgacatcaaacaccatggtattgcctccaaaccgtaaaaaaaataccaaacttccaaaccaaaccgtaaaaaataccaaacttccaaacaggacctaaggcttatttgggagagctaggcgaatgaaggggctgaaattatcttgctcccaaacattgtagcccatcaaaatgccttgcaattagaatggtgaacacaattcatgcgtcaatgcgtgcgaaggtaatcacacgtgatgacccacacaaacagcatataacctcgagcagtttgactgacacaaagtt

SEQ ID NO: 5344 - DNA, 1001 bp, Zea mays
  Intron number 1 from transcript GRMZM2G320013_T01 (locus G RMZM2G320013) derived from phytozome v7.0 (chr-ID 3; pos 1 94006774 to 194007774)
ccctcatcggctacatctcgcggctcgagtccgaggtaaatctcctcgcgacaaggaggccgtcaggcgcggtattttggtttattgctttattggcttggtagtgtgcggttctttgttacctggtctagcagttcaactagtccggttctttcgaagggaggcgagtaggattttcccgtcaagttttgtagaaagaacaatggcgatattgtgtcgtcggggggagggcgggatttaggggagggaaatttaattttggcgtttttttttctcgttggcttgttgctccccccaccccaaatgtattaggtacgacgatgagctggtcaagtctgaaagaagctcatattttccattagctgttggtattcctgtattcgtaacgattcttctatggatcttgcactttgagtttcaggggtgtaaccgttcaagctcttctgttttgtctcgtgtttccctgggtttctttcggtataggccgcgatgatacgcgttttcaaatgctgtagctacagcagctagctcgccatgtgagctaggtaggatgcacttgtttttctagcatattgcaaaaacatgtttacgaactatttctggaggctgccacataagctgggtccaccggttcctacaatttggctatgtgcattaccggatgagtcgtttaaaataattaattgccacagttattgtgataacatatggatttattttctggatattatatgtttttggtatcacttaaccttctttacatattaactgaaaatattacgtggtattccgattgatattgcgatgtgtttctttctgtgcctgggtggtgaaaaagttatcttgttatgcactatattgtttaactggctgtttctgcttattttgttaggcatctttaaggtttgcatgctttattctctcgatagatagacagcgtgtgttttgccattagttgcttggtttttaattgagcccaaaactttttttcctgcagatct

SEQ ID NO: 5345 - DNA, 671 bp, Zea mays
  Intron number 1 from transcript GRMZM2G528717_T01 (locus G RMZM2G528717) derived from phytozome v7.0 (chr-ID 3; pos 2 23545414 to 223546084)
tccttgcgctggctgctgggtacactacaaccaaggttagtcatcggagcttagccctgcacttttgcataggaatcggcggcaccgtgtcacaccgggaataccagattgaattattactaaattcagcatttgtgcagccaccagctgatcaaacaccagatagttctccacctgcatttaagcatgtgctacgtcagcctataatagaaaatgggtagggctgtgttttttctttacaatcgtattgcactgttccatgtgctgttgttgcactgggatgccttgtttcatcaccatcctatgcttgtttaggcatgcttgtgcagatgcatgaagggtccttttgtgatatttctctttaacccgcaggaggctaaagaagaagcattgggtgatagaccatcttgtgcatgaggggtttgaaagcactgtaggtttactttgctctgccaaccacatcagtttttttatataaaatagatttattgatcatggcaacccaaaagactaaatggagaacaattctatcatcttcctttctgtgggcattgtctcatatgccaaaagcagggatggcaaattgcaaatttctttttctaatcgatacctttttcagtttgcataaatggaattttaggattattttaattcaaacttgcaggctcggc

SEQ ID NO: 5346 - DNA, 882 bp, Zea mays
  Intron number 1 from transcript GRMZM2G456023_T02 (locus G RMZM2G456023) derived from phytozome v7.0 (chr-ID 6; pos 6 0967507 to 60968388)
tcgcgtactacaagaagaagccgagggaccacgtaagtacgtgtcatgcatcttccgctcgctgtatgctctcaaacctgagccactcgtgttgcgggatcgtccgtctgttcgggggagtctgcgcccctctgctcctgcctcaaaatttggacgtggttccagctacttcggttagctgtgctgttcagattcatgtgggagtttgtttggacgagcccctgttgctgttaataattcgtagtacttcggtaaactcgggattcccctctcgcggtttttgaattttgaggacgagggtcttgaccaaactgagatgcatggaaccgggtctcgattctggttcagtgggcgcagttgcttttggtgtagtaggaatcatgccagttgtgagctgtggagttgaggggcccatcgacgtggggacttggaactgttgaccacatttcgacaattagacgctgtattaatcattggagtctggcaagtgctgaataattgcacacttgttaaataggtgggttttggtcatcagaaatcaacttgtttggtctgtttagacttgtttcttccaatcattcaacctaatgattacatgcaaagctattgctcccgtcaacaaaaacaataggcatatttctaggatcaaagaatatgctttttgttaatcagtttagaagttcggtttaaccttgtttattagctgtattcatgcttatttatttatttttaccttattgggagtactttcaagcgatcaaatccattccagttatggttaaaactgagcacacccagtggcacagtatgatgtgtagttgttttcaactttgtaatgaaaatttgtgggcctgcagatcccactcaagtcaattattattg

SEQ ID NO: 5347 - DNA, 1016 bp, Zea mays
  Intron number 1 from transcript GRMZM2G410951_T01 (locus G RMZM2G410951) derived from phytozome v7.0 (chr-ID 3; pos 1 24925991 to 124927006 reverse strand)
ggctcctcgagatagccgaccgcgtctacggtacggtaaccccgcgcctcctgttcgactgccgccaccgaaccgaattaccgatttggggggtacttcggggtgtgtgcaatcggaggttctattgattttagcaccggaaatgcagctgcattatgtaatttcgctcagtgccggaacaaatttctctggatgttgttttcaggcttccagctaacatgccttccttgtgcatgctgcatcagcttacggtgccaccatgattctatggccccattctagtttcgttcgagctatgcttctcaaaaagaagggttcgctcactgttcgactaccgctgtatttttcccgtgtttattactgcacattaatagtaacgttgccagcaacctcgttggctggtgcaagggtttgattctgaagtttctatgttatgcgattaatgtaacacccatgtttgaagatagatgaggagctgtgacatttagtctatgcctaatacgataatgcttgctgatcaacaagaacaatgcgatcatgtcttaatctgctacttcactatcagaaaaaaaattgaataagaagtgcattttagtctaaaatgctgctaacatgtttgaagacatgaagtttcacataagtagaaatactgattggcatctttgtgttgctgtatttaattgtttgctgatgggttttcagtagtgcaactaggtgacttcttagtaggactaacaggataactctcatgcattttttaagtaaaggcactgctcaattaagcaaggaaaagggagttttatgtaagctgaacgcccattgtgcccaacagaccggtcctaggacaaaaagagaagccctcccccactcttggtggggtaacccgcaaagaacatcgtccattcgtcctacatctttgcactatttcttctttggtcgatgaggtgacctgctgcgatgtcttgtacacatcttaaaaaatcctcctatttctctccttccgcaggtaccacaca

SEQ ID NO: 5348 - DNA, 999 bp, Zea mays
  Intron number 1 from transcript GRMZM2G111432_T01 (locus G RMZM2G111432) derived from phytozome v7.0 (chr-ID 3; pos 1 72684075 to 172685073)
acaggctccttcacaaatcacttcttcttggtactctacatgaaatgccatgattatgaatgcctgtgtatatgctactagcaaggaaagtattacgaagcactacaaaattacaattacaagctatcaccacaagccataactaccagggagctatttactgaacttcaatactctacacaaacgcagaacgatggcgctggccacccgaatttcttgactaaaaaccacatcaaattacaatcctagaagttccaatcagattttctctcatctccctatgctggcttgatacactttcttactaggagttgctcttctatgatcactctccaactttactttaaaggatactagctaaaactcaacaggcttcaggttagagagctccaaagttggaactccacgaaactacacaattcagctaactgaactaaattcagcaccctctacctaacagagcaacttggaataatcttttctctcaattcaaagcaaggatagggagatccttcttaaaagaaattgctccccaatattagatcttcaagtttactgcaatgatcatccaccaaaacttcaagaattgagacttagaagggttcaaaactgagaggaattcacagtttctaaaaattcagcaaactgaattacgttttagattctgaaactgaactctacaccaaactgaacccccacctgtaactccattactcctcacaattccaaacaataataggccaaccttgactaataaaatttgtttaccacacatatctgtacaagtttgctgcagcagccttaggtcaaagaatcatggatcaagagttatagtgctccaaaaatgggttgagaacacataaaattctgtttcagctgactgaaactatatacctgtcagtgaaagttttgagacgttttatccaatttttttacacagcagcaataccaatgcttcactgacctttgaagaccacggaacgaagaccacacgggcat

SEQ ID NO: 5349 - DNA, 649 bp, Zea mays
  Intron number 3 from transcript GRMZM2G103666_T01 (locus G RMZM2G103666) derived from phytozome v7.0 (chr-ID 3; pos 1 97637288 to 197637936)
gatagacattcctggaacaactggagccagctttggtatgatcccatgaaatcatattttccgtctggattccttcgcttttagcatatatcatctatgatcgaaaaagatcctcggctgtgctaactgactcacaatcaacaaaagtgatctatcaccttttagcggttccaatgaccctaactcagaaaaacgttttttttagaagtcatacatatatatagagagaaaaatctagattcataccaaacaaggctaaagtttttcttagcattgtgaacaaaattggagttcatatataattaaacataaatgctaatgctaatggagatgtttggttcgaggaatcacttcatccaaaatgagatgttacatcataggtccgatccatttctcaaatttggtgtgataacctcattccttatatttgtactaattaaatatgagaaatgaggtggtgatagatcaactcattccatttcacaaaccaaacaaaaaaaataaaaagtggaagatgatgaactagcttgttccttaaatcaaacaccctaaacaaaaaaagagaagtggaagatgatagactagctcgttctttaaacaaacacactaaatatatactagaccatctcttgctgcaggtcaggagctc

SEQ ID NO: 5350 - DNA, 809 bp, Zea mays
  Intron number 2 from transcript GRMZM2G018688_T02 (locus G RMZM2G018688) derived from phytozome v7.0 (chr-ID 7; pos 1 853428 to 1854236 reverse strand)
aggttaaggtaatttctttcagctcttgccgagtatctccaggtgatcttttgatgttattgtcaaaaactcatggtattatatattgatgagttttctatgctctattcttttagattttgtgcttctgtattgaactacagttctgtaactcatattgatgcttacctgtctgcctattaaattgcacaaaaatcaacataagttgtgaatgctaaagcaagtggaactgcaagtatcttttaaagtggaaatggcaaataggttttttcctttcttcaagccaaagcaaatgaactttgaaacactcttgcagtaaagtatcagcaatggactttaggattctctagggctgagcgggaatctgaagaaaatagattgcctaagtactgaggtacaagcttaaagttatgactaccatgagtagagagaataagtggactacactcatgaatgtaaaattgtaaggagaataatatgaaactaatgctgaacaacttactaatgttggacctcatttcttcattgactttcatattttttttgcgatttcagtgatttttgttagctaagcaatgcatgtctactcaaatgttcatgtttagaagctaaaggacgctatttgcatttgttttgctttacttgtttttcatcttagatgatttcttgtcttgggagggacttctatctagccccatatttctttatatctaacttttatcacagacagtatatgatgttaaatatttatgtcttgtatctgatccttccttcattttacttattttgtttagatcattggacattaa

SEQ ID NO: 5351 - DNA, 871 bp, Zea mays
  Intron number 1 from transcript GRMZM2G435445_T01 (locus G RMZM2G435445) derived from phytozome v7.0 (chr-ID 6; pos 1 58471503 to 158472373)
gcggcaggatcaccttcccgtcgtcgctcaagcaggtcagtgagacagaaatcaccttcccgtcgtcgtcgctcatggtaaaaaaataaaataaaaaataccggctctttcgatctgtttcgtctaaatcgcctgaaatctacgtggctccaaattgctgaggtttttgggggcacatggttactatgtggctgtgcgttttcttattatccatttctatgcttgattgcttctgacaaacaaaaccagtagctacacatcctatcggtatctttgatttgaagctctaggaatgcaagagatgtcttgtgcgcccttttcttatgcggtttgactccatctcaggtgatctctcgatcaattgctggatttcatcttcttcgaattcattttccgtttctgaataggcttctacgcctattcaattttatttgcacgcagaaatgcgaaaaaaatgtatatctaattcttatgtcttatccttataacgatcagcagatccatgtatgtactctaaccatttgtatatttaaattctgattattgttcgtctggcgctgctgtaatgttccttgtgcgttaggatttagaacgaagccgcatatattcaacttaatctctatcctctctctttttggctacatagcactatatttttggtggctagtgctaataaagtatgacagtagtggagaagttggcaccacacggactttctttatttatgtttacatgtgatagcttgattttgtttggtatgtcaatagcgatatgataaatacctataaaagcctgcttctccgtttgggtttattaaatattgatttaatggactcttatattgtttcttttgcacagcctggaccaaggg

SEQ ID NO: 5352 - DNA, 530 bp, Zea mays
  Intron number 1 from transcript GRMZM2G700193_T01 (locus G RMZM2G700193) derived from phytozome v7.0 (chr-ID 7; pos 1 13592037 to 113592566)
ggaagcggcggcagcaggtaaggcggctggagatttttctccaagtacgagcggcacagaccaggggataagggcgatggggataaggatgagaccggacgcggggaagaccacagggagccgacgtatggaaactaggaggccagcaacgtttgtcctagaagctagcgatagcagggaatttctagaaattgaacgtgatgcttgagaaaggaggtggcgtggagttagaagatagagatggctagggaattctccaggagatgacgtgggaggataatagagatagggatggtggagaggataagtacatgagtgtagatttttgatcactacggttgagcagataaggaacgacagctgtatgggctgatgacgtgtgatgggggaggattttctagagataatcgtattttggataagatacaaacagaatgaactcaaacgagatcgagactaatattttaaactatatttaatttgacttaaaatcagataacttcacctaccaatcgaacacttgatcgctc

SEQ ID NO: 5353 - DNA, 546 bp, Zea mays
  Intron number 1 from transcript GRMZM2G045779_T01 (locus G RMZM2G045779) derived from phytozome v7.0 (chr-ID 3; pos 1 44602425 to 144602970 reverse strand)
tccctgacctcgcccacctcgcggacacgatctcggtacgcctcacgcccctcttcccctacctggctcgtgctttccttccatttccattagctagctttgccatgcaaatatgcaatcatgcttacggagtttctgttgatgatttgatttgctttgaccctaaacaaccgaaccaatgcccccgtggctttgtatgatgtttgagattgattgcgcacccagtcgacattactgctttatttactagactagatggatacactactctcgtgtagatcatcacgcttcaaattaatttctgtttctagtttttcacaccacgtgctgtcatcatcatcatcatcatacatgacaccaaaattcacctgtatccttaccatagtgtctttctcggtctgttcaaaacattgttctcctgccatcacctaatgtttgtgactttcattgcatcgtgcccttctaatatgtcctttcagccttacaatttgcctctacatttgtatgcctcaacttacactacctggcccctgcaccctgatttag

SEQ ID NO: 5354 - DNA, 840 bp, Zea mays
  Intron number 2 from transcript GRMZM2G422210_T01 (locus G RMZM2G422210) derived from phytozome v7.0 (chr-ID 3; pos 1 37681204 to 137682043 reverse strand)
ataccgacatactttactgcagccattgaataaaagtaagtttccgatacatttaggaattctgtggttactacagtttgtttctgtttctacattttctcactggaaattttaaaaccgagtttcattcttgtgttaaggtttctaactcctagttttatgcaaataacatcataatagactatgatgaatttgagttatctattctggtaaaaggttatcatattttatcttcatcctgagagcacccatttttatcactgtttgtgtatggtttacacttaatatactaagttcagcactattagctattccgatccaagcataattcattaatatttcttctgcgaaacttcgacaacattatttgttttgatatccctgagccttgaaaaccaccaaagcttattggtttatatgagcgaatggtcacactgaaagctaagatagcttgaaggagaatttgacacttcctttgacgagatcctatctgtcaattcatctagatggtcagattttgcaagcagaatcatgcgctacctgttattagataactgcattgttaagttgaccatatactgccatgtgcagccaagggtagcagtagctgagcgaatcccacttgctcttctctatgcatgattgagaagaatatcaggaaaaatgttctctctgtgaggtccaaatgcggatgacttctttttgctatacataaagttctgaagttttgtgatgctttgttataagcaccgattttctgattcatatagaggttgattttgaaatacagttgacagagaattgcttttacaggtttcttttaggttagtttagtacttt

SEQ ID NO: 5355 - DNA, 826 bp, Zea mays
  Intron number 2 from transcript AC212018.4_FGT004 (locus A C212018.4_FG004) derived from phytozome v7.0 (chr-ID 7; po s 151197775 to 151198600 reverse strand)
tgataataattcaaactattgacttgatccttgatgtatgtttttcaacatttttttgtctacgtgtttagtatcaatatgtaattatattattacactttacagagtggtacacataactgatacaaacctaaaatcaaattgaaaagaaaaatcgcataggatcttgatcctacgatatgatgctactcaaacaatactacataggatatttctcagcgctataattagcctaccttatgattaagcaaggaatagttatgggctaataaggactaattgttgtaactaacaattaacatatattagcttctattagctcagaattagcctatatttggcctttctaattagtatgagaatacaggagataacttttagcaccatggagtcaaacaaccctttttaatgtcttgatgttaataaccttggatggatccaaaagaaaagttgttatacatttttgtgtatatagtgataccaatatatgtgtgatcttttctataaattgtactaaaaactaaaattttaacttaatggaactgtaagaactgacttatttaggaatcgaggataccaacttgcttgagactaaactgttagaaaaactattagcgtttgatccaaaggaccggctaacagtagaagaggtagtcttttgctgctgtctcatcttaaaacttttttgtgtctgatttttctttatggatctagatatgtgatgtcgcttcaaccttactttgtaatcctaagtatctgtggcatttctttcaatatatctattatttcaggcattgtgtgatccatacttcgaaggtcttgccaa

SEQ ID NO: 5356 - DNA, 855 bp, Zea mays
  Intron number 1 from transcript GRMZM2G129999_T02 (locus G RMZM2G129999) derived from phytozome v7.0 (chr-ID 3; pos 1 0322700 to 10323554)
aataaggtccttcacgccgctagccgctcaataaggttttgtgttttcaatatatttttttggacttgttatgtatttccctgcacgtacatttagaaaaacattatataagtactgcaatctacaaaccatacccctccatgtgagaaacatatccttacactgggaatttcttctattaatttaatctgatatttacatgggcaaaatatcactttccagcatgggctggtagtaaacctgactcagggtgtaaataatggcttgaataaggactattttttaagttcagtggccaaattgacatggctttatggcctccatagctcataagcagcatttacccctcttaggaattaggataagacatgtaatgcctacattattgtctcggttcatattgcataaccattggagcaatgaaagcctcacccatttttggattgtctagattggtttgacgctgaagaagctatttgaagagggtgtagtgaagcgacaagatctgtttatcacctctaagttgtggtgtgctcaaatctctggtgatattccaatatttatgtctcatgcatctcattttggaaaaactcatacgaaaatcagatttcaggtggaatttggtcttcaatgtatatacacctgcaatttgttatttctatgtgatttttttgtttgagtctgaacatcaacaatttgtggcgatgtatagctgtaccatgcactatgagaaggtgtgttgtttcaaatttatcttaaattcctaggcatgtttttccaggggactaccacagttctcttgaaattgtggtaagaaaactaatgacactgaaacatacaattttcagatttttc

SEQ ID NO: 5357 - DNA, 867 bp, Zea mays
  Intron number 2 from transcript GRMZM2G170326_T01 (locus G RMZM2G170326) derived from phytozome v7.0 (chr-ID 6; pos 9 5610136 to 95611002 reverse strand)
taaagattagcagatccgcctccttatccttttaggtatctactaagactaagatgagtgcctacttagattatggcatacacttgcatcattctcctgcttttgcaatcaggtagtatagttagaatgagcccatcaaagtttaaaagttggatgttgcttaagagaaaatttcaaattcgcagcatgttaatgttaagttgtaaacaagaaatacaaattgtttcttcctttaactgtaacagccttttcatgtgcagattcttttcttcctcaggcagtttctttaatgcctgcttctcttggtaccaagaaatcgatgctttctccaacaaattgtgatggctttatcaatattcatctgtttaatgatcctaaccacaataaatagacattcctgttcagaacatgaagtaatctgagttttttcaggctatcgaaaacaattagttttttatacttattttccttgagttaataataatttaggaattgttttgagtttgccaattgaactttttttataacaaaccaattgaggttgaagtgcctttcaaaagtgaccagagaggacgaccgagaacccatggctttttggctagagttttagcttcaaaaattctttgttgagtgttgactgttgatatggtcttatgtgtattatgtcttactgattgaagcacactcttgcatggtcaaaacaacagagccttctaggtttctagtcccaagcaagttatagggtaagcatgccttgtagatgctgattgccttttgacattaataaaaccagtgcatatgtcatattgtctatttttctgtttctcttcaggcagcggaactggaaattgaagcatatccattatt

SEQ ID NO: 5358 - DNA, 750 bp, Zea mays
  Intron number 2 from transcript GRMZM2G167809_T02 (locus G RMZM2G167809) derived from phytozome v7.0 (chr-ID 3; pos 2 03581039 to 203581788 reverse strand)
atattattaagattggtggtcttgtgagaaataaggtaaggacaccttttcattgctcaagtttgatttcagatctcttttgaagattagacttgtcatgaggtgcttctctctgtgctatgatatattcttttgtgcaaagaccattcttgtaatttgtatagtccgataggtaaaataacggacctgaaaaagttttaggccattatttgttattttccaaggcgctgttcaaatttgaaatgttatttttgtcatttcattttgtaatgatagtactaagttggtaatattttgattaattttttctcctgactgctgagatgtttggttatgctatatagttctatattttctctgtttcctaggcccagggttttttatcccacactcagctggattttgtagttctaggtaaacatatagtcacaaacctttctgtaatatatagttatctgtacgatactccgttggctgttgccttcatatgtctgtagacatttatttggcaacctacattccatgtttttttgttggtattattcattattctatattctttgttcttagttattgtgctgttaatatatcaaagtttgtaacaggacttaccaactgatcatatgaaaatatgctgaatgtaattagagatttagtgcccttcctcactgtttgaactttactcatccttatgaaactataatgctatctgtaggagcggtttgttaaaaggagggaacggcttttagg

SEQ ID NO: 5359 - DNA, 589 bp, Zea mays
  Intron number 1 from transcript AC213398.3_FGT006 (locus A C213398.3_FG006) derived from phytozome v7.0 (chr-ID 3; po s 138305202 to 138305790 reverse strand)
acgtatggatctatgtgcaattcatacttatcattgataataaaatgtatgacatattctcattaatgtttaaactgtgacatactgagtatgccatgctgattggtcattttgattctgcaaggttttcatgcaacttaagcgcctgtgtcatttgcattatttgtgtagacagaaatgttgtgctgttaaagatgttgaaacatactcactcttctaaattacaagacgttttggctttactctgtatctagacataatgtatatgcactacaaaagctgtgtatctagaaaaacaaaaacttcttatgatttagaacggtaggaatatataatagttagatgtagagtcgttgggttgcatgagataatatggagcattccagggttgccttgatgtcttaagcatccgttacatttgattccccgaagatattttgcactgtgtagatttggttcagcatagcactgttctcgttggcgtgttgacgcagtgaaactttaaataattcaggctctgatacttagcatttggtttcctggcctttttgcagagtcaacctgtggaaggtttctaccgagagcaggg

SEQ ID NO: 5360 - DNA, 609 bp, Zea mays
  Intron number 1 from transcript GRMZM2G052991_T01 (locus G RMZM2G052991) derived from phytozome v7.0 (chr-ID 3; pos 2 17806299 to 217806907)
tagtacgtctcatttgaatctgccgtaaatgttgaccttgttcgaatgaaattaactcgttatgtctacttggactgcgaaaggatctctagccgagttagttaggtggtctgatcaatactcctcagatcctaggtttgactttctgtgggagcaaattctcagattgtggttaaaaacccccctcatctatctcacgccaatgcacaggtctaaggcctaggttagactaggtccggtcgtggtcgtactcacatgggtatggtgccgctgtgtatgggtgggacagagttcgagagcttatcgacttgcgtgagaaaatattcttcttaataaaatatcatggggtggtattactcttgcaggccaagttttttttatctctacttggattaatattactcagggcaagacagatatatctatgttagttgagtcaatctgaggctgctggagctggttactatgagcgttatggaaacaacaaggtatatgcggttaaagtgttcatctgacacagaaaactgttactttaatcaaatagagtaacacagtttctttatagtttttgtaggaggtagatttggattgttctggtacctctgtgag

SEQ ID NO: 5361 - DNA, 891 bp, Zea mays
  Intron number 1 from transcript GRMZM2G369652_T01 (locus G RMZM2G369652) derived from phytozome v7.0 (chr-ID 3; pos 1 50270728 to 150271618 reverse strand)
aaccatcgtccgcgtcgtcggcaagtttttcccgggtgcgcgaatcgaccacgtagttttcgttaatccccccccccccccccccccccccccccccccccaaatacacacacacaaacaaactacaattgcaatccttcaccattcttttaggttttttttgttaaaatcatgattgggatgcgctccttaatattatttgataatttgtttaggtgtgggattcccagtaacgattggaaactagatcttttcctggtcgatagtatatacctgctttgaggtgaaattttaggtgaaaccagaatctcatccagcaagtacctacagtaacgatttatgttgcagattgagaactgccgaccgacgtctatttaatggatgatagatcagccaaaatgtcttacagtttgaaatggagggagtagcctttttttaactcggatacgtgtgttatctacttatttaaaacaataatcggatacttggctcgtttggttgaatttatcataaatttattgtaccaagatcaagatctgatgtaggctgtagtcttcttcttcttcttttttttttttaagctcttctacagctctacccgcaaaatgaatatcttcttatggtcattctaaatcaaggatggttgatcattctgctcgctgagctgcatgaagttattagttccagccagtatatctgtagacctgatcagtgttctgattctttcactattgctattgacaatccaacaagcggaataaggctttcatatcttcattatcctcgtgcttcattgctacaagcttagtcttattgcttccgagactattcttggtgtcaatgtttacatgttattaactttggaatttgggcttccagctccagtaattg

SEQ ID NO: 5362 - DNA, 1000 bp, Zea mays
  Intron number 1 from transcript GRMZM2G054470_T04 (locus G RMZM2G054470) derived from phytozome v7.0 (chr-ID 3; pos 2 08060129 to 208061128)
tacgtgccgccggcgacaagcacccaccacaccaggtacggccgccccctcttcccttcctgatgtgcaaaactaagcatccgaaccctaattaagctatttggctatctgtatttggatctgatctgtataaatgtattatgcctactaatttctatcgggtgtgcatgtacacccatgtcctttattgggtctacccttgtgacggtcgactagtctgtaggcctgtagctagtgtttgagctaattaattcgattcagctaaactgttttgtttgttaaatggtgaatgttcgatcccgttgtccatctattatttgttgtagatggcttagggcattctatccaccattcagttttagatctttcttaaaacatgctagttctgctgaatagcgcgctttcagtgaaaaaaatatcaaacctgttccatctaaaaaggaggggggaattctagctctctaacttactgtgattgatattccaaccattctagtttcttgcacttatgtttttccctgtagtggagcaccggtcctggtttctattccaaaccttttgtggattggtgcaagatggcacctgtctggctgttttggaccttcacctagctgtatgtattcctggatgaagactatcaagttaaattagtgatagagggttagtatgattgtgcacatgcattcttcttgcatccaagccgaatgattagctattgtttatattgttttgataaaaaatgattcattagtgacacctcaagatcattgaccatgaattcatcttttgttcatggatgccttcgattaaagataagtcaatgcatttaagaattaaaatggatgcaaacgttctaaaccagaaaccaaaatgcttgataacattttaatcaacctcaaacttttttaacgctgtggatgtgtttattttcatttcattttgcagtcaaatgaatagttgatttcatttcaagcaattcctgaacaactatattacagtc

SEQ ID NO: 5363 - DNA, 795 bp, Zea mays
  Intron number 1 from transcript GRMZM2G010775_T01 (locus G RMZM2G010775) derived from phytozome v7.0 (chr-ID 3; pos 1 40410188 to 140410982)
acttgtccgacgagttcagaagcctctcggtatcggtacggatgactcttgttcgattctgctcgttttgcttcgaagcaaagcacggctgttgctattggatcgatttaatgtgaagcatcggggatctgctcggagtgtgttggtagaggatgccgtgtatgggtactcaataagttaaatgtcgtcgctaaagtcatctgcaatacaaggttttaatcatatttttttgttttaaaaaatagtaaaatgtcactaccatctggctcgagtttgatttctatctgtctagaagaaaaggctgccaaagtttctttacactagggtattcataaatgtaaggtgtattttatgccttacatggacagtcatctaggtcagatatatttattcatatcattaaccttcttggagataaactcggaaggggcgttctgtcattctgtaatatggccaatctgccatatccaaccaacatctccatgatctgttgatcagctgttcttcagtctgttcacttaagagcccagttttggcgtcttatacaaatgcatgaaaatctatagaagttgtattgaaaaaacaatacaacttccatccttcaaaactttcagaagccgtcttgcataacacaacaatttataatatattaatatttttattcttttgaagcagacatgatgctgtatttattatataatatgctttaggctgctgaatgcttctagtcatgatgaaatctatgcattctaagtatttaatgtttcatggccacttttgcaggatattagacat

SEQ ID NO: 5364 - DNA, 906 bp, Zea mays
  Intron number 2 from transcript GRMZM5G821444_T01 (locus G RMZM5G821444) derived from phytozome v7.0 (chr-ID 3; pos 2 11847057 to 211847962 reverse strand)
tcctcgcagacaagaggtacacctcatactttgtaaacaatactatcttcttagttctaccttccctagctactatgcatagatttgtacatatttttatgacctatgaggtgaaaagtaataaaatatttacaaattacactattacaggaatgaattatagagacggtgaaaattcatttgtagaggtggttgtagcaatcaactctactcaggggcctctagaaatcagagattttcttgaagtgggtatttaacctcctctaaaaaccaaattctagagacagttgattcttctctaatcatatttattactaaaaagttttagatcttatcaagcaagacaactttggtattcaacataattccatttgaggctatttggaaaatttaaaaattagatacctgaaaatttaataacttaaagacatttttagaactctaaacttttaaatgaaaaggttgtcaactataaaattgtagatctcttgaagatctacaactttgatataaactttttcatcatcaaatttcatttaaaaaagttatggatattttatgatgtacctattcttcaaggcaagcaaaatcgccaaatgtgttgaaaaccaatttatagagatggttgatgtttccaatcatctctaaaaataactctatttgtagagaatcgataaaaccagccatcctttaaacatatttagaggtggttgaaaggttttaaagtcggctaaatatattatatgtatgataaatattcaacatctatgatctctctttagctatgaaaacaaatgtttatttaatagaaaacattggattcggagcaccaagccttatccaatttatttaagtcttcgaaagcttaaaaatatattgaatgtaaataaataaataactgttcag

SEQ ID NO: 5365 - DNA, 865 bp, Zea mays
  Intron number 2 from transcript GRMZM2G075951_T01 (locus G RMZM2G075951) derived from phytozome v7.0 (chr-ID 7; pos 8 7794884 to 87795748)
cagcagtcagagtcatttttgctgccccctccccggtaagaggtcccaagcttttccttgtccagtgatgagaactaagttacctactattctctctaatatgatgaggataaatgtctctggtctgtacaaactaccaatctggacaagaaatctaatccactgtgctccaatcaactgacctctgataatggagtttagagtgtttgagtttgaggacttaggtataaggatgcattttcagctacatttacgaacatcttgttctttttttaatgcatctaccttatttctctgtatgaattcccactcgatttattatgcagttaacactagcactttacgattgattcctagcctaatccttaaatgtcattctaatcaccacaccttttagatctagacattagacttgtattgttggatctgtttaattgtttctcacacaacaaaatgagatgaagatacacacgagtctgagtttaccgtgtttgagtttgaggacttcgataaggatgcattttcaactatactagcttctgcgttaatttacttttgatgctgtgaaacaattataagcattttttcagcgtatgtgtatttgtgcaacaagcacaattgctttatgttccaaactcgcttctgccttaatttacttttgatgctgtgaaacaattataagcattttttcagcgtatgtctattggtgcaacaagcacaattgctttatgttccaaacacgcttctgcgttaatttacttttgatgctgtgaaacaattataatcatttttcatcgtatttaatgcatgcacctagataacttatgcatatgtttttttacttgcaggcacctataaattttgt

SEQ ID NO: 5366 - DNA, 679 bp, Zea mays
  Intron number 8 from transcript GRMZM2G002894_T01 (locus G RMZM2G002894) derived from phytozome v7.0 (chr-ID 7; pos 1 4327207 to 14327885 reverse strand)
cacaagattgagtctaaggtctgtagaccctttacttcatacaaggcatgtcatttccccgtaacttcgatgtagctcctttagccatataacaatgaaaaccagcgatcctgcaatcctgaaagggtgaatttatgggagaagcatacaactcctttagccaatgattccaatgaagcaccaccctacaagaataagatagataaattaacagggtataaaaatgatactaatcacatgtagtaaaagaaacttagcccctgtttgtttcggcttttcgcagcttctggccaccaaaagctgctacggactgtcaaacactcagcttttcagccagcttctataaaatttgtttgggtaaaaccattcaaaatcaacataaacatataatcggttgagtcgtcgcaatagtagtaatccgtcactttatagatcctgagccccatggacaactttatcttcctccgcacgtaatcctaatgatactcagattctctacacagccagattctccccacagctagattctcggaaaagctggtcagaaaaagctgaaccaaacaggcccttaatctttccaccgcatcacatatatttgagtgctccctcttttttttattacagtcttttgatttccattttattcagtgtaagtgctcgatgtaggtataggcatctg

SEQ ID NO: 5367 - DNA, 1033 bp, Zea mays
  Intron number 1 from transcript GRMZM2G135763_T01 (locus G RMZM2G135763) derived from phytozome v7.0 (chr-ID 7; pos 1 21252923 to 121253955)
tcctcgctgctggcgctgagatcctagggattcaggtgagacattagctgctatttgcatcagctttgtttggctaaagacgctgctctcgggtctttagtcaatctggattcgtttgtgcaagtatctactctgggcaagtgagaagctgaaaaaattcctgctattgtagtattcaatcatattaagtcatgaacattcataagttttgcatgaaacgatgagttcatcatcaatccagggagtaatgcaaatactaggcagtttaataatatgtatcaataattaccagtattgctgagcaggacaggcaaatgccctttacacaaatagtttttttttaaaattgtatcagaaattcctgctaagtttatcacaaaaaaaactgtctaggagtaccattttcaactacactgcaagatttgtggaagaatgaaatttgattgagcaaggacttacttgaacactgaagtcatcagcatgtcaaagttagtttgataggttccaaggatcgtagtagttagtcccaacataatgttttgttgttttaggtcagttcagaattggtttcaaataaatttggtcactgccttatgcaatagtctggttcaagttaagctgttttcatgttttatgtaccaacaagttgttttgtacacttcatttcatttgtttttgctttatttgtcatggaccaaatgaagaagaaaaaatccgcatgtacatgacgtcattcaattaataaaataagtatagagtcgacctatttacttacaagtggtgattggcctggccagtaaactatatacttttttttttgtttttcttactgtatttggttaccttttactccaacagagaaagagaaattacaccgattcttcttttttgtttttataaatttctctcaaccttaggcaatgcacttcaagagtttcttacatgttattttactggtacctttttcagttcggtgtacttatttacaattgagttaacattggcgacttctttatgttacttatattcaagg

SEQ ID NO: 5368 - DNA, 851 bp, Zea mays
  Intron number 1 from transcript GRMZM2G351895_T01 (locus G RMZM2G351895) derived from phytozome v7.0 (chr-ID 3; pos 2 9469081 to 29469931 reverse strand)
tgatagtaagtatttccagcttatctaaagattataaaagatcttacatttccagttaaaaattaaagatggctagagctcttggaaccctgagttatacctgctattagttcatatcgtctggtaagtagaatctatttcacttcagtagaagtacaaatcgtctgttgttttctattagcagtgatcagaaaatcttggcatgcattactttgtttcagtcccttcgcatttcttatcaatggcagatttctcccaaaagaaaatctgtgtctgaaatttgctaatatgaaatagtacagtatgcccaccagtacttgactttactggctcaatgggccaggcagaaggaaattccaattggttgttttctttgagttgaatcattataacaaacttagccctcattatgttgtatctgcagtttttgaattcaattgaagtaaaaggaaatatcatagtttggtcctttcgtgaaatttttttgtccaattctttgtccttgtaggtttttccattgcattagaaaacattgtaggcaactgattttctaacatgcccctatcataacttcctccgagaccatttcttgagatcttggcacaagaactacgacaatgactggtaatatgattcttgcgccttcgtttttcccctgtttagactttagagtgaattagtctcattttgcttttttcctttcacctgattggcagggtcttagattattcaacattgatatgattagggagcaccccctccttgtcaagcaactcacaccattacaagatctacacgacatgacatctgcatcgccaaggcctcgctcaactcagcgcggtgagtagcac

SEQ ID NO: 5369 - DNA, 779 bp, Zea mays
  Intron number 2 from transcript GRMZM2G004949_T01 (locus G RMZM2G004949) derived from phytozome v7.0 (chr-ID 3; pos 1 79227882 to 179228660 reverse strand)
gcttattcactttcatcttcatttccttttttctggtaggtgaccttttactttgcactttatctgtttgatgttgattacttgtaccatgagtgtgcgcacgtttaatgcgctgcaatcagaatcattgagcagtaaaatcagaagtggtggttatctagattgatatgccgaacctagtaatttagcttgatgtaattttgcagcatgaagaccatgggccaattaaccaacatatgaaattattggaacctccagtatgagggtctgtttggttggctgtggctatgaaaaaagttactgtgggttgtgagctattaaaaagctaaaaatcgtttggtggaaaccactaaaagccgttaaaagttctttgatatatgttttcatagttctatctgaaagccactaaaagcaggtccagggatgctttcagttttgcactgcgaaaaagtcagcttttacaaaaagctgcttcctggatccagccatttggtttggcttttgtttagttaaatacttaagttcgagctctcattttgaggtactctatttgttaaggttagatgataagtttcgcgtaaatttctaatgactatacttaaaaattggttgttaatgttttgttgcactgacttgtgtagtggtatgtgctaattttatttttgtatcctcatacttatggttgatcatgttttagtacctgtttgagccatggtatttgctaattttctttttgtattgcagtggagttttcacccttttgtttatcacagcaaacg

SEQ ID NO: 5370 - DNA, 537 bp, Zea mays
  Intron number 1 from transcript GRMZM2G093535_T01 (locus G RMZM2G093535) derived from phytozome v7.0 (chr-ID 3; pos 1 98730614 to 198731150)
cttggaaagacaactgaactctcaaggcgtgaaaggtgcacttccttatttgagctaaaaaatgtgccattgtcttatgttttgaccgataataattttgagctttgatatttgcagttcattttccctgttatacctatttcttcttaatatcatttggcatgaggaaaactgctaactgaagcctgcgagcagcacaaaataaaatatgcaatggatcacagaaaaatgttacaggatagccttttgcttttgtgccaaattgccacgcacttgcaaatgatgttacatgcttatgaattgcaagagatcacctaagttgtcttattatgtttcatatcactacctaggcatttgtctgtcatggcataaacatattcttgaatcttgatgttaatgtttcgacctattactgaaaaggggccattgatgggtggtcgggaggagcttattactacctttgaacttttcttatcgactccatttgcatgttataatgttcgttctgtagggaggagcttgagaaacaaaaagctc

SEQ ID NO: 5371 - DNA, 675 bp, Zea mays
  Intron number 1 from transcript GRMZM2G075715_T01 (locus G RMZM2G075715) derived from phytozome v7.0 (chr-ID 7; pos 3 9731278 to 39731952)
ctaaggaataggtttgtgctagtaatctacctattgcttgtttttctatgtaccagaatggaatagctggtttgaaaatgttatcatttcttccatgccttgctgtctgcaaaatatacttctacttagcatcagcctagaagtatgttcgcttcactattttttttcgaacacactagggcttctggatgtactggtgtgcattacttactgttatagtacaacaagtgtacctcactttggttcttttcttttatgtcttaaaagacctaaccttccacagtgttttagtttgtttgtggttgatttgccagttcagaacatacttaagtatctcagtaaatgctaaggtttgattacaagggttagtataattcatgaatgaggacccatctgctatactggttgtaaaatggggctgccagctgttcagttgttgctggcagattgaatggtttaacatcaatgtcactatcttttcactaaacaggtttcttttcacaggccagcccaaaagacacctgctgacaactggctggagtgtgtttgtcaatgctaagagacttgttgctggagattatgtgctatttatatggtttgttacattgtttcaatgctgtaaccactaaaaattttcaaacgagtaggacttactctttcctcactaatttagga

SEQ ID NO: 5372 - DNA, 946 bp, Zea mays
  Intron number 2 from transcript GRMZM2G356198_T01 (locus G RMZM2G356198) derived from phytozome v7.0 (chr-ID 7; pos 1 50912560 to 150913505 reverse strand)
gaatattactggaacatataaaggtaacatctgtgatttccataattgtgtgatggttatgcaatatttgtgttttgagtagtattaggtttgcttcccctttctcttaaaattgtgttttgttagcttatttttgtgttcaagactcaatatgaatgacctttgtttttgaactgcataaattagcatgattacctgccatgccatgttggccggtagacaaatccaagttagttggggtagattatagatgaaaacctagcaaagggccatcaaaagagttggctggcagacaaatagccagatataccatttgaagcattggagcatatcccttaattcttaagagttcactgttgcaggctttgaaattctattatctgggatgtcttttcttatgacattgctgattttattctaaagatatcaagtgatatttatttattgggctattccagaccactaccatgtatccaaattatgtggtttctttattttttctatcattattgtttagagacttccttgtgcttaatgtgttcctcatgtttggacataatatttgccgagactctagaaatgtcttattcttaggtttgttgcttctatgttgtacagtacatgttggaacctttaacattttcttcaatattatgctgtaatgacttcacaaaaggattgaagccatggtcactcccagcaaaagtagtcgtgtgaacatttatgaatcagatacatatatgcactggctcgattaccatagtctcgactctcgaaatgatcttaatgaaacatacacactgtgccctccactcccctgagtgtaccctattattgctttgctatatactgattactactgttttttgtatcagtattacttcaatttgtggactaacataaagattttatggtttagggagctggacttttgctggtgccacaa

SEQ ID NO: 5373 - DNA, 595 bp, Zea mays
  Intron number 1 from transcript GRMZM2G356198_T01 (locus G RMZM2G356198) derived from phytozome v7.0 (chr-ID 7; pos 1 50913552 to 150914146 reverse strand)
aggtgagtaaggtgctgtgggacttcgattgccgggttggaagttctttcccctattttctgtataacgtgcaacggactttattctgaaattagtgaattgtgagcataaggtttggcaatcggagtagatgaaatgcagaagatggttggttttggcttaattctgtgattgtgggtttcattttacagacttgcgccggagactgttctcttggcccgcagttggatggctacgaataggagttggctaatttgagttaaagtttaggtttgggaatccacttaatgcatataattcaaatatttatttcatttgaactgcctatgctgtggattcacttgacccaagcgcttgtagagtctaggtagttgggagtacccaggtgcctgtgccatttctacttttgaatgatgagtaggtgatagttgaatgccagttagttggttatcctgatttttcatggtaggaaatgctagctgattgtagtcctgagataacttaactagtactagcatctattgctctggaactattaattgtgttggtatggttgcgcctgagctagttgcttataatctgtgtgttttgtagc

SEQ ID NO: 5374 - DNA, 807 bp, Zea mays
  Intron number 3 from transcript GRMZM2G166910_T02 (locus G RMZM2G166910) derived from phytozome v7.0 (chr-ID 7; pos 7 7921902 to 77922708 reverse strand)
gtttctgttttctcgaaaggagatcgtcgttttcggtatgttatggtcgctatgcctctgacctcctttagcccctgttcgtggccataagtcaacgggacacgcgtagctacaaggggaggtctagatgagcaaaggcctaggtttgtcgacgagtatgttatttttagtcgaagcgctagtcgtcgttcgacaattgtcgtttcaactgctttaacatgcgacgtgttgggtttcctttctttgtttcccctgtgttgttgaagtatttgctgtgttgtgctagcacttgtttgtaatctatggtctaccacaattttatatagtgctttgcctcgtttctctaaaaaagaggttgctttcaatgaaattcaagtgaggatgtcccccctccctgttgacagtaaaaaatgataacttcattgattaaaataagattttaccttgatgatgtagtttgttttaagattgcttccgtttccaggtttagttgcctgtacgggaacaacttagctgttattctactaaaataaactgatgctttcttatcttaaacaaatatggctatagcaccttggaaaataggtcctgatttagttcattgcatgtttccatttttctttgtaatgcatctctcagcgtctctaaagcagttatcaccagcaggagataattagcgcgcgtgtgtgtatatgtatatatcagtatgaatgcatgttgctatcgcttgaggatatcaatttaatattttgattttgaccaaaaccaacaggcactcataccgaattcattgttggccccaagcat

SEQ ID NO: 5375 - DNA, 689 bp, Zea mays
  Intron number 5 from transcript GRMZM2G051458_T03 (locus G RMZM2G051458) derived from phytozome v7.0 (chr-ID 3; pos 8 536398 to 8537086)
aagttgatcttgattctcgtcttggcaagactcaggtttgtaaatatcttactacactttgtgcatttaccatgccttttctatgttacttcaattcttcgtgctgtaagagatacttcatcaattagttcttccctcattttcttttctctagtttcatcagtatttttgtggattcttttgttactgttaaatgagttggaaaactgtgtagtgtgtacaaggcagatatgttgctaatggacatgattgtctctgacttagtgacttcgatatgcaggggtaagacaaccctagacattatattaagaagaccttctcacgcaggtcgagaaaacccttgaacccctgccccacccatacacagctgcaccgtagcccatgtgagaaacgaccgcgatcgggccttagacctgtgctttgatgtgggacgggcgaagagattttaaccacaacctgaaattcgctcccacaaggagtcgaatctaggacctgaggagtgttactcaaaccacctaaccaacttggctagaggccctttcgcgattgtctctgacttcattcagtcctttattgtgaacaacttgcttttacagaatgaacacctttctgttttgaaaagttgattaactgtgcctttcattttttttccaggtggtgaccccgattgcaccattgaatcagcaggt

SEQ ID NO: 5376 - DNA, 723 bp, Zea mays
  Intron number 1 from transcript GRMZM2G466780_T01 (locus G RMZM2G466780) derived from phytozome v7.0 (chr-ID 3; pos 1 79072174 to 179072896 reverse strand)
tagacgtgttgaaagaggtgagttggcaattccttgggtaaacgttggattccgaatttccggttcaagatttatgctcgagtagtcatttcacggcaagctatgtctttatgtgcataacaacacggtgcacttttgcagaacaattgcatcaaatgaattccttgctgaaatataaaattggtttgatctagcagcaccagcatagctatggcacttgatctcatagtgcagtttaagagatgagttgacatctgaatcagtcttctggaatctaagatagcagcggattatggactgtaaaaattatcagtatttgtatttagaaaatagataaaattgttatagcagtccatgaaaatcagaggttatactgcattatctaaagtttccagctctgaagaaactaactttcttcataataaatttgtctctgaggtttatttctccacagctttaatattatgtttaaaccactatagctttcacgatcacgatgatatcatcttccaaactgtttcaagtaagcatgtgaatgatgccgtcagaattaataactttgcagataaaatgtttagcataattgcactgttcaggttcacatgccggcgacaagatttttagaggagacattttgatgagttagatgtagtcattgctattacattgcaaaacatttttttctttattcagatctaatctgtggcaattacacaggctaga

SEQ ID NO: 5377 - DNA, 647 bp, Zea mays
  Intron number 1 from transcript GRMZM2G043605_T01 (locus G RMZM2G043605) derived from phytozome v7.0 (chr-ID 3; pos 1 79352005 to 179352651)
gctagccgtggcctcggccagatccaaaggtaaggtacgcccgctgtagcaacagcattagcagttctccctgaaacaaaacaaccattcaaggctcgcgacatgctcgacgttctgagaatcaccacacgcaaagcgtcgctcatgatccatcatcggacacgaaacgcagtccagtcatatacggctcgaacttccagtgtgccgacgaaatgatacagcatgcgtatcacctgcatatatctagcttttccttattgtttttactctgctggacgaatttatgtgctgtctgatgcatcatgccctgtgactgtcgtcaagtcaaaagtagtggctggcctctaatttccagaaatatgaatctgcaattaacctaggcaaacccaaacaacccaaacaataaatccgatctattgttgcaccttactttcagtttcagctgttagcaccttactttctctagttgcaactggactctttttttttagtgtgaagtgaaaggctggcagataaactgcccagcttgtatcactacactacaggagaatgtcactggacagcatgactaaaccattaacaaaggatgattctgcttctggtctaagttttcttcccctcttttctgcctacagatctgcaagctc

SEQ ID NO: 5378 - DNA, 912 bp, Zea mays
  Intron number 5 from transcript GRMZM5G803610_T04 (locus G RMZM5G803610) derived from phytozome v7.0 (chr-ID 7; pos 4 6301857 to 46302768)
aggctggacaagttaagaagaaaccacaggttaattgtcagttggtcaccattgtttttctgtggtattttttgttccaaatttaaagctagtgaaatgatttctttagttcaaaactgaggtaccttatggcctgtgttagtgtaatattcagtattatcttatataggtaaggaaaagcttagtttgacagttaccatacttaatccattttacttacctgaagtccaacagcaaaaagatcttgagatgatgcttaccagtcccaccctatgcttagtaattagctggattatttctgtagatgtttatttgagaatggttagtggatgtgatttggatatcaatccaaaaaggaaggtccacttactatcttgaataattcaccttttctgctgaacccatatgaatgaaatttaggcttgatttactccaaactatttcatcggtcctgtgaatgaatgagatttttttttatttctccacctacaagttgaatatgaagatcaaaatttgtggaggaatagaggacattatgttctatattagaaaaaatcatcaaataataaagatcttaatgacttctcctaacatagggcagtaggttcggctggctggctttaagccacagcaggctatggctggcttctttaaagcctggatgaacagtgcttgatgcttacttttgcagcagcagcctgccgaagggagccatcatgtcctctataatctccgcccctccgaaaaaaagaaaaagagaacttaaagctcaacttgtacgtgaacaaacacaaaaaggaaatttcattatggggtttattggacctactgaagtagtttggggagtaaagggttatatgttgcagtaaaatggacttctccatgtataatgaaatatcttgctattgtcag

SEQ ID NO: 5379 - DNA, 864 bp, Zea mays
  Intron number 1 from transcript GRMZM2G700901_T01 (locus G RMZM2G700901) derived from phytozome v7.0 (chr-ID 6; pos 3 4894216 to 34895079)
tactccactcacccaccgctcattgtgaccccccggtttggctgtttctcgagtcttcgtcacaaaatttaagaaaaagatcgtcatcccagtattatattcaaaagagactaaaataataatcttgatcgagaaaatctccgaacacttatccttatcactaacagatcgacatcaatcattcactctgcaatggccgaaccagagggcgtggcatacaattcatcacaaaatttaggggagaagaaaataacaatgtcacagtagattctttaaatcattctctctctcctctataaaaccacctttatcgctctccattttttgaaatactacatggctatgtgactgtaatatatatgtgatagttttcttacgaattttcacaagaggaaacttgtgataagctattagttatatagaaaaccgattagcatcttaagaatcgtccttatacgattattctgaaaaccatgcaaaagatcaaataaaagggaattcgggccagtttttgtttatgggagggagaggtggggtatgaggtcatacctgctatttgcggaagtgggccactattaaacgttgctagtagtggtacatatcctcccaattacatatcaaacaaaaaggcagtccactaccagatttacaaattcactacaccatgcctttctaaaaaaaaatgtgtgctaggaccagtgagttccatctctacaactattaagagcggattgtagactgcccccgccgctaccaaatcctcccgctaccacgcgcccagcccccgcaaaaatcgccgcaaccgaacgccgcgattccccgcccgcagatcacgcgcaagcgcaaccgacccctgccgcgatt

SEQ ID NO: 5380 - DNA, 488 bp, Zea mays
  Intron number 1 from transcript GRMZM2G024806_T01 (locus G RMZM2G024806) derived from phytozome v7.0 (chr-ID 3; pos 1 86829647 to 186830134 reverse strand)
tgtccgtagctgcactcgcggtgaccttttttgaggtaaatcgttgtctcttattggataagttctatctatgtatcagccgagtcatagttaattctcttttcagttttaatggattgccaccatgttcaagcattgtttacattttagaagtagtactgcctggcgattttagtgatattatttccgtgttctatctgatataattatgtgatgtggctttgctcatagtttagttgtgttcgtttcctacatcaaaattgcgtgattcattttgcttagcttgctttccccgtcacattcgttgtttactatagttcgttgcctcttttgtttgtttcaggaagccggttgaattcgtagacctgaagatttattagctggcccacgccattttcggcaataaaatattcggctgtttcatagcaatttcagggtccttctcaatcttctgaagaagcgagcagagacggcttttgaaccgggcg

SEQ ID NO: 5381 - DNA, 537 bp, Zea mays
  Intron number 3 from transcript GRMZM2G043995_T01 (locus G RMZM2G043995) derived from phytozome v7.0 (chr-ID 6; pos 4 3976062 to 43976598 reverse strand)
cagaaaaggttgtgattcatcaaaggtatggatgattcatgattgtccatgaacttttcaaaaaattcagatctcttaattccacaattcaaatataatattttagtttaatattatactccaatttttttatgtgaagaaaatatgagtgacaaaagttgtaggattgctccatagacatatttgtatggtaccttgtttgtatatgtttttgcaagctttagcaagtagctctaactaagtatgcaacattattatactcaacttttagtggccaagtgttttataggactgattttgctccatgttttcaatgaggtgatagaatcattatgcaaataatgtcattcctttacatgttcttgaaaactgtttgtctatgtcttctcctgtcactttcgtctctttggccaccttcatttgccattcaccagcagagaatgctatgtggtaattcttttcttatatatccttaaaattctgaaccggccaagttctacagatatttgcagtggttgattgagggtcagggctgcg

SEQ ID NO: 5382 - DNA, 525 bp, Zea mays
  Intron number 1 from transcript GRMZM2G535802_T01 (locus G RMZM2G535802) derived from phytozome v7.0 (chr-ID 7; pos 1 41535794 to 141536318)
tactatctgtaagtgcgctcgtgtccagctggtgaagaacgggaagaagattgctgcctttgtgccaaacgatggttgcctgaactacatcgaggagaacgtaagttctatttctccagctcataggactctttgaccatgggcaactctatttatccagatcatacgacttttcaccttgggtaactgatggttgttcatgcctgctgttcgttgctaattgccgccacactccgtctctctgcataggcatatatgttaaccacgatgttgttcactaaagaaagaaggataactaatgaaacatacaaatggtatgccactggcactaatagtttcatatatgcctatgcattttttacagactttgtgtgagaatattattctcactttctttgctttctgtttttactcatatatatgcaaactggagtggaatctttgatgcacacctctttcgcctcagatttaaaaatccctatttctgcagcatagggtgcgagagcggggaagggagcgacggtg

SEQ ID NO: 5383 - DNA, 845 bp, Zea mays
  Intron number 1 from transcript GRMZM2G477366_T01 (locus G RMZM2G477366) derived from phytozome v7.0 (chr-ID 7; pos 4 4848484 to 44849328 reverse strand)
caggacaggttgcggtgctaccaataacataattagtaagttttaccttttttcttcctcttacttcagagatcttctaaagataggaacgggagcagcaaaccatgtagacagaagaaaagctaaaggactacatgttgaagtagtaatagttactgcagtactgcacacactgcatctgatttgacttgttgtatggtaaattgcccgtccacgcaggtttgaaccacaaaggtttcagccatacatttcatttcctgaatagctgtttcttctagatcctagcgcatgtctgggtaccaaattcaggctgaaggcggcacattccccatgccaagacaatctttattatgccatgacaatggaaatgatttgttcatttgacttataacttgcttactgacaatattatgactcatgagatgcattcttttccgtgtccagtgatattatagttaatcatgattcaactgagctgacagtttatgccattgttggtggcaacaattgtaggttctatactttgaagattttgtaccttgtcggatatcacagtcctcttttgatgtgttgatgagcacagaccagcaaagctatggtttcaagttaaaaggaggtttgctgggtgatgaaggaaatgcttttcttgagtgggatagtatgacatttgctcgtattggtattggcatattgctattcacacttaccatgaatgatatccagtttccacactgtgcactgcatactcttttggtcattcacatgcctttttttccaatgaaagcttcaatttatatgtagaaggtggattttctgtcgatccttgattttctctagccactgct

SEQ ID NO: 5384 - DNA, 858 bp, Zea mays
  Intron number 3 from transcript GRMZM2G064993_T01 (locus G RMZM2G064993) derived from phytozome v7.0 (chr-ID 6; pos 1 12138201 to 112139058)
acatcgctgcgcacgtcactggggacttccgcaaggtgatgcgtttttggtctcgcactctcgcctgttttccttgcctgtagaatcagactcgatatctcgatctggtacatccgtgtgcgatttgttggaaatggtacctgcttacattggccaatggtaactgaatatggatcgaaccttatctgttgattttcgtttcttgaacgttgatttcgtgtatggagatgtgaatttatgatttgcgcttacaaagttgataggtgaggttcagaatcattaaatgcaatgcttatgatgttgaattttggcctaccgtgtaatgaaatgttaactaggttggtggatctgaaatatattcagtatcggattgttaagttgttggatccagctgtgtatcgtgctcacatccatatagattgttctatatgaaatatataatatatatgacttttttgcctttgttgcatgctcgtgatctgtacaatgtaacacttcaagttgcagttttttagcctctttaaggcaaagctcaaatgaaaattcagttattcttccaaaatctgatgccctcaacccaccatgttttttcttgattttgtttatgtcaatcgtaaaacaaggttagatatagatatatgctatatttgtattgctagggtttactagtttagaagatgacacactcattttcatatcaatattttgggaaccttattctagattttgcaagctccctgagctttcaacaaaaggaaaaagattgctaggggaaaatttgccagattttgtgactgcacctaacctttgttttcttttcatttcagctattggtgccacttgtaagtacttaccgct

SEQ ID NO: 5385 - DNA, 1007 bp, Zea mays
  Intron number 2 from transcript GRMZM2G435675_T01 (locus G RMZM2G435675) derived from phytozome v7.0 (chr-ID 3; pos 6 2613955 to 62614961 reverse strand)
tttctattgattacattgaggtatgaaaaatttctttgctaatatgtgtggcacctattatttcttatttatggctctacctaattctgacactttctcctgatttgttttggtagtgcccaaacatttgtttgcctcttaagtcttaatctactttcagttttgctgagcatctccaacggtttccgaaaaattaattggaaaatcaatgagtttccaagtggctgaaaaaactggaagcacatatattgtgtttctccaacagttttcaaaacttagctcctaaaatatagaagacagttttgcttttgcatcaggaatcctaaactgtttctaaatcactccaaccacttttataatttctttctctctactctttatttttcccacatccttcctcatctagattggcacattgatacacacatgtatatttccatgtgattggatcgataccaagtgcagagagattgggagttgagatggggaattgttggagagttcttttcaatgttgctaaaaagtctagattgggagtgggttttggaaacacttggaaatgcacttagtaccttgttgcaacatgcttcatttggtcctcatgctgtttccacaaataatgaaaatattaaatttccaactttttatttttttcaatgtcaaggaaactataatgaaaatagaaaccattttaatatttcatactgggatggtgatttttggaacagtgcacagatgtaaaactaaagcagtagttcaatacaaatgaaaatgagctcaaattacttgaaggtgattcatggtctcatggatcaatgtccctgtgtagaagtaaagcaatagttcaatacaaatggaagcaagcagaaaatacttgtagtctatggcaccatggtattctgtcattgtgttatgatttctaatatgtgggcttactttttggaccttatatgatttattcttgggttgatttcagggttcaaaagaactaggtttgactgttttag

SEQ ID NO: 5386 - DNA, 660 bp, Zea mays
  Intron number 2 from transcript GRMZM2G475889_T01 (locus G RMZM2G475889) derived from phytozome v7.0 (chr-ID 3; pos 1 32285890 to 132286549 reverse strand)
ttgcagcggtagagcttccctttcaactatgcctcatgtttcttgttctataatcctccagggaccctttacacttgataacacattgttgttgtttaatttcgtatatttatttcgtgttgttgttgtttaggtatgaagcatgtgtaccttttacactagatatcctaaagcgccatactgaatgatcggacacttttagtctttcaacatttgtttttttcctgtgttgagcataaagtgtagtcttgcaacttatgcatccattcctctttctagggcgcaatgcttttgacccttttgacatgctaccaagcacatgtaatttttactcctaaattttgtaatatttgtcatcaaataccgctgcaggcattctattatattttgaaagttcatggatttagatatgtatgaatccatgcctgcaacaaggcatccatactagaatctgtaatgatgcatgactttgccatcacggagaattactctatttttatggacctccctttgttgttccgaccaaaggtgtgtgatattgatgcacaaaaaccttctttgcattttctttctggctacttatttgcatctatctgatggatgtagagcaaaatcaaaagtggattctgaattgaaggtatatcttctcctgattgctgc

SEQ ID NO: 5387 - DNA, 1019 bp, Zea mays
  Intron number 1 from transcript GRMZM2G111593_T01 (locus G RMZM2G111593) derived from phytozome v7.0 (chr-ID 3; pos 5 3143172 to 53144190)
cctgcttcttcgaaggcttcgtctacgtcttcggggtacgtatatcgtgatcaaccggcggttcagtttttcgtcctcttcttgatcccgtcttctccaaccacgtttttgctctgaattcttgtacaaatttcgcatcttttttttaatttgatcgattcataccctagtagagctatatagcacaatataatatgggaggaaacttattaatactggtataagctgcgaacgtattcagagtctgccgggtcttgcatctcctagttcgtcaggaggaagacgcatgctggtggtggcgtgagctccgaccccccccccccccctgtcgcggctgaatgattcagggcagagtctttcggaggaaaaagttgtatcttttccggtgttgttcttcatcctctgggtctgggagctgtattttgtcccgttgctcctcctcccactgatgcaggaagccaacaatcaaaatgttccgcagctttcaccaaaagtgagggggagtccttggtccatgcggtaatattccctccacaatgaaaaaaaagtagcagcggtagcaaagcaaaagcagcttcgcctttcgttgaattattgctgtacagtttgttcgtcacggccgccccacctgcagtccagtttgctgctacctacaatcttgaggcctcacctcatcctcacaccacatcttgtccccaaccacttgttggttcgagctgagattctcaatggtttagcggcaaatgtactgcatcaggagtgggacgagcggatgggggaaaaaggaggaacaagagaccttttttttttcgctctggtttcgtttctctttctctttcccccgtcgcttgggagggttggaccagtccgtcccgcgtttaagcttccccgctgattggtatgctgctgtgatggtggtgtggtcagtggtggaaatgttaaatgccagcaacctcacgatccatggaactaccagtacgcgacacacagctccacttaccatgccatgaaccccaggg

SEQ ID NO: 5388 - DNA, 940 bp, Zea mays
  Intron number 1 from transcript GRMZM2G135651_T01 (locus G RMZM2G135651) derived from phytozome v7.0 (chr-ID 7; pos 1 45731622 to 145732561 reverse strand)
ttgtagacatacttgcagctgtgccacttccacaggtaaaggcctcacgaagattagtggctgcagcccttgttgcataatttaattgcttatattgcattttcttattttaccatttttattggtactacaatcacctgtggtatatgttcaatagatgcatattattttgactaaattgattgatttgcgtctatgtggcggtaagattctcatggtaagcctttgggttgagtccatgtcattattttccttaatataagtaagtcatccgaccttcctggtgatgttgctatttcctatcctaggaaattgtaggcagtaaacgtacaattgcgacaaccacattgtgacttaaggtgcacccagctacctttttactcagatgtattcatgccatatatcatctgaatctaattgacatccactttagatcgtaagaaagaattcaatgaaatttattgtaataagctaatactagcactgttattgatgccttatatgtatttatatcctgttctcttgattttccccttttcattagtggctcatgttgggtttcaactctagcctacccaacatggttgggactaaaaggtttagtggtggtattgaaatttaatcagctagcttagctgaatgcttgtacattaacttcgcctgtgtagctgaaatttttaagggggtgtttggtttgtggggactaatttttagtccctccattttattctattttagtctggcgtatttggcaatttagagactaaaatggaataaaatggagggactaaaaattagtccctagaaaccaaacaccccctaagtgatgattgttgcaaatactgaatatgatgacttggtttatttcgtgcaaaaaaaatttagttaagaattaatctttctgggtgattttgttttgcaggttactgtgtggttaatt

SEQ ID NO: 5389 - DNA, 665 bp, Zea mays
  Intron number 1 from transcript GRMZM2G054405_T01 (locus G RMZM2G054405) derived from phytozome v7.0 (chr-ID 7; pos 1 3979739 to 13980403)
caccggccgccccgtccgctggaatttcttcagtagtattagtactagctatatcgtccgcacattcaatctatactttctttagactcatgatggagcatcgtggatttttggcgattcgcacccgtctcgggtgttttgatctaaccaatgcgtgcgattttgttctgcagtttgtagggatgcagtctaaatttctaggaacgctttccagttttgtgctttcgatgcagcactataatggttaatggcgattctacaatttcggtgtgcgggacgggagtgctgtttgaattactctgaatagtttagctcacttctcctaatttttcttgcaataatagtcgtttgaaaaagaaaactaaaattcaggagcaaacctcactctttttttatcctgacacttggaactctgcttgttttttttgcagtcttaacatttctgcatttctccagtatacaattacgcgattttcttgtgcacagatgcagtccggaattctccaattgctaagttcttagctggggaaatatctgtcctgctgcagtctcctttttctgaaacgcgaaaaatcttattccagtctcagtgtctgcagggtagaagcgctcggttgatgcagcagggtgattactgatgacctgtgtgttcttgtacctcaggg

SEQ ID NO: 5390 - DNA, 411 bp, Zea mays
  Intron number 1 from transcript GRMZM2G001639_T01 (locus G RMZM2G001639) derived from phytozome v7.0 (chr-ID 7; pos 1 41595322 to 141595732)
tttgccgtcggaaccgtttcgacggcggcaaaaaggttcttattcgccttcttcaagagttacatgtcacctctcttttctgtgtggttatgcttaaattgtactccctccgtttcgttttagttgtcgctagatagtttcaaaattgaactatccagcgacagctaaaaagaaacggagggagtagctaagtagtatggttgcagagtcacgttctgattgctttgattaagctatatggaatctgttgaatcagtttgtgagacaacatcaaatcgcgcagacatcaaatcagtttgtgtttggacgttttggactctgattagcatattgattttgccactgctcagacattagatttgggtgccacattgtgcaggagttctggctggacaagggcggtggaggtct

SEQ ID NO: 5391 - DNA, 869 bp, Zea mays
  Intron number 2 from transcript AC230011.2_FGT002 (locus A C230011.2_FG002) derived from phytozome v7.0 (chr-ID 3; po s 113901036 to 113901904 reverse strand)
gtcatttggttcaggcccaaactaaaaccattcaggattattgaccaactgaattcaattaaaaattcttcagataggaactggtttttcaggaatgcttcaaacaaaaattcgttaagaaataatccatatttaatctgggccttcagtttactcaatttgtcttttaccacatcaatgaaaaagttcaacgagaaattaaataagccatcaggcttctgaggaacaggagcagtttgtggaggtataaacaaaatcaacctccatgattaaacaaaagttcaacgagtaattaaataagcgcccgctgggtcgttcgttgccagatcatgtttttcaggtctgtctacctccatgattattaaattttttttcgagcgatcccgattccaacaggggacacgagaacggctttcgaggctaggcatgtggtttggaggaataatctcacgtggtaccacgctttggaggggcacacgagatgcggtcgtgcgtgcagatgggtttcacatggcagcggtttcctggtctgggccagctcgatcaccgagttaagaagctgactgaagccacaagccactgaggcaccaaagaatacgcaaagctctctgcagacctgcagtctgagctacactcattcaaagtttcggctaacaaaaacatttggaggttgcacagaacaacacatcatttggtcagatcccaaggtttctactatcatgaaagctagaacagatgcgttttcttttttgcttttgtcatgcttatcaatttcttccttggcatctggtattttctttgctggataaatttactttccctgcctcttcttaggggaactctatttacaggaggctggaaactagtct

SEQ ID NO: 5392 - DNA, 720 bp, Zea mays
  Intron number 3 from transcript GRMZM2G399313_T01 (locus G RMZM2G399313) derived from phytozome v7.0 (chr-ID 7; pos 8 0018540 to 80019259)
gccgcctccgcatttgccaggttgggctttttttccttcaaacttgtcatttgtccaatcagtgacagagcttgcatgtaaatccagcaggagttcaacaatgaactacgattgatagattgagtatttacaaaggttagctagttgatgatgtgtacatctagtggagtttgcctcactgaagcactgcccctatgtccaactaacgtgtgacttttgccctttgtagtttcctactcctatgctttggttttgttggcatgggtatatgttctgtttgatttctatctatcatgtttcataacagagaaggtcttgaaatcaggatggtatattctatgagtgtaattgcttttgattgtcttctgatgcagaaatgttttccagtcagcctatttggttacatgaccttgctacattaaaatcaataaaaaaaatatggttatactgcattaaacgaagcttgtttgaactaaacattaagatcgatataaaatttagatttacactgcactaaatggagctgaatgccttgttagttccttttcatttggttactatatgatacttcagttaactattcctatcttgccgctggaattgaatgaatgtacttgggagggatcaaaacttcaattctaagcaccaccctttttaacagtatcgaatgtgtctgtaactaaatcttttaatttttataggctacactgggcaactgtg

SEQ ID NO: 5393 - DNA, 775 bp, Zea mays
  Intron number 3 from transcript GRMZM2G110983_T04 (locus G RMZM2G110983) derived from phytozome v7.0 (chr-ID 6; pos 6 6204004 to 66204778 reverse strand)
gaggttagtgaagctaatttctgctgcagtttttttgcttactctttgaccagaccaaactcatcgtgtgcttatccaaacaataagttgcatctgcatgactgcatatgctgctgctagttttgcctgcacaacacacgacttacgtgaccatgtgatacagaatataacaattgactattaggcattagttgacttgcaggtggcaagctgaagttttcagtcatctgtgtttgttgaccttactgtcaaatgcacggctgatgtagagtacaaattccaagttaagatggatagaggaaactgaccccaaattcaatggaactttataatgtagcatgctaacactagtgtcaatcttggtaagagatgacatcaaattaatttctaaagcaaatagtaataattattaacgacaaagctattgttaaacctagtgacaattctttttcttctcataaaaaacatcacaatgaccattgctacacgaaaacatgcaagcccaaagtgtctttgttgcttgtttagggtcagccaatactgtggtatttattatacacacacacgtgcgcgcgcgcgcatagaatgattgattcagacagaataacaagttaagaaattagctggatgagccccattattcacacaacagctcttagattctgtgtcactagcttgtctttctgagcttactacatggtttgcttctgtcctttgactgatatgctaactcctgttttattctcaggtacgtttaagctgactctccagttta

SEQ ID NO: 5394 - DNA, 516 bp, Zea mays
  Intron number 1 from transcript GRMZM5G816799_T01 (locus G RMZM5G816799) derived from phytozome v7.0 (chr-ID 7; pos 3 8896279 to 38896794)
cttgggtacccttcctgcgtgaagaaatcacttccctgaccagcacaagagaagcccagttagatgacagtacaagttctgtttttcttttcttttttaaaaacaaaaacttcatgatatataacaacgacaaaaaagtatttagagaggttaattagtactgctacctaacggctttagaactgtcaaacatgcattagagaaatttttaaaagccctacttttgttcggtacaaattaaatacaatatacacgtccctagctagttggtaccataaatttcctctttacaactttcttttccttcgttcaatcaaaaccctttagtttgtaagttgaggttttcaatattgattaccaaccgttagtatatattgtgaatggaaaaagaaaagaaaaattaagaaaaaaaggtgagccacgcactatgggatgtgacatgcaagaagttattaatatgatgtacaacatgttgttgtaccttgagccactgagggacgttgctgtggtagccgg

SEQ ID NO: 5395 - DNA, 396 bp, Zea mays
  Intron number 1 from transcript GRMZM2G061127_T01 (locus G RMZM2G061127) derived from phytozome v7.0 (chr-ID 3; pos 1 45609530 to 145609925 reverse strand)
aggaggtacgttgtatacacaaaagtgatgctctacatgagcatatcacattaaattttacccagccggtgaaaaatatatgtttaggtcttgtttggttattcccatcccatcaggtattggaggggaatgacatggactagaagagattttcacttggtagggatttaaacccactcaaccccctccaatccacatggattgagattaaaacaaacaagcccttacatttctagattcccgatccttagttggaccctgcttatggtggcttatgcttgaactggccacaagcaagaattagaacaccagtattccaaggaatgctactttttttaattgggtaatttgattattcatgttcatacctgcaatattcaggtgggttcagattca

SEQ ID NO: 5396 - DNA, 618 bp, Zea mays
  Intron number 2 from transcript GRMZM2G139073_T02 (locus G RMZM2G139073) derived from phytozome v7.0 (chr-ID 6; pos 8 4787148 to 84787765)
tcgacgcggctctcaaggaggttcgccataggaaggcacgtacaaaccctaatctcttgcgttttttttttctgactcccctagctagtcctagctagttaggtatagatctgtcatattatctcttctgcgggctgatgatgcgctcttcagatctgttcatatttcatgctccttgctgctggtagatctttgttcatgccttctgattcggctttgaatcttgtttttgaagccgtcattagatagatctctctggcgtgttgttcgcagttaaaaaaaaggagatttaggattctttactgggagagatagattcatctcttgtacactaattcagtcccagtgtcaatgcatctaattaagtcctgtcaaataaaagtttctttctttttttaccttaaacaaaaacatttagccctgattcaatatttttctattggtctactagaattagatcttgttctcaaaagaaaattaaaggtggggaaaaagaaaattgttgctactagtaatttttttagaatcttgaataatttcatctcatcatgtccatgttttagtcttacttacctacctcttttgctgatcccttctctcgtttgatttttcagtacc

SEQ ID NO: 5397 - DNA, 780 bp, Zea mays
  Intron number 1 from transcript GRMZM2G031239_T02 (locus G RMZM2G031239) derived from phytozome v7.0 (chr-ID 3; pos 3 3509422 to 33510201 reverse strand)
cccttgcacgttcggcccctgtgctgcactgcacagtgagccagacagcgagtaatatttactgattattgattattatcgttgcatcaacgcatcctattttgattgatgagtgccaactgttactttctaaaaaacggcaccgtacggtatttttctaccaccatgttgtttaagtattttcaatcgatgtcattatttgtgctctttattttaggattatgtattttggtttgactgtagtaagatttctagccttataattataattttttgattttacccccttgcctcatttctgtgtctgccactgcctgcccatagtaaatccacggtgagccatctgcaagtcagcgacgagttgcttctcaattccttctctcgtagtcctgtcttgtcccctcacccatagtcaaatcatctggtcacgtgacctgattttgagtgtttggtttattggaaataagagcaaagcagcacagtatcaagaatgtagggcaatttgaatgttcctgctgcactgctacttttagaattgtagtatgcttcatcatttatttatttctaaaaaaacttgcatgtattctatcgtgacttttattaagaaaataatgtattcacgtatcttcatgtttctgataaaggtatttgtatatgcatcagtgctacacatgtgaataccggttttgtttcaactctgaagtcaagtgattttactgttttgttttgttttgttttgcaacaggtaaggtttgttttcttccattcagtttgttgtac

SEQ ID NO: 5398 - DNA, 839 bp, Zea mays
  Intron number 3 from transcript GRMZM2G020140_T01 (locus G RMZM2G020140) derived from phytozome v7.0 (chr-ID 3; pos 2 24566980 to 224567818 reverse strand)
acatttaccgagaagacctccgagaaccctgacctgtatgcttttcaaccagttccccttccagatgccagagtatagctcaatttcgctgcattactgaaacatgttcccttaggtagcagatgtgatagatcattgcgaattttagctaatatgatatgatgtccttcagtgttgaatgtgggtgtgtttggtttggctggatggtgttggtttgtagttttgtgcattcacatttctgattctgcacactggtagcggggttgctccaaatactaaattcttttttgagcgggatctgctggttttttgttggactggtccttggaacagttattattgtctaacattgaggattgctgatatgattctttgaatttgttttaagattttagtgtcacagcccttcctatgaaatttgccaatctctatttagtttattctagcaaataacaagcatagtatttacgttttctattggattgaaatacagatttatgatgtccttttcagatgcattatcttcatttgcagtcaatttggtgtttctctatgttttgcgcatggtcgcctattgtggatgtacatcaaagtagaatatgcctgcgaagttgcattgagtgcttatttttgaaaagaacagtttggctatcaacaattccaatttaggacattatgaatgatagttttataactttgtaactaacaatgggataatggtacagagtacatggcaaatgtgagtcacctggaagattttgtaattgtatggatgattaattctttgtaattttatactgatctgttatgccttctgtttcaatttgtattgtgtaggt

SEQ ID NO: 5399 - DNA, 1005 bp, Zea mays
  Intron number 2 from transcript GRMZM2G342588_T01 (locus G RMZM2G342588) derived from phytozome v7.0 (chr-ID 6; pos 1 22096599 to 122097603)
tttaaagctgtgagtacatgattttttgtttcaatcatgcacatcatttattaaaacattaaatgtagttgagtgatatacacaaatgtatattacattttcttggaaatagggacagcattgcattgtatgtcagcgattaactgaattttgaatgcatatttctgagttatttcttaatgacaagctctatattttaaatcggcaactagatttgaatgggttgatctcttcacaaaagagaaaaggatgactaattctatcacataaagagtttcctctattattcttgtcctcactagtagaaaaatgtattaaaaatacatgattacatgaggtgaacatatttgttttgtctagagtgttgtttatatgtgctggacaaatatggaaaaaggagatataatactcaagtctcagtttgaagaagattagatattgttgatgagccattttaaagctaaatttgcaatttagctttggtctttttatcttttttttaagtttttgcgggttctattaggttttaactctagcctaccgcaacatgcttaggactaaaaggttttgttgttgtttttttctcattggatcattttgttctcaatttttttgctaatacttccaatttggtatgttcaacttttgtactttatccaaattaatgcataccaacttataatgtaatacagtaatgggaacggatgaggtgtaaatcaagcacttggtgcaaaccgtgcaatcagtcatgataattttaccaaacaacccttccaccgtgtatcagctttcaaaacgacccttccacctctcctagtacttttttaaatgcacccttgcacctgcaccaatgtgttggtttgcactaagtgtttggtttgcacttgatccgttccctacaataatttattattaacagagtatcatgtggatagaagctacatggactaacttgacatatatttcttaggtattgtgagtgttttgcagcaggtgattactgtg

SEQ ID NO: 5400 - DNA, 579 bp, Zea mays
  Intron number 1 from transcript GRMZM2G099547_T01 (locus G RMZM2G099547) derived from phytozome v7.0 (chr-ID 7; pos 3 1909700 to 31910278)
tcctcatcaccggtcagctcctcctcccccattcgcttaattttctcagatctggtagtctgctaggaattaagggaggttgggtccttaaattcaagcggaagattcagctttgaactcttcgaggaggggatagtttttatctaggaaaaaattagctaccagttctagaccacacgacaacatttctctgcatacttcaattttcttcgtttgtattctagctgtggaggtactgtagcactagtctagttagtctgcatctagtgtgtgtattgcacaaatgtaattgtaccagcgagtgaagggaacaaatcatgcaaatctaatttatagcaggctgattaatactttcatcaaatagactaaaagctaaaagtagacaaattttgtaaaacctcatgttccaaaaacgtttttaaagtttatgcttcatcatcagcagcagatttttcttaatttgtgtcactaggaattgctactgtttttttaggaagtactagtataaacaattcgagaatgatttttttgtatattccattctgatatgtttgttctgaagatacccaattgcagaaa

SEQ ID NO: 5401 - DNA, 1012 bp, Zea mays
  Intron number 1 from transcript GRMZM2G032944_T01 (locus G RMZM2G032944) derived from phytozome v7.0 (chr-ID 7; pos 3 5082326 to 35083337 reverse strand)
cgtccggaaaattctttaaggttgcatctcagccccttgcgcaagttccctttttattcctgcattcctgattattcgataaggagttcaggactagtcgaaacgtaaaagcaaaatgttccatttatccttttttgtgcaagaataagagttggaccatggagtttgacatgtgatgaagtaactaaaagtaccaaaatgtttggatgggagatgattgcaaggaaaaggtgcaggctgcgttgtcaatgtgcactgccgatggaacttaaaccctgctgggtgacagatttttaggcctgtttgtttacctatagattttataatacagcttaaataagttaagagacaaacaaataacacagattattaggtggattatataatctagatacctagattatgataatccataagcaagtcatcaggtgcttatataatctataagctggattatataatctagaggataaacaaacagggctttacgttcttctgtaccattctcacaaaaattctcaaatcaaattctatgcttgtaacattcacatgcaagtgggtctttgtcagattgcaagatccgattttctgtgcagccccagcttttgcagcattgccatgtcgccataggaaattgggatgtagtgtcttgggtggcctactgacatcaccgtgctatagtgtgaatagaatgccactgtttgcacactataggccggcagtctcagaaatagtgttgcaagtatacgagactgacattatgattattcagttcggcatgtgtctttgatgatgccatgatttttattttctaacgccatctttgattctttttccacctttgttcaccagtaaattgatttaggaaatgccatttctgattgactatactaagcttaaatgcatacagagtaaaactaagaatgaaaaaaatgtgcattataggttgaagatcacatctgatattacttttacaggaaaggagatatttgcttaaggaatttcctgaact

SEQ ID NO: 5402 - DNA, 391 bp, Zea mays
  Intron number 1 from transcript GRMZM2G438871_T01 (locus G RMZM2G438871) derived from phytozome v7.0 (chr-ID 7; pos 3 1518764 to 31519154)
agttttgagtcatctgtgtacttttgtttatactaggtggttcgcttgattaaaatcggttatttggactgttgcagttacattctatgcttacaaaagtactgtagaaacagttagaagctgatacgaatcaaaaacaagtgagcaggttcttaagaaaataatcctctcctcagcatgtaacagaaacttttttttgttgcatttctcatgatacagccatgcagcaatcattcatgtactcagtactcctacagataaaaactaggcatgtcagagatccgagaagactattgtggcatcgagctgagctacggcactggctaggtgggacatgctgctagtctctatctcagtagacaaccacaccagtcttgctttaataccctca

SEQ ID NO: 5403 - DNA, 862 bp, Zea mays
  Intron number 1 from transcript GRMZM2G151254_T01 (locus G RMZM2G151254) derived from phytozome v7.0 (chr-ID 6; pos 8 3605366 to 83606227)
ccgccaattgggcgcccccccccgcccacgcaaaggtgcgattttccccccatccctcccgctcccccttcttggagccgcgtaccccagcccccaggattggtgacaggcaccctccctcctgatctcaatcagttctcggcgcttgagtgccgtggtatcgttccaattttgtgtttttttagttcgtgggctaagaaatcgtgtcttgtttctccaattgacgggggtgcctaccacacggctcagaagaggagtatagtgttttcggcgaaattaatgtgccaattgtggtgtgcaatcgtctctttagtttccctgtttgacgatgcagttcatccgcgtcgcgaaggaaggacccaggcagagcttaacaatttttacctggcgaggggaggagactttgcgtaattatagttcctggggggttggctttgattgccatttacacgcctctactagatatattttcttgtccgctggaaggagtcgtacaaaattctgcatttgtcattcgagtatccttatgtccggagctagctttgaataattgttggagtggcatgtcatgtttatttccatttctagcctagtcctttaaaaaaggagattcctgggattcaaggaggtttagagtgcagctatgccaacattgatataatacctgtagtgctatttgttaactgatatgaaataaaaagaaataatgttatccacttattattgaatttgtgctttcagaccgaaagacaatggacttctcagttctcaccgacgttcataagccatagctgtgtttggttcatttctagttgtttttgttacaggacagatagaagaaaattattggcgctctgacaaa

SEQ ID NO: 5404 - DNA, 599 bp, Zea mays
  Intron number 5 from transcript GRMZM2G096051_T02 (locus G RMZM2G096051) derived from phytozome v7.0 (chr-ID 6; pos 8 2569346 to 82569944)
gatcttatcaaggagtttgaggtaagttcttttactattaaagcatattcctccgcatgggttatacccttgtttatgtcatgttctaattctgagattttttttaaatgatattattttattagaaaattgcaaaactagatagcaaattctaaaaattgttgatctcttggcttttgggcaagccaacaggtcggttgccggctcttcacaggctatcaagaagcaagttctacatttaatgcaattagtaacttacactgataattttttatcccatttcatatactttgaatggtggcagctacacgtgaaccaagtttgattattatattccaggcatgccatttttttagaacagtaggggactattcctgtcttttcctttgtgtttatggtccttgtttactaagacgccctccattattttgaacaatgttcagtggccatgtactaatgctgatgcatttttcaatttctgtcgaaatacttccagtatcacccaatttggtgtgcttgatagataataatacattttatctgatttggtttaaatttctttaggtgagggaaactgttcgtgacgtgacattcttaca

SEQ ID NO: 5405 - DNA, 1019 bp, Zea mays
  Intron number 2 from transcript GRMZM2G060079_T03 (locus G RMZM2G060079) derived from phytozome v7.0 (chr-ID 6; pos 1 45272226 to 145273244 reverse strand)
gagaactttcaggtaagttgtgttcctattgcttcagaagttctcgttcatgaagttcacccatatgtctaaaagatttagtattattttttcattgtgtttgtgtacttctattagtttccatagctaacatgtggttatttctccaaaagaaaataaatctgcggtatcatcaattgatgctttaagataccaaaatgctttatgcaaagcatctaactgtggtcctagttcaggctatcattcattaccttttctttcattgctggttctttttgtcttatataatcttgtgctaactggctcatagatctggggtcctaggtcctagcaattgtcgcccccatattatagaaataaaaaagtatataagattttgaaatttataactagattactagtactaatctatcttcctaggtacagtagaacatgaatctaacaatcaaaagtaagcttatcaacctagcgactaacacgctgaccgatttggcatgtctttccttatctttagccaacttaaaagtttacctcttaatgaaaagaaacacctttgaactgaatatataatttaatactagtaacgtattagatcacttcttttttattggaataggtcgtgccaagccatggtaacgtccgtccaaagtcgtgcacaacaaaatgttgatccaagtaagacctcaactgacctcttaagttcctgactatgctgacccctccttaagaattgacatagaacccactaattgggtactcttccattgggttttggctgaaatcatcacatccaagtaagctacctgaacttggaaaccacgacttcttttcttagctctggtcagtgtgttcatctattttatctcttgaaatgtgaactgtatgtttacgtgttcagtaaaatgagtatcttgcaattgccttggtgcaatttccttgtccactccggtgcttattatatatcttttttcttttcaattttaggtgagactttcatattcttcaacaagcagatcaaa

SEQ ID NO: 5406 - DNA, 890 bp, Zea mays
  Intron number 3 from transcript GRMZM2G079836_T01 (locus G RMZM2G079836) derived from phytozome v7.0 (chr-ID 6; pos 1 62028541 to 162029430 reverse strand)
aagaaccactacaaaaaacttagggtgtgtttggtttgacttttggctttggcttttgcccccttaaaagctaaaagccaaccaaagggctggatccaggaagcaaatttttctaaaagccgactttctcgtagtgcaaatctgaaagcacctctggacctgtttttagtggcttttcggatggaactataaaaacatatatcgaagaatttttaacgacttttagttgtttccaccaaacagtttttagctttttaacagctttcaggctacaacagctttttccacagcttacagcccacaacaacttttttcacagccacaacctaaccaaacagacccttaacctagaggtctgtctctacccttgatgaggctttctatttatctgtagattgtaatcacttgctcatgtaagcccaccataaacataatgcagtaaatactgattaaagatcaatgtgacgcccattttgcatatagtgtgggggtgtctggttcccatagtagacgaggatgatttaacatgagtccatctctcatgcctatactaattattagtttgtgagaaatgaggtggtaatgcatcaagttaattccattcaacaaaccaaacaaaaaggcgaggaatggcaaggtgacgcatcaccatggaccaccatattatcaaaccaaactgaacaccccatatgttcatatacaagttttgataattgccatatttatatgttactgaaaccaaactgcatgaagtagcgatcagccgcaccttttcccttttcttctttgtctgaaaataggatgacgtactgaagccccttctcaaaccttactaaagtctgaccttttgtttatcattttcttccaggcagtatttcaggagtacgaga

SEQ ID NO: 5407 - DNA, 886 bp, Zea mays
  Intron number 1 from transcript GRMZM5G891783_T02 (locus G RMZM5G891783) derived from phytozome v7.0 (chr-ID 6; pos 1 46883803 to 146884688 reverse strand)
gtgttcaggctgtgagaatcttcctgacctacatcgatctgttcccataaaactttactctcatagtctcatatatcattttcttagtagtacactattttttcacggtgtccaggcgtgagaaaattcctactgtacctcagcggctcaacctcaaacattgttttgtgtaatagctcacattcatgttccaattgttcaagagttcatgacttttttttggaatgaaatagctttctcatagattttagcatgaacttttgattgtgttcattgccatttatcttattcagagatgtgcatcattgcctcctgatcgaaggaactagtgctgtgctgcgttttttttctttgaactactcaggaggcgtgtgccatttcattaagaagagtaccaaatgtacgacaccaagacaccacacaccaaacccacccttgcactagatcacaatgagcaagcaagccaccttcaatcaaagaaaaagaccaaagaacagaaaacagaacctagataaggttacggatgccccgggccctggctgagctccatagagctccttcctctgctaaccaccaaggaaatatttggaagcattgttgaagactcagtcattgcggtatttctgaatctcccatgcgattaaatgatcagggagccgagccatttctctttagcctttccattgactcgactgtgcgtctcccacaacaggagaatttaagttttgaattttttaaatcccattaactgatttatcaggtattttctacagtttgaactttgaacacattggcatctaaattagagtatttcctttttaatataaaacaaaatcgtagatcaaacttggttattttatttaccgtgggtcttggattgcaggtt

SEQ ID NO: 5408 - DNA, 674 bp, Zea mays
  Intron number 1 from transcript GRMZM2G145704_T01 (locus G RMZM2G145704) derived from phytozome v7.0 (chr-ID 3; pos 1 53947654 to 153948327)
ttcacccgctggttagtgatacactatcctgttgctacttctctatgttttagtgagttctaacagaatggaggagctataaactcattgatcgatgtgtaagacatggaaatggcttgggtaaaatagtaacacttgttgaatcaaatactactgttgtcgttccccatcgtttggtgtgtttagactggatgtgttgggcagatggtgcccaaagtttatgagacacggaatgagtacaaataatatgattgttgtatatacgggggtaaaatttcaacagaacatcggaagatggttttaggatagcatgtgatcgtgtgtataaatggaagaggaaatgtgtaacacatttttgcaaggatattacctgcttttgacaaacaacagtgaatcataggcatgttgatacgggagaattagtatgcatgttggtattttcaaagctgaaggtagtcttttcatgcacaacgatatgtaccatactaacaggtgaaaataaaatcagtgtggtgtttttcttttaaaaaacataggcctgctctaagtctagtgtttatcttctgtatatttttgtcagtgtcatgatttccttgcatccgtatccatttatgagttttaacttgttttttgttgcaggaaaacctgcctgttgaacagttcgttgttagaaa

SEQ ID NO: 5409 - DNA, 634 bp, Zea mays
  Intron number 1 from transcript GRMZM2G318849_T01 (locus G RMZM2G318849) derived from phytozome v7.0 (chr-ID 7; pos 1 45382379 to 145383012)
cggagagatctccgagcatccttgctactcccgttgtacgtgctgttcctccccaacctctcaacctgcgtggcttttgcggctgcttaaagtcaagtgtgtgcccttgttccgctatgcgctttagtttctgtgaggttcctcttgtaggtacggcacgcgggagtggggatggaaccggcgatttcaaaaatttccctcccacccaatggttggtggcaatagtgtgcttcgttccgtttttaggctactcttgcatgtgattttgtttttcgcttggaggtgccccgattgctctctgatctctaggtttctagggtttaatgcgcaaatggcgtgcaatgcggcaggtgtgagcgtgagatacgggcctggtgctgcttatctgaagttcactaacgcttggttttattctgtttcggtacatttctgaatcgaactagtgttcatttgcggaaaatttagctctcaactgttggctaagctccaattggatcttggtgtggataatctgattgttttcgggctcaaatttgtcaatgtcttactgaatgctccaaacttgttgtcttccaggtgtatctgatttcttattcgaatcatgtatgttttgtgttttagatcaggtaaaggg

SEQ ID NO: 5410 - DNA, 769 bp, Zea mays
  Intron number 3 from transcript GRMZM2G143714_T01 (locus G RMZM2G143714) derived from phytozome v7.0 (chr-ID 6; pos 1 58275594 to 158276362 reverse strand)
ggctcttgagttctaccctccatcaaaactcaaaggtttcgccatagtgttaagttatttgtttgttggcccttggggtttggcataaattgtcgtcacttaatgtaaacacctatgctaataacactaattcactaacgggaaaatatgtaaacaatgaatgagctacctgattaccgttagcattttttcatataacaaaggttggcatttaatgccaaaaagtttgtgtgcttgcactttgggagtaacaatgtattcgtcctcgttgttgaatgaatgaatggtatatttgcaaaatattttgatgtgaaaaggcgatgtaatttgtgttgttaaggttcagctaaagcttgtttagtggtgtataaggtgggattatagtattgtggaattgaaggtgggtttgtgcccctacagcgacaagttacagggctccagtgccaccttgctgcgctgtcattttgagaaaccagaaaccatgaaatttcctatttggttcttctttcaaagaacatgactgaaaccatcctggctttcaatgcttcagctattcatatgaatttgtcgtccatcacttccgtgatggagtatgcctgtataaataatttgcatggcattttcaaagagcatctaagtctatctgttgagaaaaatagcatgtgccgcattggcagtgatagtctgattacctgttttactaagttgtttcgcacatgttgtaattctggtgtacttgttttaggcgttcaccggcattttgttctct

SEQ ID NO: 5411 - DNA, 988 bp, Zea mays
  Intron number 1 from transcript GRMZM5G855401_T01 (locus G RMZM5G855401) derived from phytozome v7.0 (chr-ID 6; pos 2 7987006 to 27987993)
agactctccaccagagcttgtttacaggtacatgtttcctccatttgtttcacacaatttcagaaataatagctagtaggtgtatgaagactgcatatgtgcaggacctgttttctcaggtttagtgtcttctattttgtcgttgattactgtggcaactagcctgttaggcctctaaatcctaaactgcatgcaagtgtatcctttcctgttacattcatagctctttgctcatgctcccacgaaatttagcacaagaaaagacactctcctgacatgttgatcctactcggacacatgctttttattatgttctttacttcctttcaaatgcagcatatgtcatacaaaagtattacttgctctaactgttatcttgtttttgtagattcatatgtcatatttgtctatttatttccttataaactgaaaaacaaaaacatatcaaatggaacaatacatgtatcttacttgctatcgttttgtttactacaagctgatgttattgtcacttctgtttgtcgcatgcattactgatatggttcagaatggcaatgaagaacagtacacatcaaatgactaacagttaggtgttgtgttcattctatactagcagtaggagttagctagctctataagaaggtattacaaagtgtgtactaacatttcttgtcagtggaaagtgttgtcttccaaccaaaactgcagggcacccagagggcgcctactattctagtgaaataaaagccttcaaattttgttctcttatttgacatgtctgtattgttcattctaatgttgtttcttttcgccatgcaatagatacaattaactgaacatttatttcgatgccaaccattgtgaaataggctcctccatctacagaagtacatgatgggttcaattcagatctattgaaaggcaatcttgtcctaggctgaacctgtccaactaacctgaatctgttcaaaatgttcagactacttaa

SEQ ID NO: 5412 - DNA, 887 bp, Zea mays
  Intron number 1 from transcript GRMZM2G061562_T01 (locus G RMZM2G061562) derived from phytozome v7.0 (chr-ID 7; pos 5 0149018 to 50149904)
cgcctcctcccacaagaggctcctccccccaacaggttcgcttccttgctcctctcttgaaattctagcttctgtgtttgtagccttcgcatgccattctagcttctgcgtgctgtccggccgtgatccgtctatttctaccccatctctttgccttgtgatcttttaccacttagatcaggttgcattcgtgattttagtatactgctctgcaggtttgagtccatgcagatgcatgctcccgacttgtgtgttgattgcacccaacctgcaatgaattgcaactgttgataactgttgagttgccaccttttccagcaaaggtcttcgttggtttggttgaaactgataatgacccacctcttgttgtctacttcactcctctcctataaaacatgtattttaccccttatactatagaaaaaaattaaaattttaataaccgtttaggatggttttgaaattggtttcactgacatggcatattaaagtttaaataacctcctaatatatcaagggtttaagtagattttttcttttttttttacgaaaagttggtgcttgacacaccaagaaccatcctttcacagccccattaaccatgtccatagcagccaccgacaaaaatgtccgaaatggagaagggctgtacacatagttcattggatcaaaaggaaaaatgtttctgtgctttttctactttagatgctgtcactttgtttctttctctttatatcatcatatgttcctcgcaagattttccctggcttgcttctgattttgcaatgttgtctcttttttttggttttgttataagaaagtagaaaggcatgctcctcttttgcctgtttcagcactgacaacgatttcactccttgaagcaggcc

SEQ ID NO: 5413 - DNA, 439 bp, Zea mays
  Intron number 2 from transcript GRMZM2G100012_T01 (locus G RMZM2G100012) derived from phytozome v7.0 (chr-ID 7; pos 1 7641632 to 17642070)
ttgcctttggaaggattagccgacatctcatttttgtaagtcatggttttgttttgcacgaaatttaatttattgcatagaaattatagataggtttcgattcgtgtgaacactgagccaccacctcttctcattttaaaatcagaaataaaaaacccttagcgatttctacattctctccatgattatctcacattgtgtagataaaacaatagttggcatagataaatcatatataccaaaatctcgaagactctaaccatttggtatttgtgttttgtttgtgcagatagttctatacaccaaactctatgcaagaaacccattttccctatcttatattgtgcataattttgtttttttattgtagtgtttgtggataaccacagtattccattcttttcacatttgagttatttttttttattgcagttctttt

SEQ ID NO: 5414 - DNA, 485 bp, Zea mays
  Intron number 2 from transcript GRMZM2G001572_T02 (locus G RMZM2G001572) derived from phytozome v7.0 (chr-ID 6; pos 1 40945544 to 140946028)
gcaaactgcaggaaagcataccaactcaattcttcatacttctattgtaaatacttctttttgaagatctcgggtgagctgtgtactgataatttgttttttattttgattgttttcaatattaagcgaagtacttatcaatttgttattatcttgtttaatcacaccgcaaattgtgtctgaagggaaccagaccatcaaagcatccattggtatttggacttgttcacatttaacttcagtctgctagattttttatataccgtgtgttctctgcaacaattactctatacatatgtaccataacgtgaggttgaaaagatttatgttcacaactctatagatttgtaaagagtttcatgagaaatgtggttacctttctgcccagctcctcttagtggccttctttctatttcccacatctttgcactgctgctgactgaatttcatccacagatatttcaccaattcactgcttcctcact

SEQ ID NO: 5415 - DNA, 864 bp, Zea mays
  Intron number 1 from transcript AC226550.2_FGT001 (locus A C226550.2_FG001) derived from phytozome v7.0 (chr-ID 7; po s 174252905 to 174253768)
tgcctaccgcggacggacaaggacaagggcaggcggtacggtactaccggaagtccccaccagtgacagcccatatcaaacttctatgatatcatggtaacaaacatgacaaataacttttaacccaaacgagaacgtagcctcgtcgagataacctctgatcgataatttatttggccccctcatctgcatgatattttctatgcttattccgctccagttttatgtgtcaatgaaatatcatggtggtaaacatgttgttatctaaatgagaagctaggctaactatcatacttttgtgggactgaaaggctaattctgtttccgatttcttgctcacaccagttagcatgattcgcttgaatttatgtaggatgaaagcgtataatgtagccgttttttttctatttattgtttcaaattttcagcaatacctaagaaaaaaacatctatgcaacctaggatgctgctctagtgtttttaaaaatattgttgcagctgttaatctttcattttggtttgttcttatatgggtgcactaaacttaacccatatttcaataaaaaagaaaataaggcttgtcctaggggggaaaaacagctgctctatccaggaaggttttatgcataatgccatttctttttttaaagaaacaactttaccaaataagcattgcacatatgcaagagagtatttattgggtcaggaggttcttgaacattatacttacaaataagagtttatcatttgcaaatgtattttgtcggcctctagttgttgttgatcttcattttttttgatgaattttaatgtttttggcaaataaattttaccagttagataaatacatccactccagtatat

SEQ ID NO: 5416 - DNA, 1004 bp, Zea mays
  Intron number 3 from transcript GRMZM5G840013_T01 (locus G RMZM5G840013) derived from phytozome v7.0 (chr-ID 6; pos 1 39398362 to 139399365)
aaaagcctgtagagaggtacgtcacctcaagcttgtcctttctgctgcctcactcatctccctctttgccacgataccattggatctggtcagtgtatgatagttcatacttttccatattatgtccagttcattttcttttatgctcggggataatgtagtcttctaattgtggtacttcactgagaaaccagtgaacctaattatgccgttgaagcatgttaaaaatatcatatcaaatagctttattcatcattttatgtttaatatgttaggctatctcatcccctatttcaaacttatctctgcaaacagtatcatctacagttctgtgtccctatttcccacactctactggagacagtcttagtaatttatccttcatgcttgaattgctgactttctcaatggatcactatacactctttgtgatgctaagatgtggtttatgctgattgtcatgattcttaagtctatttggcaattggcaccgttcaaagaaataggttgaagatattgtattccgatgccataaggttgtgtgtattgctgattgacattttggcccccttggctctgtgttttttacataatagctatcattatacccatagtgctaaaatgcaattttgctttatgggcatttatttcacatgttttcaactagtgctagcaaatgaaaatgttacgcttctagaaaattatagcagatcctcttctaagggattgttatgagctgcatgcatgattgcatccacatgttcggtcagagacctacgaaatgaacaaatctccatttttcttatctggtcatgcataattccttagttttgcaatgctaattgttaacagagccatcttttgtttgagttgaacaaaataatgaacatggtttaatgtttcgccctcgttcactatatttctagtggtgtgtttattcttgattaaattgctgtggtgaatctacagggctgaaccatcattgtcggagaaagatcagaagg

SEQ ID NO: 5417 - DNA, 969 bp, Zea mays
  Intron number 1 from transcript GRMZM2G078368_T01 (locus G RMZM2G078368) derived from phytozome v7.0 (chr-ID 7; pos 1 16448909 to 116449877)
ccctgctcttcaatttcgtccacacgcaagaaccagtgagtaacgtttgatgtcaacacaaattgttgttctattttcaaaactaagtttgagttagttcaagatttctgtagcaatttgttgtttaatttaatatatactgtgaaattttgatcatgtggatgatgagcgactagtattgaatctatttgatagattgatgttctattaattgtcaaattatatatgttaaattgtttatgctcgttaaaattattttggaattagttgtttagaataaagagtaaaaggatatgatagaccacatatttgtattaaaaacactagatggattatttcatgtttacttttgttcttaaaaatgggagttagatttaaagtcaagattggtatgtcatgcgtaaatatacctaatgtttacccactagaaaataatagaactttattaatgttgaaatgatatagtcgtgatcgtgtctattatagcctaatatagcagtttaataaactataggttatgtgtcatttaaacaacattatattattttagttcttcaaatgaaaagttaaaataaaatcataaactcgtgcttaccggtagaaataagtaatctagttccatagagtttgtttagcgctacatctatgttagtttaaatgaatttatatagtccgcactgccatagtccaattgccatatgggttctctagtaaaatatcaaaacaaaataattagtatattatatcatagtaaatgagatgatcgttgatatgcctaggtccatattatagttgcgaaccaagttttatttttgaatattttcctttgttaagcgtgattggaatgatgtatgttttattgtttgatgaatggtatatatttatttattggtgtatgttttctttttgtatgtatgacgtgcgattatactagaagtcgattgtgtgctagaggatccgaatctgttt

SEQ ID NO: 5418 - DNA, 833 bp, Zea mays
  Intron number 1 from transcript GRMZM2G044457_T02 (locus G RMZM2G044457) derived from phytozome v7.0 (chr-ID 6; pos 1 55398883 to 155399715)
ttgaagcaagaaaagttagcattggtggagcaaaggttagtggcctctgttggctgttgcagacttgcattgcactagctcataaaaaatagtgttcatattttatgacagttgtagcaattgtggtggatgaagtattggtagaatctccacttttctttcaaaagttgaaccaaccaacaaatacgactgaacacatttctagggcaataccacagtttatattttacaaacagaaggttgaattttgagagccatctaaagggcgtacccagtgccgtaggcttcccacactgtacggggtctggggaagggtagggtatctttaggcgccaagccttacccgcataatatgaggctggggctcgaacccgggagcgatgagtctttataaccacacaatattatgagcataccagtaaatttcttagtttcttctgtgcttagcccatgtgttttcgtccagttcactgctgaattgttgctccttaagcgcttctagaactcatggggaaaattaccaaattgtgacatgacatcaagaagctagaaatttaaagttggcattcatacatgtttttaatgacataagtagttcattattgttatatttgaatttagtatagaagcgttttccaaccgtgttatcttgaaattgttctatatgactgtcggacgtattgttttcatgtttcctccaatatgtaccacaaccacaatgaaacctcgtcaattgaagatataaggctggtttggttgtacttttagcaattacacatgcatatccttgatagaaaaaatatctgtatagatcgagagaccattgcaaaaac

SEQ ID NO: 5419 - DNA, 388 bp, Zea mays
  Intron number 1 from transcript GRMZM2G134062_T01 (locus G RMZM2G134062) derived from phytozome v7.0 (chr-ID 6; pos 6 3756681 to 63757068)
gaaagggtactgtttatatctgtataggtttctgtttatactttacagtgaaccaatctatattactacaaagttatgggttctctgaataacatctacttccaattcattcagtggctttctttttcttttcgaatttaaatcatttgcgtgcatttactgaacaaattgataatctggttatgaagcattgacattattcaatctttgattgttttgtaatagcattcatggctatgctgccttgtagttttgacacatcgcatttctgtggtctctgtttactatactccttagtgtaaaagattccatacttgcatccttagttaccaagcttgactgttgtctctatgtcaatgttttcagatattatatcaattacaagttg

SEQ ID NO: 5420 - DNA, 1008 bp, Zea mays
  Intron number 1 from transcript GRMZM2G541168_T01 (locus G RMZM2G541168) derived from phytozome v7.0 (chr-ID 6; pos 5 3005572 to 53006579)
ctactgaacccctggatccactgtagctggctcgtctactcgcatcaatacaaacaaacatggtatggcagaaattaacatcacaccaaacagtagaacaaaatgcatgataatattctacgcgttgtaacgagatcgtaggaacaagaatcactaaattcgattttacggtttctagttatgaattttcgaagttatttagtacctagaatagagtaattcaagtgaataattttaattcaagtttcatggctaaacagtggtactaggagatagacaatattaaaacaaaattaatgccactggaatgaatcaatttggagttaaaatggattaaatattaattatacaagttttggaattatttttgtattaaaaatcaattcttaaatttaattatctgatttttctgctctctggactacgcgccaaataccaaagagtttcggggctaatctataaaaattccccagactcagagttctttcagggtggacctcgggtttgattctgtaaagttcagggacttatttgtaaagcgcctgcgccgaaggggtatcccagcatgtgggttgttggatcgacagtgcacgacccggattaaaaggtcgagccaaatgagccagtgtcctattgatcaattcgtagccgcccatcccgtgatctacgaccacgattttaaattacaagatctagcagtacgcgttcgatctcagatcgacgaccctcgtccatccaggccaaccattgatttaatctagatcgttgatttcttgatccaccaacatgacttcttcttctacctcccgactcggctgggcaacgacgccgcgccccagggcaatgcccccaccggaaccagatgaagggcccccagacgctcacaacacggcgacaggggatggtagcccccaagcaaactcccacaacaagcccccaaaaccaaaacccaccgctgctaaattatgcatgggacatggtgattatgagggggggtccataccaggg

SEQ ID NO: 5421 - DNA, 959 bp, Zea mays
  Intron number 1 from transcript GRMZM2G089021_T01 (locus G RMZM2G089021) derived from phytozome v7.0 (chr-ID 6; pos 1 27899454 to 127900412 reverse strand)
tggtcgtggtgaggagctctacccttactcgtgatcgtgaaccgcttttgtgtggttgacgtgtccttttgcccttatagtgtggtggtgtcctgtaccaagaattggttggctttgatcattttgctggtacccgtcatttgcttgtggacggactcaatggaagataattcacctgacctcctctagattgtttaccttcactctgtaattaagtagatagtcttggtcctgtgtttcacgttcccagagagagaatactagaaatttaggatggctgtccaaacatgactcgtaataattattttttgtctggaccaggaacagaaaccatcgacctaacaaggtactaataacctgaaattaatcagtgtacaatattttcagggaggtctaggagaaaagccgaggatgttcactaagccgtataagattatctgagcactgtttgtaaattgtataaatatctgctggttaggccacctatatcatagggcatatacagtttgtagaagtgcctttttgaagcgggacatttagagctactcagaatgaaatagttttgtctagagcatctaacagttttaaacttaaatacagcattcacattttgtccttgtttgcaatcttgtggtacggctctaaaatataggcaccaagggaatcactaatgtgttgcttgattcatgttttatatgtctaggaatagtattcaattgagaaatttgctctgcactgtgtctaattgatactatgggaaatgcatttttttaaaaaaagaaatcattgattatgttaattagtttttcgtattattatcgttttgttgtcttaacttcctataattgtctgagatgacttcctagttcttgggtctatttgagctggtatatggaatttgataatgatttcatatctcggtaggttgaagatattgttgacacagggaatactctgtc

SEQ ID NO: 5422 - DNA, 951 bp, Zea mays
  Intron number 2 from transcript GRMZM5G822842_T01 (locus G RMZM5G822842) derived from phytozome v7.0 (chr-ID 7; pos 1 35819707 to 135820657 reverse strand)
cctgctggaaccaaggtatgagaaatcaatattatgttattgccttttaacgtattttgatttgaaattaactgcaattttttctcattgtcttttctaccatgtcacatattttacttattttcacatggtatgatggtaaaaaaatattgcattgcatactgccatactctgttgtgattgtcgattttgttaattattaaaatggcatgttatctttttatttttttagatttatgctgagattcaattaattattctggctctgaatactcattgagacacatatgtggttcaatccattcatgaacttatatttttttgtggttttttcctgtttattagtctgtggtctgtaaggttttcaggcctggttcccttataaactaggccaatttgattctttttaattgaaaggtagagctgttaccattactttaggtagataaacaacaagaaaaatgtttgggcattccatccccgtgtttttcctttttttgtgggtgggtgttgaaaagagtaagtcgtgatgtatcacgagttgaaagtacttaatcatctgctaggtgctaccatcttgcaagtgttttcagctgcatgaatgaaatcttatttttcttatgaaatggatgttttgtgccttcttttagcagtcataattatttagttttatctctttactttcttttctcaaatccatattctgatattgtaaaatgggacagactttcatgcggcaaaagatcactctatcctctgcttctccctctcatccgaccagagaagaaagcaaggccagtgatgtaaaggtcgagtcagtccagtgtggaagtgaacttagagagttcggggctctattttctgaatgtaataatgccaatacaattggtagataaattcaaattacgaagttcaagttaattattttctttaactttgcaggttctgaca

SEQ ID NO: 5423 - DNA, 759 bp, Zea mays
  Intron number 2 from transcript GRMZM2G133802_T03 (locus G RMZM2G133802) derived from phytozome v7.0 (chr-ID 3; pos 4 7738281 to 47739039 reverse strand)
cagaaaggaggctgagaactgcgactgcctccaaggttcatttcgtttttatcatactgaaatgcttgctgttgtttgccttttgacctgaaagtgtactgttaattatgcttatgtgattgctctgatgtgtgttagatgtgatgagagcactcaactttatgctgttattactcttggaaggcacgattatttagccacaagcatgcttgctttctattctacttctaattggtggtcacttggttgttggccagtatttgcatctgataagcctttgtattctatattgttgaatataattgcccatttatcccttgtcctacggtacttgtaggattcatcattttaggccaccagattgttatttttactgttaactgcagtcacatggcacatgagtttcttcaccaatattgatttgtattagttttaactacaaatgaactgcatcgacaaggattaggttttctacacatattgtttatagtctgaccctgtttgattgatttcatatatgaaagacttcaaaagtgtcatgagggatatgtgattgacacccgcaataggtattttcttatgtgatattggaccacacattgcccttctcttttgtgagagaacaaatttaggttgtctctatttggtttgtgcacaggtttactatgatggtaacattcaggtgtccttagtctcactatttttcttaacttgctgtaatcaggcttccaagtctgccattcccttggaggaggcact

SEQ ID NO: 5424 - DNA, 1063 bp, Zea mays
  Intron number 1 from transcript GRMZM2G439201_T01 (locus G RMZM2G439201) derived from phytozome v7.0 (chr-ID 7; pos 1 71632211 to 171633273)
ctctgtctctctagggtttttgattttagccgccgccgctgctcatctcacatccctcgagaagacgcctgctcctcgccgatcgatacgatggccgtcttctccgacctccacaccgccgacggcctcaagtccctcgaggctcacctcgccggcaaaacctatgtgtctgggtgagcgctgttagacttgttgctagatctgctgattcgcatcgatatgatgatgaccgtgatatgggatcttgtcgtttttcgctccaaatggcaaatttctcttgtgatgtcgatcgggttgcgtttccttatagtgcttgtgcttgtgctgctgcctgtgcagtgactccattactaaggatgacattaaggtcttcgccgcggtgccgtcgaagcctggcgctgagtttcctaatgccgcccgctggtacgagaccgtctctgcggctgtagcctcaaggttcgatttgtttctctaattgcaaatttataggtgtagtgggttgatgtctttcactggccgcaggttttatttatttcactgattgcacatttgtaagtgtcgtagattgacgcctttcactggttgcagattccctggtaaggctgttggtgtaaatctgcctgcgggatcagctcctgcggcagctgctcctgcggatgaggtttgttctccccatcccaagccatactgccacatctcttttttatttgtttacattaatctgtcttattggtcaaacaatgggccagtgctgttctgtttgatttagcatggtacaatttttcattgattggtcaaacaatggggaagaaattccagttgatctatgcttattttttattccattaaatatcaacctatttgtcgttgtgtgattaattgcatgccaagtatgctttatatcaatgcttcttttttgttgtcactgtcttctgcttttaattctcgacaggctgaggacgatgatgaccttgatctttttggtgatgaaactgaggaggacaagaaggcagctgatgagcgtgccgccgctgccaaggcctcttctaaaaagaaagaaagt

SEQ ID NO: 5425 - DNA, 530 bp, Zea mays
  Intron number 3 from transcript GRMZM2G089365_T02 (locus G RMZM2G089365) derived from phytozome v7.0 (chr-ID 3; pos 2 7393639 to 27394168)
ctgctattgctcaggtaacaaaataaactgcaactgtggaaacatcttgcaatatttttttgatgactcatggagctttggtgaagaacctatctgcattcgtatgggcacacattagtcgtgctgcagttactgtggatagaaagacgtattttaacggggctcagaatttgtttgttgttcaacctgaggtgtttataaacatctaatacatcctgttccaaactataagacgttttgacttttatagattcatagcttttgttgtgttcttagatatacactatgtctatatatataataaaaacattgtatctagaaaagccaaaacatcttatgatttgaactgagggattatgtttaggtgcgcagcaagcttaacaagttaatatgcacttctagtttagctgacgccacatatgtattcttgatttcttgaatgaaataaaaaggaatgatatattgtaatatttacaacaaactcttacaaacttgtttatcatgcttcaacatgaataatctacaggata

SEQ ID NO: 5426 - DNA, 583 bp, Zea mays
  Intron number 3 from transcript GRMZM2G329867_T01 (locus G RMZM2G329867) derived from phytozome v7.0 (chr-ID 7; pos 9 528682 to 9529264)
tttgacgacaacagaccacattgtcagatcaagaggttcgtttatctattttctctgttgtggttacagtccacgctatgttatcatgatttattaagtgtcgatcaaacgttgtaattcaaagtctgaaccttctttctaagtccgttaggaggtatggcctatggctagttctcctaccggtatttcctttgaagatgaatacttcgaatgttatccttttgacctttttgtgaagactgatgcagtttttactaatgaaacaaacaccaactatatatgacaatacaagcatacaggggtgtgcatgtctacatgcagattgacagtacaaactgaaaatggcaaggaagaatgtgccactctattggatcagtgattgcgtttcaataaatttgaactttgttctgaacttaccatttcaatctaaccttctgaacttatctccctttgcatctgttcctgatagatttgactaaatatcattaacctgctacatgcatgtttttttgttgctggtaatttacttctaagcttttattttacaggaatactgcttcttggggaaacattgtctcgaatt

SEQ ID NO: 5427 - DNA, 581 bp, Zea mays
  Intron number 2 from transcript GRMZM2G162497_T01 (locus G RMZM2G162497) derived from phytozome v7.0 (chr-ID 6; pos 1 00086923 to 100087503 reverse strand)
gcggcatttggatcttgtcttgcggtgtgtgtttccccttacttcctcacatttataaccaggattattaatgcggtgtttttattttctttaactagattaggatcaatttcgagattggctaatttgaatttcaatattcttgttacatattccctgttcttagggaacatgcttataacacgatagcgaagtcttccaattttgagaacaccaaccatggttcaacttgtgggcctcataaaaaaaggccagctattttcaaagaaatatacatcgtcagcagcagcatcctaggccattgattggcacaatgtaggtagctggtcttagagaccctttcttgatccagcagtgaaaaagtatgccttaatgcgatgtaaactagttacatacctaaaaaactgcaagtgtattggttggaacttgttttttgtattataatataatcaagattgcaaaccaatttaacttcaaatttgttgaacaacacaattaccctgacagaagctagcatatatcttacttgaccagactgccatgatttacccttcttaacctctttggtgatagatattctt

SEQ ID NO: 5428 - DNA, 959 bp, Zea mays
  Intron number 1 from transcript GRMZM2G467134_T01 (locus G RMZM2G467134) derived from phytozome v7.0 (chr-ID 3; pos 2 29557101 to 229558059 reverse strand)
atccacacgggcttctgtacgcttctttctccgctcaccccctacctgctcagcatccaatcctaccccttgttgtttctttgagatttctaataatgattacacttggacgaattatgtgcggttcatgtgagagcaatatatttaggaacaattggatctataccattaaaagatccaaactttagatatataccatggaccccacatgtcattgactgatgtggacccacatgtaagtgagatagtaatggtatggatccaaagtggtgatcttttaatggtatggatccaaatttcccatatatttagggtgggtttgttttactcctagattatataagttggattatggtggaaggtagaagagtaaaatatcacattgtgaccacaaataagctagtattaaatagcttattttagcttatttgtaatctcaaagtgatattttacccttctatctttctaccacaatccaacttatataatctaatggggaaacaaacaaggccttagtctccatttttttggggtctgtaggcacctttagtcagattgggaaatgttcagctgcgccattgcaattctgtattctcctggttccaattggcatttgcactttttctgtcatccaaactcagtacctaaatctagcattaaacatcatatcttgaatgactaaatcatagggaagttataagtgctactaaattacctcaaataactataaaaaccgggctgatcagtgcatcttctcgtcaataacaatccaaacatttgatactttggtggccacataaatagttcaagacaagctacctagtaccattcatcgtgtcgagttcatttagttttctccattttcaccgtcgcatcagaatgcctctcttttaacatatttttctctatggttctatgctacagacgagaaggtaactgtcttggagtcagaaaaacga

SEQ ID NO: 5429 - DNA, 622 bp, Zea mays
  Intron number 1 from transcript GRMZM2G001566_T01 (locus G RMZM2G001566) derived from phytozome v7.0 (chr-ID 3; pos 3 238363 to 3238984 reverse strand)
gaagggaaggtaatgcagttgtgtctctacgagaaagaaggcagcaagagcggcaatagaaccgatgagtaagctgcaagcacgctgattcgaaagtgtctacagactctgaaaacagaattacgtaccaatgtcttgtaatatgagttcctaggtattgcatgttagtcaatctgatccaccaaagattttggagtgtaggattcggtctatgggccatcatttgttcacgacaattggtgacccagttgagaaagccatatttgtaaagccacataagctaatttgtattctaatatgttggtcgagccatattttctaacttaatcttaggcatggcgatagcctagataactctgtttctccccaaaaaagtacagttccaagaaattgatgtgcgacataatgacaggtaaggaagcgccacaggaccacacccaatctgaaaagtctacctgaattatttgagtgtgtcatatcttatctctgtttttcttttcattcccttgttctttttccaagaataccatgaatgagataatatacatggaggtgtatcagaaacagaccctatttcttttgttaatgcaggtgtaaatcagggccctcacaggaaaggcac

SEQ ID NO: 5430 - DNA, 660 bp, Zea mays
  Intron number 6 from transcript GRMZM2G136803_T01 (locus G RMZM2G136803) derived from phytozome v7.0 (chr-ID 7; pos 1 71700506 to 171701165)
aggtaatgcaatgagtcatattcttcatacaacgtatcagctactcaagagtaaattgcaaatcacaatataaatgtccctattttgtattgtcaattgttggtttgttttctaaaatattactctctttgtaccaaagtaaaattcgttttgcttttttataggattcatacaatacttagtgtatgtgttctatatatgtgtctagattcatcatcatctaattgaatatagacataaaaatcgagagataaaacaaatattattttggaacgaagggagtactagttactttgatctcactgttggaatataatataagcggattgcccacccctcctatcagcttaagcttttgggttgaaatggttattgcgtccactataacatgatatcaaagctagatgtctcgagttcgaatcctagttagcagcacataaataaaataattgtttttgttcctattccacgtctgagacccatgagaggctcaacgtgagtgggagtgttggaatataatataagtgcattgtccacccctcctatcagtttaagcttttgggttggactgattgatgcatgcaacttaatactcacatttttcttctttgttccacttgtatagtttaaagaagattgcaacacagagaaaaagattat

SEQ ID NO: 5431 - DNA, 988 bp, Zea mays
  Intron number 1 from transcript GRMZM2G086022_T01 (locus G RMZM2G086022) derived from phytozome v7.0 (chr-ID 3; pos 1 21426408 to 121427395 reverse strand)
ggccactccaccgcgctccagcagaaggtgcggtgcccccctcccttgttcttcctagccccgatctgatccgctctctgcgttagggtatgggtgacgtggtggcactcgatctgctgggttcggatctgattttcttggtgacgggatggcttgccggcgatggtgcaggccgtccactccaacgacccctccgtgcagcttgaggccaccacacagttcaggaagctactttctataggtgagattggaatcttatgtgcagttagcattccggatggatagagtttaggggttgagattttggccatgctcgaggtattaggccatacccaaacgtgagggtatggtcagttgtagctgtttcgggtaattgttgtatacaggacttgacttgtggattgcgagctatcaaaattagtcgttgcaccctctcattttcagattacttaatttactgtctcctcagaaaaaaaacaaaccctatcctatggcctttgcaacatgcatatgaccatgtatgcccaaaagttctgaaaaaagttatactcttgaaagcatttgatttcatgaaccactattctttttttccagtagtgttctgcttgcagctggggcaattatcattgcatccatgtgtgtgtttgcgcgtgcgtgtgtgtgttatacattgttctattgtcttaaaatggtatgcagactatgtgtgtgtttgcgcattagtgtgtgtgttatacattgttttattgtcttaaaaagatcatggagagtctgtgtacctcttttcatattcttgtacatcgtagatagcagctttgatatcttgtgggattcttgtatttgttggtgaatccagatgagtgcacggtacttctttcttaattcccactacaactttatgtgaaagttaagtagtaacttgctgattgagtttccataaatttctctcgtagtcccccaatcgaagaggtgatcagcacaggagtgg

SEQ ID NO: 5432 - DNA, 1008 bp, Zea mays
  Intron number 3 from transcript GRMZM2G059393_T03 (locus G RMZM2G059393) derived from phytozome v7.0 (chr-ID 3; pos 1 40559343 to 140560350)
caccagattgcgttgtctcatcatccttggctccggtgagtctattgcgatgttgcctgtcaaataccttatggacaagttttaggtacagttgcctggtatataaaacagtactcaaaggtgtaagtgcatgcatttgtatggagatgtggcaatactgaataattgttagtaactgcaagttcatatgtgagttgattttcttctatggtaatgaaagtacaactcttggtgtccgtatatgggaattgccttttcactgacttgatcatggtagactgtcataaagagatcatgggacaaaatcttgtttcatccagaaacattatttctcccagtcaagtgtagctttcgtgctgccgcagttctgctttccagaagtcggtctccttgtgcaactctgataaccctgaactgagtcaggagttcccttttgtggtctctgctatccatttttcatctgcagcttctattctaaggagagcacatttttttaataatatttttgcattttggttgacttccttcagtttattctgttcatgtgcaagtgctatcttagttgccgatttgctagtggtgcagtatattgttttagttgcatattcattcttgccctatttagcatgtattggctgtttaatagcagtattaaaactgtcaggatcttaccattttactgtttataattacaaaacacacttgtatctctgaataataagtatatttatgcttttctttttcccattgggaaatcctattcttttttaacacatctgatcactatcaaatagcacatcacttgcattattactattttctggactcgtgtgcacactcttgcaagaacatttggtagtttctttgagttatcaagtacctaggttgtaagatatgtagcttgatgaaacatgtattgttttgtattttggttgttaggagggcataccgcagaaatgatgaatattgtaacaacgcttcagaaggataggttcacaccaagatatt

SEQ ID NO: 5433 - DNA, 780 bp, Zea mays
  Intron number 1 from transcript GRMZM2G416484_T03 (locus G RMZM2G416484) derived from phytozome v7.0 (chr-ID 7; pos 1 48854701 to 148855480 reverse strand)
gacgacgacgacggctgccctctgcgttcctcaaggttagcgatctatcctatcctctcgcctgtatttactactacttgtgtgcgttcctcggtgggttttgtttggtcacggcggcggaggggtgaatcggctggtctcgtagtcaaggctgcgtcgtttcgcgctcctgctttcgaactagtcaccactcaaaattctcctctctcttctctctctcttttacgatcggtacacggcgatggatggatggagtggctcaaataacatcatggacatcagtgctgaaacctccggcgtgatgcctacctcccctcatggacatcccatcctcccaccacctgccttggcctgcgaatagggcggatgtaaataggtattttaggtggtttaagaaatgagtttgtttttggtgggttgtgatgagttttaattatgaacatgttgggttgggtgagtttattttatattgcgggtcaaaatggtttatacccatgggtatagatggatttgtataggtatgagcttttatgggtcttcaccaatcagactaccaccctaatcagtatcattttattttaggttcagaaaagtctttgatttctttagtcgcacgcaacacactatacttatcgctttcacgccatctgcataatccagtgacataacagaattgcatccagcacactatacttattgcttgtttggaactttggatgaaaatttcatttcattgggcgtctctgccttgtcggctctctacaggctgtacaactacta

SEQ ID NO: 5434 - DNA, 979 bp, Zea mays
  Intron number 1 from transcript GRMZM2G034079_T01 (locus G RMZM2G034079) derived from phytozome v7.0 (chr-ID 7; pos 1 46470776 to 146471754 reverse strand)
ccgcctcgccctcgcagaggacgctggcgaccgaggtacgcagctagctacgtagtgcgtcacgcgggcgttcttttgcgattcggaatccacatgacaagagcactgcggcactacctagctgtttgccactgctctctagcactacggtgttccatggtgtggtggagtgtcaaacattctggtgctgcgatcgcagttgcgctcgtggatgtcgtgacaatcaccgaccagatatatagtactgctggcgcttattccaaaaaattgatcctgtgccgctgtgtggtcatcccattgtcaatgagcgcagtgtttggcagagcttggttcttaggaaggaaggagtactaggcaagatagtttttcatatcttgaaatgatgctgtccagtcactttaggacacaactgattgcaagtaggaaaagaaaacacgaatgcaatctgtgtttttaaaccttttattactgtacacattagcattactgcactatcacattgaataatcagcacacttcagtaggatgccattggtcatgtgagctgtcagctgtgattcttgtcctatttgttatggacgggatgcacagttcaggtttattcttgattacttcgtgtactgtagaaaaactatacatgaaggcagaatgaagagaatggttaatgagctgtggatagtcaatttatatcatgtctccatggtccacattggccagtcctacaagctctaattgtggggttctatttttaattcaaacccatgaggtttttaattcttattttttaaccactcagtttcctcctcctgagactttagacgatggatatcgtaactaaaagatcaataccactagtctgtccacttaggtcattcctcaaattgctatgcagcttgctatgttttcaaatttttacgtgaaactatttccaattttttaatataagtacatctggtctgtttgtcaacatcttcagggg

SEQ ID NO: 5435 - DNA, 750 bp, Zea mays
  Intron number 2 from transcript GRMZM2G384897_T01 (locus G RMZM2G384897) derived from phytozome v7.0 (chr-ID 6; pos 1 05307056 to 105307805 reverse strand)
acagccttgggttcagatctgtaagcagacatatatgcagcgggtcacaaccactgagatattgcagggcaatgacagtcttgggttgagatttgtaagcagacatatatgcccgataacttttgactaacatactaatattagaaagatgagatgttcatatttgcgctttgttaggtggaatattataatgggaaattggtggactgcatggaaggtgaaacactcacatgcacttctttatttcaccatgagtcatagaacaaacaacatatgtgccatctgtggagtctttgttttatcacctaagcaacgagcaatgtttatttgttaccaaaaagcactttctgtatcttcatggaccatgatacttggcaaattggtatgtaggctttattttagaatttaatcattataaggtttggtgtaaatgtaaaaccagacaatgttttttggattttttacaattagatagcttgttttcaacatacttggctacacaacaaaatcccaatgtatatgctggttcatatttgccagttcctttttttgcatatttgtcagatacccgtcggacccgcgatgccgcgtgtgcagcagcagcatgacaccccgccgcggggaggcggcaccccaagaagtgccatcgtagggacatggattccccatcactgactctgacccctgatgcatcatgctggtcatcctcattcaggcggccgctgcggcggagtgcgcgacaggtgaagg

SEQ ID NO: 5436 - DNA, 468 bp, Zea mays
  Intron number 1 from transcript GRMZM2G177451_T01 (locus G RMZM2G177451) derived from phytozome v7.0 (chr-ID 7; pos 4 4830563 to 44831030)
tccattaagagaattgtctagcaacacccttgaaggtatatctactaataaaatgcaatatttgatctctcaccaaggttttaaaaaggaaaataacgatgttcatattgtgtagatgaatgtccagagatacctttcagcgatggaagcataattgatttaactaaatcgtgtgataacactcaaggtgaatatgtttgtttactattgacaatggagattattaatgggtaatatatgatggttcaggaggtcgaactgatgcgagacaatgtaagagagaaagagaaagagcacgatatgcggcgatgagtgttgaaaaaaaacgaattgaagaaccgtcgtcagtcacgcaaaaaagagaacgttgttcaccatgagtattcaaaaggtaaattaaggctgcttgtgcttcactcatctttaaaataatgcttttcttatgtgttattgggttactttgtgtag

SEQ ID NO: 5437 - DNA, 788 bp, Zea mays
  Intron number 5 from transcript GRMZM2G074821_T03 (locus G RMZM2G074821) derived from phytozome v7.0 (chr-ID 3; pos 2 11381328 to 211382115 reverse strand)
tttggactcattctgtcagtaagtgattcatgtgttttttttctagtttattttgattttatgtggcacttaggcaaatgacttgtattagcttcttttcgaattattcattccaaaactagacacatcttggtcgcaataagtctgatgaccaggcaatttttccatcattaaatttattgtttcaaggatttgaacattgttatcaatcagtttgcatttttcccatccaaataaccagaacacatatgcctttttttcttgtgcttcattatatctatacatggttttaaatatctcgaagcaatcaaatattagattctttttaaggaactcaatcatgtaaagtttaagtgaaaagtatgagctcagaacatgaccttgtaattacaaatttgcccatggaaaggtatgctaaagtttaaaaagataaaatcacttgtttatattgaatcatttattctgctatagttcacaacaatggatatactgtaggattacaggatcaaactgaactgttactttagtctacctactattgctagtgggttagcactaggtgcctcttagatcttgttttgggtgtcaatattatgcaattgcacttccattgtgagccggaaaccatgttcaacttcctttctatttaaaactgaggcatgcctttgctcggatattgatcatttattgtgtttataggaggtttaacaagtaatgatttcatccttgctgcgaagatcaatcatctcactttagacggcattataaggaagaaagctaaatagcca

SEQ ID NO: 5438 - DNA, 446 bp, Zea mays
  Intron number 1 from transcript GRMZM2G025758_T01 (locus G RMZM2G025758) derived from phytozome v7.0 (chr-ID 3; pos 1 92907169 to 192907614 reverse strand)
gctgcgtcggtaccatccttgcgctccagcaccaggttaatgttaccacgataccacgcatgttggcacacccaaaataacgccttctccacctgctcagttaatttgctttgcgtgctcaatattcactcataatcgctgcttacgattagtttcatggccatatttttagatgaaagtttcaaggttataattagtccaagacgacgttatatggccctaataattttaagtattattgatgtcttaacaaatttaaaaggcggaattcaaacaagtagcatagttcatatctaaacagtggtcaccaatctacttgtgcattctcactggcaacctgtttcttgtttaaagaaaaaaaaaacggtagtccattgatcttcgttctaaacagagctctgtcaacaacaggtagcactcgtccaagccgagctcaccattgcgca

SEQ ID NO: 5439 - DNA, 687 bp, Zea mays
  Intron number 2 from transcript GRMZM2G117298_T01 (locus G RMZM2G117298) derived from phytozome v7.0 (chr-ID 6; pos 1 44864422 to 144865108 reverse strand)
cgtaaggacccaccataacagctttaagttacatttgtgcatatgtactttgtatggaagtatgatcttacatactgttggccatagactgatatcaggtcttctgtgtgatactgatcatagatgcaaactcaaacttagctgagtcaataaactaatgtcactaggaaatgtctaaatatgatctttaaccatctggaacaacctgacatggtttatggtcagctatcttctttggtatgtaagcaatttacctttttttatattatataagaattaataagcataaacctctttatctctaaatgctagacttatgttttctcagttgtcatttttgtatttcggatggatttcatgtttcccgtagtacttttttttgttaaaccaccagttaatagggatgcatcaatcaattagttgcaacagtcggtagcctatggtggaatttaataggatagtaatgaggtgaggaaaggtcggcaagagtcagatgttgatggccaatatgccccagattagtaagtgaattccaccctgactttggaaaataaacttataatggcacttcaagtagaaggaagatgatattattgttcagggttttgtttattccataacaaatgtaaactgaagaaagttttcgaataacttcttggatatattttatttgcaggtttttcaata

SEQ ID NO: 5440 - DNA, 521 bp, Zea mays
  Intron number 2 from transcript GRMZM2G075794_T01 (locus G RMZM2G075794) derived from phytozome v7.0 (chr-ID 7; pos 1 53252266 to 153252786)
gcttaacaatcctcaaaggtcacactagcgccgtacctcggagtccggacttgatgtttaaaagctggaagaaatatgcagcctctgtttagagaaaagggacagacagctaagtttcagacaggatgggagcgcaaaattctccatgtactgggattcgcactcgaagctcgtgattttttttgggcgtcatgtacacaattacagctttgatatatttttcttccttcctgaagccaatggttttgaagtgttgttctggcccttcacgagagtgacttgtccaagagatacaaaccgagatgtgactgaagtttctttcatctaggactctggaaaaggatgtcaccatgtttcataggggagaagtgagataaataagctcggcgacggacaaaaataaacaaaggttatcagcattgacacggcctgtccaactaattaatagtctcgtgatcccatcaataattccacaaaaaaatacaggccagaggcagagccaggctgcagctgcaggaggg

SEQ ID NO: 5441 - DNA, 1058 bp, Zea mays
  Intron number 1 from transcript GRMZM2G068690_T02 (locus G RMZM2G068690) derived from phytozome v7.0 (chr-ID 3; pos 2 16844060 to 216845117 reverse strand)
agaggtcatcggcgctacgcgagcgcactgcctgtgtacgtatctcttctcgtctctctcgagctctgcgcttggtctggtcggaggtttcgtgagcacaaagttcttgccccgtctctttagtagtatcgatgcttgttctcaactttctagcgtgtgattaagctggggacggccctctcagtctctcacggtgaatttggcggcgaatttggtgggtatttgtggtcttttgtagcatgaacacgaggagatttcggcgagctgctgaaaacgcggaactgttctggttttttttcctgtgtgaaattcgagtgccgaaggacgatcctgtagttccaagactctaagctcgacagagatgttcggtgaaggctgttggcctggtctctgttctccgcacttctttctccactcgtgattctgcgctgtgattttccgacgacgaggagtgaagtgagcccctctttttgtgatgtgatgtcgggaattttacggggttagtagtgctttgacgtacggtatattccgcatccgattttcctgttgcaggggagatttgtgatggtctaaaaacgaaaagtagaggaaagggggaaaaggggacggatgctgtctggtagagttgttacttgctgccactgccagaggatccaagagtattagcggacctgttttgctttggcgaattcacttataacatgctcccggcatgcgagaagtgacagctgatttcgagtttcgagtagagtaaatttgttgactaatactattgtttagtcaaagacgcatatctttttcttgttttgttaataatgattacatttacattacttcctttgtctacggactaatcgtcacaatactaagtttttgttttttcatgtcgaattgattagcgctttccctttacagatttattagtggttaaagtatgttctttcgactgcattaggttgtagatagttccttgtttcaccttttctccactaatgtctttagtgatatcaaatgtttcaacagttggccttttcctactggaactgcagtactttgaa

SEQ ID NO: 5442 - DNA, 950 bp, Zea mays
  Intron number 3 from transcript GRMZM5G881803_T01 (locus G RMZM5G881803) derived from phytozome v7.0 (chr-ID 6; pos 1 47444979 to 147445928 reverse strand)
ccagaagaaggtgatcagactcttggaattggaattttgatgtctgttacaattatttttgtttttgtttgagccgtggcagtgggttagatgaaagttagtaagatatgatgttgacttgcatctccatagatggaatgccacatgttgggtagaccaactaaacacaattttttttttcagttttagaacgtgttgaagtcatgttctgctgtcaatttctaattttctatgtttgacgctttgagctggcttccaagttggaatactataattcaggtggaatgacaggtacatgcgacttagtagtatttgacaccattgacagaaaaggagggttgtgatggcgcctgtgtctaggataaatctgtttatttctgttagatgagggatttatttagacaattgagactgatgattacagtagtatgttttttaaaggaggtcagatgagcatatgattggttaaaacattcaagtttttttatcattatgtgcttgcttaagatgttacttctgtttagcgtagtcttaattgaaaacaaccttcctacacacttagttgttgctacctttcttttttttatcatagctgataatttcatacttttctttttctctctattaactcgtaatgttgcttgaagatttcatcaatagaggtgtttctttaattttaatgatgtatctaaggtcctatttggaagcaattcagtttttaagaaaccaatttttatcttttagctaggggagaccagcttcttgcttcttggtttttaagaaactgagaatctaatttctataaactaggtcataaactggtatgtttgaaaccacctcaatttctataaaccagtttcttaaaaaccgggtgcttccaaacagggcctaagttgtgctgtttgttttttacagggaaaagttccacttttgtcccttgaagccataca

SEQ ID NO: 5443 - DNA, 1023 bp, Zea mays
  Intron number 2 from transcript GRMZM2G124732_T02 (locus G RMZM2G124732) derived from phytozome v7.0 (chr-ID 7; pos 8 9157820 to 89158842 reverse strand)
aaggcccagatctgggacactgctggccaggagaggtactcaaccgtcctcttccccttccgttttctcgatctatttagtttcctggtctgctatgctaggcatcatcgtgttggatcgaaaattagctacatagtattcatctaccccatgcaatgcaatgcaacgttgtcctagttaggaccgcgcaggacacacgacgagtaaaatggtcgccttcctccttgtgcaaattgcaatcgtccacgccttgttgtcctcctatatgtagtcctggatttacattgattttgaatgttaatagtattcatgaggcattctctgcttctatgaacacaacaaccttgcaatcgcaatactcttgtcctcatagttattccaatttctaccgtcgccgtccacaaggttccccgtgtcgtcatgtcctgtcattgtcatatctggtaatatgttgggtgattatacgttttgtactgccctcctggctgcattaaaaaaatgttctgttgcagcagcctctgtaggtgatggaaatgggcaattaggcaggcaactcttgtttggtagtctgtctcactgtctctaaattaaccttatatggtggcacttggtcagctctcctgcaaaatgtaaattctgcagttgttatctggaactgaagatattctaggactgtttcctattgtttgtgcagttccatttctgtcttcattttttttgtgtgatgcttcctgccaaatagtagcacctgatgtggaatgtaggccagcctttgtttgactttcgtttaccatttccataagaatataatgctgattttgtcagcatgccatcaaattacgttctgtgtaaccgtctccaatgtgacttgttttatttggtctgctcagctgtatatttcttgcctaatttcgctatcgaattttctttggaactttcagtatttcagtggagcttaagtttgtcatgcatcatcctccccctgtaggtatcgggcaattacaagtgcgtactatagagggg

SEQ ID NO: 5444 - DNA, 854 bp, Zea mays
  Intron number 1 from transcript GRMZM5G866954_T01 (locus G RMZM5G866954) derived from phytozome v7.0 (chr-ID 3; pos 1 75693825 to 175694678 reverse strand)
tgagttcccgctacacaaggggtggtgccgtggtggtgagtggttttggtccggtttcgatctccctaggttttggaggatttgcttggtcagtcagtgtgtgtggtgactggtgagtggagctgcggtgaaggcgggggcgttcctggccagatcggtaggtcgtatgcgctgattcgctggatacggtgttgtccagggcagatttctggaggggaatctggacttctagcccttttatttacttgcggagtcttccttctgttcgcttcgctggttacattgcctgacccgttgacgagcgaatcctttcgatttctacacttttaccgtgcgtatttcgtgtccaagtttgtaccaaactaaacatttcccgaaataaaataatggatccttgtagtagagtcgtagtttctacgctggtatcgtttggttctgtacgtggcggtatttacccggcgaaatggtatgtatgtcaatcaaccactgcgtttattctgctgctacgtccagaagctcccatgcgaattgggcactcacatgtgcccatgtttgtgtagcttaagctacagatttcttcggttcaaagtgatgctcgctccggacctaacataggttatggagtcaagtcaaaggtctccgcttgcatcccgaccaatgatggatttggaacctgatttagtttcttgttaggctatgcccggtagttatgatgtctatgtttaatcaactaaaaggtgtgatgatgcggccatatgccaatcaattccatccatgttaaacattctctcattaattattttgttttttttttcttttgcaggggcagcttgtagtggctgtttcttttgcat

SEQ ID NO: 5445 - DNA, 795 bp, Zea mays
  Intron number 1 from transcript GRMZM2G178602_T01 (locus G RMZM2G178602) derived from phytozome v7.0 (chr-ID 6; pos 6 6348534 to 66349328 reverse strand)
accaccacctcttccccaaggccatctcccagctggtgcgtggatctctgatgtggctgatttagggtttaagctccaactgtatacggctttaattcgccgttcatactggtacattagcctggactagcatgtaactagttagttgtgtttgtagatcaataacacgtttgatctgtctgtgggtactccactgggacagtgagacaagcaactgcactgctgcaaagattttatttttggcatatgtacataggtgtgttaagatgggagatctttgctttgcatttgtttcattttcccaccgagtgatgtctatcaagttgtcccaagtgctgatttgtttttacccaaaattgaatctaggtgctgtggaaccgctgtgaaatttaggttttgcaatctgaacaaaggctcaagcccattttaactagaaatggtcacagtggttgttgggtttgtaagacaacaagtcaatgaccctgagcattgggggttctctgaaatgggcacagtagtttgtgggtttgtgcctattaggcattagccccaaatgttggtggctttgagaaatttactctgtattcttttgttgcctattaggtttacatataataaactgtcccttgtttatacctttaagtcacaacaacctgggcactgaagaaaggggccctccatttcttatatgctgccacattttatgaatgactgagaagtgagaacctctattaacattattctgctttgtcaatatcaggttaagaaatatcatattagcgagttggagctatc

SEQ ID NO: 5446 - DNA, 878 bp, Zea mays
  Intron number 1 from transcript GRMZM2G156986_T01 (locus G RMZM2G156986) derived from phytozome v7.0 (chr-ID 6; pos 1 07756277 to 107757154 reverse strand)
acaaatcggtcctcttcctccgagcgcctaacgaggttagcagcgccatgtatcgtttcttcttgcgcgtgtgcttctttatggttttatcggtcggggctgttgataattctgtgttgtgggatctggtgtactgttttctgtaatccttagagatcagatagatgtgttttttatggttttgtgcgagcgtttgattgatatgttagcgaccaattagctggtgcttagacgtgacatgggagaattaaggttcgggttggctgtacgaatactatggtagttccactgttccagcatgactactgcaaccttaaattggttttatgcaacttcttctgtgttgattttgtgcagtcaatcaagattgttctgttcttagccaggcaaaggatgtctgtagtcacttactggcatcatgtatttccttagcttagctttaagcaacaaaaaaacactcttgcctgaaggtgaatatgatttgttctcgtcttaggttttgctgatgccagtttcatttgcttttgctttcttgtgggtcatagcaaggtgccgtgtaatttaattggttcattgccatggagtattctaaagcaatagtttctcagtgcgctaatagcatgttcaacttaatatgggaatcggtttgtctccatctttggtctgattttgtgttgtcgaattaatctgtaccatcttgtggagatggagatacatgtttgacgctttttataacatttcagaactaatgcttgcagacattgtttgttgcttatgtcttcgaattttttatttcttcttattgttgttgttatgttatgttgcatttacatgttcttgttttacaggaataggtattcaagttttgtatcaccaag

SEQ ID NO: 5447 - DNA, 703 bp, Zea mays
  Intron number 5 from transcript GRMZM2G063258_T04 (locus G RMZM2G063258) derived from phytozome v7.0 (chr-ID 7; pos 2 1273250 to 21273952 reverse strand)
ttagcatccccaaatttgaggataagcacatcaaggtaaaattgcctagctccatgagttcatcacagaagatacaacaagctacaactgcacgaatgcaaaaatgcatgccatgtaggctcgtatttactaaaactgagaaagaagatgaggtggaagatgcgtgaacgaaatgaaacacagatttttttgctcttcttactatttggttttttatgtatgagaaagagagaaaatttcttacagtttatattcaggggcatgacaatagtttctgaactattaagacaagggaaaagtgactgtgttactacctgaatattccagaacattcaataatttgcaactagtacgttcaacagctaagcataagaaataggtttccttgtttcaaattagttactaccacgcagttcaatactagtcttaggagcaatatcttgggaatttctgttgcttgagaaacttttgtccagctaaaactagcccaactaataggctatacataatatatcataccaacataaagaagtgtgatgaacgtttcttccactgttaactatttatgattttgtacacattaggatttaggaggtaggttagtagagattattttgatcatgacagttttgtacttcagcgacctgtgatactgagaaaacaataggcgaatattttgaatgtgacctatgatacttcagtg

SEQ ID NO: 5448 - DNA, 766 bp, Zea mays
  Intron number 1 from transcript GRMZM2G325238_T03 (locus G RMZM2G325238) derived from phytozome v7.0 (chr-ID 7; pos 1 42112633 to 142113398 reverse strand)
tccatcaggctcaggcttcatcgggcaaagtcaaggtgagcgtctggactgcatggtgcatgcatgcgcacagacacttcactatccaatattttaaataggagctaaaccatttagcgtccagctgatgcagaaatcagggattgaaatttccgaaatttcggttttttcgttgttgccgattttttaaccaaagtttcaatatttttctattaccgttgtagcaaaaattattttaagaataattaaatgcatttaaatccatcccgaaatttcggctttttcggtggttgccgaaattttttaaactatatcgaccaatttagcggcaaacggcctgctttaatttagttttgcgcaaaacgtttaaataaaacagctaagagcaactccaaatgacaccctatattatttctatttattaagaatagagatttttttaaaaatatcttgcacaagagtacctaaactgttatctaaggtcacgtttggtagagctcttcctctgaccggcttaagtcctggctctgacttctctaaaaacatagtcccctccttattttcaaaaagaactctaaaacgatatatttgagttaagattaggcaaagttaagattatttgagttaagacacacctcaaaaacgatatatcttagcacggagggagcatgcacgaaagaaagcacgaccacgttaatggactatcacttacatgtctgtgaaacttgcagtgaagaaaagggtccatccgaggacgactctcgct

SEQ ID NO: 5449 - DNA, 1018 bp, Zea mays
  Intron number 1 from transcript GRMZM2G061611_T01 (locus G RMZM2G061611) derived from phytozome v7.0 (chr-ID 7; pos 5 0149034 to 50150051 reverse strand)
agtttgcagtaactcaagtcaggatttgtgtgccagtaaaaaacatatataactactctactgcagataaaattcagaaacttaccagaacaacctggggtgaatatctcgtgcattctccccctttgcttggattgctgggtgcatggcctgcttcaaggagtgaaatcgttgtcagtgctgaaacaggcaaaagaggagcatgcctttctactttcttataacaaaaccaaaaaaaagagacaacattgcaaaatcagaagcaagccagggaaaatcttgcgaggaacatatgatgatataaagagaaagaaacaaagtgacagcatctaaagtagaaaaagcacagaaacatttttccttttgatccaatgaactatgtgtacagcccttctccatttcggacatttttgtcggtggctgctatggacatggttaatggggctgtgaaaggatggttcttggtgtgtcaagcaccaacttttcgtaaaaaaaaaagaaaaaatctacttaaacccttgatatattaggaggttatttaaactttaatatgccatgtcagtgaaaccaatttcaaaaccatcctaaacggttattaaaattttaatttttttctatagtataaggggtaaaatacatgttttataggagaggagtgaagtagacaacaagaggtgggtcattatcagtttcaaccaaaccaacgaagacctttgctggaaaaggtggcaactcaacagttatcaacagttgcaattcattgcaggttgggtgcaatcaacacacaagtcgggagcatgcatctgcatggactcaaacctgcagagcagtatactaaaatcacgaatgcaacctgatctaagtggtaaaagatcacaaggcaaagagatggggtagaaatagacggatcacggccggacagcacgcagaagctagaatggcatgcgaaggctacaaacacagaagctagaatttcaagagaggagcaaggaagcgaacctgttggggggaggagcct

SEQ ID NO: 5450 - DNA, 814 bp, Zea mays
  Intron number 5 from transcript GRMZM2G064374_T02 (locus G RMZM2G064374) derived from phytozome v7.0 (chr-ID 6; pos 9 9685392 to 99686205)
gctaacagaagcacgcaggtactgtggtgttgaataattcatttattatccattgtacatgacttttcctttgaattgttgtcaattgttgtccattagaaaatatatactatagtcgatgataacatatgcgcaaaggttttatcgaataatttttgtgttctcgcaacttacgtgcattgtattatactaatataaagtaggagtttctccaccttcctttcatcatgctacttcttgctgagggtggcgtgaaaaagtcagcaacaagttcctctatggtggcgacagagaagacaagggaggctctggcgacattgtggcgacgacgagaagcgagcaaggatataaatcgatctgtttctttggaaattagctgtagtagaatatttacgtgatacaaatctctattctctatatctctatatctattacgtttctcatgtctctatttttattataatggtttggaaaaatgtcgctcatcttctgctctaatctttcgaaattaggtgtagtggaatattattgccagatattgctacactacaatagtgaaattattgtccaaaattgaagattgccgtatgccttaggtcactataaaatcgagttattttataataatagttttttgttttacataagccccactcttttatctaaaagcccataaattattgtccaaaatggaagattaagagtttgtttattacttctaaattatcctttctatatctaccatatgtaccatcagcgacaagattaccccacatgttgtatcatggtttactagctagagaggctactcaag

SEQ ID NO: 5451 - DNA, 589 bp, Zea mays
  Intron number 1 from transcript GRMZM2G070041_T01 (locus G RMZM2G070041) derived from phytozome v7.0 (chr-ID 6; pos 4 0637346 to 40637934)
acagaggacgcacggcgtgtgtttccttgccctcggttgtaaggctgcaccaaatctgggccatgttttcacttgtctgagtactgctgcatttcatagcagtttccttatactttagttcaagtaaccttgtactagttcttattgtttctgtagttagcagatgtatagttcctctgatttttgtaactagatattcatagcagtttccatatacattattttacatagcatcctgttaggtgtttttcagaaactgcattgcagacacattgtccatagttgtgggatacttggaggtagtggtagtaatgtcaacttttacatgacttgtttttatacgatgtctaaatacttgcagacacattgtactttgtttgaagttttagagatgttagtaaaacaatttttcctcattgagttgggctctgtttcagactccaagtgttttattaaatcaagtcagttgataaattcttttctatgttggccattgtatggattaatgctatgttttactgaactccatttacatttctagaccaactaattacacatgataagtttttattttggtatgccagcggac

SEQ ID NO: 5452 - DNA, 670 bp, Zea mays
  Intron number 3 from transcript GRMZM2G037134_T02 (locus G RMZM2G037134) derived from phytozome v7.0 (chr-ID 3; pos 1 8179608 to 18180277)
cattcttctcgtcgcctacttcaacagcggctcaggtcggttaaagattctcggttagattcgctcacccattttcctaattaatgttggattacaaaaggtttgtgcttgctacatggcgatagaacatgtcttgtgacatgtacaactcaaattcttcgctgtaggctggcaaaagagtctgtgactttataatcaaattcatcaattgttttctagccagtacatcgtttgagagtggggacacaccaaacatgtacaactgctagttgtttgtcaaaaaataataatgtctatgtattatcatgcaatttgaaagcaaaccgagtaaccgactcaggcactgtttgtttaccacctagattatataagttggattatggtggaagggtaggagggtaaaatatcactttgagatcacaaataagctgaaataagctatccaatgctagcttatttatggtcccaaaatgatattttaccctcttacccttccaccataattcaacttatataatctaggagagaaacaaacacacccttaagtcagtacttatgctttgttcgaaaagtccaaaattaaaaccaatcagtgtttccttgtctttttgtttgactctttctttaatgaccaggtgtaactgttacaagcagagagtctgtgaccagg

SEQ ID NO: 5453 - DNA, 785 bp, Zea mays
  Intron number 4 from transcript GRMZM2G037134_T02 (locus G RMZM2G037134) derived from phytozome v7.0 (chr-ID 3; pos 1 8180250 to 18181034)
tgttacaagcagagagtctgtgaccaggtctgaaggtacaacttttttttctccctattgtctcgttttgggttgcaaatcacccgctgatgttatttctttagtcatccaaaattctgtattctcctttaaacttgctctttactgtgtcgttaaaattgcaggttcaaatattttttgttctcctgattacaaggttgcacttattgtagtttgcaattgagatgcttaattagttttacttcaatatattgtatccatggctatgtttttgttatcttagcattgttgagtagtgcagttaccccaaaatcttacagacacattctgtatgctaattcttaggagcaatatcctatggttacaatgcatttatattattctgcctccatttttactgcaatagtgtcctatttcctttgtaactgatttgatgtttggtattcttcagtaagatatgaaatatcttgcagtgcatccaatactagtaactggtgaccagcaatcaacctcatgataaatagcaaacactgaaacgaactctgctgtgccactatgatttggttccctgattcttggtaactcaaaacatatttatttttctccttattcccatatgatcaggaggaccagtagctaattttctacattaggtacatgattatttagtttctttagttatgttcacatttttctttcccaacatgttgatgggggaagttttgttctcttaatctcagactttccatctacatctgcatccaggttcttgcacatcagaagtt

SEQ ID NO: 5454 - DNA, 907 bp, Zea mays
  Intron number 1 from transcript AC233954.1_FGT004 (locus A C233954.1_FG004) derived from phytozome v7.0 (chr-ID 7; po s 13485701 to 13486607 reverse strand)
ctggtagcggtgtgaggcgctgttgccaggttctcggttaattatcccagggaatgtccggtgaccaaacaaacccgggtaattctctcatggaggtattttctgacaaggaagtaaagtgacaaggaaatctccccctttggtactttttctgggttaattaccctttggctcccaaactagccctcaggagcccatcccctcctccctcaaacgacgccgggtgacaagcaggaaaagtagtaatgacgacatgcaaactgaataagattctgtattttgaatacgattctagagatgcacgctctgttcatcaatgctgctacgttttgaaacttcaacatttcattactgctacgaatatatgtacacagtaatataacctctaagctcctcatgttgctacatttgtaaacttcaatatttcattactgctacaaatctatgtatggttccaattgactatggtagcttccttgctttctgttcttgtcttacgagtctgagctaaagttttatttattaaattgtgatgcaatgttgcatcaatgctggacttcggcatttgaagtttacgtgcactctggtttttatgttgtttactgtccatctttctcctaatcaataaaatgctttgattactattgacataatgtgaacttcgatttatatgttgtttattatccatatttggccctatccatgaaattatttgattcatgttcatataatacttagaagaatgttatgtaagcctcaaattctctaatttgagttgctatccagtttaacacattaattcaactgtctaaatgtatcgtttaaaaaaactcgcgcaaagcgcgagcaagttactagtaataaatgcatgaattgaatggccaggtttaccactctagtttcgctg

SEQ ID NO: 5455 - DNA, 826 bp, Zea mays
  Intron number 1 from transcript GRMZM2G154641_T01 (locus G RMZM2G154641) derived from phytozome v7.0 (chr-ID 3; pos 1 79513319 to 179514144)
gaagaggtgagctctggctacctcgcttgcttctgttgcctggccccttgcaggtttctcgtgctatctatcctccatggcgtatccatcttttcttcgcttgtttcggaattgcaattatcgccctctcgctgggtggggaagaatcttgcttatacaggtcacatcgccactgcagttgtggcctgcttttgttcactgtagttgcatgtgcttttgatttgatgatgatttcctctgctgttgatactcgcggtacatctttttcgagttttttttctctttgtactcgctggtacgtggttgtgagcttttacagctcgcactgttcatcgggcagtcgtttcataaatgttgtgtgttttggtctgctgtttagcagtaggaattgcttcagaggtacatgaaattataagagtaaaaagaggttgactgctttgaactctttctaatgtcatgagacgataaaaactggcgtcacctcttatgtcttctgatgattcgtcgtggcttggctcgtcgtagcacctgtgaccgcaagcttccatttttggaaccctgaataggcgattgggttttttgcagagttctttaatggcatcccgcttccataattgggaagcatgcctgctttgttgatgtcacgtcttcatgcaaagaaaagcgccctgctcccttttcgtaacttgggagtttcttcattgcttaatataaaagctgtctaatctacatgattcaacctctagattgagttatccaataattaagaaactttttttttttacttctaggtttgcaagcggtaccggctgtactaccagcaggt

SEQ ID NO: 5456 - DNA, 962 bp, Zea mays
  Intron number 2 from transcript GRMZM2G096662_T01 (locus G RMZM2G096662) derived from phytozome v7.0 (chr-ID 6; pos 1 36843676 to 136844637 reverse strand)
atttgctgctgcaacaaggtataatcaggatttctgtttcactcctgttgattcattagttgagacacacatatattagactatgtgagctatatacagaatttgatgctagtataatattgtttgagttgaatgcatgatttgacaagtgcaataactgcccgattggttgcctgcatcattggcgtctggctcaagccatcctgcaccgattgatacacacatttcttacttccccacgaatgcaggctaacgagggtataaaggtctagactgcacctgcgcgcacaggttcagacgctgctatgcagccaaccaaacacacgcccagccacggtcaacgcatgcatggggcctggacgcgggagcccagccaaccaatcatgcagtaagtgactatacccttcctttaacattttgtttcatcaatatgaagtagttaatcttcattaatttgctagtcacatctgttgcagaaagattctatcagtagttttgatataagtttctgatccaatctctttgagtaatgttgaggttattgtaatacttttagtgcattaaatatgtttaaacaagtcttgcggcatttaattttctccaacccttcatataattggtatagttacttaacctgctgctcatagtgtttagtagtagggtgcattgacatatacctattacctttgttttttgtactccgtttgtaattgtgatatatatgacgatctacctatttatctgttagttattattgttgctgggatgccactataagtattacgtaccagataattttgattgatgttttctcacttatatacattaagctaacagctgcttgcaactcatgcgatttactccattaagctaatagtattgttcggttccaagcatatactatctatgtgccatggatagtcaaactaatggcaaatgtattttgtcgttctgttttttag

SEQ ID NO: 5457 - DNA, 497 bp, Zea mays
  Intron number 1 from transcript GRMZM2G074340_T02 (locus G RMZM2G074340) derived from phytozome v7.0 (chr-ID 3; pos 9 8831832 to 98832328)
agctgagcccctcaacctctccgtggctcctcaaggtcagcagtagccgcagctggaccctctagtttctgcgctttgaagtaccatatactatgaaagaaacaagtaacatttgagtactactgctatactgcagaaatatattctacagaattttctctcacgatctttttttgtcattgcaactttagggctgtgatagtgtgatagctattgtctagatatgcaggttatttgtactctgctatattgaaggcttacaaaaataactgtagtgtgatctactggtaattcttaccctttgtagtgaaaaatgttagtagagtaagaacgtgaatggtttaagggagtaaccgaacaaaattgtccggcattgaagtcaggaactgcatgcattctggtatgaagactgcatgtttcagtagtgactccatcagtaatttgttttcttttaaatggcagtcaaatcagaagttacaaggtttaagggaagaatt

SEQ ID NO: 5458 - DNA, 947 bp, Zea mays
  Intron number 1 from transcript GRMZM2G386276_T01 (locus G RMZM2G386276) derived from phytozome v7.0 (chr-ID 3; pos 1 89694968 to 189695914 reverse strand)
ttggtcgtgttggtggtgggacttcatcacaaacggtattttctaatgttttgttgtttttttgcttttatgttgagaaacatttttaacatcttctgcccctaaaaccaacatgtaagagcataatgtttcgttgctacaatcagattctccaataccaccttctcaaacaagcttttatagtatacttcttagttagttccatgtttttattctctttgagttttcttttaactcacctcatcttgttttgtcaacgttcattactggattgtcgttttgtttcttgaagaacggtaaaattaattgattctcttgattagttggatctctcatttcaaccaacttttcaataagttattcttctcacatggtctttaatcattctttgcttttgacaaaccatcgtaattttttttttgattttgatatatgctagagtactatttttagttttttattgttttcctaacatgtttcttttagtaaccttttccacaagcaattctttccaaaaaaaaactaaataggtatttttttctatattgcatttaatattaaatctcatacttcttagatcttgttttaagaagttacatctatatatggacatgtatttttaaggaaaatagttagtcgctagtataatttaattgttggcatcatagctcataaattacagtaccctaaacaaccagcatggtttccaaaaagatgtttattacgctgttattgtcttgatatagatgcttggaacgatataacgcaataaaagaccaaggatctaaataacagtgacgtgctatattttcattgcagagccttgcatgtttttgtatgatcgatgctcttttgcgctaaataacctttcttactatattgactattagaatggacagatctaacagtgaaagtgtcgccactttaacagagtgacatacctgaaa

SEQ ID NO: 5459 - DNA, 550 bp, Zea mays
  Intron number 2 from transcript GRMZM2G409475_T01 (locus G RMZM2G409475) derived from phytozome v7.0 (chr-ID 3; pos 1 96859407 to 196859956 reverse strand)
aataaattcttatcggtaagtgcatgatagcaaaatatggactgttaccaataacatagcgtgctctttgttggtccagccatatgcagttctcatagtttaatcttcagtcatactatatatctgcacttcaaacttttattggcctggagtctagcttattaccctttacattggttcctatagtattaacctaggatttcatgggttgtgcaaaaacatagaatttcgtgcaccatttttcttttgattttggtgtagtatctccatgttggtttccaaaaaagatccaaccaactataggctgtttataaacgaacaggactctgacagaccaggctcttcaagaccttactaacaccttgatgtctaacaaaaatcttcagtaggatttgagagctcgagtatatttgcacataaaaaacctgttgttgtatctgtgtcattgctttgatttcttcatcattggcttatctatttccctgcactaacttcacttgccattcttgtggtagcatcttgacataacttctagaagagacccgaccaa

SEQ ID NO: 5460 - DNA, 716 bp, Zea mays
  Intron number 1 from transcript GRMZM2G115000_T01 (locus G RMZM2G115000) derived from phytozome v7.0 (chr-ID 3; pos 1 66432166 to 166432881)
tccgtccgggcgtgggttgattccttcttttcggggtgagtgattctagcttgtttgggtggatgctccgagaggtcgttttcttggaactcatcctttgctgtggccatgagcaatcaaatcgcgcattaagacgacatggatttgtgttctccgtcgcgctagccgctaggcccgacgcatctcgttcacccagttgtggctcggctaggttcttcagctcgcaagaccgttctcactctgcccccaccccaaaaaaatatcggttcataacagctcccatggcccacgctaagtccatccctgaacctgccgacatcatgtttttcttcttcttttttatttctgggcacaagactagtcaaatgctgctcactgggtgcattggcgccttaggtttgttcaaaatgtgtggttttggtaaagaaaaaaattattgggctccaaggggctggaaatctcaaaatttgcagaggggacgtccttttcagtgggttgtttacgggagccaaagtttatttttcgtgaacagtgtattgcgggcttgccagttggttttaactcttccatttctactaatagtatctggacatttgatttgccccattctacaatgtccagacccgttctttccttttagcctaagaaaaggccttgccaaatgttcagagtgaaatgctaatgttatctgtttttcttgtgattattgtagtcag

SEQ ID NO: 5461 - DNA, 508 bp, Zea mays
  Intron number 1 from transcript GRMZM2G144594_T03 (locus G RMZM2G144594) derived from phytozome v7.0 (chr-ID 7; pos 1 50456660 to 150457167)
taactgctatcgaatccttgaagccaaagctaaaggtgaattttagctcaactgcactacacgtttttgcttgcaggtttcatacattgtagttaaagcaagttgtttgttgcttgcagagaacgccccatcaccagcttccccctcgcaagccgacctatgcgtccaactgagttgaagacaatgcaaaaaaagatctaggtatgtgcccgtgcagggtgtccgtgcgttgttaaccatgcagtatttggcatcatttgaatttggagaagaaatttccaatgtgtttggagatttgaaagatgacaatggatccgatactggcattaattttgataacattttttgggcaatagtccattttatgcatatacaattaaaggtagtgcgtttcaaaaagaaggggatgatagtatatcattttagcacatgataggggaatgcttccaattatttacttggtgcttatcgggatgtttgttgtcacaggagcttctgaagtataggg

SEQ ID NO: 5462 - DNA, 806 bp, Zea mays
  Intron number 1 from transcript GRMZM2G026596_T01 (locus G RMZM2G026596) derived from phytozome v7.0 (chr-ID 7; pos 3 4717865 to 34718670)
tggagaaaaccaccgagatccatatctgcaaacataacatgaactgttaatatgatctttccttgttaatatgatcatcttttctagcttgttatgactaacataacctacagtctaaactgaatgcaaacttgagttagaagatcagtttaccaaaagaaaaatctcttgagttagaagatcagattacgacgaaaaggtgcaaaaatacctaccctgctacaataaaactcagctctcttttctagctttagttgttcaacggtgctacacaaattttctggcaccacaattcataactttgtaagttgtgtggtcttcttttcccattcgttaggatttaggaaattacaagaataagattcagtgtctatgctccactttgaagagtaatttcataagtacggtttaaatctttaaaaacaattcaaaagacctcgcagcatgcaaatgaaactcaaaatataaaaaaattcatttatgtatgctttatcaaggttacatgtaatagtagcagaatatagagaatcgtgaatgaaaggaatgatgcccacagagaaaaactgaagttgttgaccaaacaaacttctagaaatctataagacgaatcttgatgccctattttatgcgcagttcagtcagcatatgcagaaattagaaaagggatcactatcagctgtttacgaatttgtataagttttgatcttcaaaacatatcatgaagtcaaaaggaaattttattaaaactaccaaacttcggcctcgcttgccaagaaatcctaacaattacctctagcacagttgtc

SEQ ID NO: 5463 - DNA, 903 bp, Zea mays
  Intron number 2 from transcript GRMZM2G319988_T01 (locus G RMZM2G319988) derived from phytozome v7.0 (chr-ID 6; pos 1 05620876 to 105621778 reverse strand)
ttcaagcttcaattttgtgagtgaatttaagcaaggtaaatatttcatacggaacttgatgatagatgcctaaagcttcacctgctgcttattctccaatattactgtcatctttgttaagacaattttatgccattagttgaccagtgatcaaaataataaccgctttccttttctgagttaactgctacctgcttctccaaattgaaggccacaattaggcctttttgatagctgcaactaaatttccttgaatataagaaacaaataataataataattgaccagataggttgtacgatacagatactcacccttcatactggttgtcctttttaaggtgtgtcttttcatatgcttcttttttggacttttgctcagcatcaaactccttccttcataattcagacaaggaacagtcaaaatatcgaagacatcactgagtgaaaataccaaacatgtgaacaaatcaaacaggtagtctatgtaagtaaagatgttcaattagattcaaaaaaaatataaaaatggttaccttatcaagatgagagtgccaattaatttaatccttataaaaatagtttgctttccaaatatcctaacttcatattaacctggaaccaaatgaagtttttatttgcctgctagagcatgaatgtacaccagttcactgtgttagatgtctatgcatgtgcccttgttgtattcggtctcatatatagtgtccttccttcctttttacaatgttttaaggttaactaaccagtctacaatttttcaagtcactgatagagcataatttcataggctaccaagtaatgtacttgtgtcttctttcatagatccttctttcaataacatttgacaggtttgctcaatttcccaagttcgtttgggaaaggg

SEQ ID NO: 5464 - DNA, 788 bp, Zea mays
  Intron number 1 from transcript GRMZM2G147243_T01 (locus G RMZM2G147243) derived from phytozome v7.0 (chr-ID 6; pos 1 33197387 to 133198174)
aagaaggttgcagcgacgccgcagccggtcgcaaagtaggtggattcgggagtggatcttggtgtttgctgcctcaaacaaaaaaaagggaaagcttgggctttgccagtgcgttcatctggcgccactagtgatttgcagattgtgattgttgcccctttgtttgggagcaagttttctactgtttgggaaatcttgctgggttttttgagctcatgacatttgcaggttctgtgacagaaaatcatctttggaaattctgtgcttttgagggaaacaaaagggtaggggtgaattgtattttaggggatctctctctctctctctctctctctctctctctctctctctctctctctctggccttggtatttccgatttgtttttactcttctttaggtgggaatttcggtttgtcttgcggcctagaggagggaaactgaagttgcagctttgttatgttcttttaaaatcccacttttcctccaaattctctacttttctaaatgggctctttcaattcgtcttcagctttcttgggttttttttcacttttgttgcttgctcaaaggctcttctcatcttttctctgctctccctgatttgtttttttttatattttgtacataacattttggtttcgcattaccttgttcaaactctgcaactttcgtcccaaaaatcgccaaatttctttgttttgtacagcatctcctgatctacctcttcgttccgtggttgtaaagattattgagcccaggtgtgttgtgcagagctcaggtggtggg

SEQ ID NO: 5465 - DNA, 752 bp, Zea mays
  Intron number 1 from transcript GRMZM2G160364_T01 (locus G RMZM2G160364) derived from phytozome v7.0 (chr-ID 7; pos 1 17242161 to 117242912 reverse strand)
ccccgaccatccgccgtcgcagccgcagggacacggtactgctctactgtcgccattgttttgatgttttatatggttgtctttttcccacagaaaaagagggattttgggcctgtatcattgagttcaaaaacttggccaaccaaaattaaggcatacctgcatcttttggctattgattggttcactacaaaattaatgtcacaccaaattctatggccaaaatcacggcaaagtcagtagaaacttattattccatcgaaaaaggattgctgctaggtcatgatatactcaaccaaatgcatgtctacatttgttgccctaactttggtaagtcttgattttagcctctgttgccctaactttggtaagtcttgattttagcaatcttaagtttttggcatgtcataattttggttgggcattttttggaacccaaccaaacctctttgtttctgtttgggcagcgaagcaaaaaaaaaggattttcttttgtgtgtttcttgatctgtagattgcccaatatttgcattagttcaatcatttatttgaatttcttggcgatatcgcttgatgttctggccgatggtcataaaaaagaatttgggtttcttcttgacacaaaaaatgacgatgtgtgcaatttggtagaaaaaatgtaaacgtttcatctaatcctgttcatctgacaacaatgctcttgccatcgatgagtaggcgagcccaatacatccggggtagacgctgcacta

SEQ ID NO: 5466 - DNA, 874 bp, Zea mays
  Intron number 1 from transcript GRMZM5G877104_T01 (locus G RMZM5G877104) derived from phytozome v7.0 (chr-ID 7; pos 1 29128587 to 129129460 reverse strand)
gtgagcttgcagcagcgttgcaggtggaatacgaagtgagtacaaatacaaggccaatgctcagcgcaagaaatgatgagataggaacgcttgggagataaagattggaggaagaaaaatctgggtgggaggagatgtacgatgaagaagataggcggtgggaaataactagaaaccacggcggcatcggataggagagaagatatttttatattttcttttcccttctttttataacacgtacatatgaatatgggttctaggattagagtttaaaaaaaacataaataggttggatcaaaacaatatcgggtacaagaaagaaaaaaacagatatgatttgatttgatgaatactctagagtcagatgaatttttttaccagttatttatatctgaaggtgtacatttaagcgagaagcaaacagaccgaattaaaacgatatttcggctacacatattattttcttggactttgaaatagtaatccaaatcggctaacaattattatggtttcggttggttcgggttcggtttatttaaacagcctgcccctagtagtgtctcttccgaattcatagagatcgctcgaacaagagcgaaatacttaggtggcctttacaatccgccttattcgattaattttaaactagtaccagaccacgtcattatctttgatattttagattgcactagatttaatttaactgaaaccagataaatcttatctgctaatgaacattcgattttgtcatcaaaataacgtgctgaacaaacgatctgaattattaaccttgggtacgatttattctataatctcctcttcgattcgtatttttagtgcaataattatgcatagttttgatcttcagatt

SEQ ID NO: 5467 - DNA, 462 bp, Zea mays
  Intron number 2 from transcript GRMZM2G088533_T01 (locus G RMZM2G088533) derived from phytozome v7.0 (chr-ID 3; pos 2 21355011 to 221355472 reverse strand)
gtggcgtcgactgtggatattagctggtaatttaaattgtatgaactatttaataattagaaagctatatctatctatcaagggcaaattaaattgttagctgatatgggaaaaattccagccaaagaaactaggtagtgacttaatgtagtaccacattgtccaaatggtcttgcatattgtttttgttatcgttagtaattagtggattgtgagcctaaccaaacattagtaaacctattaatgtagtatatttcaacccaaagtcatcttctggttgctctcatttttgaatatgtgctgaccattttattctcatcataatatatacttttgaacattaacaacttatttgcgagtgctgttttattgataccaattgtatgggtatagttcagcaaagcgttctgccctacactttgatgcttataaatctttttgcctcctctatcctctagattg

SEQ ID NO: 5468 - DNA, 965 bp, Zea mays
  Intron number 2 from transcript GRMZM2G374030_T01 (locus G RMZM2G374030) derived from phytozome v7.0 (chr-ID 3; pos 1 78773640 to 178774604)
gaaaaatattggagtaggtgagtgaaagtcacctagagggggggtgaataggcaaatctgaaatttataaactttaagcacaactacaagtcggggttagtgttagaattaaattcgagtccgaaagtgagggcgaaaacaaatcacaagcaaataaggcggatgacatggtgatttgttttaccgaggttcggttcttgcaaacctacttcccgttgaggtggtcacaaagaccgggtctctttcaaccctttccctctctcacacggtcacctagaccgagtgagcttctcttctcaatcaatcgggatactaagtccccacaaggaccaccacacaattggtgtctcttgccttgattacaattgagttgaaaacaagaaagaagaaagaagaaaagcaatccaagcgcaagaactcaaatgaacacaattgtctctctcactagtcactatttgattggaatgatctttagacttgggagaggatttgatctctttgtttgtgtcttggaatgaagtctagagctcttgtatgaggtttgatggctgaaaacttggatgcattgaagtgtggtggttggagggtatttatagccccaaccaccaaaagaaccattggtgagggcttctgtcgtatggcgcaccggacagtccggtgcgccagccacgtcattaagccgttgggttccgaccgtttgagcttctgacaacggggccaccggacagtccggtggtgcaccggacagtcactattcactgtccgatgcgccttctggcgctgctctgacttctgcgcgcgcaggcgcgcactgttcactttcactgttcctctgcagacgaccgttggcgcgaagtaaccgttgctctgctggcacaccggacagtccggtgcgtccggtgaattatagcggagcggtctccccgaatttcccaaaggtggcaagttcggagtggaactccctg

SEQ ID NO: 5469 - DNA, 769 bp, Zea mays
  Intron number 11 from transcript GRMZM2G150796_T02 (locus GRMZM2G150796) derived from phytozome v7.0 (chr-ID 7; pos 129108016 to 129108784 reverse strand)
gtcaaggagcttgtacttgacagtttaagacattggtatgacataacttacagctttgatttttctgtggcacctatgtgtagatttcatacatacttgtcaggtttacgtgaatgctcgttcacatatttgttcttaagagtagttggtggcttgttgctttgattactacagcatttaatttccactcccattaatgaaaatgtatacatatatctatttggagctgagcttgggttggtggacatatctcatacaccccgtggtccatgaaaactacctctagaatacaggacacatttggttcccgacccagggaacacacctgcacaaagcagccatgcaagcattttatttcgatcacctgggtcgaatcgacctgcttgggtgcagcccccccaggctagggtgccaatcaaacaagcccacaatgcgggctcttgttaggccgtcttcaacaaaccgtaaatatggtcgtgcaaaacactgttttgcactgtagagtacattgtttacagagtagagttgaaataggagacgagataggaggtgagatatgaaagctgttggagacagccttagttgataactagcaatcatttggttgtggtatgatataactgatgctatagatttttttgtaaatagctgcagtaagatggataatgcattgcctagtcctattttacttgatatcagtttcagttttgtgttgtttctgattgcatgagtgcttttgtttcttcaagggttaaggagtatcacatag

SEQ ID NO: 5470 - DNA, 510 bp, Zea mays
  Intron number 3 from transcript GRMZM5G822131_T01 (locus G RMZM5G822131) derived from phytozome v7.0 (chr-ID 6; pos 1 60412250 to 160412759)
gcaataaacaggcttcagatagtcaaggtttgatcctcatccaatagattataatttcttatgttttgaaagttttatctttattccatgcattatgtatgcttcagtaataacataaagatcttggaactgtcaaatacataatgtttgacgtgataaaaggacgagccaataaacaccactgtcttacttttaccacatctactgttgtagagcttatggtagcacatatagtaatatataaaatggcgtataagatattatgtatctggtgtcataaaaaagatgacacaataaacatctatgttttaccagttagggctagtttagtaactcaaatcccctccaggattggagtggattgaggggaaaatgaactaatttctctctcgatcctctctaatcccggaggggatttgagttaccaaactagcccttaagttagtaattagtaaaagttgtggtggtatatgaatatgattaatgttattatctctttcttcttttaga

SEQ ID NO: 5471 - DNA, 1001 bp, Zea mays
  Intron number 1 from transcript AC191724.2_FGT003 (locus A C191724.2_FG003) derived from phytozome v7.0 (chr-ID 3; po s 64820189 to 64821189 reverse strand)
gtgactgtgcaaggtgtggggtggggaagcctgtgtgtgtatgtacatcgttgatttggtgttgcagggttcctagccatgtagcaatgtggatgcgggcgaagaagatagggtcatcagcagcagagcagcctcctccacttccattaggagcctccgtttctgcaccacgtgaaagttgctgctcccgctactgctgttgctagagctgtcttttactccagtcttcgcctcgccattattttgttgttgctgctgctgcttgttgtgctctaggccaagctcttgcctcctcttctttcggtaccgaatcccgcaagcgttgcaaagtgactgcccaacataattgaaatgagattaaaaaagagagagagagagagaccgcgttcgagttgtttccagggcagagtgtgaaatttagcataagtttcctttgcgaaaacaattctcttggttattttattatcctaaaaaagtgtaataagtcatgtcttggtggtgcgcaattctggtcagcggaaacacactgaaaaagtagagggcagaaatgaaaaaataatcaggctaggagaatcaaagtggataaagtatctttctcccggcacaccattggctcggtggttagcactactgttgttaggaacagctcacctaacaaccaagttgcagtccaatttcatagagagaaatatcaacgaggacgagtctcgtaccgcattagcaacagaccaaaacccagctcacaatttgcctgtccccaaatcaaacaaaacgtactgtaactacagactgcgaagaacattttgtattccctatttcagtgtctaaaaaatactgctatgtcatgaaaacaaagcaatattagtattaccatgaaaagtaatagagcacgcatatggtttcatttatctcagttgcaaacagttcctccattgtcaagtccactgcaaacattttggccgtaaggggtagaggaaatttcgctggatagatcctcaaaa

SEQ ID NO: 5472 - DNA, 370 bp, Zea mays
  Intron number 1 from transcript GRMZM2G102923_T01 (locus G RMZM2G102923) derived from phytozome v7.0 (chr-ID 6; pos 8 1716161 to 81716530 reverse strand)
cgctcgccggcatcgccatcaagtacggcgtcgaggtattcatcattcatccagcaatagtcgccttctccgctttggttggttggttggtggtggtgggtaaaagcctctacacccccccctcgcccgcgagatggaagaggagatctcatgctgttcgccaaaaactccaacttttcctcgtttcttggcaaccatatgtcaaaagaatctccagctctttgcgtcatctgttttatttcttactacataaatccgcaaacgtaaacaactgtgaaaaacttcttctttgagttgttgtgttaaagatctacttcttttattattacctgtagatatctgacatcaaaagggcaaacagtttggtaac

SEQ ID NO: 5473 - DNA, 715 bp, Zea mays
  Intron number 2 from transcript GRMZM2G404941_T01 (locus G RMZM2G404941) derived from phytozome v7.0 (chr-ID 7; pos 1 90536 to 191250)
gaagatccgaacaagaattatcaagaagacaaaaggtaaataatacaacacccatacttattcttcttctgatttttgatagtttatgaagaacaataatattgtgcaaactgctaagctgctagcttgttatctatttttagacaatatacacctcttgttaagaatggagaggtaggagatgatcctggaggcagcatgtcaaagatagaactcacatgtttgttgttcttctatttttttatcgctcataaggaaaattgagaccctgctcttgatgttttagacatggcgtacttcctgttatggtgcctgaaattggcatgaagtttcaggatgaggtagaggcttggaagttttggaatacatatggtaacacggttttgaggttagaatgagagatgcaaacaaaagaaaatctattggaatactgagatcatttagatttatttgtgcaaaagagggtcagtggaaataaggtaaaataagtcatcttgtaaacggccacgagctaaaactagaactaaatgtcttgctgtattttgaactaaatgtattattattgttctatcttttggagatagaaatacgagcatgcagtcaatctcagcatgcatttagtttcaattaaatcttggtaaacaacttggtctctcctactctatatgttgttactgtaggcgtccacacgcgctctgttctgcccgccgctctg

SEQ ID NO: 5474 - DNA, 977 bp, Zea mays
  Intron number 4 from transcript GRMZM2G482077_T01 (locus G RMZM2G482077) derived from phytozome v7.0 (chr-ID 6; pos 1 60055364 to 160056340)
tgattattttcaggatctgtgtgttactgttgcacaccgtcctctacggcctcgggtcgcgcggtcggcctaggcgcgtcggcgtcggtgtgcgctgggcgtgtgcagcagcgcggcctgggcggctcggccgcggggcaggggctgctgcgcggggtgcggggctcgcctgcgcgctagagagagaggtgagagggaggagagagataggagagagatgagaggatagagagagagttagggagggagaaggaagcacaggcggcggcggcggcggctggcttcagctgggagagagcagcgcgcggctagggttagtggtagttgggccctggtgggccggttttatattagggtttagtttttttgttttttttattccgaaatacatttttagatagctcaaaaaatcataaaaattcaccaaaattatttataaataaaatacttgttttagactaatagttattatactacttaattattatattaattactaggatttcttttttaaaagaattactacaaaacatctgatactcaatcatgcgcatacaaagaaaaatgattaaaatgcaaataaataattaaacacttaaaataaaattattatcttaattaccataataactaaatttattatatttagttgatgacttttatggtgttacacttttcagattgttaaagagtgcattcattgcaccatagatgtactcagtgattggactactgctggatagaactttcacttttgacctgtgaccttgcatataataacagcgaggcacctcagtcattgagcatagttaacaaatcctaacataccttggacagtgtaacagtgctgctgtgcagagcaaatttttaagtgaacaaatagatactggcgtatcttcctctgagataaatgtcaagcttggttctctatcgactatgcttttgtttgtgttgcatttttcagtcatcgagtctaa

SEQ ID NO: 5475 - DNA, 1023 bp, Zea mays
  Intron number 1 from transcript GRMZM2G145662_T01 (locus G RMZM2G145662) derived from phytozome v7.0 (chr-ID 6; pos 1 54887917 to 154888939)
ccgcgcaggagcgcttccgcaacatacagctgcaggtttgcccctagcctggttatcattatctcaagcgtcagttagatcctttttgtattcccccgcgtcgtggttagcatccagttcttgctgtgagaaattacgggtcggggtgtgctcactgtcactggcctagcttagagtcagccggccgatttacttgagatctgtttagcatgctttggattcttgttggtaactgtgagtggatctcagtgttgatcggcatgcccgatgagaggtaaagattgtctgatacgggtgctgtggcttatatagcaatgtctgtttgaggactggccaaatttaatcttcagctgtgcgactgtgtgcgtcggacctctatttgccttcgcactggcctgcttagttatttgtacggttctaggtttgttcagtctggggcacttctttttatatatgtatatattttattttgggggcacattgtgcgctgaaatgctgatgtttgagattttcggaacctgataatctaggattgtttgaatctgcttatccgcaataggctatagctaatgccagtaacaattctctgctgtgatctctatgctgccaagttgggtcggtgctccacgagctggaatcagctgctaaccaagtaactgattgtcacctctgtgcccctttatatctttgttctattgtatgattttgccaatcttgtctcgtatttctgagtatgaatttattacttcttattttgcactcaaagaagagcaaggatgccttcctagtttgaataactaggcttgtgttatcattggtactccaatgctcaaacacaatcattttgtggcaggaaaccacagtattagagctgtcaaccttcacgctatctgtcgttttgtcactgtttgtgcagcaatgagtttatctcaaattctgttttttgtggtgacatcggttgactgcactttaagtgtctgataaagcatctttgctgtcacttgtaggaagagtttgacactc

SEQ ID NO: 5476 - DNA, 810 bp, Zea mays
  Intron number 1 from transcript GRMZM5G853361_T02 (locus G RMZM5G853361) derived from phytozome v7.0 (chr-ID 3; pos 2 4744469 to 24745278 reverse strand)
gacggcaagggcaagtccttcgtccgcgcatttgtgtgagtacaaattttacatgctcttccctcccttccatctcgatcgcatttgaaggattcggaggttaggggaaaggcaacggtaccacctttttgtgggatggccgtgatcgggattcgggagagagcacaggaaatgctacgattcggcggttcaaactggggttagccgctgactgttgatctggctatacaaggccgttcaagggatgtatgctatgaagtatgaagtgctttgcaatggggatgacggaatatcccttgtcggttgtccccatcacacatggattgttcaagcttctgtgaattggatgagtatttgttgaaattgggacgattttgattggtgccctcaaggacaaccccctgctccagggcccagacatgcatctcggacccaggcatgcatctcagccctggcgctggaaatccaacgcataggagagctgcctggtccaggcaggtttgcctgaagacaaaccaaacatgccagtccttaaaactcccatatgttcttatttcagattaagcgttaccatcaattgtcattaggttcgactatacatgtactgttatttgtttgaatgatgattatttggttgccatttagtttcatataataataagtaatgcataattgaagaaagatcatcctctcatagaaacaggcgaggaccataatgattttgttgtttgtgttttcacttctttatatacttatttgagttctttgcattatgtaggtgggactctggcagcactgttggtgaatttg

SEQ ID NO: 5477 - DNA, 707 bp, Zea mays
  Intron number 4 from transcript GRMZM2G131001_T01 (locus G RMZM2G131001) derived from phytozome v7.0 (chr-ID 3; pos 8 564851 to 8565557 reverse strand)
catccaagaattcagaggtaatttccatgcacttataatattaacttatgtacatagacacactggtattttctctagtgttaattataattagatcgacgtgacgacctcacacaaacctaaaatacgtgtataaaaccagttttatgatcagggtgtaccttttcactctttgattttattgaaatataaaatagaatgattgaatttagcttacaaattattgttgaagttgtcctaaatatgccattatcacatgaagcttagtctagaaaaaaagcctgtgcaagaggtaatttccatgcacttataatattaacttatgtacatagacatagacacatatatgtattttctctagtgttaagtataattagatcaacatgacaacctcacataaacctaaaatacgtgtatagaaccagtttttttgatcaggaagtaccttttcactcttttattttatcgaaatataaaatagaatgattgaatttagcttacaaattatcattgaatctgtcctaaatatgtcattatcacatggagttgagtctgaaaaagaagcctgtgtacactaggaaatcagacaagggaagctctccgaatttcagctgtacatactcattcttttcaaccatctaaacaaactgacaccttttcttttaatcacagaacgttgacgagtatacagaccggctaaccaacaa

SEQ ID NO: 5478 - DNA, 1006 bp, Zea mays
  Intron number 1 from transcript GRMZM2G386486_T01 (locus G RMZM2G386486) derived from phytozome v7.0 (chr-ID 7; pos 1 32894386 to 132895391 reverse strand)
tcctcgccgaggtcctgtccgtcgcgttctgcgaggtcatgacactagtacaaaaaggctcaaagcctgcggggacgatatatttttacaggcggtttcggttatccaccgactgtgttatttctagtggcggtctctaagaaaaccgccactagaaatcatttttatccttaatttttcgagtttttcaaacggcctcgtatgacaaaaccaccaaaataaaagttgtagatctctaaaagttatgaaactttgtagttgacaacttttttgtttgaactcatttcggttctcaaaaattgaatctaagtatgtcaaatttaaaattcaaattttgcaaactacctcggatgaaaaaagtgtcaaaataaaagttgtagaacttcaaaagttatttatctttgtagttgacaacttttttatttgaattcgtttagggtctcaaataagcaatttacactcaaatggttgtaatatgtgaagaaaacaactacaaactagacacaagacatgtcatagacggagtggtaggggagggtacacgcgagggtgaggtcgacggttcgaatactaacaaccgcgtagcgcgcgaattttgcgcgaaaaatgccgcgatgacttgcgacggagacgggcgggtggggtggccgggtgggcctaataaaaataattttttaactatttttaaaatatgttttatgtttcctggaaacgatttgcactggcggttttattacgtcgaccgccagtgaaaatcgattttcgctggcggttttattacgccgaccgccagtgaatcactggcggtcctcagttacccgcctgtaaaaatgatgatttctactggcccctagcactggcggttacgaaaaacgccactataaataggtttataaccgccactatagaacttctctgtactagtatgaacggcaagccagagtacaccgaccacctgacccacaagctcaagcaccacccgggacagatcgaggctgctgccatc

SEQ ID NO: 5479 - DNA, 892 bp, Zea mays
  Intron number 1 from transcript GRMZM2G125832_T01 (locus G RMZM2G125832) derived from phytozome v7.0 (chr-ID 3; pos 1 03799492 to 103800383)
cttctcctcccgctcgccttcccggacctcggctggtaagaaagcagtccactgctcctgctcgcctccattctccgttgcttatttcaagttagcgttgctgctgctgccatgctttctctgcttttgttaatggcgccttctttctgaggagtgactgggtgatgttggttgctgtgtttcaagctttattttccacttcttattcacttgccttgaccacgcctgcccgtgggccgtgtcaatgccattcgacttggtcgtgggcgccggcacaaaccattttgattgctgaatttgggtgagatggcccagtcctcactccacatctgtccaaaataccaaacatagagacctattagtaagatccatctggggacatgagttttcttaactccctatgattaagtctgttaatttcaagaaggaagaccgcaagtaaaagatcttgaggagcaagtttgctaatgtctttttctcaaatttattgtctggtaaacgtttgctacattcagttataattcaggttggtactattgcaggcttcatttcatatgttcatgaactactttggtttcgtatttttttccttctctgatttgaagtttgttgaattgttgtaatcatagcatgtgtaacttagaacaaataaaatgcaactaattggtaaattgtactttctttatcgcaactgaaaaaggggaaaaaatcttgttctcattttttaccatttgttgtggcttccagttgggactgggtttcaaccttctcagccaatgaagtcttcaatgaattattgtggctgaagtttagaaccgtttctgacatatcactgtttatgactgtttggactgcaggagctgggggataatttcattgactattgcttatt

SEQ ID NO: 5480 - DNA, 870 bp, Zea mays
  Intron number 1 from transcript GRMZM5G833124_T01 (locus G RMZM5G833124) derived from phytozome v7.0 (chr-ID 6; pos 1 47659266 to 147660135 reverse strand)
ccgcccgtcgaggtgaggccaccccctcgtgctgccctggacccgaggggtttctgacactgttgatcatggtttggtcttcttgtgtcgattcgattgctctgttcacacttgtgagatggtttggtgagatgatgtggtttggcgaggaggatatggatttatcggtcttttggtggtggtgggctggtgcttcctttgtcggggatttgaggtctcggcagcagcaacgaatcagaattcgcacttggatctgatagcatgcggatgaatatgcttgaaacaattgtttggtcggaatttggcgcaagctaattgtctggttgtttgagcctttgaggcgaagcgtggaaatttcaataatttccgtccagattggatccgcaacagtaggcctcgttgttgatttctggaaaagaaaagttaggtcttttttttttcttctgttgcttgtctccgagcaattaattcaaccttttcattgaatgtggtttggtattgagtcgccggttggctttgaattcgatttcctcagttaggtttatcatgcatggccaagtatgtgattcagggtcaacttgttctgacctcaggctgtctattttatggactttgctgccttgctggtggagcaaagttgcaatctttaggcaaagtgaccctggtgtctcgttgaagctagttgtttgttggatgccgctcaatagcacactgcacactgttccttgttttttttaatcttttggtgttgattacctcctgtgttttcaactatagaaataccagataaaatgaatggtcatgatttagaatgatgaactaatatagtgattgcaatttccacacatatttttgttggtgcaggaaatc

SEQ ID NO: 5481 - DNA, 798 bp, Zea mays
  Intron number 2 from transcript GRMZM2G437113_T01 (locus G RMZM2G437113) derived from phytozome v7.0 (chr-ID 6; pos 1 09270403 to 109271200)
gccaaaataagcagagagacgattctggcggccaggtatgctggctctaaatggttcttttgatcctgctttatgtttgcatcgctctcacattgtcgaaatagtattcaatttaataaaaaaactcaacaccagcatgtgtaagacatgctctgtgcatatagaagaaacgcaggtggataaaactcccatagatagcgacatagttaaccacaagagatttaggctggttttgtgcttgtcctttggcatgagacaaaaagggatatttttaaacaacacacaatattattcaattatgttctatgattctattattcttaattgtcttgaagcgtgactatatgcatagaagttattccctccgttgtaaatacatggcacattttttctgcaataaattacatgacactttattttttgtcctaaatcaatcttctaaaactgaccaagttattaggaaaatgtattagcatctacaggttcaaataaatgcattatcaaagacatattttgtggagagtttaataaaactaatttgatgttgtcgatgttgttggtttggtgcattctcctatacatttcatcaaagataaaaaaatttaaagtaagacaaagctaactataatttggtccagggagtattacgtttgtgttctataaatggtaggttgttttcttacttttttgtttgcactgactgatgactgtccttgtgatatagggatgtatgtaatgattatttgtgtatacattgcagcagagttcagagacacttatctagctatcaaggtgcca

SEQ ID NO: 5482 - DNA, 271 bp, Zea mays
  Intron number 3 from transcript GRMZM2G129482_T01 (locus G RMZM2G129482) derived from phytozome v7.0 (chr-ID 3; pos 1 3918986 to 13919256 reverse strand)
ctagggcaggtatggtgtcttcgatatttattggcatgtttattttttcaagtaaaaaaaaagtcttttgagttcacattttcttacaagaactatttcaacagcctttgtttccaggtgaaagtggtgtggaccaactcgtagaaatcatcaaggtagttatcaattttacaaatttgtaaactatcttctgcatagacataaattttgatcacgcttgatttgattttgcatcgcaggtccttggtactccaacaagggaagaaattaa

SEQ ID NO: 5483 - DNA, 735 bp, Zea mays
  Intron number 1 from transcript AC198379.3_FGT006 (locus A C198379.3_FG006) derived from phytozome v7.0 (chr-ID 7; po s 103924549 to 103925283 reverse strand)
gtcctatcagattgcaaggtatgacacaaagtacagaaataaaattcttatccactttcttaactcatcacctttaagtgcatcaaaacacaagcaaatcaattataatattattactaacaagcaaacaaagtgttagggtaatagtatgtatgctgaaataccagcaaatcttgccgaaaaaagggagcgctcatcgaaacaaatcagatctacgacatcagtcgttttagagttactgcagcaaaaacagcctacaaagccattgatggtgataagatgatataatttacggtttacacaattatcaagcatgcaagtaacccaccacctacatttcctttatatatctatcaattaactccatttgatgagattgaatctcggattcagcacaagaccaaattcctaggtaacatcaaaaacaacttcaataattcaattcatctacattttctcactgcattactacctatattctaactacattttgttttacaaatgttcttggaactataactgaggtaactgctttgaagacaatacacatagaaggacaactcagccctactattattagagacgtaacaatagaagatctaaggtttgtgacaaaaaactcatcctaactatttttcacatatatgtgtgtatgtctatgtctttgcgtttactaatatatttccaacatgatctacagctgcaaaactctcaaaatcactctttgggcgaaac

SEQ ID NO: 5484 - DNA, 675 bp, Zea mays
  Intron number 1 from transcript GRMZM2G069865_T02 (locus G RMZM2G069865) derived from phytozome v7.0 (chr-ID 3; pos 2 00421950 to 200422624)
gttcattcctctccagtccctagcgagagattcaggtaaggagtatttacttattttagtacaatattggttttggtcaagattagagactagacactggttttgaaactattgtattattattttttattacttcagattcagtttttgattgtttttatggggccctcatttactctcagtctcattactaatttgtgcctgcatagcaataatacatcaaccgagtccctaatgtctaacataatatgatattcaatcagcctttctcaatcctcatagttcataccctcatgttccagactccagttcctagcttcaaaaagtgaagcaaatgtagtgcctatatggtctatagtatcagtgtttctgtaaaataaaggagaaattttgggatatttgtttataaaggactgcatctaaaatagatgcatgtttctatgcggtatggtttgtgaaacatttcctgagatgcacatatagttatgggttattgtattgttctgattctgtaaagtgtccaatggttcactgtatctgtgtgaacaggtgaaacgtgaagagcaacttgagtatgcccaaagtatcatttcaggactgaagagaaatgctaaccttccccgattcccccctcttgcagtctcgcttggcaaccggcgccgccgaagccgacaa

SEQ ID NO: 5485 - DNA, 965 bp, Zea mays
  Intron number 1 from transcript GRMZM2G386337_T01 (locus G RMZM2G386337) derived from phytozome v7.0 (chr-ID 6; pos 7 0837638 to 70838602)
gaagcacttcaaggtaacaaacttgttaatagaaatctatctaatagattttagtaataggtgaacaatattaatactatttgttatttggattataatagagttgcttgggtgcattggatggcacacatgtaaaggtgactgtcccaactaagttgaaggggagatataggtcaagaaaaggagaaattgtgacaaatgtgttgggtgtttgtgcaccgacatgcagtttatatatgtcttacctggttgggagggttctgcacatgacgggcgtgtgcttcgagatgccatctcgaggccggatggattacgtgtccctcaaggcgagttatgtcccttcatattgaaaaaacaattatttaggcatagttattggtgttaaacttatactttcttttttccatgttaaggttgctattatcttgttgatgctggttacacaaatgcaaatggtttcttagcaccatatcgaggacagaggtaccatctaggaggtttcactactcaaaacccaccacatagtgctgaggagtacttcaacttgtgccatgctagagctaggaatattgttgagagggcatttggaaggctcaagggtcggtggggaattttaaggtctccatcgttttttccaatcaagactcaaagtcgaattataatggcatgtgccctcttgcacaacttaattttgcaaaatatgtctagagacccatttgaaaatgatgaggagccagctatggatgcatcatttgaagttatggatggagaaatcagtgaaccagaatttatcacaggtgtctcaacatctaatgaatggactgatttccgtaataatcttgctcaggggatgtataatagatatagagctaggtctaataactaaggtttgtaccttttgtctttgatgttattcattatttttggcatgttgcttatactttcataaatacttcttgtaggac

SEQ ID NO: 5486 - DNA, 1036 bp, Zea mays
  Intron number 1 from transcript GRMZM2G024073_T01 (locus G RMZM2G024073) derived from phytozome v7.0 (chr-ID 6; pos 1 32126419 to 132127454)
ggcaaccccgacctcgccggttcactcggcacaaggtgcgcgttctcggcttgtcggctgaagcatttgcaaccggctttgttgtttgtcaaacgcggtgatgtggcgctccgaagggtttctcggttgttttcgcactaccgcgtgtttgtgacttccagtgtgaacgatgtggagggggggcgcttcttttacgatttttcggtggactgcgaggtttgtggtgttgctgaatctctggattagagggtacacggggttttattgcgaagcagctcttgcaattccatgtcatttatgagcgagtaaaatcctaggtgaattttgtggtttcttctctgcctttgatgttcttttgctcattgagcagttgttcctaaggtaagtccactactctgtggaattagacctcttcgtttccgttttcctcgttctagatttgggagtgccatgtatataatttttaatctactattatttctattgttgtgccatgtgaagaggaaatgcataccagtgaataactgtaagcactgtgctacgcgaattacatagcgggtgtttgaatgcattggagctaatagctagctgctaaaattagctaaaaacatccataccgcctatataatagttcaactattagctacttttagcaaattaacaataattagctagttatttgttagctagctaattctactagaatttttttagccaactaaccattagctcttgtgcattcaaacacccccacaatgctttgctgtttgtttcatttggattcgttacttcattttggtgttaagcagtgctacattttttactctccatttctaagtagttcaccaggatgtgtgttatattcaattgcattcttgcttgttgaacttgtgcatgttttaacgaaaggcttgtgtgatctgttcagtcatacgggcctatgctacttagtttacgctgcagggcatttgattgttatggttttgttgtgttgattattccagatttgtgcagcagagcgtggtgagcaaccgaa

SEQ ID NO: 5487 - DNA, 811 bp, Zea mays
  Intron number 1 from transcript GRMZM2G178209_T01 (locus G RMZM2G178209) derived from phytozome v7.0 (chr-ID 3; pos 1 0676592 to 10677402 reverse strand)
gcttctgcggcttcgcgtcccttgccaggtattttgatatatcatgttttattatcactaaaaatgtctttggtcgtcctaaaactggtgtaaaaagtagcatacgttccttcatataagaaaaaaggtcttgtttgtatccgcttataagcctgtgcctaataatccatccatattattacctaaaacattattttacattataggttgtattgttcgtatagtagaattcaaatatgggtacgaggatgctggagctagcctaacagtcatacaacggggattttttttcctcccaattctcgattcaaagttctgaagctgcagtagcataaaagcagaaataatcaaagcatccggtgggactcgctttttacactaaaaactgattttagttggaaataaaaatggtgaatgacaattatgtatatagaggaaagtattcatctgagcactacaaatacaactcagaaacggtgtttataagtgtaacgtaaggaaaaatatatatattaatcataatactaattagaacttgcttctctaaaacttcagagctcagctctaaaagctttagatcactttagcttacttttaagctctaaagctttaatttagagctctgcctctaaactttaggtagagggtatgcaaacaggcccttaattagcaacagtaatttagtttacgctccagccaatagtggaagaaatccaacagtaacatgttgactaactggcagtgacaggaaacaagtttgcagcataatgcgattattaaatacgatacaattatattttgcaggtacatc

SEQ ID NO: 5488 - DNA, 473 bp, Zea mays
  Intron number 1 from transcript GRMZM2G041618_T01 (locus G RMZM2G041618) derived from phytozome v7.0 (chr-ID 7; pos 1 57113536 to 157114008)
tccattaagagaattgtctagcaacacccttgaaggtatatctactaataaaatgcaatatttgatctctcaccaaggttttaaaaaggaaaataacgatgttcatattttgtagatgaatgtccagaggtacctgtcagcgacggaagcataattgatttaactaaatcgtgtgataacactcaaggtgaatatgtttgtttaccatgtattgacaatggagattattgatgggtaatatatgatggttcaggaggtcgaactgatgcgagacaatgtaagagagaaagagaaagagcacgatatgcggcgatgagtgttgaaaaaaaaacgaattgaagaaccgtcgtcagtcacgcaaaaaagagaacgttgttcaccatgagtattcaaaaggtaaattaaggctgcttgtgcgtcactcatctttaaaataatgcttttcttatgtgttatcgggttactttgtgtag

SEQ ID NO: 5489 - DNA, 963 bp, Zea mays
  Intron number 2 from transcript GRMZM2G484741_T01 (locus G RMZM2G484741) derived from phytozome v7.0 (chr-ID 3; pos 2 25080627 to 225081589 reverse strand)
gtcagaccatccgcctctctccttccagcatcaaggtaacctctccttatttagtacgtttgtatcaagaaaacagtgttccatgttccatcacaaatgcaaagagggttctcacggaaacaggatgcctcacaccgatggagttggctctttgctacatattaagcaaatagtgtatttgtgttgttactgcttggacttttaaacatttgctctctataatatatactgatttagtcatatcttttatttgtagtaggttgcttttatggcatcttgatccatcaattattaggcttgatctctcagtgatgctcaaggaggtaattagaaggctcttgccttgcctgagaaagaaattaaataataggatggaatgacataccttaaacactcatatggaataccctatgcttttgcttgcactgagttttgatgtgtcctgaatcctaattttggtcaatgggcttctacacatacttttaatcttgcaaatagaactacaccaaacagaagggtatcctatgggagcaacaagatgtttctagatcttacatataagcagacgcatcccttgtaatctatgttgttactggttttgtaggaacttagaagagtttgcaatcattaaatccttagcatgacaagaagtcatctgtatatgctatagcatttgtgtcatctgagtttgtgtcgcgtcctcttcgaccgtctcggggaagaggttctgtgcgagcttgttggggtcgacggtggggtagagggagttgcccgtggcggcgccggtggaggtggtgggtgcggagaagaaaggggtgttgagatcagggtgggactggtccacatccgggtagaggctctgcttggcattcgaggaagcgaaagccatggttgcgtagctggtcggttgctatttaattttgcattcggttcttactatgcttcagggattaagtggttgta

SEQ ID NO: 5490 - DNA, 990 bp, Zea mays
  Intron number 2 from transcript GRMZM2G539377_T01 (locus G RMZM2G539377) derived from phytozome v7.0 (chr-ID 3; pos 1 07183202 to 107184191 reverse strand)
tggtattggcattggcattggcatttccccgcagggttagaagtacattgtagagatcttgtttcagtaatgccacatttaataatgtgcccattttcatgatctgagtgttcaactgttcatccatctatcacctgtttcttgcttttttgttctttctgtaagctatcatggcatagtagtttatgcagctgtagatcactagcttggcagcgacagagttccttgtgagacctcagagaacctgttcccgtgtatctccatcatattgttgttccttccatgagtttaggtatcccttggtccattctgcatcattttattatatgatcataagtagaagaaacagggaaaagtgtaggaactaaagaaatgtctcttagattcttggtgccaaagctgaggacatgttgatattggggactgctttccactgacattgttctaattgttgaatgatttaatttggatctcagttttacttggcatctaaaatgtctgtgcagcaagttgtcgagaaaacctagtgtacgataggcgacatagaagaattctacgtgcatgggtgcattgatgttttcatgcatgtatattgtcgttttttgagcgatacaacattaattaattaatgactattttggcctgctgtaattttcgtttgtgctactgaaattatttgagcaggagatgtatttattgaatctattctgtttcttccttctatatagttctttatttgaattgcgtgcaattttattccttgttacaacatacagacatatatggtatatactttttgaggctagaagctaacagatgctcaagggatcctttcaattaagattaaggtttctcttagacaacccatcagttagcgctaaattcactttcctagcacctagctcactgcaccagggaaaaatatatcttgatctagattttatatttagtttgcaaaattcacctcattcctttgtttttctcttgcag

SEQ ID NO: 5491 - DNA, 512 bp, Zea mays
  Intron number 1 from transcript GRMZM2G382038_T01 (locus G RMZM2G382038) derived from phytozome v7.0 (chr-ID 7; pos 1 28638291 to 128638802)
tcacagaagggcaagatccaggtgcacagggacgagcagagcattgccttcgcctctgtatctacatctgtcagcacgaacatatgagctgctaggtatcctaatctttttccatgtctatctatccctcacccatgtggatattgtgcccgtgttttgatggcggcttagaatcttgttgaagcagcagttctgtattccctcctttcaaaagcaaatcttgagaataacaggtaaagaagtcccgaagaagagcaaaatcattgattggatgtgggcttacatccaaaatgtgaccgtttctaaagggtgcataaggaatcttacggtgataagcttagacctatttgctgtttggaatactacagcatagaagaagcaatggtgcaattaaacagtttatttaaaagattataaagttggagcaaacttttagctgtagcatacatcttctattagatttatcacaattttctttgctgaaaaattactctttccaggttatagaggat

SEQ ID NO: 5492 - DNA, 807 bp, Zea mays
  Intron number 1 from transcript GRMZM2G002614_T01 (locus G RMZM2G002614) derived from phytozome v7.0 (chr-ID 7; pos 4 8319499 to 48320305 reverse strand)
gacagctgctacgacatcttccggtgagctctccttctctctcgcgcgagcgcttcgcccttcggttccaacttccgtgctgcgggtgcgggtttggagcttgccgttgcactagcgggccattagaccaaggatggtggaactggaatagtgcttggaagttggaactgttttttttttcttttttcgttttggcttctggtatttaatgcgcaggcgattcacttgcacagtaagattcagaagccgtccatgggtgcctttttagttatttgcttctattctctttcatggagattgggatcatttgatacatacctgcgctgtgcttttacatgggatagacgagaaatcctttttaacttcaacctaaaattcttacagtgagtcaaactctgagaagatctaataagtgctactcaaaccgtctaactaaatcagctagaggctcttacgtgatgaagtgatttttaaatggattgccattctctattgtcatgtagcactgctcggacgtgcaacaagctgatgtcagatggttcctggtgtcaatgcaacaacggtctcatgtttgttttatgttggactgttggcctttgcattctataggcttctcacttgcttctgacaactcttaaattagccgggggaattaacagaacataggtgggccctttgcatttaacttctgactttcgtctgataactcttaaatttggtgacatatttttttctttatttcaataaatatagtgttctcttgtctcccaatactgaatttctttagtctgtggatccttacacagc

SEQ ID NO: 5493 - DNA, 568 bp, Zea mays
  Intron number 1 from transcript GRMZM2G381638_T01 (locus G RMZM2G381638) derived from phytozome v7.0 (chr-ID 7; pos 1 17179860 to 117180427 reverse strand)
agaccaaactacaagaacccactgaggtgaattgaacagaacatggtgttttcctttccatctgatctggagtttttggattctcttcttcttatgcgtttgtgccatgtggagtatttgtttactttttttttctagcatctgtgaagtatatcatgatttccctagtatgtttactgtttaactttcaacacttgctcatctaacgctgtagtcaaactgcttagacaaagaactcagttgtagttgtaggtcaggaaaatgcaccactcaaacaacaagaattcaatcgggcgagcaacttgctatgttgttacctcatctggtattaattctatatctgttttgttcgcaaatttgtgcatatgaacattttactattaagttacctgtctaggttttcacactttctcatttattgcctagtaaaactgcttagagaaatgatttagtactagcaaaaagtgcctgtcctgatttcaccatacaaacaaagctctcagcatctaacaaactgaatgtaaaattaacagactaggttgcctaaggagacgacgcatcctttatt

SEQ ID NO: 5494 - DNA, 580 bp, Zea mays
  Intron number 2 from transcript GRMZM2G063961_T01 (locus G RMZM2G063961) derived from phytozome v7.0 (chr-ID 6; pos 1 50461518 to 150462097)
cgctgcggcaccctaacatcatccagttcatagaggtgcgtgtgcgtgtgccaataaggagcgcggatatttctcgatcgtttattactcccttttgtcctggtattaggtatatctgtaggcttcggggtaaaaaagagactttgatctatgcggtgtgcgtgcttttgtgcggttgaaggaggcgccgatgacgcggaaattctgacgcagggttcatcttcttcttaatttgttgtgtttatgagcatttgtttttgagaatcgagattgcattgaagcaatcaagctggctgcccaaaattttgccttttaggatttgtggatcagtattaaggtgccagatagttgggtttaaattatttgggaaataagttgcttagattcgaagtgtgtgccaagtttatctctctcccttttagtttctctagactctagtactatacatataacattattttctattactttatataaatatatacttgctaaataaacgaccaccaactcaaaagcttattccattatgggaaaaaattctgcaggtgatcctaactccaactcatcttgcaattgtgat

SEQ ID NO: 5495 - DNA, 752 bp, Zea mays
  Intron number 2 from transcript GRMZM2G375904_T02 (locus G RMZM2G375904) derived from phytozome v7.0 (chr-ID 6; pos 1 58186424 to 158187175)
aagtccctgcaagataggaaagagaggtaggcagtccagtggatattaataaacttattttcacctttgtctgctttggctatagatttagcacccatctagtgatctagttttcatacaagtagcaaaattccaaattacgacttaagtgtagaatagaaagaaatgaaggtccccatcttgctgttatcaagcaggatgcccaactgcacacatgccatgccatgtttggactagaatggcaagcacagccacacaggtgcggccacgcggatgactaagatcaagtccttacaagcgtgttgtgaccatggtttagcccagaatagaaagcccagttacagcgttaactcaagttaggtagctccagtaccatattatgttgtagctgttcttttttgtgaattgtattaagtcgtagctctgtagtgaatagtgatacacaatgatctagcaaagctatgaactcaacgctgaatatgattttatggacttctttaggattgactctttgaacttaaaaacttactcaagtaaacttacatactcattctaaatgatgttcaccgaatttgtttcaaaacttatgcaattcaaacttatacctacaatcatcatcaaatttcaaatgtgaagacttaattttctcgtcaaccaatctacttgctggatttcatttatttgatgcaaattgacttgcaggaacttgtgatcttacctttacaatatattggtttacttttaggcgctgg

SEQ ID NO: 5496 - DNA, 841 bp, Zea mays
  Intron number 2 from transcript GRMZM2G115901_T01 (locus G RMZM2G115901) derived from phytozome v7.0 (chr-ID 7; pos 1 37460646 to 137461486)
agaggccccacctcgaccgctacaagtgcctcaaggtaccacacgatcccttgaagctctcattctgcgtgctaaagaaacatttgcgctcatcgttggtccatctgccggctgctagttaaccttgttttaggtccacctgaacaactgtcacatgtgcaccaatttgaataacttggatccgtttcagtttggaagatgctagtgacagcttgctggcttgcgttcgatttagaatcttgctccaaccgcccgaagtgtaagcttagcttctgaagtgctggattagtataaaagctttcctcattttaggatgcgtcctttggttgatgcaacagtttgtggccaagcaattgttaaaacttgaaagtgaccaaatccctcgtttgtggaagttgatagttttcaccgctataattccacttattatgtagctgtgataaatcaaaaacaatactgtgcagtgtagcaaatgctcattacttctgacccagtttgctactgggtgaatcagaaatgcgtcatgcacaatactgtaccagtgtagctaattgccgttacttctggtcatgtttgtaactgggtgaatttgaaatgtgtcatatcctgcctaaacctgctagagttttttttctgtggagggccatgaatgagtcttgaatatgacttgtaggtccagcaataagtagacatcctataaaaagatgtgtgcaactttctaattcgttgggtccctatatttatgtcatctagcataaacattcctattaattttaagctaattttaccaatgctgttttctgcagccaagctggcgcaggcccaagggtatcgactcccg

SEQ ID NO: 5497 - DNA, 791 bp, Zea mays
  Intron number 2 from transcript GRMZM2G141941_T02 (locus G RMZM2G141941) derived from phytozome v7.0 (chr-ID 7; pos 3 5611149 to 35611939 reverse strand)
cttgatccacttgaagtgttcagtacattctgtaggttagtaccaaccttttgtgtaaatgtcaaatgaacatattaattatgtgcttcaggtctctgtttttttcttgatctgtcatttccttttttttgttatataggatgtgctcagttaggccattttttacagtaaacctactttatcatttttttccatgccattgggaagctaatgtgaactttcacggaatgacatttccttgggtacaagcactatatttaccttgtataggatagtcttatttaatgttgccactatgtcttttaggacaatatatattgccatttatggccagtaattctcgatttgttttattattgtatttgttatatagaatgtgcaatttctctgcaactttcattgggcggcggtacttatctgaatgtttatgtcctactacctttttagaagtatgttttgaaggcaggagatcctttcctttgaaccagaatgccctctttgaaactaaaatatctgttgggaaccaaaattgtcccttaaatgatcttaatattaatttaataaacttcagtggaactttgatacttattattgacttatcttctttcttggtcttggcacttgcttttgtgtttatatagaagaaaaaaaaatctgttctgatgagtacagaaaaatgtgttttcagatttttttttttgcttaaactgcttaacttcttaacttgaaacaacaacttattttttcaacaattctaactgttaagtgaattcaacacagttggtttcaag

SEQ ID NO: 5498 - DNA, 1027 bp, Zea mays
  Intron number 1 from transcript GRMZM2G097726_T02 (locus G RMZM2G097726) derived from phytozome v7.0 (chr-ID 7; pos 1 3348999 to 13350025)
ctataccatcaagggttcggacagagtcatcaagcgtgagtgcccctttcccccgtctgatccggaatttacggagggccttttttgggggattttttgttggcgttggcgggtggcgtatctggggacatgtgtcgggggtctcggtttccgggccctggggttcggggtgtcttactttgggggtagattgatttcgtcaggaatggttgcaataatcgggcgctggtctgttgttttggccatctatgcctttactgcggttgaaatttgaccgctttgttgttcactgctgccaactccgtggctgtttggggtttgaattcaattagcaatgtaacggcgtaatcttcgaggggggttagcatggcagtggttactgcagtactatgctgtgctctggtcacttgaaagttgaaactttttttccctacaaagctatcgttaacatgaactcagcttgttggaatgttcagtcttgtactaggtattagtggacgtgtgtacatcgcattggcatctgtgtatgaacgagctcgatttatacaaaatagagctataataaaataaaagtgcaataagctattttacgattgatgtgctctttgattagattgtctacagttcgttagtatgtttgctctgttattgcgttacagcttcaaatttggtacatgaatagtatttttttggatagaagagctcaatcaaggttctgtaatacagtgctcgtttcctcacaatgtcgtcggccaaattttggtatgaggtcttcaaaagtatattggtcctttactttttcttgcaaaaaaaaacaattatcataatagaagaacttgaatacctttgtcaaacaaatacacttataatctgaccttttcaaactaaaatacaccttatagaagtgaagaatggggtatttttgtttatataaggctttctcattgctttgacgaagcagcgtaaagtgccttccggattcaattgattctttaaattgtttcttacagctggcgattgcgtgcta

SEQ ID NO: 5499 - DNA, 750 bp, Zea mays
  Intron number 1 from transcript GRMZM5G885285_T02 (locus G RMZM5G885285) derived from phytozome v7.0 (chr-ID 3; pos 6 5829595 to 65830344 reverse strand)
aggctcagagaagccagttagatatcctcccagctgtaagataatacatgcaactggcttctcacatcctcatattttcgtgaaataatctgtatctggtttgtgttatgcctgtttcagtcgttaaccttatgctgtaattgctgttagattctatgtttcatatgtgtggaaatcatcttgttgattcttttgccatttactatatgatcgaggtatagtatattagtatgtcataatggttaattttgcctgtgaggagaaattgctcgctaagaccaatattttatatttttcttcaggagatagggatgcttttatttcccccctccagttccttactcttggtaacaaacgatttaatgttatatatatttgaatgttataaaggtaaacttcggtaagagatcaacaaatccttgtaacttgatattgctaagaagtgatcaccccataagtagcaatgccttaggattaaatttgggaactgaacctacctgagttggtgaagggtgtggatgcacacctagaagatctaagttctagtccttgtgatagcatgcctagtttgtccaaagtccgtaatataaagcttcctttcttttgagttggtttatttattttaaaagtagttatgaattgtttattctattagaagatatagatttccatttgctgctttgagacaacactactcattgatttgaatttccaggttgaccggtaaattactggattgtgggaaccata

SEQ ID NO: 5500 - DNA, 893 bp, Zea mays
  Intron number 1 from transcript GRMZM2G087795_T01 (locus G RMZM2G087795) derived from phytozome v7.0 (chr-ID 3; pos 1 469349 to 1470241 reverse strand)
tgatcctggggattgtaatattttgattaaatcaggtaggtaaatttgctattttatctgcaaattttgatatgtttctgttttgttatggttttattaagccagtgcaccacacaataacttaaatgaatggaatgtacatttttctcattcttggtaaccttgatgtgtttcatgttgtcattgttatcatagttgtgaaggaccctgtgagaaactgtcagtttctttcttaccccctcctccagaggtcaatcactctggttgacttgacctcattttacagtcatgtagttgtatcaacaagaggattatatatctttgtttcttatttgttgggacgacctttcaaattgctcatttatgatcaagctagtttggctcctccctcgaatttgcagatacttgatcttttggacactgatgtggtctaccaaaaatagctttgagcaatgaatatctcaacaatttttggctgctttgatagtacttctcaagacaaatctatgcaaatatgttcaccaagtttctgaattaaatactttatgatttatttgtaatcaaaatttttacagttttgacttttgactcaaaccttgtccaaagtgtcaaatcaattatttgcaaaccggaggaagtacatgagttctaaactgtcttcactgtggcagtcacctcactgttagggagcaaattgttggcttggctgtggccactataaaattacttaacaatatttttatgtcaatccttgacatcatgtaacatctccaataatttgtcaatcctgaagaccaggactggacatatgtaacatctccaatgaggagaatgctctaagcattgctaacttttgtggtctcatattcccagtgatcggagtctaacactct

SEQ ID NO: 5501 - DNA, 894 bp, Zea mays
  Intron number 1 from transcript GRMZM2G173534_T02 (locus G RMZM2G173534) derived from phytozome v7.0 (chr-ID 3; pos 1 56363147 to 156364040)
ctgcgctcggtggtgccgaagatcagcaaggtgatcaaccagcctcgtccattcatctcctattcgtcgtgtttcccatctgtgcttattagtgtatagttacatatagagtattatgctttgcctatatatgctgagtttttttatttatctataatggtggtgagtaggattctatcctacgaatatatttttcacttcagcatttgtgaatttcggtgttgaattcttgaattgtccatgtttagatccaaaagctacatcttttggtagatctatggtactcctacgtgcaggggtggattcagtgggcggtcacatcctaagaacacaaaagaacagttagcttagcacgtcgaagcagcctcttttccatggcaaatcatatgcaaaagccatattcttttgattactccttactctaggcttgtaaaattcgatcatgtaactccttattttaatacgaagtgaaatctgtttttagctccttgtaaatgattgctttactgtccagctacggaaatttccagtcatgcattaatttgttgccatgggatttgtcatttcttattactttttgttttctaaatattctgaggcacgccctgattcagtggttgaaattaacagggccatgcacaagatgttgtcgaaagcgacccatcaacccatagcttggaaaataatgatgtttttctttctttctttctttctttctttctgttctcgagaattcttggttttgctagctttaatttggttataactattgttgtgttccttaaacaattcacacacgcttggacgcttcgccatgatagtacatgtttggtattaatcaacttgctttagtaaatgttgattctcatcagcatttctcttctgctgtgacag

SEQ ID NO: 5502 - DNA, 858 bp, Zea mays
  Intron number 2 from transcript GRMZM2G104146_T03 (locus G RMZM2G104146) derived from phytozome v7.0 (chr-ID 7; pos 1 69875150 to 169876007 reverse strand)
gcagcagtcggagtcatttttgctgccccctcccggtaagaggtcccaagcttttccttgtccagtgatgagaactaagttacctactattctctctaatatgatgaggataaatgtctctggtctgtacaaactaccaatctggacaagaaatctaatccactgtgctccaatcgactgacctctgataatggagtttagagtgtttgagtttgaggacttaggtataaggatgcattttcagctacatttacgaacatcttgttctttttttaatgcatctaccttatttctctgtatgaattcccactcgatttattatgcagttaacactagcactttacgattgattcctagcctaatccttaaatgtcattctaatcaccacaccttttagatctagacattagacttgtattgttggatctgtttaattgtttctcacacaacaaaatgagatgaagatacacacgagtctgagtttatcgtgtttgagtttgaggacttcgataaggatgcattttcaactatactagcttctgcgttaatttacttttgatgtcgtgaaacaattataagcattttttcagcgtatgtgtatttgtgcaacaagcacaattgctttatgttccaaactcgcttctgccttaatttacttttgatgctgtgaaacaattataagcattttttcagcgtatgtgtattggtgcaacaagcacaattgctttatgttccaaactcgcttctgccttaatttacttttgatgctgtgaaacaattataatcatttttcatcgtatttaatgcatgcacctagataacttatgttttttacttgcagacacctgtaaattttgt

SEQ ID NO: 5503 - DNA, 540 bp, Zea mays
  Intron number 1 from transcript GRMZM2G014452_T01 (locus G RMZM2G014452) derived from phytozome v7.0 (chr-ID 3; pos 1 79999629 to 180000168 reverse strand)
gaccctttgccagcgacgagcacccaccacaccaggtatgcccgcccgcacccctctcttgccttcctcctgtgtaaaacggatcacccaaaccctaattttgagctatttggctttctgcattcgggtctgatctaataagtgtaactgtatgcatgtattatctctacaaactttgttttgtggcaaaaattatcggctatattggtgggtccgccctgcgaggacatatggaaccatccgtattcagtgacgcaatgcttctttagacatttagggcctgttcggttccagtggattgagcacccggaataattcttagctggattgtttgtctaatttatataagagtcgatgagctggaatgattcttggccaaatccggcacaaacgaacgcacccttagttttcacgcactgcaatttggtttttgtctcccaagccccaatacccttctcttcagcagtgtccatgcaacatcaatttccgctccttattcttatttgaatgaatgctacttgatggatgcaggatttcatc

SEQ ID NO: 5504 - DNA, 1025 bp, Zea mays
  Intron number 1 from transcript GRMZM2G102664_T01 (locus G RMZM2G102664) derived from phytozome v7.0 (chr-ID 3; pos 1 3864710 to 13865734 reverse strand)
ctagggcgtcgtttgccggcgacgagcaccacgaggtatgcttatcctttcgtgctgtgcgactcagaaccctaacataagctattttgctatatgtattcggatctgatctaattacaagtgtaggcatgccttactgggttcgcccttgtttacacttatattatatagccgtcgctcacattagattgaggcaggccccagcaagttgccctggacaatttagacgatgccagcagcttagttggtaaggatagctcatgcgacttgtttaggtagttgagtttgagttggacacaattagccactctgggctgactgttgataatttttttagataatggaaaaattctgttcgggccttttacagttgcttgtatacggccttacaaaacagtccacagaaacattgaacgaactagaagtgacataaaagaaagcctaagatgtaggcggaaaatcactaaaacattgcaattctagcattaaaccgccacccatgccttgcaaaaatctccatggccaccacttccaaagagcgacaaacatcgtttaggcgatgacttaacaatgttgtccaggttcatagtctcatagggaaaaataatgattagaatgatggatgatacatagtagaacaattcatagcaagtatacgtctaacgagtcatttgtacagtgcgtatggaaggaaatgatcattatctttcattttttttcttgggatccctttactctttcttgaatatgtgcctgttgataatgatgccttgctaaattgtttttttgggatttaggaaacaggaggggccagggtccctactggaaaagatggataaaacgaacagtggcactaaatcaccaccaccctgttatctgtcgatcccaattttttatttcattgaagcttcctgttcataaaaattcttctactcatagcttttcaacattgtgatgtcacaacttctttttggtgataataaaaatctccttgaccaggtactttgtgctaggatagcagtgct

SEQ ID NO: 5505 - DNA, 510 bp, Zea mays
  Intron number 2 from transcript GRMZM2G390498_T01 (locus G RMZM2G390498) derived from phytozome v7.0 (chr-ID 6; pos 1 39171477 to 139171986 reverse strand)
ttacggtctcacgactccgccatataaactggtatgtaagcttgttggcgccaatctcagaagatttgtatgttgtcattaaaggaatatccaaattttaactttgttaaactttgttttgtggtacaatgtccatgatgctctagtaacttacatgagcaagagaacagttgaacttcactggggtaagcaccatcaagattacgtggatggcttgaataagcagctggctaccagccctctgttatgtatgtatacactctagatgatctgataaaagaagcctacaacaatgtaatccattaccagagtataacaatgcagcacgattaactcgtttatgataccctgtccattctattttgcttgcactactcatcttctgtctgtcatatgctttctttaaaaaaactgcaatttgtgctttcaccaatagtaggatggttttgggagttccaagcttctgttttcttacatgcaggtttggaatcatcattttgttgggaattg

SEQ ID NO: 5506 - DNA, 699 bp, Zea mays
  Intron number 1 from transcript GRMZM2G017404_T01 (locus G RMZM2G017404) derived from phytozome v7.0 (chr-ID 3; pos 1 55619021 to 155619719 reverse strand)
catcgcctcatcctctcccgcagcgcctacttcaggtgagcagagccttggcgcgctcgccgccttcgcggattgaagtgcctgtttggctgtttcgatctgggtcgtctgcagctgctcaaagtacttaattgaatttctgtgtggacatttttgtcttggttgggacgtctccacccctttcctgtaaaatttccatgtgctttgattcctaacgttcaatctaagaatatgaccttatcaagtgattaggattctgtttttccccccagaaagtaacagcctgcaaatagcatgccgattgaaatcttacactcttaaccgaacatgttagattttcatttactctgtatatatcatattgcatccttcaatgttcagtttgccttatgatttccagatttccatttatgccaagaatcgctattgaagctaaaattgatttaataaaagtcaggcactatttttttctgttgagatttcaagttcagaacttttggatggaagtataggcatcaaccaatagtgtggctcatgaaaaatgaaatcatagtttttctcccttccctttagcgtcgtgcacacatatttcccttattacattacttccctactggcacatccccacatagaatgttcatgtaaattaaaacaagtaaaatgcttaacaacttctgtatggtaatttcttgaaggaat

SEQ ID NO: 5507 - DNA, 986 bp, Zea mays
  Intron number 1 from transcript GRMZM2G010306_T01 (locus G RMZM2G010306) derived from phytozome v7.0 (chr-ID 3; pos 1 97390698 to 197391683 reverse strand)
ccgattccaggtgcgtgtgctactattcgtcgcctagattttctcccgttgcttctcccagtcccatatcgaatctattcggagaacagattaaaattaaggtacggcggactattgtagtttggacgagttgtttatggactataataccatgtccacactataatttacccaaaacattgttttgtattgttatgtactatgtgtacgtggacgattaaactgctggacagttagactgcgacaaaccgatagcagatatcaatagcaatagactggcctaagagtatgttgggttactttaggctagtgattaaagtttagttagaggattaaagtttaatctctactctgtttaattatagggactaaaaatattcagaacatattaaataaatcataagaagactaaaacatgtggcattctctgacaattagtacaactaaaataaattatggacaaaaggtgaaattaatatgatttagtctcttttagtcaccttttaaggtaagtttagtctctattttaattttaccgtttgtcaattcagagactaaataagactaagggggtgtttggtttctagggactaatttttagtccctacgcatttttccattttagttacaaaattgttaaatatagaaactaaaactttattttagtttctatatttggcaatttataaactaaaatagaataaaatgaagggactaaacattagtccctagaaaccaaacaccccctaaaacggagagactaatctttagtccttaaaccaaaataatacaagtgccatgtatttttccttagattacaccgaacaaaaacatgacagctgaaatatttgtaatagatattttctctagacaatcaaacacaagggtcctccgcccctgagtctagtaaagaatgtgaacccgacgagcggttgtttgatgtgatttcttgtgcgaagcgttgcaggaggaggattccgaggagt

SEQ ID NO: 5508 - DNA, 661 bp, Zea mays
  Intron number 2 from transcript GRMZM2G029807_T07 (locus G RMZM2G029807) derived from phytozome v7.0 (chr-ID 6; pos 4 9407368 to 49408028 reverse strand)
atattttggttgtgatgtgtaatattccatggtatgaattcatatgatgtgatcattctcatgatgattatatctaccacaaatgcttcgccatatcacttgccatgtcagcggccaacgcctcccaatttatgacaaaattctttgtcacaacaattttgccacatcatctgccacgtggcttgccacgtgatcaaatctatgacaaatgttttcgtcataacggtttgccacgtcacatgccacctcatcaccatagccatgtggcaatgcatgtcaatacaaattgtgacgtttttataatgacttatgacaaaatagagtgtcatagatttagtgacgaatttgatgtgtgtcataaactctatgacgtttttttgatgatcgtcattgtagtctatttaacacgcaccttctgtgacgatgaccttttcgtcacaacgatgtcaccaaaacacaacctgtgacaaataaatactagttggtgacataatcacaatgtcatagaaggcctaaaaggttgtagtgcatcttccttgtttttctccttcggttacatcaaaccgagtcaacgccacaaaccgagtcaacgccgcttccttgtttttctccttcggttacgtaaaaaaaactagaaacaaaagaaaaaaagaaagaaaaa

SEQ ID NO: 5509 - DNA, 753 bp, Zea mays
  Intron number 1 from transcript GRMZM2G541193_T02 (locus G RMZM2G541193) derived from phytozome v7.0 (chr-ID 3; pos 1 7613319 to 17614071 reverse strand)
accgatatttgttctccttgaaacaaaggtatactggaccaaccccataacatacctttttttagctgcaattagttctactagttaggaagtagttattttacgggacttttaaattagtgcccttagttcagcatcattgctcagttttgcctctatctagtagtaaaaacacctcatccattactactagagagggttaaaagttaaaactgcacgttgctgctgaactagggttatggatttgattttttttcttatttacattgcaccctttggttaggtgttacatttcaattgaaaattttctgttataggagtacaaatgcacaaaatggtcagtttataaccttcagatgattcattttatttgtgtggtatggttgattgtttgcaatcgagtaagtcctagtttcatgatttatgatcaatttagtcaggttccactccagcattgttactctaaaatttcttgtcttgagtgcgttttgaaataattttttaaagttcttatggcacggaatcaaatcaacttgtttgatggcaaaattgtaaatatgataatggtggacttctttgtttatgacactctattaggatatctatttagtgttcgccacctggaaagcagagtacaccttactatttagaaggcctacataacttatgactatatatattactggctgcaaaccttatgttgttttgagtctatttgtctgcagcaacttacatgtttgtttatttacagat

SEQ ID NO: 5510 - DNA, 1050 bp, Zea mays
  Intron number 3 from transcript GRMZM2G102421_T03 (locus G RMZM2G102421) derived from phytozome v7.0 (chr-ID 6; pos 8 7279934 to 87280983 reverse strand)
gaaacagtctgctggggagctccgtcttcataaaggtttgttgaattataggtgaattctttcttgtagcaatctgttatttgttttccatacacaacatttatttatataacccaaaagaactgaagttactcttatctgtttcataaaatagaactgtttgccactgcttgttccaatatcgaaggtcccacatataccaataaaccaatgtagcgtttaatgatcttagtgcttactagtagggtagacatttacaacttcctttcctcttgccctaatatgggctgatgtattacatacacctcttagatgtttaaaagattattggtttatcctagaccacctcctattaacttcaatcttcccacctctcactctctcttctttcccatacttatcttggtccaaatctccctgcctagctcccattgccatgttctgtcctcaatgcgttaccctaagcggttggagtagccgcttcgcaagatggttcatgaatggacggctctagtggagaggttacatcatagtaaaaataacaccctcaaatggaatagtatgtatttagtgagccgtccattcatgtaaatattttgagggtgtttcattttctttttcatttgtggtctccaatcttcttgatgatgccatttagtgagcaaagttaccgactaaaacctctgttaactcttctgtgaaatgggttccactcatgtggatacacttgtttgattgtgggcactgtctgatttgtatctgtattctctatacaaaattacaaatggtaactatttcactatattcgccataccagttccttatctaatatttctgaattctaatagaataagctgtgatcctaacttaagctacacaggcatatgatgcaataatccataaacaagatgccagcttccaacttattgatgtacctgactgatatttgggttttctgatggtcttgaatgtgtgatgaatcatttatgtggttacttctttctcaaccatgcagatattagtgagctcaacctgccgaagaccacatca

SEQ ID NO: 5511 - DNA, 1051 bp, Zea mays
  Intron number 2 from transcript GRMZM5G880720_T01 (locus G RMZM5G880720) derived from phytozome v7.0 (chr-ID 3; pos 2 13555221 to 213556271 reverse strand)
gtgcacaagggcattgccttcatctgcgagatcaggttttcttccctctcctgttttgatctgtcatggttcaacgtggtagaagcggtagaactgagtgcttgcccgttcggtctcttgaagtagtatagtggcacaaatttcatgccccttttgctcctatacgagttatattcttagatgtgcttgattaatctgcgcattcattctatcattttttcagttttaagattggaagctaatatcaagtgtctgtgtacacaattttgctaggaatcagatcctgtttaatatataagttactggccaatgattatggatcttgctggtagaacgatctgatccgcgcgtctgtattccgtaaatttcttacgatgatttttattttgtgtatctgatgccacattatgggtaaatccggagatctattttataaaaagtagtaatatggtctggtgctgttgggtaaatcttgagatctattttgtaaaaagtagtaatctgaacacctttttggactgtcttataagtggcttctatatttcactgcacatttcagcaaatggaaccagcgaaacagataaaggtcatgaaaggattctagaaacgatcaacacagttggacatgacggtaataacattgacactgctgatttttgtttatgttacttgaaagtttaaagatctcttgtgtcatataatttatgctatgatgatttggtggtttttttagactgagattttcaactgttgttgacatgagtgccttaatacctatcaaagctttcgtgcttttgctataaacagatgttgcaaatatgttgtttgatcatgctattggatgttgcttccaccaaatactctctttgcaaaacactgctttagcctaattaagggcttcaaatatttgatcttttgaattcaacctaggtgctttgtgaagctaacattgattatatgagtttgaagctaagccaattgttagatctcatgtaccgcgtggggtgtcactgcaggacctccttgtgcggctcgccgacacatacgacac

SEQ ID NO: 5512 - DNA, 709 bp, Zea mays
  Intron number 3 from transcript GRMZM2G081668_T02 (locus G RMZM2G081668) derived from phytozome v7.0 (chr-ID 7; pos 1 58971603 to 158972311)
agtgcttataccattaagaagttgtactttggcaggtttgtacttgacacaacacaatttttttaattgaaaaattgatggtatttccacatcttacattcctcttatttgacatgcaccctaggcattcaatctatcgtgaagtttccattatgatgctaatggcttatttatcttacatgctagctgaagtgagcaccctgtacttttaacctcttcagacattttgcattttttaaaagcaaacatagctgtaaattgttattaacgggttgcctttttattgtaagttgctcgatttgagtggaattctcactgtgtttttctgcggtgtcgtaatgtcacactatacttggcacaatgtaacagaaagttcaagggtcacaaccaagtaagtagcttcataccttctgtatgaacatttgcttttgatcatgcattctttggtaatgcttatgttaatgtactattggatggatcacaggcatgcctttgcaacattgtcgtttatctccgagacttttctgtttctttatgttggtatggatgcattagatatagagaagtggaagattgtcggtcaaacttataggcatactctctccctctttctctctcttcattgctcaactataagatctttcttctagatctgtattttctatcatgtgcagcccggtaaagtctatcgctttgagcaacaccattt

SEQ ID NO: 5513 - DNA, 610 bp, Zea mays
  Intron number 1 from transcript AC207655.2_FGT003 (locus A C207655.2_FG003) derived from phytozome v7.0 (chr-ID 7; po s 136982663 to 136983272 reverse strand)
tgatagaggggcatcaggttagttcattttgactattgaacttattattatttatttacacacatagttgtattcgatcccgaatccgattgaaatacattagggtaggatacaggatgacatactatccatctatatccatccgttttcaccctagaatttatttatatatcaacatgcatactgaaacatggttcatccttgatctttgttctaactgaattgatggtctctggccacaatataactatgggggctgaccaacatgaggcattgaggaagaccaacaaatcaacataaataaggtgctagcttctcaaacttttttcagaatgagatatatgaacagtatgtcatgtcagtgtgattaattttgccatgttacagatcatagtgttgacaccaatactcgagaaatactagaaatccctgtactgtggtttttcttctacctgctttggtggcagggtgccattttaggagcatatgaggtggctgaagttttttgagatttggttaacaggaaacaatgcgtacgctaaatgttgaccccatgtttttttgttttgtgtgcacacgcagattgttacttgatcttcttcagtgaggt

SEQ ID NO: 5514 - DNA, 691 bp, Zea mays
  Intron number 2 from transcript GRMZM2G360579_T01 (locus G RMZM2G360579) derived from phytozome v7.0 (chr-ID 3; pos 6 5187456 to 65188146)
tcataatcaatagtgattgtaaagtaaggttcttgtaaactttgtgtttgaaagtttctttgcgagcctggtaggataggttatttgttttcgggatcaaggatcctaattgtggcactactataaccaagtatcctgcatgagacgtaagatacctaagtataatatatcttacgttacttaccttatagcttagcagatcttagggatgcatccatcgattatataaagcagcgaacgtgtggcgctaataaattctgtgggtaggatataatgataagatttagtttggcaactccattttcccaagggatttctattttcccaagagaaatcggttcattttccctagggaaaataaaaatcccttggaagaacggggttgccaaactagccctaagtatagcttgccgtaagcatctcaaagtgattcctatttatttaatgggacctcctaccatttttaggctacgctttgttgatctaaagaacacatggaatttggaatgtgagttttagacagatgatgattacaatattaattttatagttgcacttgtgtatccatagtatttttctgctttatgttcacttttgctttagttatggtcctgatattagcattggacatcctgcatttgtcttcttattggagtaccgttggtgcaggtgtcgaccacaataactgtta

SEQ ID NO: 5515 - DNA, 604 bp, Zea mays
  Intron number 3 from transcript GRMZM2G417750_T01 (locus G RMZM2G417750) derived from phytozome v7.0 (chr-ID 6; pos 1 11975409 to 111976012 reverse strand)
tctgttcaatccgtggcttctcggcgctctcctaggtaattttcccgtctcttcattcgaactcatagcagtactacacaagtttttcttgattattggtatactcagatcagtggtaaaatgaaaatctatttgttcctggctaaattagttcgtttatgctttcttgcccgttttctgccatctttctctcttgataatttttaccctcattgagccctttgacttataagaaataaccacacaagtttgaaccatttgttctcctggttgtgaagtgtccatttcttgctcgttttttgcccgattcgatctattcattgcttgattcaagtctgcaactaattttgtgtctataaaatgcatagataaaatggggttacactattgtagattggctagatagagattttaaatgatctgaatctaactgttttcactacattaagttctgaatctaactgttttcactacattattgttgtttaccttcgcatttggtttaaaaaaatgctggcgatatctgctgcgtttacatagcatcatagatcttaacatcgggaatccttttctgattaaaggttttggacttcaaaactttgta

SEQ ID NO: 5516 - DNA, 635 bp, Zea mays; identical to SEQ ID NO: 4488
  Intron number 6 from transcript GRMZM5G834205_T02 (locus G RMZM5G834205) derived from phytozome v7.0 (chr-ID 6; pos 2 384523 to 2385157)

SEQ ID NO: 5517 - DNA, 490 bp, Zea mays
  Intron number 1 from transcript GRMZM2G089854_T03 (locus G RMZM2G089854) derived from phytozome v7.0 (chr-ID 7; pos 1 30248894 to 130249383 reverse strand)
ggcagcgcgcgctttggtggtgctcccacccaaaagtaagttggtggcttcttggttcatgttttttttttgtttttggaatcaagcttctcttcttccattggtcaggaatttcttggttctgtccttcccctttgagaactttcggtgtgagtcgtttctcccttcttaccgcgaagagatcatcttctccccacaacctcccccctcagtgaactttgaattgtctaatctttctcatttcagttgcagtgtacgtattcgatgtaggttatttctagtccaattcaattctgtgttcgctttgtctagtcaccggccaatttatttgccggcctagctctgcagattaattccatttgaccgctccatgtatttttcatgacttcatgtacctacgcattacgtcaaggcaccagtaaaagcatggacgatcgtttgatttttaccaatactacgtgcaggaatctacaggaacaacggctatctg

SEQ ID NO: 5518 - DNA, 381 bp, Zea mays
  Intron number 1 from transcript GRMZM2G139624_T01 (locus G RMZM2G139624) derived from phytozome v7.0 (chr-ID 3; pos 1 20338972 to 120339352)
aagcccaagcaggaccaaagtgagcgctctactctgccccctccttcccctatctcaatctgaagttttctttgcctagatgcttgaggatacagaggcgggtcaatgtgtagtggttggtgaatttcgagtagaatgatgattatttgggagctggacagatttcaagaaaaataaaatattaccttgtccagcctacatgtttattggaaattaaacaaaagaaaccattacgttctgccttgatagaatgatagttgatacgagaaattatcacgagcactgggtgcaatcttaagccatcagaatacaataatagcttttgataattgtgatgctgtttcctgacaccaggcaagaccaacttacaggtgaccatat

SEQ ID NO: 5519 - DNA, 620 bp, Zea mays
  Intron number 1 from transcript GRMZM2G010085_T01 (locus G RMZM2G010085) derived from phytozome v7.0 (chr-ID 3; pos 6 8362956 to 68363575)
tgcagggggtacacgtttagtttcacagccttcatgtgagtactttgctgactacttgttactaccttgacatgtaatttcctttaataactacctcaaagtttatagaattacagatagatgattttctctgctgccatcatttttttgacactatttataaggcaaactgaacctaggcaaattgaatcttgcaacgattttgaaagtgaataagggtttcaattgaggtgcaaactaaaccaatattattaagtattctaatttggtgaggtgcagactgaaccaatatgttcatattcaagtgttgtatctaagatgttcagaaacactgaaatgaatgctgacctatttttcccaataattattcctacccagtaaatgccatggtgcttttgcttgttgattcttctcataaaggaacgtctatttcactttttgttccataagcagtggcctaactacttccaaatttcttgttaaaagaattgatgtgcattttcatggaaaccaaccaataatttttggttttagttttcttaggttttatatcctttgttccttttgtcttatgtaaacttttattaaatgtttgaatttctccaggcatcaagggaaag

SEQ ID NO: 5520 - DNA, 652 bp, Zea mays
  Intron number 3 from transcript GRMZM2G037134_T04 (locus G RMZM2G037134) derived from phytozome v7.0 (chr-ID 3; pos 1 8179626 to 18180277)
cttcaacagcggctcaggtcggttaaagattctcggttagattcgctcacccattttcctaattaatgttggattacaaaaggtttgtgcttgctacatggcgatagaacatgtcttgtgacatgtacaactcaaattcttcgctgtaggctggcaaaagagtctgtgactttataatcaaattcatcaattgttttctagccagtacatcgtttgagagtggggacacaccaaacatgtacaactgctagttgtttgtcaaaaaataataatgtctatgtattatcatgcaatttgaaagcaaaccgagtaaccgactcaggcactgtttgtttaccacctagattatataagttggattatggtggaagggtaggagggtaaaatatcactttgagatcacaaataagctgaaataagctatccaatgctagcttatttatggtcccaaaatgatattttaccctcttacccttccaccataattcaacttatataatctaggagagaaacaaacacacccttaagtcagtacttatgctttgttcgaaaagtccaaaattaaaaccaatcagtgtttccttgtctttttgtttgactctttctttaatgaccaggtgtaactgttacaagcagagagtctgtgaccagg

SEQ ID NO: 5521 - DNA, 706 bp, Zea mays
  Intron number 2 from transcript GRMZM2G160816_T01 (locus G RMZM2G160816) derived from phytozome v7.0 (chr-ID 7; pos 4 7355094 to 47355799 reverse strand)
tactcaaccagcgattgtcactccaaatacaacaggtatgttgacttctacattttagtacatgccacatcataaacaaaaataactacttatgccttatgtagactcacgtttctgcatataaagctccatgtgcagacgtctaatatgttccttcatacatagatgcgtatttaatatagaatgcaagaattttacttttcaataattctatctatatatacaagccaagcaattttacttttgaataattgtaaatatgtgtctacattccatttcaaatataacaataactgtttaccgaataatcctaactatatgtacatgtcaagcaattttgcttttgaataattgtaagtatacacagagaaagatgtgttgtttaccaatataaaatagttgtttttattgatctactctattttaattatactatactaccaaattgttagttatcaacagtgccacaagtatctaatccacctcgggatagaattgttttgtacaagaggtcgtgccacaaagtagtcattgttgcacacgtccactaaaatccctatggcatatataactctagacattttatacataaaggaaaattagttgcccaaatagcacctcacttattttctattttgttgttttaatgttgaagaaaaccaacacgatctctttgtttggaatgagaaatttctacaggaaacaa

SEQ ID NO: 5522 - DNA, 1008 bp, Zea mays
  Intron number 1 from transcript GRMZM2G377461_T02 (locus G RMZM2G377461) derived from phytozome v7.0 (chr-ID 6; pos 1 38148063 to 138149070 reverse strand)
ctgttccccgcctctccgctcaccagtacaaccaactcctccacctcctcgctgctgccgaccgctcctccttccatagtcccccccccccactgccgtcgtgcgccgtgtcttcgcccacgtgcgtgactggacttctcgttgatcccatgcttggtcccgtagatctgtttgtctgcgcttggttggggaggactcggcttctcgtccaaaattattaggggtgttttcaatgctcggtttcacgatttgattttggggacggatcgatacatcaatgtgcgtgagttgcggatgctcaaacctggttcatttttaatgaaactgccacctgtgagctaattagatgcacaatcttattgttacgatctcgaatacttttttgagagctcgcaggccataatcaccttaatataacaacgggatgcaactggggagggttagttttttcgtaacaagctgcaatgtgaatccaaatcaatcagcgttcttcatctttttttgctcgttttacacgcctcacctcgtggagaagtctagggcctaaaacatttgtcatcttgaggtactcactgtcattatcatttagtattttcttccacaacatgccattttctggatagactcgctagaaacatctcagatattattgtgatcttgctaaactataggattcattgatctgctcatacatggtgtagatctatatgtttaatacttttgtttggatgccttgtttctttttaaaaccttgcatcaatgcaaaatcgaacctatgcatatacactgtattgactcaagtctgattgtatccactgtctcaaagtagcatgttaattcaatctaatttccgcagttagcataatgtgtatctgttgcttttgtgcttatacatgcatctcttcatttaccatgcctcgtggcccatatgaatttattatttatcatagttcatagttcataattcgataatcagcaaaagttctgttgatagcaaattgattcaga

SEQ ID NO: 5523 - DNA, 1032 bp, Zea mays
  Intron number 1 from transcript GRMZM2G030902_T01 (locus G RMZM2G030902) derived from phytozome v7.0 (chr-ID 3; pos 1 51293896 to 151294927)
ttttttccgccgattagtgtccaccaggtacgcctctgtcactctccccttcccttcctgctgcgcggaactgaagaccccaaaccctaatgcgagttatctctattcggatctgccccaattgcgagtatacacatggcgcctgctaacttcgagttttcgcaaacttatcgggtgtacacgtgtcctatgctgtgtccgccccttgctactacaacgtgtttatgattctggcgcggctaattttctaaaaaaataaaataaaattggggtctcagttccacttccatcccccatgctccatgccaagccttccatgacagaggttgttggttgtgttggcacgggtgactcatccggaattgggattttgccctgggggatagtttctgaaaactatctgcgtttagtgtaagaactatgtgcttaggtcctgagagatcaatttggccttgggcatgagcccaaaatctgcggaccatgacactgtatggccatcacccacttgacttattgttggatattaactagctttattatctcagtggagctggatagagagataggttccagtgccaggcaatacaatgtttctgcttcagagcagcatatatttcgtagacattatcaatattaccgctgttctctccctttgcattatgattttgttgccatcgtttattgtatacccagttaaccatcattgaacagcatttatattattgctcattttctgtttcgtccccagctgtcgagctcagatacacatcctgcttatccagctgttatttgaatcttatatcttgccattgactggttatgtggccatgagacacttttactaaatcataccaactttcagatctagtgaaggctggtaacttgacgcaaggtgttcaagaaatttaagccacacactcttcatcataggcccaggcaatatttgtgttaatctcagggacctccagtagattgctgagagttatccttgatacaggggaatatagacacagaattttttgaacattgatc

SEQ ID NO: 5524 - DNA, 828 bp, Zea mays
  Intron number 3 from transcript GRMZM2G108159_T01 (locus G RMZM2G108159) derived from phytozome v7.0 (chr-ID 7; pos 1 43234858 to 143235685)
ttttgtcagatcattcgccggacctcgtggacaaggtatgatgttgcacttgcaaagacatctgcatagttcatcttttatttattcatggcaatgtgttaaaaaaggtttgcaaatgtcgttctcattacaatcgtcaagccatccgagactctgttttcagtatttgccatcttaatcagatatatctccttcagtttccgaatccgtctatggaatggcatctctggtacagtcggaatgaggcggtctgtaaccccataaggctagaaccacacatcatttggagcagaaattgtctcacccttgatcttgtgttaaccaaatccattttcttaaaaatatctaacttcgttattgttgggtccttacaagtaagtatatttgtctgtaaactgccggctacttgtagtttgcaacattatacacaccacctttattggtttccacataagcaggtatgcacctggcacaaatgtttgccaaaaggaacacagagtatcccttgttaatggactagttaacttgagtaactagtagttgtttccgtggcttagcgagcttagctccttgactgtattgaaggcaatatttccacttcactatcatcacaatcaaatttacattgaacttgcatattttgggctgaggtagtacatgtatagtttttcattttgtggtaatactgtatgaatttaggatatttacctgaatatccatttcttgtctgtttgggagtaaatgggatccagaaactgtatattcttgagtcttgactaacctgtgcattctatcatttgtaggcagttgctagtgaaggtgggactg

SEQ ID NO: 5525 - DNA, 885 bp, Zea mays
  Intron number 3 from transcript GRMZM2G139892_T03 (locus G RMZM2G139892) derived from phytozome v7.0 (chr-ID 3; pos 5 5803098 to 55803982)
gcggggacttaaggtttgctttgtggaatccattggtatcctattatcctttagaggtcacttcataccacttagttgattatctgtaattgcaaaattaagctcttgtgccttccaaaccttatggtgaaaatgttgaattatattccatcttcaaatgaacaatgaaatgctgtgtgttcctagagaaaaagtggagtgcccaagaacaagattgaaccctcttttacattactcttgttaactgaattagcaggaatgattatctgaaaacttgaaatctgtgccagcatagatttccctattgtcttttctcttggtgaaggagaacgttgaattatatgcctgtaatgtgtttagacctccctcctatagtcatattctcctctaataagatgctcatctggacatataccaaacttgacgagagtaatttggaatttttcctataataatatcttacttagaccccaaattgttatcttggttcccaagatgatagatgatatctgtagttatgatttgttgtacctgttattatatgatgtgtagatcttgattctagaattgtctcaaacaaagagatgactctagatagcagaatgatggcaacattatcaacaatccaaggaataacattttacatataatgaatttggcacaatatatcttttacaatttatttgattctaatggtttcttagaatatggagcgtggatcttaagggaaattcacttgcaagattaacttgtatgagttgtaacttgtgaaatatactggtttaagcagcagcttcataagctttccgagctaatgtttctattttcttttttgctgtgcccactgtagtgaacacttgattagagaagcaccaacaagaaaag

SEQ ID NO: 5526 - DNA, 640 bp, Zea mays
  Intron number 1 from transcript AC191269.3_FGT005 (locus A C191269.3_FG005) derived from phytozome v7.0 (chr-ID 7; po s 164754273 to 164754912)
gcgggtaaataactcaaaactccatgactaggttgcttttttggagttttcagagcagcaaaagaggtactccaaaaaattgtactgcagctccaaaaactccatagagtttacaactctggagttagggtgtttggcatgctttgaccagctcctccttggagttttgctctggagccatgccaaacaggccctaagtttttgtgtcacatgtgcctccgtagattgttgtatattttaagataaaattgaaacctcgaaaacttatttatttattatggaattgaggtattatatgagacttttgctctctctctctcttttagagaagagttgttctagaatatagcaaatgaattgtacaaattactatatgtttatgctgtatctataactattatatattttcttcattcagaaatgataggcatatttgactataggaaaagtcacatattaatctgtatttgtttgacttatagtttatagccgatggttaaagaatcagtatcatcttagagttgctttgaacacaaatttggtgcaagtgttatgctctaaacttgcacataatttaactaattgttgattaaactttgtaaactttgacttttcttcaggtataataggcctatcattt

SEQ ID NO: 5527 - DNA, 1023 bp, Zea mays
  Intron number 1 from transcript AC192238.3_FGT005 (locus A C192238.3_FG005) derived from phytozome v7.0 (chr-ID 3; po s 207246648 to 207247670 reverse strand)
ttttcatcggtgaggcgccttcgaaggacaaggaggtaacagtgggtgtttctggaagatggagtaatcgccataataaattcatattaccacgtacgttataggtttgttctgtacacctccatcaaccagccacttactaacttaatgtattatagtatttaatatggcacgcacagcccatctatttaagtaaaattaataagaaattaaattcctatacgggattaaaactgtaatgtattatagtatttaatatggcgatatttatttgatttataattaaataaatcatgggtcaaagccatattaaatttaaccgtagaaaccctacatacgtcaggtggtacaacagaggtagtaggaagggagcctcgcgctcgccgacatcattcatagcatagatcgatgtctgtcacatggctccaccacttgcaataaaacgatagggttttcaaacatcttattcttttctgttgcatcaccatgggttattcggttaatccttcagtggctgcgtcaacgagaccttgttggtttacaccaatccaactctaataaattggaattaaatccatgcacaactcatgtctcaaaataattcaagcctactcaaatatttttgttatcatagattataatctaagggtttggattttttttaaaaaaaaggtatggattttatctcactataggattgagtgtgagatatagattcatctaatcaagactcattaaatacattcattatatgcatggtgggattttatctctttaccaaacaaggtccgagcgggcggtttgtgagctgtagactgtagttgcgttcttcggtcatgtgctcttgcctgatgatgtcgccgcctgcgctgcttgatttggatgtgccaccatattcgtccagaactatattccctggagcggagcagagccaagctgtgcctatctcatatagtattttaaactaatgcagcaactaacactgtgcgtgtaatagcttgtaaaatatatggccaggatagg

SEQ ID NO: 5528 - DNA, 877 bp, Zea mays
  Intron number 1 from transcript GRMZM2G119300_T03 (locus G RMZM2G119300) derived from phytozome v7.0 (chr-ID 3; pos 1 79728348 to 179729224 reverse strand)
cccaagtctcacttccgccgtccgcttcccccctggtactttctcttcttctattcgcaagcgcttatagccctggccccttgatcctctccctcctccgtttcagttggtcccgattttgtttagccttcctaggcgcgtgagatcaaaaatccatcggttccggttgccgccatagggttcggcactcggggcgcgcggggggagctttatttgtaccgaactaattcgaagggttcggttaagccccttgcagatcggttttactacccatttttcgattcttttgttgtgttctgatgcgggcttgacggcatcatgttatctggcttgtgatttgcggcaatagggatcgagggaggaaggaaaggaggtgcttcacaatgaaggccctcattcttgtcgggggtttcggaacccgccttcggcctttgactctgagcttcccgaaacccctcgtggattttgcaaacaagcccatgattctgcaccaggtgaagttactcttactcgttattacgctgatacagcatgaacattctagatatggctacatatttatagtcgctttggtgtgttttttaacccaatcccactgctggcgtcatgccagcatccatcatcattagcttttgatgtgccaggagttagcttagaaataatttagccatcccactattacttttatctagaacagtcaaaacgacctataatttaggatagagggactaggaattttgctttgtgtccaagtacatatttaaacatcaatcaagtgtttttatttttttttgcatgtgtggtggtcgctggaaagattcaaacttattcattctgtgcagatcgaagctttgaaagaagttggggtcacagaggt

SEQ ID NO: 5529 - DNA, 1059 bp, Zea mays
  Intron number 1 from transcript GRMZM2G091092_T01 (locus G RMZM2G091092) derived from phytozome v7.0 (chr-ID 3; pos 1 42339327 to 142340385 reverse strand)
tcggtgacttctccctcttcgctgcgttcgtcgaggttagaaaaaaaagaaccttgtgcatttacaacgtactctctgcgctagcttttgcctacggattctatcgagcggcatttgccgatgctgtgccaggcgatggaggtcccggatggattcctcctcggtgcatctgggtggttgcctggctcgaccgcggcaaggatcgggagtagagaagtgagagtgaccattggggcgggaccgctagtacggcgaactcggctctgtccatggtgccgctcggcgtgtggtccgcctggtgggagtagcgagtggaagaagatgaactggcgcccttggattggggatgaacggctctgattagcttccacataccggttcggttgggcttattctcgaccgcgcgatcttgatccagtggctaggacgtgcaccgagtcacttgatgcctagatctaatctgagccacccgtttctaatccatcggccaagattggtcaataacccttcggccaggcattttgctaaagaaaccctaggcttctgagaaaccaacccgccgtcctgcacgacttgtctctgtgccttggggatttttgccccgagccccctgctgttctcatattttgaggcccagtccagagattgtttaaatcgaataaatgaatagaaaatggaattttagtgtaaaaataaaatgctagaattggtttaattcatagaaaattcatatgcagtccaaattaatccatttcagtttctataattttgtaataatgttgtttatcaccccgtgtctctgttttaacataaaaatggtattaacatttatttcttaattaacctcgtatcaaatacataaaaccttaggaaattcgtatctcctccgttttcactctgatttgatccgttcaagttgcgttagtctcgtagcaacgcgtagattgttattattcagtttgttcttatgtttggtgtgatgttaattttatctataccatgtttgtttgtattgctacgactagcgcgaggacacgtgtcatctgaaaagcaagttgg

SEQ ID NO: 5530 - DNA, 748 bp, Zea mays
  Intron number 1 from transcript GRMZM2G430152_T01 (locus G RMZM2G430152) derived from phytozome v7.0 (chr-ID 6; pos 7 4145225 to 74145972 reverse strand)
atccggccgtcggtcggtctcgtcgtctgtcgttggtgagtgacctccagctgctttgtttacctggatagataaattttcctatctgttggttttgttagtccaatccaatctcccagatttttcttcgttccttcgtcggttcagttcacttgccgatttgtgtgctacgtggtgccacgcagctaatctatcgagtccaacataatccgaccccgcccgtggttcatcagcgtgcaaaatccgcccatctcagttgccgccgcgccgtagaagttagttagttgctggtgcccaattaagtcaaaatcagattcccctgagccacgtcatattgaggtcgaaatcagattctggcagttattgatctcttatggagtaaggaaaatttctatgattcgtttgagttttaccggaactggaagttgtggtaaatcattaggttaagtggatgagttcatttttagtgtcaaatagtcatgtgtggttacagggaattcattatatgaactgattgcggacattagggtgtttgtgccctgccatacactgatacactatcatctatcatattgccttctgatggaaatgctcgatctattcactatcactcacagaatttgctcacgatgttcttgaaggagcaagctggaactgatatgattggcctattggtgtcttgtaggctgtaatgaaaatctgggcctgctagagccaggagttttcgttgcaaatctgcgtgtccgct

SEQ ID NO: 5531 - DNA, 763 bp, Zea mays
  Intron number 1 from transcript GRMZM2G081615_T02 (locus G RMZM2G081615) derived from phytozome v7.0 (chr-ID 3; pos 1 98787490 to 198788252 reverse strand)
cggccgccgcaacttctccacaccggaggagatcggtaacgacgcgcccgcccgccccatcctccccctttggtcccatttataggtcgaattcgatttcatatctggagcgtgccacggtgagcctaggcgactgcttgatctgatgatttcgatgtgagctagttctggaccggatttgcgtgatcgagcagaactcaaaccatttagtagcttgtcgcgagttgtcacttaagttcctggttttaagtctgtgctgcgaggtttccatgggttcgttcgatgcttggaggaacgatgatttgttcatctagttgttcgatttagaggctcaatgattcacctatttgcacgtaccgtttggtttgggtacataattgtgcttcaaaggtttagttgcttttattcttcctgcaacgatgcactgagacaacttgatgctactctgctcttggttcagatttagctttatttctccttcactgtcagagatcttcacggaaaagggtttttgtgaagtttaaacgcagtgataaatcaattagcacactgtatttggccttagataaagctctttagaggctggatacaggaaataaatgctacacttagccttcttttttctttaatttctacctggggtatatatgtctacttcctgtggttgtcctgctaagagtatttttggcttgtttctgataacttctttatcctctaaataattgcagctgctggtacttcaggtcgccctcgcacctttaag

SEQ ID NO: 5532 - DNA, 899 bp, Zea mays
  Intron number 1 from transcript GRMZM2G434388_T01 (locus G RMZM2G434388) derived from phytozome v7.0 (chr-ID 7; pos 1 00888398 to 100889296 reverse strand)
atcgagcgagatataaaaaagggtcagcattcttttcaactcataactttctcggtcttttggctaaaacaaagtatcatatttgttttaaccggtttaatatttgatatggataatatgttcaccttaatatgaaatttaaatttttatgggtttcgaatatgattgtgtgtcatcgcaacgtatggtgattgactagtgctcttataaagcatggaattcctaaatatgtaaacgggaggataccgtctttatagcatctccaagagttccctagaaaatgactcttcaaaatcagttttaagggacatctaaaaattagtggggctagattttaatcctttctcccacagatcctttacagcgacagatggttctggggagcctaaaaccccctcatttgtagctacaaatgagagagttttaagggttatgaaaaagttgggaacgtttaggggaaccgttgaagacatatttttgtgttttttctaaaaaaaacttgatttaggagagacttctgtaaaactcttggagatgctcttacatccaaaaggctgaatatatgaacgtcttactgggcctaaaaaacatagtttactcttgttttacttaagagcaaggcgtgtgggttatcaaatctaggcaaccgttagactctcttctctagcaacctgaccccatggtcatgcccaacatgtcagtgattaacaaaaaggccaaacaaagtccaacgcgtaggtctccaatgggaaagctcgcaatatagaatttcctgagactacgggtcgccggaggggaggggtggggaacagggtctaggaatgggcatcaagctcagctgagttcacgcgctctttgattccatcgagagactagagctcggggaggcagctggcagg

SEQ ID NO: 5533 - DNA, 538 bp, Zea mays
  Intron number 1 from transcript GRMZM2G034975_T01 (locus G RMZM2G034975) derived from phytozome v7.0 (chr-ID 3; pos 2 05024701 to 205025238 reverse strand)
gtcgcttcggctccttctctcactcctgtttcaaggcaattcctctcccctcctcccctccttatgcacctagaaatttccctctaaatgttgcttgtttagttgggaatttggcagggttttgtttatttgattttcccaatccatcttccctatgcacatgatctagtcgaatggaagactcgaatctgtcttggtgcggtggccatgtgccaatgggttttttcatggaagttctgagatataacattcggaatttgctttaaaaagctcggcagtaactagttgcctttctaatcatataaagaataggcacccaaattcccctcaaggacttaacttggctggcctaggctcagattgatttttctttacatgcccccagtcacaagtgcctacctatacttcacatagtgtatttctgcacgatattagctcgtagatatgcttaaaattgttcgattttgttgtattgactagtgcgctggcatggcttatatatctcagtttgggaggtcatttccagttcagagagtca

SEQ ID NO: 5534 - DNA, 928 bp, Zea mays
  Intron number 2 from transcript GRMZM2G147961_T01 (locus G RMZM2G147961) derived from phytozome v7.0 (chr-ID 6; pos 1 47424640 to 147425567 reverse strand)
tcgtataaaaattctccttttatcacatctggtgagatgcacttcacgcacatcttgcaaattctgtgtacgaactatgctgctttacttaaacattatattcttctccatgtgatcaatgcatgtttctggttgaaacacaaagaaaacttaggatgagttaatttccttagatgatgtaattcactgatacctgaataattatgacatcatcttcctgcatccgataggctaccacctacctgaatgtttgttcctattgactttgcattctattagattgtaattatgatctatcatactttttttaggcttctattctcttatttacctaaggtggaccgtccaagtattctggtttgaaactttattttccaggaaaaaattctcactgacgtgctgacactgagggcataaatagcaatgttacgggctccagagttgtacagttatgaatgtttgttggtaacacactaatgcactgcatcgctaactattggcgaataagtattcacactataattttgttccaagcactcccattactcttgaaaacattaaaaaagggcgtacccagtactgtaggcttcccgcactgtgcggggtctacggaaaggtatctttaagtgccaagccttacccgcataatatgcagaggctggggctcgaatccgggaccttccggttacaaacgccttcactcttgaaaacattcatgttaaaaatagatcttttgaagttggttgtgaataacaaaactgaaaagtaagcttatcaccaactgcaattgacaaatgcgtacttctatattagcatactaaacatatatatgttgcttgaatatatttccatttgtgttaatacctgattcatctacatatggtaactgacaggaaaaggtcagatctgctgtcaggagcgtcatatc

SEQ ID NO: 5535 - DNA, 927 bp, Zea mays
  Intron number 1 from transcript GRMZM2G049342_T01 (locus G RMZM2G049342) derived from phytozome v7.0 (chr-ID 6; pos 1 38944803 to 138945729 reverse strand)
gtctgaaatcgtggacgtagagctctggaggatgcaattaggaaataaattctcccaatccgagtagaagaaaccctgtctagccgtactagcgtaggggcttcacgctcattcggccaggtagaccttctaccaattaggggaagctcttgcagctcaagatcattgaggaagtgttgaaatcgacccatcatcaacctatcaaggttggtattgctcttatcctcgaccttgtatataagattaaagtcaccacccaccgcccaagcactgtgcaactggtactcttccaagccaacaggatgccacccctggtgccctgagccggaaggaaaataaattcatcaaactcagatcccaacatcgacattaccatccgtcttgaaataactgcttttttagtctcctggagacaaaccaaatcaggtttagtagagttaaccatgaccctgactgtatctctccgacacgtacggttgaggcctctcatattccaaactagatttttttgatggatcagtcattgtatttggagatatcaaacattgtaagctttgaccatcgatcaattactcaaaatgtattcatgtttagcgcacaagagatgcaccaacagattcttatgtcacatgtcttttagtaagacattggttttgtagcaatgtagcatattgtaattgtcaaagcatactttgaaagacttccttggagcataatacaccttataaaaatatatggagcacaattttgtggctactggcttgtctgcgagaagtttgcatgattacttgattagcttatttttcattatgacaatacttcatttgctgtgttttcttttggttatcctcttccacccacccacctacccacagaattgttgttattagctaaactttcttttgtatctttctatgactagcaaca

SEQ ID NO: 5536 - DNA, 977 bp, Zea mays
  Intron number 1 from transcript GRMZM2G099678_T01 (locus G RMZM2G099678) derived from phytozome v7.0 (chr-ID 3; pos 2 002097 to 2003073)
acccagcagcaacatacccatcctagacgtccaaggtatacttaatcaaccgatccagctagcttgctaaaataccttcaagttcaagcttgaataggccgtacgtccttggcatatacgatactctaccctgcataataatagtaagctgccaagctgcaaatatgtatacaagacaaagggtgtgtttgtttcaatgttccagtttaaatccagcttatgtccatgagaagttgttgcagattgtcaaacacacttagcttttcagcctgttttttgtgaaaaatcggccaaaatcaacgttaacgcaaaatcgactgaagcactgcgataggaaaaatccgttactttatagattctaaaccttatgaacaccatataatcctacgcatataattcctacgatatttagattttctctcacagccagatttttaaaaaactcgtcaaaaaaaactgaaccaaacagtcccagcatgagtgcatgacttctagaattgcgtatgtacccattttaagttcaatgataaggaatattgatttagacatatatatatctctattattgaatataagtcaacttagtgctcaacaaagctagatacacaaatatggatgttcagtacagtgtcataatcaaagaagcaagagaataggtcatatttgtttttttttctaattgtatactttaacagtctagcatataactcatattaacgctacgatcttaaaaaaggaccgtcgatagcggcatcagcacgagagtgagagagggggatcgagggggagtattggaggccaaaatgttgtcatttttgttcttcggtgatgaataaatatgattatatattcgtatagacatagtgtgtatataaatataaacatgatataataccatgctcaaacaatcacggttgacatttttgttcttcgatgatgaagggcgacgattccgcttcggaactattggaagccaa

SEQ ID NO: 5537 - DNA, 876 bp, Zea mays
  Intron number 1 from transcript GRMZM2G409131_T01 (locus G RMZM2G409131) derived from phytozome v7.0 (chr-ID 7; pos 8 2321083 to 82321958)
tcttcttcaggtttatttgcgttttttgcctgccagcatcttcttagtttctccttcacctgctgcatctgccgtccaagcatgcatgcatgcatcctgcacctttggtttctcgatttgtgtcgtgtcgtggatgtttccaagagttgttccattcttatgatgttgtcgatgtaacaaaaacacatgctcctttttcaccgccatatatatgaaaagcgaaaaaagagagaaagaaaccgctcgattttggacgcacgagacctggaaatttcgtcagctcgctgaacaggaaatgaagacaacgggtgtattgcaaaaacaagaagctcaccaaaagattcttgtggtatatcaatccttagagatggtggtaatggagatccttgcaaaacatggttggagttctaatgccagattaaaggacgcttgattcgagaacaagttctttttaagaatgttacttttttttaataatggatgttttattaattttttaactgtaatgtcaaactataaaaggctggaacattttttgtttccattataaaaaaatgtaggctccactcctatactcgtcttccttctctagtaatagcttgcacaggggtggcggacccagtgcttctagagttctagaggaagcagagacttgttgattcataatatagacagaagcttcttcctctcacaagtcacaaacccttcttttttttccattcaacaggattcaaagttttgaaaaatgtgttccaaccacatggcgtcacaacaggatatttgacgctgatggttttagcatcgtctaacgtttccgaaacttgtgatgggatatgaccagggaacgagggtggagtttggggacccaacgacaac

SEQ ID NO: 5538 - DNA, 852 bp, Zea mays
  Intron number 2 from transcript GRMZM2G121208_T01 (locus G RMZM2G121208) derived from phytozome v7.0 (chr-ID 6; pos 1 61707940 to 161708791 reverse strand)
cctgcagcttgacagggcaaaggtaagaactttgctcagtcccagatttgagttttttgtgtttatatatatagcattaggacctcgggaatgaaggtgcaatgagaactattgtaatccaagcttttggaaagcaggctggctctgctttaagccacatttctgtttttatctgcatggcatatggaaaaaatacatagtgtgagtacagttgcaaacaaaaaagcaactgtatccacactacggatccccccccccaggaatcacactggaatttcaatattaaggactagtttgggaactccattttcttaagggattcctattttaccaagggaaaaagaattaatttacattggaaaaatagggtttccaaactagccctaacatgttgtagttgtgttattcagttcagtacgcatctcctctcagtaaactataagtatagtcatttgttagtaggcatgctagtatgccatatgcttgtctgctcatacccagttagacagaagacagccgttttcatttatgcatgacaactctgattaggtcttcagaactacaatcgcaaaacaatgttgattagttctgcacatgtgtgctcttgtaaccgtgtctgtttacaagacaacgcacctttccatgcctatgctgattattttccactaagaccaagccgctctatacaattttggtcatctctacgccgcctgccaatcatgaacttttgcctgcatgagtacttcctttcagcatttccgagcttgaacagttaacaagttgttgttttttctacgtggcttgtgtgacaacccagtgctgcttccctgccaacccggcgtcgcacgtgtg

SEQ ID NO: 5539 - DNA, 452 bp, Zea mays
  Intron number 2 from transcript GRMZM2G477771_T02 (locus G RMZM2G477771) derived from phytozome v7.0 (chr-ID 7; pos 5 6730277 to 56730728 reverse strand)
gctggggaaacagggaagaggtatgctcctttttttctatgagtaatagtttttcttttaaaatttttgtgttactcttctttaagtgatggcaattgctttgctcaagagcatagtctagaagtacacaaactgagtcctatagcttattgagaactttcatgaccagtagtcacatagcagcagttgaccattcaagtgctcaggtgtctttctctttgtggctcacgggctatcatcagcacaacaccttattcatctcctatcttctgttttaaactacattatgtaaacagtgcaagcgatgagtgaagggtgactaataggcttctttaatcagcactgcagtatcttttgttgaattaacctatactcacttcattttttttatataatacagtccatttagcaaattttgtttgatgtgcagtgacacgaccttgacagtcaag

SEQ ID NO: 5540 - DNA, 775 bp, Zea mays
  Intron number 1 from transcript GRMZM5G855860_T02 (locus G RMZM5G855860) derived from phytozome v7.0 (chr-ID 6; pos 1 35937103 to 135937877 reverse strand)
ggtcgagaaggtggtttcttgatccatttttattttcatcttatctaaaagtctctgggttttcttattagaatgtagattgctcaagtgataacttctagaatatttgttgggtcagttgcttattcgctcattcccttttaacttttatattaggttcatcaatatttatacgataggaactggcagagccacagaggtgtcggattgaaatagtttctaaagctcaaattagggaatttcgggataaaattagcccaaattagctatggttgactagctagttagagacttggcaaaaagattagcccgcctattagctatcttgttttgacgcactggatctaattggagctaaaattagctagctaacaattagcccatggtatttaaacatacccttaggttgtagtgttttaaacgtgtgctatttattaatgtgaatgcttaagctttttcatttcccagtacaagttacatgacttagtgcttatgcaagccagaaaggcagaaacgaagtactgaagttaaattgcttagctagatttgctatgtatctgattatagtataacagtataactacattgcacggagcatccttattattgctatggttacttcctctgttaagtatggtgagcctgtattgcccagtatatgctttgctgtcaacatgcctatgtaaatcaaattttctttgcactgtgattgacaagatgggtcattattgtcaattatgtaacatgtgggtttcttttagctctttgtcttcat

SEQ ID NO: 5541 - DNA, 607 bp, Zea mays
  Intron number 1 from transcript GRMZM2G520951_T01 (locus G RMZM2G520951) derived from phytozome v7.0 (chr-ID 6; pos 1 222233 to 1222839)
ctgtattcacatcccttcaagccgaaggtatatttgtaatttaccattatttaaatgagtaatataagtagaaaacaaattaataataatgtttacagagattatgttatttcttatattctgtgtttaaatactctttatctcttgttatgttcatgaaggtttgtccttcatgaccttcgtccaaaatccattatatccgaagggaaataatgattcaaaggacgaagggttttgatatttaacatcttgtgttgccttgttcttgattcatagcatttgagaacaagttcccaacacttagtgtcccatttgattgaagagaaaggctcactcggtctaggtgaccgtttgagagagggaaagggttgaaaaagacccggtctttgtgaccacctcaacggggagtaggtttgcaagaaccgaacctcggtaaaacaaatcaccgtgttcatccactttatttctttgttgacttgtttttccctctctttcggactcgtttctatttctaacgctaaccccggtttgtagttgtgcttaagtttgtaaatttcagattcgccctattcacccccccccctctatgcgactttcagaaagcaaa

SEQ ID NO: 5542 - DNA, 681 bp, Zea mays
  Intron number 3 from transcript GRMZM2G106607_T02 (locus G RMZM2G106607) derived from phytozome v7.0 (chr-ID 6; pos 1 61416417 to 161417097 reverse strand)
aggtagtaccatttgatcccttctatttacttggcattacataatgcgttcttttaacttgttttgttaatgaattgctgtttgactgtcgttaatttgcaattttattttcatgttacatttgatggttcttgtctcttcccataatttttttctagtaattttcttcatgtgctatacttttggaaagttgtttttcccttttgtttgcattgggcggagtgtgaccgataattcctagatattaccaagtgtctttattgggcatgtttgcttatatcgtccatgtttgagaatttatactttctagcagtatgtatactgttctgactggcaaccagtgttaccctaaacatttaaatggactaaaggtcacctactgtttagctatttattcggactaaatggacatttaaacagaataaacagtgattaaatgggataaacaaatgattaaacagcgtgcacgggctaaacggccgtgtacgcaaatagtgctggcaactaattcaaaactgcaggaaacagagagtgatttggttacattctataccagtcttatttaaaagaaggaaagctataaacagagaattgaaagtcctttcactcaaatgcaagttcatggatttcttattgtttcgtgtaggcatcatcatcgtcatcttcacattaagttcctta

SEQ ID NO: 5543 - DNA, 981 bp, Zea mays
  Intron number 1 from transcript AC205574.3_FGT006 (locus A C205574.3_FG006) derived from phytozome v7.0 (chr-ID 3; po s 3475926 to 3476906)
tgtagggctggtttggtaagtcttgagccataattgacaatataaatttagatagtaaaaaacttaacctaaataataaatgaaatattttgtttacatgtcttttacatgtttacaactggaactctacgattataaaagctttcctgttcaaataattgcctcttgcgctcgttcttgaactcctacacatgaaacatgaaatccatgccacaggggcggtttattatcgtatatttttcacgcggcatctgccccgttgtttgtcacgggaagaatcggacccatgcatgcataacaaaggcaaagcaagcatacaaagaagagataaatacacatctcatgccacatctccatctccacaatcatgcatcagatccaagtgacgaaaatgaggcgcccaaatcgacgcatgccagctcctccaaatttggcttcccaaacacccttcttgcacctcgctgtccaccctgtccagcaacctgcacgctcatcagctagcgccagcaagggagctagcgatagggacagcgagtggcagcggcactcacaagtcacgagagtgaagagaagagaagagtgacacacacgcacacgcactctccccttctctctcctcacaaaatcccaaatcccagtcttatcatcctgtcttgctgcctcccttgtgcctcctgcgctcggagctcccacactcccgaggggaaaaagaaagcgagaaagcttcgagctttgcctcccccgtccccccacccccacccccaagggtaaaatgtgatgttgccatccatccgaatccgagaatccgattgcttctagtttgtctccccaactcctcgcctcgcctctcctcctgggtcagtgtccgtccatccatccctggccaccacttcgcctgatgtccatctccatgccgccaccgccgccttcttctccactcttttgactgttttcttttctgtgtttcttgtcgtcctagtt

SEQ ID NO: 5544 - DNA, 1020 bp, Zea mays
  Intron number 1 from transcript GRMZM2G057535_T01 (locus G RMZM2G057535) derived from phytozome v7.0 (chr-ID 7; pos 1 57599943 to 157600962)
tcccccggctctgtctgttgacttaccccgtcgaggtaaggcactgggtgcttgaattcacggttttgattcagttgttactattcagttctgtctgaattgtttgatgctcgattcattattaggctttcaagttctgtaaattgttccctagtttttgtccttcacgcatatattactaggagtgttgctcttatgtcgcgcacctagctaagctaccaatcgtttttctttcttccacttttataataaagcagatataccaaatcaaatagttatacagtatatatcatcgcatcgcccacctgattaaattcaaattcaactaaaattggtgctcccatcttctaacggtgaaaacagagggtctcatctcctatcctctcgggtgaggccgtgggaccgggccttgtggtatactgtagttgatataattctgatataggttcgaatcctattgggtgcttcaatttagtttcggcatctcctgtttaattcgctccactgccagactcactcacatagcctgctaggcaatatctgtctgtgtattcttggtttagatacatcatgtttgcttgcctacttatatttattagcatggcatcttgtatagcttggttaattagtatattatattatttgttcctgctgcatctatctttatgtattcattcggcagttgtgttgaatgctctgatttgtcttgctcggttgcttttcattggtatgaattactagttacagatgggtgaacactgactgcacggtctctgttttcttgatgactgactatgttgtctttgctattctaaacaaaagaacaattaatctaccagtctgcttacgtacatatgtgtttctaatttgatgttagtcaatgaatcgccgcaactgttctaaaaaaaataccaacctctcaactgctaattgtagtatatcttaacttttgcctgactgcgtgctatatatatccttttttttgtgaatacagctttctagtcagctgctcccgttgcc

SEQ ID NO: 5545 - DNA, 801 bp, Zea mays
  Intron number 3 from transcript GRMZM2G123558_T02 (locus G RMZM2G123558) derived from phytozome v7.0 (chr-ID 3; pos 1 712638 to 1713438)
agctggctaagattggtaagcatgttagttctttgtatgtatgtatgcctcagtagtttccatgcatgacaactgaagttaataggtttcctttgcttcctagtatattatatgctgttctaggatttcaactgcatcagctcctctaacccttccagtgctatagaacagaagagcaaaactgagaaaaaaacacaactaagggtaaaaatgagcacaccagcaaacccgagagcaccaccataaaaacacctatattattaggttcgttgtaagtagtacactatttttttttgttaacaaactgtgtcacttcatcttatcagaacatcaaacctgtttttttttcaccctggcgaaaatgaagtgtaaccaaataaatatacatatttgtcataattctgtttttctgtttattgtgaactagaaccgccaccaaccgccgtccttttttagtcccttctaggttctaccaatcttcgctttcttgggttctgtttcctgagtgacctttgctatgagttttaattccttggacaagctgaactttattctccttttctttcttcattcaaataaccatcgagctgcctaggaatcctgcatcctgtcagctactgcaccatgtttcttcgggcggaagcccaacacagaacagcaaaaccaaaacaaaaattcaattttttgtcgtcaactgtttgtatacatgatgcatatgcatacacatggaacatggatctttttatatttgtctatgcatgtgcagacttccctggagccaaggtggtgagcgaggcggtg

SEQ ID NO: 5546 - DNA, 892 bp, Zea mays
  Intron number 1 from transcript GRMZM2G118363_T01 (locus G RMZM2G118363) derived from phytozome v7.0 (chr-ID 3; pos 1 84059368 to 184060259)
ctcgaaatctgcgacatcctcaacgccgacgtgtgagcgcgctgcctcccacttcttgtcgagtcgtcatggggaatttgtaggggtttcggttttttatgggtgttagttgccgtagacgctcagtcgccgttgtgtttcggccagaatttggtgggttttgagttttgacaattgtatgcgaggaggttatgactctgctccgcctcgcatattcggagcacaagaatacctcggtgtagtgacgttgaactaggtgctgtttattggcctaactttagcctgtggcctgcgttggggaaaagcgatttacgtataacttggcttttgccctctcacatggttattcttgtagatgatggcccttctagatgtcaactttacttgcatgccaacatgggaaaacaagaatatttgtgaatcgtgtgtggaaaggacaatcaaagtgataaaatccacaaagtaccacagttgggagtctagcagattttttttttggcacgggaaactttcactaagtgttgcccttgttggaaatggtcaattgagtgtcaattaccttgttatttttttacaattccatgaaccgagtggaacaaatgatgctaatactgtttgattttacttcgtaatgattattcatgataaagccaaactgtggcccccatacaattgaaatgcagataaatttggatttgcagtttgtatttacctgtatggtgcaaaggttttgatcttatactaacatttcatttagcctttctgcttggaagagtcgtatggtttcattacactactatgactgaagaattttaaggtttattggttctgggttccggtacctatcagctgatcctattgattttgaacatctgaatcaggcaaacaaagg

SEQ ID NO: 5547 - DNA, 947 bp, Zea mays
  Intron number 1 from transcript GRMZM2G113796_T01 (locus G RMZM2G113796) derived from phytozome v7.0 (chr-ID 7; pos 1 02647447 to 102648393)
gtggattctctggtgagcgtgccgacctcgtatgtgaattcaatgtgctttcatttaattttttaactaaaaccaagaagcgatcatgctatatatcacttcgtatttatacttatggaaagattcagatctatacatgttcagtattggaaggaaatcacgtacggtactagcaatacacggatctgtctgaagtagaattaggaaggagtcatgtcagctggttgtttcttgtgtactgtgactagttcagttttctgtttggcaagctgacataaactctaaattcggcacttttcagttacaaaattcttgttttggcaataatttcaatttgttaaggtgacataacacagagtataatataggataaggagctatagtctttatcaaggcagacttgcttttctttccccttttttctgatagaaactggtggtcatatgcaagtaggcatctggagttattccccaatgattgcttggtatatgccgttatttgttcaacactgagctgattggagtagttctatcgaatttatgggtggattggcttaatagtcatatgtgattggtgctgttgactcatggatttggtggcttactttgtggtactatggaagatttgaaattctataattttgttagtttgtaaagtttgtcgtaaagccaattggtgggtacactaagacttagtggtctacttttggtgtttcagtgaacaaaaagataactcaatcatctgtgaacttgcactgctttctgtgattgaacttgaaccaactaataatattcagttgccttctttagcctttcaatcttttaaaatgtttcgctttttttggtaatcttgttcggtatattgatcgacagcatcaggtccataacctaaatgtaacacgagtgcagtttatgttctctaatattcttctttcttttgatttgcag

SEQ ID NO: 5548 - DNA, 973 bp, Zea mays
  Intron number 1 from transcript GRMZM2G163136_T01 (locus G RMZM2G163136) derived from phytozome v7.0 (chr-ID 6; pos 1 30897264 to 130898236)
cggcggagactccaagctctccgcgctcctcttcggtacgaccacaccccccgcggttcgcttctgcagtttgcttggtgcgctcgccaccccacctccctcactcttctgcttgttactgggttctgtttgttactgggttcgaagcgattgttcggcctagattggtggttgctgatgcagaatttccaagttcgtgcttccttcgaggaatatttgatgctggtgtgcggggattgagtcccccgctggtgtccgttgcctggtttcagtgtgtgctcagaatcgcgaccaatttggtccacatccatccgattcttctcggttcgttcgtttccccatcccgttccgattcgattcgttgtatgggttatgctcagtaatattagtatctgaatcggtgtctcgaatttcctgtccataacactccgttcggtggcgataactcattggttacatacgtacaatccgatttccaaaccctcattcacatgtgcaaactgcacagacgagatcgcgtcagatactagttctatttttttgctgctcgagtggacgcgctactgtagtgaatctgaaaatggggctctattactctatctgcagtcgaagtcaggtgacccttcttatcatatcataccgtattcatttgattgtgtacccctgtcgaatttgaaagcgacgttttaggcaacttcctcttgataaatttaatcgtgttttaaattcctgtcttcgattttttatatagagtcaaaacgaatttcatctaaaagtcacctctgttgcatagagtacataccgaaactactgatgattcacaagtgcagactggaattgctttgcaaaccaatggaagaactgttgcagtgttgtgcattccctgatgcagtattactcatgctaacacgggcgtgaactgtttttgcgttgcgcagacgtgtcgcagcaggtgcaggacggtctccagagc

SEQ ID NO: 5549 - DNA, 747 bp, Zea mays
  Intron number 4 from transcript GRMZM2G087144_T02 (locus G RMZM2G087144) derived from phytozome v7.0 (chr-ID 7; pos 1 41809398 to 141810144 reverse strand)
gaagaggaaaggaactctatcaagatcaagaaaaggtaatatattcaccgtttagtcttttgtttggtgataactggcacatgtttatagatctgtttgggtacctgatttatgctgcaagtgttcatttggctcaatgtaccatgcccatatttccatgaagcaagagtgtgagactaagaaatatcatgtagcacttgaacagcattaattgatttctttctctctttagtaaattcataagaggttaatattgtaagtttgaaaggaaatcaaactaggacatcctattgccattcacgtactgttttttttatatgatctgttaagaagggcaggcctggtgcagtggtgagtgttgtctcattgattcaccaggtcacgggttgcgttggtttgtcccttccccagaccccatgtcggagcctctggcactgtgtctgcccttttcttatgtgatctggtagcaatttttaattggtatgactttggtacaggaaacagtatgaaaagctgaggaggcagtgccaacaaattctgaatggctacaagggaaatgggttgaaggcaataactgaacttaatagtgatgagtgttctagtttagatggtattgctgaaggatcagaatcaccttgttttgaagatgccaatgctatacgtgctcctgtttcactcgaggaggtgaagcctgaacagaatgaagctgaccaaccagacaacattctctgtgatgttgttgaatgc

SEQ ID NO: 5550 - DNA, 651 bp, Zea mays
  Intron number 1 from transcript GRMZM5G803604_T01 (locus G RMZM5G803604) derived from phytozome v7.0 (chr-ID 6; pos 2 2305856 to 22306506)
gtccattcccacctgatttcagcggtactgcaacaaaaatataggcattgcattggttaaagagcaatagtaagtcaaccaaattggagaaatttcaaaaatattgccatgggcagcaaaataattgtaggcactttatgtgccatagccatacattaatgttttcatgtcaacatgaaaaacatgtaaccacaattcattctttgaataaaaaaagactaccagcaaagtgtagggcatgtttcaacaaaataccacagctgcacttgcaagaaagggaacaaagtgccaaagaaacagtctaaatacataggaatgccctaaactgcaagatgtcgcctaaaagctggcagtaactaattcattaaagaattaaagatgataaaacaacagataagtatcagacactttacatcatagaatcttggagccttttccatgtttacgatggaggctaactaaaagcagaatagtgtctaaatggagctatttcacaaatattaactaatggatttatcggtctttcacttttttcttgtcgtgttttttgatagcaacttttcagactaaatatccaatacaaaatcataaagcattaatgatgctaagcatcattcacacaggagtttgaagcttatattgcataccttg

SEQ ID NO: 5551 - DNA, 949 bp, Zea mays
  Intron number 1 from transcript GRMZM2G138205_T01 (locus G RMZM2G138205) derived from phytozome v7.0 (chr-ID 7; pos 1 76146014 to 176146962)
ttcttcccaccactttcaacaacctatcagtaacagctttgtcaatattctggaatagggggctgaattgctcccaggggccaggaagatatcggggagaggctaaatcaccttttaagtacacatccaatgctataataatcgaacatcatgctatctaatttgcaaatgatggtgagtaggacaaacacaagctgacacgaaggtaatccataactccgcagttgctgtgaacatttatcaaacatcttggacagatataaaatatactatgcacatcagcagatatgagaaatctggtgcaaaattattcagttccttcgtatttttacctagtttttcaaagaaggtactaatggatatgattgcagttttgcattagtttgcttttgtattattcaatgaaaacatcatctgcaggaaagactgccccatttgttaaaaaaggaaacctggcatcactaaggctaatatcttattggatgtgtataaaacacatgaagcgaagtcaatgactagaatgacaaatctgggagatccctcaagcaattcatgcttgaaaaaacaacgcaagtcaggaacagattcgtcagtattgctccaagagcttcctatgattgccagcgccaaatgtaattaaagtggaaactacatgatctgataggcggtgaacaaagatgcatattcagattatagttgccatggaaacttgtttggtttgctctaggcttaggcagaaaagtaacacctttgatttccctgatcatgttaaccgtgctctgcaactgttatattgtgttctttaaactgaaagaatagaaacatttgaagcgaaccaaaacatcggcaaaaccttcattatgtttatagcctgttgcttaaattgcaggaaatttaaaactgaatttatttatgatatacctctagaagtgcacgaatagcaagcttg

SEQ ID NO: 5552 - DNA, 558 bp, Zea mays
  Intron number 1 from transcript GRMZM2G529223_T01 (locus G RMZM2G529223) derived from phytozome v7.0 (chr-ID 6; pos 1 38088258 to 138088815 reverse strand)
cacatcgaaaaaaatatttgtgagtatattcttggtacattacttggtattcctggtaagtcaaaggatagtatcaatgctaggcttgatttggaagacatgagcataagaaaatccttgcacttgaagcgtgatggcgattcatactccattcctcatgctccttatatgatggataaaaaccaaaagaaaacattctatgagtttttgaaaaatgttaagtttccagatggatatgtagaaatatcctgaaaatgatctggtatctgaagaacctgttcttgtatgtgattaaccaattcttgtatctgaatgacatgttgacctgtttgtgttatgagactatgtggacatattcttgtatctaaattttggttctgaaaatggtaacgggttgtgatgagaatggtagtaggttgtgatgaaaaggcccatcaaactgaatgttataggttcatcagactgaattttacaggttcttcattagttcagaattttgtaggttcatcagactgaatttttgttctaaaacatcagttcttcatcaagctgttcggc

SEQ ID NO: 5553 - DNA, 870 bp, Zea mays
  Intron number 1 from transcript AC209362.3_FGT003 (locus A C209362.3_FG003) derived from phytozome v7.0 (chr-ID 6; po s 144263108 to 144263977 reverse strand)
ttgcagaacacaggagccttccagaactctgaaaggtgcctgtcgccgtgcacactgagataaggggaatatctgtgttagccgcatgcccacctgcacacatacttaaataggggcatatctactatgtatgcttctctctgagtagtaggacctgtacaagttcaacatcagttattcctttcacgttgctggataaggcttttattgtgtcgtttattgatctgatctgttgtcagctccattagcttgtacccaagcttattttagagagggtgttatgaattttgtctagattataacatttctgaacaatcgcactgcacaggacgtggtaccatcctcatcatgttgcctaggacgaactagcactatgaaagatttcaagtggttaaatcatgcatctacataatatattgtactctcaaatggtgggttgttgtgttcatagatgcagtcacttttcacaactaatttatggtagtcattgacacttcactgcatgagtcatcatttgattttgtggtcttcttgatacatgtttctctcacattagacacaaatcaattactttaaactataattttgtgaaatgcttgacgcaaaacattgtcgaagacatctccattaatcaaattagtgggcaagttctgtatttaattatacgagtcctttaactacaagttttggctcattgtcgcagaattggacggtcgcatcgacgctaggttctagcagaggagtcgtgcctccttgattccttcaccgaggtgccatactctcgaaacaaatacttgataatcgttttgattttggttctttgttgtttatttagaggtgccatactctcgaaacaaatagctagagtct

SEQ ID NO: 5554 - DNA, 554 bp, Zea mays
  Intron number 1 from transcript GRMZM2G440998_T01 (locus G RMZM2G440998) derived from phytozome v7.0 (chr-ID 3; pos 1 60142126 to 160142679 reverse strand)
ccggggcacaacatccagtggactccatctcgcaggtacggcttctcttctgtagccagacgccagtgataatatctcatgtttccactacgaacactgcgaatatttagttctgttataccacttttttagataaaatgtctcccccgctttatttctgggaattatgaaacaacagttctcacactctaagcatatcagcatatttgagggtgcccaccaaaaccaattttaccctcacaggtacttactactagggatagtgtcctaaactcaattctcaacctggcatgtcaatcaaactatatctctaatgggaatgcatcgtgcacgcctgcctaagcttgcggaatctgagagtttttcttgccaccatgttaatcttggctgttgctttgggcaacaccaccttaacatctgccagacacctgtccctggaaacacatagcactctatatagtccatagaacatcaaaagtcagagtcagtttcataaatctgttctccttttatatacagggacgctactttgaggagcaggtattggggactcc

SEQ ID NO: 5555 - DNA, 953 bp, Zea mays
  Intron number 2 from transcript GRMZM2G123977_T01 (locus G RMZM2G123977) derived from phytozome v7.0 (chr-ID 3; pos 1 81758239 to 181759191)
cgcactgcacgtcgccgccagagaagggcgtcgtgagtgtctatcctttagcgctctctcttacaattcgtgtatctaatctaagtataacatttggagaatcgagctggcaactgcgagtttgtcagtaagaagtttctcgggcaactttaacttatgctacaattggcaaatcagttgacaagaaaatagcctcttctcagtttgaaccaaatagtagtagttgcacagtgcatgatcgtatctgttactttgataggagcgttatgcacatagtaccacacagtactggtgagcaaatgatcttgtttaatgttttctttacttctaggcaacgaatactatgatacgaaatatagagcatatggccagagacaacaatatacttctcattattttatacataattcggttatggttatctgttcatgtctccgctaacgaagggatccaaaactatccctcttgttaacctatgaactcagtgcctcagtatgtgtgcactttcgagcgatatacgacctgttactcttcaaagacccatgtactttagaattcagatagtaatcactctgcaaaacagtagttttttttaatacagattgatataaagtagtttttcttacaagttttgtgtgtaagcaacttggaattgggacttttgggatggtaggaaatgtttttagttgcataggaacatcaaactgtagcctttggttgtggcgtgtagattcaggatagtttgcgatagattcatgtgtgataaatttgtgcatggtatttgtgaagctattgtaacatatattttcttataggaaattttgtgattttatattacctatgcattggcatactctataaaagtatcttcatgtcacctgttcggtgtattaatattggagcaaattgtcctaacaagtaggagcgcttgtttgccagctgttgtgcaggaa

SEQ ID NO: 5556 - DNA, 854 bp, Zea mays
  Intron number 1 from transcript GRMZM2G057853_T01 (locus G RMZM2G057853) derived from phytozome v7.0 (chr-ID 3; pos 2 18004627 to 218005480)
actcccagccgccaccctcgttcaagtggcaggtcagttccgcgtcgctcctccgtgtctctcccctaccccctcccccccggctgaagacgacttgccccgttctcagtagctttcgctcgagttcatctgcccccagcgcatgcacagtgccttctgttgccccgtgtgtgtttagagcttgttgctgcctagtattacattctagtacttgcgtacgatgatgggcaggactgtcatgggcacattgcgtgggggcgaattaccaaattcactctctagatttcacaaatattgttctttcagcaaagcgttttctgagtgcggagggaatctgtccattgagagaatttgagtatcgtgaagattatatgcggagaaagataaataagttcatagggtttagcatgtagaaagtgatggattcctactatcacaacgaatcagccgattctgtattcacgttgattttagacgattttgactgaagtgattttcatataaacgggctaaaaaactaggtgtttggcagtctacagcagcttctcgtggccagaagctaaaaaaagatgaaacaaacagggccatagactagtaagtgtccttaagtagcagtgccgtgggatggtaataattctctcatggcaataattcgagttcctgacattgaatttgtgcttgctctgaaaattatgatggatatgcagccttgtgggcattgcacacaagactacttgaaaactgttatccaaaatcggttccttctatgtttactgtgttaatctcagttgttcttttgattgtacaaactggtgtattctggtgtataacctggttggtgttggatcaggccc

SEQ ID NO: 5557 - DNA, 1022 bp, Zea mays
  Intron number 1 from transcript GRMZM2G086628_T02 (locus G RMZM2G086628) derived from phytozome v7.0 (chr-ID 7; pos 1 75397976 to 175398997)
gcagaagtacaacttcaccgccggcgacaccctcggtacgtacgccctgtatatattattagctgctgctggcctcctctctcctgctgtttgatccgattcacaaacaatctgccgacgcgccccgcagtgttcaactacgtgaaggagcagcacaacgtgtaccaggtgacgcaggacgagttccggacgtgcgagccgccggcgaaccagtcgacgcgcgtgtgggcgacgggccacgacctcgtcaacctcaccgtgccgggggactactacttcctctgcaacgtcgccggccactgcctcgggggcatgaagttctctatcgccgtggccgcgccaccccctccgcccccgccgccgccgcccccgccggccctgacgccaccgccaccgccgccgccgagctcgggctgcgtgccgttgatttcacggcggcgcgcgtgggcggaggtggggcggattccattcctcgcggcgatcggcctgctcgttctcacttgattgtcgtcgtcgttggtaggtacggtggttaccaatactacttttttttttgtgatggttgacctggacgttttcttggaattgatggttgggatgaactattgctatgcaagtaatggcgtgcgcatgcatgtctacgtttgattgatagtgttgactttgtactcaaaatgttattatcggtacgtgtgtttgggtccttttggtagggatctcaagtgctcaagcaagaagagataaaaggggctcataccactagtacaaaatgtttattggttgattttttactgacggttctaaaaaaacgacggtgaaaagatttatttttacttgctagcttcaagttttggttgttctgaaaaacgctagtaaaaatagattgcaaaactttttatactagtgtgaagtgtaagtggagagaagagaaagaaaaaaaaactcataaacatcaactatataatcaaatatagcattttcgtccagggtgtgcttctacgatagacatttcctttctcctc

SEQ ID NO: 5558 - DNA, 784 bp, Zea mays
  Intron number 1 from transcript GRMZM2G029153_T01 (locus G RMZM2G029153) derived from phytozome v7.0 (chr-ID 7; pos 1 13163418 to 113164201)
acttgttggagagtatttaaaatcttgccaaaaaactagaattagaagtagcttttggaaactattgaagattctattaattcttagcacttccttgcaattcccatcttttagtattggtttgttaggatccagtgttgttaattttttaaaccctaaggttatcttcagcagatctcctatctcatcctttatcccattccctatttaaaacttctctctgcaaataatgtcaaacagtgtcatctacagttctgcgtcccctatttttacacactctagtggagacattctaagggcaggtttggttataaagaatttggaggagatccatatgggatgaaatcttttactattcaaaattgaatagatggaaatcccttctttaactgttaaaaagcgccgggtccaaacaggaccaagcccttttagaaacatttgctttctcttgttggaccttgttgggaatgacttgggttttttcttaattttttttgagaagccaagaaaacccatattcgttggcccaatcgtggataatctctaacaacaatattcgtgccagaaagtaccaaaattacacgcactcgctgggccgctagttgagttcgggcgaagacccttttaatcgtgccactattagaatttgagagctcatggtcacaacaaactgtacagtgtttggacttcttgaaccctagagtgccaaatgtttcacaatggattatctcctggtatgttctgccgatctgactgacccaatgcttcaggaggcgtgacatcc

SEQ ID NO: 5559 - DNA, 467 bp, Zea mays
  Intron number 3 from transcript GRMZM2G043240_T03 (locus G RMZM2G043240) derived from phytozome v7.0 (chr-ID 7; pos 1 08009791 to 108010257 reverse strand)
tccaggtccagcttccaggagccgctcgcaaaaaagtaggggcaaagtgatgaaaagtaatttcttttgtgcagtgtgactaaatacttattggttttgttgtgtgcccctcttctggttcgtgcttgctgacttacctgaagccttggaaagcatacttctcgtagtgcttattttcaaatcaaacgatctgtgattctgtggttgagtcatgtttacacattaaagccccatttatctgcttttgcataattgaaggttgttgttacatcctagaatgtaactatgcagagcgatgccattttattattgtttattcatctcaaccattggaaatcacaattttatgctgatgataaggtgttttcgcaaacatgtaatttgctgatatcaaatttctttgcctcatataatgattctattacttcgtagattgcaactacgcaaaggggaagtggatagaagat

SEQ ID NO: 5560 - DNA, 974 bp, Zea mays
  Intron number 2 from transcript GRMZM2G125054_T01 (locus G RMZM2G125054) derived from phytozome v7.0 (chr-ID 6; pos 1 21504969 to 121505942 reverse strand)
tgggctggcgtggcgcttcccatcctccaggaagcgtgagttgatttccgtctgtagcttcgttatattaattcccctgttccgtccatatggttctgaaatttcaactttagattgctgtccttgttctcttcatctatttctaaattttctgaaggttttgatacttttgcttgcaatgtatttagtccacctgcgaagtgataatatttgagattactcaactctattattttgccaggatccatgttccatatttgaagttggcttaccactgcttgtttcatgatataatccttttattgcttactccttcagatcggcttgaaaaatatgattacaagaggtgtgtaattgaatttctacttagattttgcgatgggatgtaaagctatatatgacatatgaagaaatatctgtagtagctaatatcaagtggatatgtggtgggcacaggaactagttgatggagttccggcccaccaggtttcatgtactttggactaggtttggtcactagcgtgcctcatttactcatgatatgtgcatgttcactctcatgaggtcgaatcatgactccacgggctttgacatgtgtagcaggaaacataagatgtgcacacatgtgtgagtgactgagtggggtgggtatgttcgttgtatcttgcactctcgaaagaaacaaaaaagtttataggatagaaagagcattcgtgatgtaacaatcttcagaaacatgtgtaatgtttcaatttgttcctttttggaaacgtttttgtattacaatacacaatagtggtggtggctgttcttccttttggatttgcagtatagggaaaactgtttctttgtcggagaatttgggttctattttgattacaaccagcatttgttatgtaaagtgaacataatgaattatggaatggtactgattttcaggtatacaacaactcattgttgcaccattacactat

SEQ ID NO: 5561 - DNA, 934 bp, Zea mays
  Intron number 2 from transcript GRMZM2G141185_T02 (locus G RMZM2G141185) derived from phytozome v7.0 (chr-ID 3; pos 1 75349050 to 175349983)
ctggacgccgtcgtctccatcgagcagttcgccaggtagggtcaagcagtgtgtgcttgcgaatctatgcattggtatgtcttatatggtgattctactaccgaattagctaggctcattagaaaatttctgtaagtttcaaattgctgggtccttgaagtgaacgtggcacgtagcagcgggctactttggtgttaaatcaatctgtagactgtgatcgttccctgtcttgctgtctagttaacaagaattatcagtattaggtagctttgattgtcagcacttttcgtctcagagatactttatatagatgaaactgggtcacgttgtttccagttggtgctcttataaatttatcacacttcattttgcatttacagcgccatttgggtattgagtaaatgattatctcggcatgtttaagagagcaaacaataataacaacaaaaacacagcacagaccttttagtcccaagcaggttggagccaagcaactcagcatgtataaaaaaactcggctggtaggggaaagaccgcccccatggtgttatattaagaagaagttcaatcggagccctgaccgagagaggtcacgaaaactggtccccggtgcaacatgagggtccgccccctatagaccagatctttactcgtactttgagctctcccagagcctacacgaggatctacccccataggtcagtccatctcgtgtgtgcacgactagggaaccagcaagtgactttttttaacctcagtctgaaatgcgcccccactgggattcgaactcaggacctaaggagtgcaactcagaccaccaaactaactcggccagagaaccatattttcaagtttggtcttttgaatagtccacagctgaaatgtttttcccttggtttgatccatctatgtatataattttctggtaggttga

SEQ ID NO: 5562 - DNA, 769 bp, Zea mays
  Intron number 1 from transcript GRMZM2G044460_T01 (locus G RMZM2G044460) derived from phytozome v7.0 (chr-ID 3; pos 1 60517377 to 160518145 reverse strand)
gcgggcagagtttaaccccaagaacccggattctggtatgcgtgtttgtttctttggtctttttctgaagagatgttccgatctttatcttcctataatcagttactgtagttttttgaagttctttggaggtaaagagcagatgggcagtcagctctttatgtgaaaaggaaacttttgggtttatttattcatcttttgggcttttgatttcaggatttgacagcgaagtgtggtgttatcatcgcattaatcgcttctggagatcagttagctttctaggggtgggtgatcttgaacggaaaacgatttacgggagctgactgattttgggctcttgtaatggaaaaggagtttttagttgttcctaagttttgtccttgaaaatggaacacttaatataaacgaggattctgttctacacaaagtggattgctctattgactgcagtccttctacctcgatgtttggttaagttccttaggatgcagtttttcccctgtaaatttgctgaatggatcctaaattgaactaacacatgatctttgttgccaaaaaatcaaaagcctacttaatgttcatttgtccaaaaatcaattgctacctcttgaatcatcaacctagcaaggaataaataatcgctccgtgtttctgttttttcttacttatttgattaatctcttagctgaaattcgtcaaacacgtatgcaaagattactgttttcatgaagaagaactttatatggaacttaatttgcaggtagcaagg

SEQ ID NO: 5563 - DNA, 461 bp, Zea mays
  Intron number 1 from transcript GRMZM5G889778_T01 (locus G RMZM5G889778) derived from phytozome v7.0 (chr-ID 6; pos 1 6620672 to 16621132)
gacctcctcagctcccccatccgtatctcgcgaaggtacgcctacgcgctcgcacaagggggtggtgctggcagctggccgcctggccgtaaccagacgacgctctgcacgacctgtccctagctggtgtggtagctagtgtacctcagcatgaaaattgggagcaggtttctcttccagttccactctgaaattgtgattctaggctcttggtgtgggcgtcgatctgcacctacattcaaagcatatttcataggatatctagagctaaaatctcaaatttattattattttattattatctcaatgtttctagttgagctgagcatcagtgtacatcatcagtatctcagtgactcaaaaagactttgaatttagggggaaaagtacacaaagaggtcaattatttattcttttattttatagataacaaaagctcgtgatcgatccagatttcggtc

SEQ ID NO: 5564 - DNA, 922 bp, Zea mays
  Intron number 1 from transcript GRMZM2G080512_T01 (locus G RMZM2G080512) derived from phytozome v7.0 (chr-ID 7; pos 4 905812 to 4906733 reverse strand)
ccgcgcggggcatcaccaggctcttccccatccaggtgctgcctccctcgtggtaattggatgatgatgcagtttgccctcagtttgtgcctgattttgaatggaaatggtactctcgttctttcaaaagcttccgaactccgaattgttacgatcctgcgatgtgtgctaccgtgaatgagactattcggtattggaacgctagttttagctgagctccaaggaattgtttcgtggaacggaggagaatgcatctcttagttttgtaacatcagggttgtctagtacgatgtaaactgcgcttctgatactgtgccctgcaacctgttcaagcgcttgcaatttttcagcagtgattttggttcgtaacctgtgagattatatttatagcgttgtttggagtgtagtggtgtgagccgtctgtccgagtgcactggctgtctggatctgcattgtgctgtattcttccagtgagtccacaccgtgtataactattagcttcttttagtaaaatgctaagtcaatatgatgtctcaattttttgcttttttataaactgctaagtcaatatgttgtctcattatgttctaacgtaaatgctaatcaattactccctccgtcctagtatataaggcataaccactttttattctagtctcataatataatatgtgatctttctagacatgcgtacattgatgcagtagtatagagagaattaaatatatttttttagtttttgaaccagagctggttacgccttatatactgggacggagggagtggattaatcagattggatctccacctatttcctgttccatcttaattgaaaaggtactatatgtgtaactctactgggttcccaatctgattcggttcatgctattttgctgtccagagggctgttcttgagccagca

SEQ ID NO: 5565 - DNA, 741 bp, Zea mays
  Intron number 1 from transcript GRMZM2G415550_T01 (locus G RMZM2G415550) derived from phytozome v7.0 (chr-ID 6; pos 1 31998163 to 131998903 reverse strand)
cttctggtttatctatctctgattcgagaacatgagataatcttgacaacaacaaaaaggatatcttaattgaaaagggcatgatacgagagttgaatctagtttttcctaaggattccattggtagacatttttcatatgcttactactctagaaatttaagtaatggtgagtctattgatagaaagtggttggtttattctaaacacgtgaacaaagtttattgttttgttgaagttgttcaagtcaaacaaaagaaagtctttgttagcatctgatggagtgagggactggcaacgtctcagtaggagactcaaagaacatgataatagtcttgagcatctgacaaacatgtatacttggaatgaacttaggatgaggttgagcaaaaataaaacaattgaagatgatttgcagtgggaaatttcaaaggagagagagcgctgaagacatgttttattaaaaattgtttatgctatcaagtttcttgctaaacataatttggcttttcaagggacaaatgaaaaactataccaagctaacgatggtaacttttttgggcacaattgaaatgatgggtgaatttgaccctatgattcaaaaccacattaggtggactcaaaacagtgagattaatcgtaactatcttgggcatagaattcagaatgagattatttcccttttgcagattgtgtgaaataaactatattaaaggttatcaagactgccaagtatttttct

SEQ ID NO: 5566 - DNA, 273 bp, Zea mays
  Intron number 1 from transcript GRMZM2G379409_T01 (locus G RMZM2G379409) derived from phytozome v7.0 (chr-ID 7; pos 1 56068442 to 156068714 reverse strand)
ccacaaccaaaacagcaaactcattggtttccttggtgagtaatttgatacttttcggtaatcacctagagcatcatatcgtctacattgtcttcacttgttaattccaatttgattttgctgattagcacttgcttcaacatgagtcctaaaaaactgtgcatttggttattgctggttttttttggctcacactaataactttgtttgtgattttggtcatcatttttctgcctggttgggttgcatctgcttgtcattcttgcagtcagc

SEQ ID NO: 5567 - DNA, 944 bp, Zea mays
  Intron number 1 from transcript GRMZM2G087619_T01 (locus G RMZM2G087619) derived from phytozome v7.0 (chr-ID 3; pos 1 75100050 to 175100993)
gcttaggcaaggacgcccttatcaagctcctcaaggtgaccactgctcatttccacccgattctaacccagcacgcttccatttcccgtgaaaccgcgctgcctctgaagtttcgaattcgtacgaggccttgctgtagcgcgttgctaaggtcgatggaatttgctactcaaatttgcagtcacagttcagggagttgatgtggcctcctgacgcttttggtgaacttgacttccatgttgtaatacgtactgatttccatctgaagctggagtggtgtagtagtactgaaaaagtcgtgtatatactagtgggggatgtcgtgtttggttaaggtggtgtttatgttctttgatatatataccaaagagttggtttcgggtccggggaatgttttttgggtcttgcaaggcaccttcgtctacctggcacttggaggcagcagaaaaatgtttgtggagttttggacattcagttgaactgcctgctgttccatgtttattttctttctgaactgttataactgaggaagctgctagtcctgaaaaattttataggtaaggaatgaaaggatatatgaggcatgatcatacatatttctgtaaattggcagcgagccgttaatatttaactgattttcttgcatcctgttgcattttttcacaataaaccttctcttggagatttattggattttcttagggttcactgtcttttagctttgtgctaatgtgagttgatgatccagttgttgaaacagttcagcctagcagagttcttcagaagctagacatgaacttgtccattattaatacatacttaagctggacaatcatactgacaaaaaggctcaaatattggtggattcatattctttactgccctaacacatttatgttcttattgcagcaagctgaaagtgcattatcagagtttagtcaatc

SEQ ID NO: 5568 - DNA, 491 bp, Zea mays
  Intron number 1 from transcript GRMZM5G848140_T01 (locus G RMZM5G848140) derived from phytozome v7.0 (chr-ID 3; pos 2 05353849 to 205354339 reverse strand)
aaaaactggtactctgaagctgcagcgaaccaaaccctgtcaactaaaagcagatgttctgtatacactccagattagatgtttgaacacagtacttcaatcaaaacagatgtcactatcactgctcgtgctgctaatacattgcatgatgaatctttgaagcttttcttatttgacaatcttttctgaaataatcattacttcaggtccagttgttttttcgagcttctactgctgcttgaagtttttaacatgatttttcctagaagattctgtcatcaatagccatttgtttgttgggaaagagaggcataataattattttacatttttatacaaaaatgcacatgtcatatcctgtttggtgtgtgagataatgaaaaagaactaattcatagtaatctgtaagcttgattgcgaacaaaaataatatggttgaatgtgaacatacaagaataatttacacatttctgtatttttccagatttcag

SEQ ID NO: 5569 - DNA, 1057 bp, Zea mays
  Intron number 2 from transcript GRMZM2G078592_T01 (locus G RMZM2G078592) derived from phytozome v7.0 (chr-ID 3; pos 2 29846596 to 229847652)
gcatcgtgccacagcaaggacctcctcacacacaagtaggtcatccagctcaccaggaagaggcattgtcagcaagggcctcctcacacacaagcaggtcatccagctcaccaggaagatcaaggacggcatctgaagtactttgaagtttgatgaacagtaaggacatcctcacgcacaagtttgatgaacggtaagtactctgaagaactcagccctgttttaatttctggtgatacaagtatttcttaaaagctggttatgtgatcattttcgtccagcagcgatgccccggccccctaaaatctcgcacgcggggcaaggattatcattattactactactgctattaatctgccatttgagtcaatgcatgcatacaacatacatgtgactccctagacgatgagatccacagttcgtgttcatcaaaggagttacgagtttagcaaggtctgcctgacgtagaggatactcagcctgcacgaacatgtcgttcggtccaactcgcaagcaacgaaaatcgctcgctttgcagcacatgctgctacacgcacatggtattgaattgaacaactccaagttgaatttggttcatgtgaatctctataaattccaagcgttatacttatcattgttctgtagtcttgacataacaagtcctgaccgtataaaattatgtatatatgttcggagtattcatcatatcccacaaatcttggcaatgtgacgatattcccttttgaaaattattcagatacttcttcaatgtaactgaaaagtggttccaccaatcccactatatttacctatcattatggttccataggttaaatagatcccttagggagttaatgatgtataatgtgtgaatttgttggccaatgttgtgcccttgttgccttctatctatctcagatttaattagagtaaagaaaaatatctttcagatacgagggaggtcagagtggatctttgtaaatttatttgaatgtgagttgtacatcggtttttgtgtacagtgcacaaggccattctgtccaaacctggaattggc

SEQ ID NO: 5570 - DNA, 988 bp, Zea mays
  Intron number 1 from transcript GRMZM2G082924_T02 (locus G RMZM2G082924) derived from phytozome v7.0 (chr-ID 7; pos 2 4225463 to 24226450)
ggcattggacagtgttgttgtaactctgttgcctgcttgcctactgggtcaccttggcccccctttttccgtcagattccaatcagattgtgcatcacaaactttagtttttatctggatgcacacgcatgagctgagcgtcgatgctgtaaggtccaccagtctgcttgttgctctactgaaaagacatcatataagcatgacatcgtggaacgatttttctttctctaaactatacagcaagtagacagaccatagggctggatccatgtgaccatgctactattattcttgtctgtgtctttcctgctcattccgcgccaacagggcacatgccaaatagatatgtaggcatcaaatgacaagaaacagtacctaatgaaaccagaattcggttttggttccacaagtaaaattctaggacattctggtatctgacagaaaaattactcagatatgtaggcatcaaatgacaagaaacagtacctaatgaaaccagaattcggttttggttccacaagtaaaattctaggacattctggtatctgacagaaaaattactctttacaagcggggattttttttaaaaaaaaagataatggaaacgaggttgcagcctagaagtggggaagtgatttgagtgtttgccatgaatgaattgatgtctgaaatacttaactgaagatccgttgtcttgaaattgagccaaactatttgtttcatttgaatgtacaagtcataattgatgtcattgaaatttatgcctttgcttcaaaaggaacctacaatatttttcgcagctgcatcttttcttgtctgccaacctgatctctttgtggttcggtacaagtttaggacaaagtaatctgatgaaatttaatcgctgattagctgtatataatcgatattagcagcacggtttcttctgataaaccatgacctcaatctcaacgtatgtgcttttgtactgcagttgtggagtcaaagg

SEQ ID NO: 5571 - DNA, 679 bp, Zea mays
  Intron number 2 from transcript GRMZM2G073521_T01 (locus G RMZM2G073521) derived from phytozome v7.0 (chr-ID 6; pos 3 048851 to 3049529 reverse strand)
ctgtcgtgtgcaaaggaagggctttggcctaccaggtatcgtactatcacttatcactcttctctttcgcctccatgggtttatgcttctagcctgctctatctctttgcatcaattgttctatgcactaccaccatcttttgcattttgattgatgcaatatgtttggttcaacttgtacctactagtactagttacattaaggtaccttttctcagtaaaaataatccttggaaatagccgccacagttttaaataattccatattacttccagtaaaaaggatgtctaacttgggtgtcttttcttaaaatgtttctttctcttggtagcctggtacctgtgtcaatctacattcaaaacttaaccaggaatagtatgcatgcattttgtagccgctttagaaatttagaacttgctgtgtacttcagttccgttggttagaacaggaaatgctgaaaaaactcaccattgagtgagcattactttggaggctagaccaaaatgtatcattatttacttttattgagaggatacgcccagcctcctcactgactggacagaaaatggctttttcttgcgattctctcatgtacgatgcttcaattgccaggtgtcattaattcatattacttcatgagcagactcgagtggagcaaatttccaagcagctgaagtc

SEQ ID NO: 5572 - DNA, 742 bp, Zea mays
  Intron number 1 from transcript AC204522.3_FGT007 (locus A C204522.3_FG007) derived from phytozome v7.0 (chr-ID 6; po s 107376605 to 107377346 reverse strand)
cctgccgtgagagttggcactgagatactctatctgaaaaaatgcaaaaacaaagcctaccagtgcagtgtttagagcctccgagagtttgtactgaggccagaccttctggcttgtcgtagcatagtagtaatgctgctttcgattttattcatatgttccagttaaacctttactatgcattggagcatataatttgtcagctgtgatgtgtagcccctaaaaaaacaccaaagagaaattgtcccagttttgctatgttctggtatgacaatctgaagcataataatttctatattttattcatgttttgtgctgatccgccaaggtatttatttaggacaattgcattattagtcaatttagtctcaacaatgttccaactatttggcacttctccttgcttctaatagtatgttctatgttccagaattgagctaagcgcatcctaacatcttgactccaatactaactaagaattactagcatcacacctcgaaagaccactctgtcgaccaatccaaggaaggcacctgaagcttagggaggacacctcacaagtcacagctgtctgtgctgcttctgtgagatttgtaattagtatgagcaaatctatcaggcgtcaatgcggggttggggtaggtgagaagaatatggcagcactccaatttgcagaaactgatcaattatttatgttactcatttgattcttcagtttccctagagggtgaaacatcgtggg

SEQ ID NO: 5573 - DNA, 919 bp, Zea mays
  Intron number 2 from transcript GRMZM2G066524_T01 (locus G RMZM2G066524) derived from phytozome v7.0 (chr-ID 3; pos 1 36310345 to 136311263 reverse strand)
gtccctatccacgcatcacgctctcaggccctaaggtttgtcatcgtttatttatttgtttattcttcttcgtcctcccttcagtgaccactttatatttctttaaggtatagttccagcagtttaggcttcctactaatctgattagaactaccatggatgtgtatttgtgggagcaaaacattaagagtttgcttggaagatcgggattgctagaaattaaggatatagttcaaatacgataaaaaggctataaacttgacttcaaatccctgcttggctaaagagatcctaaatgttgaattctccatacaactatagaaaagggtgaagcctaatgaccagcgactgactattgcgtacaagtgacctgactatagttcatttttgcatgaaattactttgttttcatgaaagatattgcccttttgtaattgttttttgactagatattcatttgattaaagttgatagaagtgttagtattctgtctcaaaatgattatttggatcttatgattatgacttgcacccatgtacccaacttaggctttgttcggttattcctaatacacatggattggatgagattggaaaaaattaaggagaagtttgacttgtttgggattcaaactcatccaatctcactcaatccacatggattgagaactaaccgaacaaacccttagcgggttgctttcccgttttgtcataccccaatcatattttcgtatgcagcggtctttaagctatattgtttttctctggaatggtaaacatggggggagaacatcccccacctgaattagcatggcataaccacaaataagcaacctcgttctaagctatattttaaccctatgaacctttttttttgttcattaggtacctgtgtatacgattggggatagaagtgccaa

SEQ ID NO: 5574 - DNA, 440 bp, Zea mays
  Intron number 2 from transcript GRMZM2G479068_T01 (locus G RMZM2G479068) derived from phytozome v7.0 (chr-ID 7; pos 1 26470685 to 126471124)
atctctcaggtatacttttgaattttgcaggctctgatcttgcattcatcgatttataatatgctctgagtggtgactccagtgggtaatacagaataagtcaaaaatattgtgtgctccagcaaagaaaaaacaattgcatattaaaagcacctaggagttgaggggctgatctgcacaaagtgattagtgactacactacatgtgctttagaaatcttacaattttcatctggtgcagttaataaacatgcttcgggcttatactatctgttcctaggaaaggttattgatctattgacatcatgcttacagataccttagcttgtgttggaaagtaggcactaaataatttatcaggatactgtacattgtagcagaaaatatgtcacatggtggtgaataatgttttgtatgttctcagtatcaaggagagggagg

SEQ ID NO: 5575 - DNA, 700 bp, Zea mays
  Intron number 1 from transcript GRMZM2G004795_T01 (locus G RMZM2G004795) derived from phytozome v7.0 (chr-ID 6; pos 1 60014778 to 160015477)
taggcgaggcatatgccagcgcctgcccggtgccgacgcccgaaattaatcaaagccaagacgtggacgccgccatctccagaggcgcctctcgccgtttggaacagcttcattaagcaatgtttatttttagcatttccatgaattgcatcattcttctgtggatagaccaaacatggtgcaagtattaatactgcaatctgtaagcgtggcgtgtgtgccccccttctctttttttttccggagaccatggcctcactcaacatgctactgtcgtccatggttttcgttcgatcgtgttactactaccagtaccagtgtacgtctaaccaagtgcagttggcagtgtgtgttccattccatccctgcagctgcagggatcgatgttgcatttgcaaaataggaacccaagcaaatttgcctctccccctcggcgacgtaacgtggccgacgttgacaccgattctccattgaggcagacgtacgagaaacatcccccccgggttgagtggacggatcgagataagccccctggtccagactctactatcgtaagcggcggcacacaacgtaggcctaggactaggacgatgccgtccgtcagccaaagctgcgcgaacgaagccgtgtactctctctcccctgcctctttttttcttctctaccaagtacaaacaaaaaagaaaacagggcttccaat

SEQ ID NO: 5576 - DNA, 887 bp, Zea mays
  Intron number 1 from transcript GRMZM2G162369_T01 (locus G RMZM2G162369) derived from phytozome v7.0 (chr-ID 3; pos 4 5444655 to 45445541 reverse strand)
acctatctccgctgtcgccaacgtctcattctctggtgagctcagctgacgcgcgtcctctatccccgtcgtcttgttcgactccaactcccctctgcatgctgtcctggctggttggggtcagttcctgggatggatgccatgcagccctaccagctgcaatccccgcagcgaaccgctggttcaaggtttatgagcggtttgattgtgcgctggtcgcgccccgggcgtttctgcgcgtctgtgatcctgctggctcggtcggggatttcttcgagttcgaacaataatcgtgtagcaatttcttcgtcagtgagcatcgctcccaatatgctacagcaccaaattttgctccttgcctgctttatttacttccaattactgtaagatttaataagcatcacaatgtgttaagttgcacttcgcttgctagttcctgtagttgagtatatgcccacattattttactgtcaatccggtgatacaggaagcacactgaatttcctgcgaaatttattgtattgaaattgcttggctgcagcgccttgatcatactcatatagaatttattggttaataatgccacagaaaccttattttctctattgtgttgcaaccttcagtcatgaacccatgtctccgttaggcccacatgtgaattcaggatcgaaatatgtgaaatttgtgggcacaagatcctattagggcctgttcgtttcgatccatatggattggttgaacggtattaggtgagtttgaatttatagcaagttaaaattctttataatcttttttaatctcatccaattcatatcaaaacaaggaataaccgggccttaagtggtttgccttttcgttatcactgttgttgcagcctcaaggctgca

SEQ ID NO: 5577 - DNA, 894 bp, Zea mays
  Intron number 3 from transcript GRMZM2G180654_T03 (locus G RMZM2G180654) derived from phytozome v7.0 (chr-ID 6; pos 9 8085471 to 98086364 reverse strand)
aataatacaagtatgcccttgtttcccaatggtagactgctaggtctatatgttatccctccaaatctgaaattgttatccataaaaaatgagagatgcatagtttattttatgagttaaatgcatcagcgacacctaaacttgtcaaagggtgccacctaggcccatgaacttttgtaaatgtgttttgggtccctaaatttgctttatggtgcactacacatccctaaacttgtaaaatggtgtatcacaggttcatttctggaccatagtcaccatactgatcattgtggtgcaccacttaacaagtttagggtcctagaaatgtgttttcaaagttcatgaacaaagtggcacctcttaacaacttcaggggctgctcatgcatttaaccctttttttaataaaaactatacacctctgaaatattgtttgtatatattaaatgcaatgattttcttttgtcctgcttgtgtcaggccccagccaaaagttacaagattacatgtttgcacacttgtggaaccagctgtgaactcagcacctgttttgtacttaccacacccctaaccaacttgtctctctttcaggtttaccgtatgggtggggattattttgttgtgacatgagcttagaatttctcaccctgaccgtcgccaaaaactaggtccttgctgattctaatgcttcaagactcttccgtgctagatctcgcctgtatcaagttaaactcattagttgacatagttctgtgtgtattcgggtgcgcccattggctgtgaattgtagctaaagcaaagttactaagcctagagtttaggatgttaatagcctgatgctcaacatgtccatggtttcttaatttaaccagcacaaagtgtactgtttgtagca

SEQ ID NO: 5578 - DNA, 1014 bp, Zea mays
  Intron number 1 from transcript GRMZM2G427337_T01 (locus G RMZM2G427337) derived from phytozome v7.0 (chr-ID 6; pos 1 44118204 to 144119217)
cagaactccggcgcgcagccactacctagtcccaggtccgcttctcgtcaatcctaaagttggtaccaatgccctaaaatatgtttctagattgaatagtagtagcttctgtgttgccattgaattatctaggaggccgatactgaatcctgccaagtttatccaatggttttattgtgagtaggttgttcgtattgttttgtgagatgaggtgcactttgacactgtacaatttccactttaagatgtgtaaatggtgaatctttcactgttcctttgcttgtttctttctcatcaactttcctcagccgtaatgcgggaggtgtactgtaggttatggaccattgccttctggctttttttgttattgttagtttttttggtgcaacatagtattttaatatatcagtacgcataggttggatataagtttgttaggaagtatacgtctagccattttcatttccatctttcacacaactgtaatttatgactctgaagaatactgcctttctctaatgaattctcaaagcctttttctgggtgaataatgccagcagccagctcacagaagacatgaaagtttttattcaaggatcataactggagcgaaatcacaactacaatagagcaaatagttacagctttgagcatctgctgtacatgttctcattgagaacctccctgaaagttactatacatttcttttgtggggttatgctgacaccaagcacaggcttttgtatgtgacaactcaaattctgccgtttaaatgtccattcaatctatcaatactctgttatagaaggacccttgctatatgctaaaggatgtgacaaatgaactgattttttttcatgggcaagatacttcatattttgggggcttagtgcaactaatgattttaaaagcttgactggatttgaattgaaaggtggaagtattaatacttcagtccgtcatgggtaatttcttgcagtgcttcctccaattcggaacactaataatcattct

SEQ ID NO: 5579 - DNA, 573 bp, Zea mays
  Intron number 3 from transcript GRMZM2G391375_T01 (locus G RMZM2G391375) derived from phytozome v7.0 (chr-ID 3; pos 4 3105677 to 43106249 reverse strand)
aagagtcatatcacgtggattgtatgtatacttaacatgttggctgttaccatgaaaattgtcttttttcataaaaggtttattcttatcttgtgataatcggtgagctaaacttcctgaattttaatttatcgatagcatatttgcttaactttttgtccactggatatatgatagttgatcaaagtatgttgactatgttcacttcaacagttcagtcccagtaggcaaaaaggcaatgttggccatactgcatcactagaaactagaaagagtatccatcatcgatgaaactcttggatatctatgtttatccgctaaaagtatattgtggatataattatttgttattgcatcacaaactagacaacagttgtgatttttgatctaaatggagttaaagatgatgttagctgttacgccttgccagaaacaagctaacatctatgatagaacttttaaaatctgacctttgtatgcttctgggagaaatatgattgattggtttagttgattcctggaatgtaactacctacaggataagcagttgaagtctcattctccaaagaacgt

SEQ ID NO: 5580 - DNA, 673 bp, Zea mays
  Intron number 2 from transcript GRMZM2G001327_T01 (locus G RMZM2G001327) derived from phytozome v7.0 (chr-ID 6; pos 1 36693801 to 136694473 reverse strand)
atttgctgctgcaacaaggtatgctttcaggaatttttgtttcaaaagcctctagtataatggtatgtgctacttttgcagaatttggtgctagtataatagttctggagttgaatacaggatttgtgaaatgcatatagtggctagagcttcgattaaccttctgtttctttcatatttagtagttagttaacttaatagcattcattagtttgctagcatgatctgttgtagaatattttctcaataattttcatagaagtttctcgctcaattgttccaagtaatgtttagatgttattggaacaagtaatgtatgtacaagtgtataagcatttatttatcttcatttgattggtatggttatttaatgtgctggtactgcagttttattagtaggatgcattgacatatacctgattagctctgtattttgtcatatgcttcttatttgttacatccaggacttgctatgttggctacatatatatgaattatgatacacggtgatctacctatttatgtgtagttgtcactgctgtggtatcacatccacagtttgcctgctgttcatgtcctttattattccattaagctaatagtattattctgttccaagcatatactatctatgtaccgtggataatcaaagtaatggtgttctgttttttag

SEQ ID NO: 5581 - DNA, 771 bp, Zea mays; identical to SEQ ID NO: 5167
  Intron number 1 from transcript GRMZM2G001327_T01 (locus G RMZM2G001327) derived from phytozome v7.0 (chr-ID 6; pos 1 36694918 to 136695688 reverse strand)

SEQ ID NO: 5582 - DNA, 601 bp, Zea mays
  Intron number 1 from transcript GRMZM2G474544_T01 (locus G RMZM2G474544) derived from phytozome v7.0 (chr-ID 3; pos 2 03288484 to 203289084 reverse strand)
ctgccgcactgacctctgcccagcgctgcaaatctgtacaaggtggtgacctatgaaacgataaaaagaagatggcaagtaattcatgcgatggtaaaaaaacaaaattaaaatagaacaggtgtcccttatcagtctagcattcaaagaaactgacggccatttttcacttgtaatgtaaaataaataggaggaccaccatgcctcaccagtctgtctcactgagtacagtggcaagagctttatgaattatgagtcaccactaggtcacagggactccagcactgggtctgcccaataaaagggcctttcgtgagtcacaacgcgtgtgccctgcccacctttgctgtggcaggccggcatgcatgtttttgtaggaaaaagaaacatgaaaacagtgacaagatctgatcacctgaacactgtgactgcgagatcagaaactgatctgagtctgttgtgctcatcttatacacagcagaaactaatatgagatgagcgcaccaaactacggccgaatgattaaaagagatgtatgaagactatgacggcctgcaaaggaagaaagtgtcgcaccttcagaggcagaagctgctcttaa

SEQ ID NO: 5583 - DNA, 545 bp, Zea mays
  Intron number 1 from transcript GRMZM2G389299_T01 (locus G RMZM2G389299) derived from phytozome v7.0 (chr-ID 3; pos 2 31276097 to 231276641)
gtcggaggtggttgctgcaattccccgtcgtgcaggtgagtagagtagattgggcaaaattgtggtttctcattatctcacacagaaaacaatttggagtgttctgaaattccggatgatattttaatttccacacaacgacgacgtctccgtgtcggaggaggacctcgaggggttctaccgctggttcgtgcgctccaggatctagggcgtccgggttggggccaagtgcaccgtcatgtcctcaacaagctcaaaaagatcaggtataatttctttcttctccgtacgtgcattcctagatgcaatggataacagaaatacattattcattgagaactgcagttagccagataaatatgtttcatcattgaatcaatttctaactttgcgaatacaatggtctgagcaaattgtgtcattttttgtttgtttgtttttagtcccttattggatttcatttctagcctacccgatgctgagagcaagtgaacgcatgcgcacttggaggagacggcgtcacgtgataaggttgttcaaggcgt

SEQ ID NO: 5584 - DNA, 615 bp, Zea mays
  Intron number 1 from transcript GRMZM2G337065_T01 (locus G RMZM2G337065) derived from phytozome v7.0 (chr-ID 6; pos 3 6193382 to 36193996)
cttggtaagtgccttgcactaatgttctcttcacaattttgactatgttctctgtctaaatctgatatgtgccttgcactgatgtttcttggcttactacttgatcacttggtttcgatatggaattttggaaagtgctgtcaaaactcattcagttcttttgccattcttgatattagtatttgatttgattttcgtctacatatgaacatcaagattattaatgaagcaatagtaattgaagctaccctctcactatatcaaatattcgagcttcacaatataacttgcaagaattgtttgattactcacctgtttaattgtagctcaacgatttcatcatttttttctttcagcactgtacaactgctattttgttagatgcttattgcacttacgaaggttgcagatgctttgtgttgcacaaaacaattgctgcgtgtggtttatgtgccaaaaatgaaatgcttcatggccagtgatagctcatttgtgcaaataaagttcatggtctaagtgtgtgcagcactctattaatgttctgccagggtgtttttttagtcctcaaattgtgatatttgactgttactctgtctttgcttgcttgtaggggta

SEQ ID NO: 5585 - DNA, 553 bp, Zea mays
  Intron number 1 from transcript GRMZM2G405067_T01 (locus G RMZM2G405067) derived from phytozome v7.0 (chr-ID 7; pos 1 71214175 to 171214727)
agaaccttattgtggagaaaaagaaagttgcatatgtgagcatttaatctcatgcatatttatcaaggacaaccacttgttagcattattataactaatgacatgttgtgttggtattttctacctttccgcagatgaacaaaaaaactaactaggagccaagatatttttctatcttttcgcgcgcaggtgcaacactgcagctcatgtagagcctcatcgacatgttctccacccaacctaaccagtaattaataaaatactgcatgaacaattaattcttcttgcgccatcgatatttttgttaaatgcggtggctaaagcatgtttttaaggcatggtgtgtactaacattatttttgtcagaggtatttgcattctatgttccgatactttagaatttgctgtttatggtagaatcaacaatgtaaatacattatatttatatcttccttcaaagttcaaaaaggcgatgccacatgcattgtagctacactattttgatgtatcatgttcgggatgccgattttgctatcctttttaccctaggtta

SEQ ID NO: 5586 - DNA, 716 bp, Zea mays; identical to SEQ ID NO: 5460
  Intron number 1 from transcript GRMZM2G115000_T04 (locus G RMZM2G115000) derived from phytozome v7.0 (chr-ID 3; pos 1 66432166 to 166432881)

SEQ ID NO: 5587 - DNA, 442 bp, Zea mays
  Intron number 2 from transcript GRMZM2G115000_T04 (locus G RMZM2G115000) derived from phytozome v7.0 (chr-ID 3; pos 1 66432955 to 166433396)
ccaaggtatcatctttacacggaatatgtctggtattcctgttaatctgttgtttgcctaacttttgtaagtacatcataaaagcctgttatgtttattgatcaatgagagccaccttttcttttccatattatttaggtggtatttgtttcaatggttagtattatcacaatgctttgatttctataaggttcctttttctttaaaaactagtttgtactgtattgggcaaacattatacttgtactgtaataagttactgggaccttatagctttccgttttggggtttgcttaatttcgcagtgaatctgatttttttcttgtttatgcagttgcacgcaggaatttgtagagcatttcatccttctgtatctaagctttccgccattttcccctttatcgaagcatcaagacccagaagcaagcctggtatacaagca

SEQ ID NO: 5588 - DNA, 479 bp, Zea mays
  Intron number 1 from transcript GRMZM2G153607_T01 (locus G RMZM2G153607) derived from phytozome v7.0 (chr-ID 7; pos 7 6419148 to 76419626)
ttcctgtttattatagcaggtttggatccatatgtttactttatttgaattgatgggatagagcagtatggaatgatttttgcatcatttgttaagtgagcaggctatgtgctgtgcttaatgatttggtgtaaattgatttcttcctaatcctagctgcactaaaatatgttgctttggagtgtggccatgcgtgcgatttaattgctcgcttgcgcttttaatttatattttccaatttatgacatgctaagttaaatcatgtgacttgtccggacttataaaattactacatgtttttaataaatgtgtcaagtaaatattattggtttttgcacctcatgcactgacagattatgttcttgaaaaacaagattaatgggagtagaagttataattagaagttagaaccattggttgagtcgctttgggcttgtgtgttttacattctatgtttgaaatcttgtagaagaggaaaa

SEQ ID NO: 5589 - DNA, 396 bp, Zea mays
  Intron number 2 from transcript GRMZM2G357707_T01 (locus G RMZM2G357707) derived from phytozome v7.0 (chr-ID 7; pos 1 44047940 to 144048335 reverse strand)
ggcaggtatgacttatgaaaccaccttttaccataatgttttattgctgttatataacaagaaaaataaggtatgcatagcttctccatagacagctctcaaagggcttctatatgagacatacgatataaaataattacttattggggcttaatgttttgtaagtttttctgtttgatgcaacaaggtgatttagagtgatagtaatttgctaagttttcataatgaacagaatagaattgaatgattgattaactcattcagctatttccaaggaaacatggatgaagaaaataaccatcaatgttgttggttctgatgtagttctatcccttctatagatcgagcctcatgactacatatcaaagctcttcaacctattcacctagtttaaca

SEQ ID NO: 5590 - DNA, 922 bp, Zea mays
  Intron number 1 from transcript GRMZM2G152889_T01 (locus G RMZM2G152889) derived from phytozome v7.0 (chr-ID 3; pos 1 42703864 to 142704785 reverse strand)
aggctcgccgcacatttcgggcggctcccgcacaggtcgtgatccattaccacactcacctaccgcatcttaggcttgctggcttgccgtggtttagactttagagtccctcggttgtggaaaggcaacgactgctgtgcaagcaggaaatctgtgctcattgtttcagtcaaggaggggagcgtgctcgtttcggctttgagctttttgggtggccatcgtgaaacttagtggcgaacttcgtgtggatttttgtagcatgtttatgtttgaccttttggttagctcccactggtgctttcgtgcttgatgtgctaagagattgtttgtttgactcggcgatggaatcggagttgactcggtactgtttccttgaggactggatggatttacaattttacaatactttgatgttggaatgatacccagcagccatgtctagctcgattttgatctggtgtgctctgtgatcaagctaacgtgcgaaataaatggagtgaacagggtttcttagaatcatctgctggctcacactcttccagaaaaaggaaagctttcgtcctcgttctgaattattgtattacctatataaaaaataaaattccaaagtgtctcttttagatgggtaacagcaaaatttctcaagttagcaaatattcttacaaactaatatgttcaagagcgcagtgtggcttaacaattgcatactagcccttagtcttgtagttatcccttgtattgaacacatagtcagagtcttatcccttagtcttgtagcttgcctctgtattcttcgcgggtggggtagactggtagttaatttttaattcttcagttgtcttatttgtataatcaactaatcatgacactaacattggtttctcttctttttgctcatactgtagctatcagctggatatca

SEQ ID NO: 5591 - DNA, 603 bp, Zea mays
  Intron number 2 from transcript GRMZM2G127591_T03 (locus G RMZM2G127591) derived from phytozome v7.0 (chr-ID 2; pos 2 6290462 to 26291064)
aatagacttatagcgtgtttggtctgagaaacgaggtagttatcatcttttcactactcactttttttgtttgtttttggaatggaatgaattgatccatcatttcaatccttgtaggccaataattagtaataatacgagaaatgagttcattccactaaatttgtggaatgaacatatgatgcacccacaccacctcatctgtaatagattggctcttcgaaccaaacaccccattagattgttactacgtactttggtttggttggtggttagtcaagcagggttcagcagctgtctagtccaggagagttgagagttgctgctcttatgcattttttatgtatttctgggtgatagcagattgtgtatatgaacgtgtaaaatactgttagactactgtttagagagtataatttgagataggagatgagatgagtaggacttctgtagatagcctaacaataagaggttacctactcatctcccatcatcttatgggtggtgtcaagactcaagagccgtgcccttttgatataataagtaagttgctctctcttctctgcagaaactggatttcaagttccctctcaccgtgtcctg

SEQ ID NO: 5592 - DNA, 525 bp, Zea mays
  Intron number 2 from transcript GRMZM2G408096_T02 (locus G RMZM2G408096) derived from phytozome v7.0 (chr-ID 8; pos 1 03193883 to 103194407 reverse strand)
aagaattcatctgtggtaagcatttcattattctttgtttaaacttcctatgagtgtccattgtagttgtgaaaatgcatgcttctgcgccagggaacataatggcttactgaaagttggcatatctcatagtgtcattaccttcctttttgataaagttccataggcttaaacattgttcggtctttcttattttttcttctacttcttactctgggtatcctatattcctatataagggactgcaatatgcagctcaatattgggaaatcagagttttggaaaatagaaatctttcaattttccaggtggtcagctaattgggtaaatgcataaatgagttaatttcttaattgggcacatgatcaaacctaaatacctaatgcttataactgggaaagctacctcagttgtaagtttgtaacttgaatttggttgagttttgtggattaaattttcatattttgttatattccgcagtatattattaattatcgtgattttgactaaactatactttgcaga

SEQ ID NO: 5593 - DNA, 1028 bp, Zea mays
  Intron number 2 from transcript GRMZM2G087662_T03 (locus G RMZM2G087662) derived from phytozome v7.0 (chr-ID 2; pos 2 04077526 to 204078553)
cgagattcgcatcttcgggactggcggcatcttccgtgagttctgcttctgccatgcttcgtatatacacaccaaaaaaaaaaaaaacttgccagatttttcaattttaacagctttgcttctagagaacacaaccttaggtttgccatgtcacctaaatttgtgccagctgatgagtgaccagtattaaaatttggagaatggtatggtgacacaataacctaagttagtgaaatattgctatgcaaattagaagaacatgtgcttcaggatcagactagctaatgtgtgtgagtgtgttcagacttgttatagtttgtgttaaattccttttagctttgtgctgccaacctttgtgcatttctcgaatccaacgttcagaattcatattccatttttaaattgaatacatgagtttgatctgtttcttatcatgtgccactaatttatctgtgtatggacttgaaaattcaacaaagctccatttatcgggaaaaaaaacattcaagtgtttcaacccaaacaaacatagtataatttaagaaataatgttcatttacatatgcgttggctgaggtccttgtgtgtctcatttcagaacggaacatactgatacaagccatggcttcgggattggtacttcaagcaattggatttgcttggcttttcttcttgctatttcaagaatggcgcagccggaaaagaggcaacttgatgtaaaaacacaagagttgatcccatatctcattctaaattgacctacttcctagttgatacacgatccatataaaatttctcgaatataagtcttattcttctagaagtagccaagtaagtaaaggtggtctactaatacaaatgccaaatatttcaacctcagtcttatagaggcaaatgatttgattttttttcatcaaaatgtcacaccaccaccatcatttctctgaatttggagtacacggacaaatatatatttactctgtttcctcttgcaccatgcaggcattccacccctcttttatctggag

SEQ ID NO: 5594 - DNA, 787 bp, Zea mays
  Intron number 3 from transcript GRMZM2G014596_T01 (locus G RMZM2G014596) derived from phytozome v7.0 (chr-ID 2; pos 1 3337598 to 13338384)
ggcacggggaagtcttgaaaatcatcttttcagaagtaagcaatcacctaacagagttaatgctttaagttaagtagatttagtgcctttattactaatttgtttccccacttaggcctaaccagtttttttcttcactaagtcttctttcatttttccgagcaaccttggattttttttgttctctatcctctgtgacatcagagataagtacattctaacttgatttgattatggtaatgtagacatgaacattttagcctgcccttattaagtttgatttgtgccagttacacctgttcagatcttcttagttaaatactagatgcatttcgcacacacaaaaaagttgcaatagtactgtagtgagcaaggatgcatgcctactaccaatggtggtgttcattctattgctaacttttatattggtattaggtcatacccatgtaaccattattatttggaacaattggatttataccattaaaagatccaaactttagatatataccatggaccccatatgtcattgactcatgtggacccacatgtaagtgagatagtaatggtatggatctaaaatgatgatcttttaatggtatggatccaaatttcccttattattttgaagggggtagggacattgccagcttttcacaaaagttgattttatttttatgtgcctaatcttgtcaaccataatctttctatctgctcgttcttatgatcctgtcatcttactttgtttaatcttgaaggggctcttcccctaccttggtccaacagg

SEQ ID NO: 5595 - DNA, 767 bp, Zea mays
  Intron number 4 from transcript GRMZM2G178660_T02 (locus G RMZM2G178660) derived from phytozome v7.0 (chr-ID 8; pos 1 65802159 to 165802925 reverse strand)
aaaaagtagatactactaccccaatatatcttatatttctcttctttatttccttttcagttttagtagaagaaaatgttgttggcttgtgatttagcatggttcttggattctacaaagtgattgtcttcaccaatcctttgataaattctatgagaatgcttaattgcaagatatgcaatgatgtaattcttgctccagtcctaatgaaccagttgttcacaataggctaaaccatcagaaagttaactactaactacaatcaaactattttttacgaagcagttattattttgttacaactttcaatacagaagacaaaacacatgaaatttgataaatgtaatcctcacatttgaaccatagtattgcagtgccacaagaatagtttcattttatctgcaaagtcattccttatagttgtcaatgaactatcatgcgaagatagaataagaactttgtgattgcttgtttatttatgagattgaataagagggttactacaaaatatttgtcatatcttttcaatttcctttcttgtgtaatcatggcctagatgtttagattactgattagcagtttttctatgtattattttgagtttgtagacaacagacattgagtgtcttttgatattaattttcaggtcaaaggtcagttttgtggaaaacatacaatatgttggtatcttcaatagtataagatcatgtaccacacgtcgacatcaatattgactaatttctttcaataggatgggagaatgttga

SEQ ID NO: 5596 - DNA, 892 bp, Zea mays
  Intron number 1 from transcript GRMZM2G156376_T03 (locus G RMZM2G156376) derived from phytozome v7.0 (chr-ID 9; pos 2 9868274 to 29869165 reverse strand)
aagaatcgggcggattcgtgtcagttgttggaacggtaagctgatttgctatttttattttctgatttgatgaatggattggttgaattagttgtccgtaaagagtgttttattcttagcacgggtgcgttgtcgaggtattagatgtatgtcgtgatgcctcgcttcatgcatcaatggagtctgtacatacgtatgaagtggtcgtgtcacgcgaaactcaaagtttaaaacgcttattgtgtgaggagtggctaattgaataataagtctagtgtctctctcatatagctgataaatacgaccgtggttatattaaatgattattaaaatgcatcgcaggtagtatgtagtgggtgcatatgtcgaataggtttaaattggctctttgctgagaagtgaggagaattaatagcgtgaagaattgatttattaatccaaacgattatccgataaggctgtcatcgttgatttggtaggatattttggtaatcaaacctgaaatgtttgattaattgttaacatgtaaaatatatgaggtgtgaaataaaattaaataattctttgtgagcgatggggtataatttataaagagggggataagtttagaatttaattaattagctgataagttgtgtttaggctaagtgtattaaaggtgtatagtttgttgctcgtaatgtttgcgttaggttcgtttaatctagagaagcgtaaatattgcgcttagtcgtacgtcgataactagtgttttcgtatgaaaatagtacgacacttcatcactaagtgtttaattcttgccggtgtagcactatttagatctatgctattcctgtctatatgcattcatgtgcataatgcatttcattcaggtacgtgaattaaccacgtg

SEQ ID NO: 5597 - DNA, 723 bp, Zea mays
  Intron number 1 from transcript GRMZM2G029434_T01 (locus G RMZM2G029434) derived from phytozome v7.0 (chr-ID 9; pos 1 18300391 to 118301113 reverse strand)
tcctttcaccggcaaaatatatatgtatgtcaataactctgattcggatcttaattactagtgctcaaagttcaaatatgtgaatattgaagtgttattatatttttaactgtagccatatatataacttaaaatgtgtatgcagttcatgatgtgtttgtagtctttaggaacattctttagaattcttttacttttctccattggcccattggtagtgctggtttcgtagtagcccatttttgtaactgattttgatatgagctatcagtgctcttatgtttccacaaaaggagtttgcagctgatatgacataaatcagtgcagccacatttgaagggttggcaattgatatgtaccataagtcatttcacattatattctgtaagaaaataagaaaacaaatgcgtattttctatgaaatttgtggttgctctagtcagttctgagttttactgaccttttgcacttattgactgcaaagttggaagttacaaactagtagctctatgcagtgagtcattttctgtgtcttctgcatgtagcgtttttaacttgttgtatcttgccattcatctggtaggcacttaagatggtactggagaaggaatcttggacaataaaatgtctgctgaagcttcacaaataattagtttagcaggtctaactggtgatggtgttgcactgtgttcacataccagtagaagtggcaagtcccaataa

SEQ ID NO: 5598 - DNA, 886 bp, Zea mays
  Intron number 4 from transcript GRMZM2G368303_T01 (locus G RMZM2G368303) derived from phytozome v7.0 (chr-ID 9; pos 1 35428391 to 135429276)
ccttctatataagatacaggcaaggagaaaaagaggtttggcccttaaactatctgtcaaatattttgaacatttgatctcgctgtgtaccgttccatgttcagttcaacagcttgataagtgaggttcaatatcgtgcctatgtctcctatgtttaatgtcgtggcatgggcacaaccaagagtggtgagcaccagcggtgcactttaccaatttaggattaggactatagtttctttgttagttagttttttagctgtcaccgttgtaagatcatttgaggcttggcttattagagtttctcttccagtttcctttactattctttaggaactatgtacatagaataagtaatataaattgttggtgtcttcttctcatgattttgtttttacttggctacagctccaaaggttgtaggattaatatatcattttggtgtcaaataattggagttagtcatttatttgtttgtgtcagaaatctggagtcttttattgctctgaatgtccagcagctaaataagggtattgttctgaatttagtcacaccttttcattaataagaccaaaacatttcatttcataaatgtcaatgaggtttggagaagagaagaaagagcaataacaaagtaaccaacaatccacacactgttatgcttctattttttatacattcaagtttttaacttttaatagacgtcttaactagatggcttcatattcttcatgtgcatagtaaataattactcaggtgttatcttttttatgaactacctgcactattcaaacaagaaacttgtttgttgctgttattggtctgtgtttgacagtttatctctaccaatgcaggattcagataactgtatcactttctgcaagtacaa

SEQ ID NO: 5599 - DNA, 757 bp, Zea mays
  Intron number 3 from transcript GRMZM2G462261_T01 (locus G RMZM2G462261) derived from phytozome v7.0 (chr-ID 2; pos 1 9260574 to 19261330)
aacaacgtcgtgaaaacctagggtgagtggtctattttattttccttttgtgatgcttatttctattgcttgctcaaattctgaccttagtgacatcctacagaatcagataaggatgtccacgttattatatcctgacgtggttggtaacatgtcatgaagaaaagcactctatcttctttagaataaagatgcattggggggagcattatgccattatcatgcctgtttgtcttttaggataaagttgcacaaggcaaaaaagttgtcatgctttttaaaatctttgctgatataaagttccacaaagtaggggattctcataactaagggtataataacaactagattattttgtggggaacatatctggtgctcaaaggggtacggtgttcacgtgcacattttaaatctagaacgtccatccaacatctaacagaagcactaattttacaaagaacccctttcaccttcctcccttggtggaaggggttcttaatcaatttaactgcagccgctggatgtgagatatatgtctcagatttaaaatgtgcacttgagacccatacccctttgagcaccagatatgttccctattttgtgtgtgtgtggggggggtggtggtgagggggagaggtcatgctggttaaggatgctaacttttagtttctgaaatgcagaacatttgttttgttataatatgttaatgttattcaaagcaggtattcatcggagataccactagtattaattcagg

SEQ ID NO: 5600 - DNA, 543 bp, Zea mays
  Intron number 1 from transcript GRMZM2G036060_T01 (locus G RMZM2G036060) derived from phytozome v7.0 (chr-ID 9; pos 1 39148692 to 139149234 reverse strand)
gagtgcctcctctaccagaagaaggacatcaagcggtaggcggcaacagttcacgctctttaattacttctctgtcttgttaattgcgtacttgctttagggggtggttggttgggccattgggggagtagagtagggtgcgccatggcagggaggagagaaggctgcagactttgagtatttgtgggaagaatcgtcaggctagtatatcactgctgtaaggctcaggcggctgatgatttttctgcggatattaggggtgtttggttcacccttctaagctttagagactaaattttatctatacgggagatcttatttatttattagtcatactgttttgacgcaaatgtatgtttgtttgctaaagtacattttaccagcaaccatgttcattagccactggtcattaaaatagtacgcatcttatagttgccttacctagaattcatattgttcgtggcagacacaaaaaaattaagtatttggtcctaaactatctgcttttctattacccttgttcttccagcaagctagcagcac

SEQ ID NO: 5601 - DNA, 721 bp, Zea mays
  Intron number 2 from transcript GRMZM2G004729_T01 (locus G RMZM2G004729) derived from phytozome v7.0 (chr-ID 8; pos 1 9043162 to 19043882)
aaactcaaggtggtaagaaatatgtcgtttgagtaggtagaactggttatttaaagtaacttgcaagaattttagaataactaaaactatggtttgcgatactccctttgagtgtccttacctctttagtatatgatatactgtcactacataagcacgcatatttcttgtttttaatccatggcgaacatttgtatctggatcgtatttattatacaagtataatatccatttgaaagagaatgggatcatgtatcttctcttaacaatatatcttgccaattcatgcttgtaatatgcacttcagtaggtaacttctgtcaatgccactttctaaggattagagattaatctacttataacacatttcccccttattcatcatcgtcccttttctatttcaatgattgcatacaatccttttatgtctctactctttattatcctttcttatctattgatattatgaatacttagttactgtacaacaacttctttgttgataaaaacatatgtgcagtcagttttatatgtagaacatctcttaagtaattgatttcctgcagatttttcatcaccagctcaataggattttaactgaggaacattttgctttaattagtttgatctatcgtggttgctggtaatttgatatgagcaggaggcaactaatcaacaatgttcagggtgcagggccacaccacacctacggactacttca

SEQ ID NO: 5602 - DNA, 561 bp, Zea mays
  Intron number 1 from transcript AC206168.2_FGT003 (locus A C206168.2_FG003) derived from phytozome v7.0 (chr-ID 9; po s 111643571 to 111644131 reverse strand)
aactggagggatccaaaacaacggagggaaatatagtatgtcagtaaactaaattggagggaaataaaataatgggagggaaacagaaaataataccttaattatttaattaattcaatatggttttcaaatattttgctaaaaactgattgtgtaattcaaaatacttatattgttaaattttaaccataatacagggaagatttgttacacaattataatattaatgtacatttcaattgatatcgtcgcgcaataaattgatgaaacacttgaagcagatcaagcagggtcgttcctggcttttcaggggcccagtgcgaaattcgatatagaagcctcatccaacaacttttttcgatatatagaatcaccaagccatttaacctctcttgcgttattgttgaccataaatagttcataaaaaaattaattttaaaaagtttctctctaccgaagcaaccatcacatgtatagtttataatactctctctatatcaaaataaaatttgttttgcttctttagtggatttatcatcgctgtcacaacccaaccaagtt

SEQ ID NO: 5603 - DNA, 791 bp, Zea mays
  Intron number 2 from transcript GRMZM2G145029_T02 (locus G RMZM2G145029) derived from phytozome v7.0 (chr-ID 8; pos 1 04662470 to 104663260 reverse strand)
agtccaagtataactgtgcgtgattccgtgtgaatttgtccattccattcagttatgcacgcctgtgatattcaaaacaagactgtgacattgatgctgactgttctttctagccgtattcagtttgataagtattccaattgccatgtttgactttgacaagtacaacattagttcagcaggaagaaaatgtttgcaattgccctcttacatctaatgtttggtggaacctcaagttacattaatatttattgcattctcaccgagagaatagaatgtactgttaagtgtatgtttggtcaatggtcacatgttcatactattctatatgaaatgttggagtctttaatgaatttaaaccgaactgaaattactgtaaagctctcaaactcatggtctagagatatttcaaatacatgttccttttaatatatatagtacaaagcaaatccctatgtttaatgattagaactcgctaggcatctatctatccaatattgattaattttttgaaacaacatccaacacatttgcatgcttttttgtgaatttggcataacactattttccttctaatataaggtccggtggagttttattgtgcattcaacaggatagcatgagttgcaccttagcattacagaatacaattttagttttaatatgtgaatgttgcacactaattgatgacttgtaatcttaaaccagagttctaacagtgaagtgtcagattttagctgctatcacacttgtttattaatcatacttgatcaataattttaggccatctc

SEQ ID NO: 5604 - DNA, 499 bp, Zea mays
  Intron number 3 from transcript GRMZM2G052255_T02 (locus G RMZM2G052255) derived from phytozome v7.0 (chr-ID 8; pos 9 8050680 to 98051178 reverse strand)
aatctgtcaggaaaacttcagcacaactattagtatgccaaacctatgtataaaattgtactggttgctcctaatttcacttctatgaactgtactaatttgcatcgaagaaagtttggtcccaaacaactcgtgaactcgttttcttattattgggctgatggacaaggcaacgtgaaatttttcatggtacctgggaacagaacatagcctacaaactgcagaaccattcccatttcatcttgtagtcttgtcttgctaataatggactttgtgggttgtctgttccctgtgtaattcatttgaccatgatagttcttgatcatgtgatatcatagaatgtgtcaaaaacttcatcacatcaaaattaaaactggatagaacactatacataggtaatagtagaattaaatgttaagaagtatttctttatgtttattttaattactaattgttttacgtgatgtcttttcttgcagcactcactgagcctattgat

SEQ ID NO: 5605 - DNA, 550 bp, Zea mays
  Intron number 2 from transcript GRMZM2G152436_T03 (locus G RMZM2G152436) derived from phytozome v7.0 (chr-ID 8; pos 6 3142097 to 63142646)
taggtaagaaattcacatttcctccacttgcagatttgtgcttcagctagctcaagtgccctcagtttgatgttggtgtttgtttgtctcataggatagcctaaatgctgtcaaacatgccctactggaatgtgtaggaatttcctgattatattgttatttgcttgcatgctcttctaagtgatttggcccttactaggtaccaactgatgtccacctgccgtttctgataatgtataccaagtatgatagcggcccttggcactaagtagctttgcttttgagtactcgggcttgggaacatggtaaaaatagacattaacttcgctccagagctttaagatgataatttcctttattacaaaggcagagtgtccatttgttgaccatttgacggtggctatggtcctatggagtatggaggtcttgagaattcactagtgtatctgcttttataggttttttctcttcattctcttgtgagatgctgcccatctacaatcagttcaaacttttttttttggtaacccccatgagttgtattttccag

SEQ ID NO: 5606 - DNA, 560 bp, Zea mays
  Intron number 2 from transcript GRMZM2G076415_T01 (locus G RMZM2G076415) derived from phytozome v7.0 (chr-ID 2; pos 1 46124796 to 146125355)
aaagtaaaaaaagaggtgatacttaaaaccccatgcaatttgtctgtgctgagttttcagcatcaaaactgaaaacacccacttctactaatattttttttaatatggaatatgtgctgcatatccacattattatcttttctgtattgatagatggatggtagtagggaccattgcaattgtatgctttatttgaagtgttgatttgcttgtggccgatattcttgtttatattcctctaaagatggttgttgcaaacttgtgatgttaagatacaaaattgcctgcatgaaaaaagagttcttagtcagacggatctcatcaactaactgaagaaattgattttgattagttttctttgaactgtgatgatatagcctgtgccagttaaaatgttcacaaaggcctcattttgagtacttgtgactgcacagttctcatggatttgtacctcacacgcaacaagaacacaatatattctcttgagttatgtttttattcattattttatgtatccttactcttgcgcaggattctgattactcttcattaggttataa

SEQ ID NO: 5607 - DNA, 750 bp, Zea mays
  Intron number 3 from transcript GRMZM2G160184_T03 (locus G RMZM2G160184) derived from phytozome v7.0 (chr-ID 2; pos 1 14252693 to 114253442 reverse strand)
ctcagctcacccctttgggttggaaccaagtaaggttctgctctttcttttttttccacaacttaatcagtccttatgcactggagtagtaactgataacagggtgttagtttctactgacaaaataagctgcatggatggagttgtgcttctactaacaaatttttatttgggcctaagctagcaaggtaggtccaaattgcacacgtttattctaataactgatgctcgctaagcagtaacaaatgtagaattagccatggagattattctgtatgttatcctcttcaattttagcacacaaagcatcacccattcatgacaaaatagattagccatggaaataattcaagtgaaaaaatctgaaagtctcaatcccccacttactgatttccaactacttttaccttacttcatatgctactgtcatcaataatcatgtctcttctttttacaaacatgcattttgatagaaggcttcatagtcctaagacaggtgggtgcaggttttgtttttgaagaataaggaagaggaatagaatctcattcatgtgttcgtgcaaacagaagagcagatccaatacgcatacataaggcactggtgtttcatgattttcaagactattttggtgttaaattccaagtttcatgtctaattctgtacattagctgaggagccatcacgtaatcgtttccatatgacattttcaagattcatgaattgttgacttacctccaatttgtaggtcg

SEQ ID NO: 5608 - DNA, 797 bp, Zea mays
  Intron number 2 from transcript GRMZM2G475017_T03 (locus G RMZM2G475017) derived from phytozome v7.0 (chr-ID 8; pos 4 955828 to 4956624)
gccgctacaaccacccccgggatcggccggctccggtcagcgccagcctcacccacgcagcctcgctgtccgcttgttcccctacccctgctctagtgctctgccaagttttattctgttccttttcttttgtctcgtgctcatctcgatggttactggtgagctaagcgctcccgacaatgaccgacactgcgtgatgttacatctggttggtgggtgacgagtttgttcttaaagttgaaggtattcagcgaattgatgattatataacggcatgtgtggaagttttgaaaatttggtgtcttgtgtttgatgagaggggaattcagacttcgcatctttgctctgaatagtgaatactgccatactgcttaggcgtttactaccttgcattgtaggctgctctggctctgcagttctactcctattaggattgtattgcttatttgtctgtcttttccttatgtcttgcgcctttagtactccctccttcccaaattataaggtgttttgacttttttacatccatagcctttgctatccacgtagatagggagggagagcagataataaccagtcttcatatatgtctacaatgagtgggagattggagtctttggtgggagctagaaccttcagtacctaataggagctatacccttcatatgtcacactagaatgaatgcatgatggagtataatgtagaatgtacagacttataggatattccaaaaatattttatcctgcttttgatttaagcatgtacctgttaaattttgctgtgtttttcaggtta

SEQ ID NO: 5609 - DNA, 987 bp, Zea mays
  Intron number 2 from transcript GRMZM2G145330_T01 (locus G RMZM2G145330) derived from phytozome v7.0 (chr-ID 9; pos 1 36699945 to 136700931)
gtccaaacacccctcacacagcacggatctcacatgtaaataagcagctgattagccggggctaactcgcaaaaaggttaaacaaaaaaaaaagcccgcgtcgggtagaccgtccccgtcagccaaatcaaatcggccgagactagcacagaagctgacccgtgtgtgcctggcgccctggcgggggcagagaccgacgcgtgtggcggcgggcgccgagcgggcccctttaccaccaccacccggcggcgacgagagtacaccgccacggggtgatgccaagcgccgattgacacgaaatgtttctttttcctcccacattggacattgctcaaaaaaaaaaacattgtctgggtgcatcgagcggacggagggcgacaagtagatgcgaagtgggagctggcaaggaaagtgagacgatcagaaaaacagagaaggttcgtgtaggaggagatgaggtgctgatggcttggacaaaacaaaatacagaggaaaaaaaagaactcggcgaaattcttcgtatgccgatagagaggagagcgttgtagcagcagcagcagcggcacaataatgatttgcataagaataaagcggcgaggatggcgagaggccccaccggaggaaaggaggacccgagagagcggtagctcacaagtcccgtgtcacttggtgccaccgagtccctgcccccaccaccggccatttccgccggctaatccccgcgagctaggtttatctgcctcttaagcgcgagcgaatggttgttagtgtcagccagttcgtgcacgcccacaaagatgaggaggattccaagttacgagtactcatgtttgtgagcgactgacggtgactcggccgtcgatgctacaatgaaccagtccatggtggttggtggtggagcggcggtagtattcattcgtcgagttcagggtcgtgcaggtgaggtgctctgcattggactgactgactgacccttcattcagctgg

SEQ ID NO: 5610 - DNA, 1000 bp, Zea mays
  Intron number 1 from transcript GRMZM2G470723_T01 (locus G RMZM2G470723) derived from phytozome v7.0 (chr-ID 9; pos 1 28644731 to 128645730 reverse strand)
atgtaagcaaattgtaaccttcgctgctgaccggatggctttggccaccggaaacaactacccctatcgaccttgtctttacttattagatctttcgaaacaatatgcatggttttatatatgtactgtctactagttccatttgactttatattttgtttcgctacaccggtcaacggaggggccttcccgtgtcggcgctgggatcgaacacagatcatcggtttgcaagctatgtataataataatgtactacctccattctcaaacatttgtcgtttgctaattttttttaactaaattgtgataaataaaaaagaacgaggagaatatacaaggagagcatatgcatggatgcaccagcacggctgacttacgctacgcccacactcgtagctagttatataaaaaaatagtggtgggactatgtcatctctgtttggacatcatttggatatcaaattaaactgaaactcccaaattaacaatattgtcctcgtcgaccggtcgtgtggctccgatccacacgagactcactagctaattcggatacaccgtatctgtaaaatacggcgcagctacatatatatggcgacctaattaagcacggcaccagccgtaataataatttatatagacacgtgcttcattcaaccaaatcaaaccactgcgctgactaagcatggaacgaccgggttgtttttttttgtctctctctatatcttcgtcaccagcacacgttacttgccgttttacggcgccggagccacatatatacaatgggcccgcacgtcaccgagacatgcattgggggcgacagaatttgaaccggcacagccaactggtagcttgtttggtttcgatcgaggaaccattccatcataaacacatgacagtctattatacgttgattgttcaaatttaataaaataaactctatagctttctatctctattctctactgctacttaaaaactatagtgtaggtattcacggtgc

SEQ ID NO: 5611 - DNA, 384 bp, Zea mays
  Intron number 5 from transcript GRMZM2G109677_T03 (locus G RMZM2G109677) derived from phytozome v7.0 (chr-ID 2; pos 5 1928256 to 51928639)
tcacattgtccgtgaggttgagaagccaggatccagtatgtccacccccttcgtttttgttaatcaattaagctgatgacatagtccagtttgtttatatctgaaaaatgaattgtaacataagcatgatttgatttctgaccagcagttttagtttttttatgaatttgagggcacttaattttagatgataagccacacaactatctcttcacaggcccatagacttactcaaaacaatagatttttctgtttgaatatccacaactgcttgcacccatgaatctcgagtatatggataccatttcactccattatcgtaactgctctgcctacttgatttctacagaactccataagaaggaaacttgtgaggctgttacc

SEQ ID NO: 5612 - DNA, 950 bp, Zea mays
  Intron number 1 from transcript GRMZM2G461569_T01 (locus G RMZM2G461569) derived from phytozome v7.0 (chr-ID 2; pos 2 35692564 to 235693513)
actacaccgaggccgtcgcgctcatcgccgcgcaggtcagccccctcgctgctccccggtcagtgccctcggtctctggacgccgccgtcccgccatcccatcccacgtctgctaggctgctagtcaaaacgggataccgtgtgtgtgtgtcacgccgcgcctgcgcatgcccgcccgcaaggtcaacgcagaactgagccagctgatcagtgcgggcgttttgtttctttttggatcggacattccgcgccttgtcttcagtgccctcctgcctcctttaatttggtggaatggaagtagcatgactgcacgagggagaagggcaaggacttgtcccagaaaacaacgccgagagcctgaaaccatttgtgctacagtatatcctatatatgcagtggttgttcagattctgaggatttaaacggtggattagaatactgaaccatgactaggggtggtaatgaactataaattttacattataaaatttaaggatatggtcagattaggatcggggcatcgggctatatttctatttatttttgaactaaaattagttaaggatttaaacaaattgtgaagaaacatttggatcatgatccattaccactcttaaccatgatccaataagattaaagaaaggagatcaagacaaaagaggaaggattgccttttatttaaatattgaatttgtgtatatcatagatcttctttctgtactatatatttatttttccctttcctcgagaccagccattcaaatggggaatgaccccttgatcccagatggaagggaagatgctaactgcatttaccctccactgtaaggtgttcctgattttgctcgcctggaggccactttgctttgttggcatatttggtttggctggcatggctgaactaagtctacctctctccctgatgatacagattcttgagcttattcgcg

SEQ ID NO: 5613 - DNA, 704 bp, Zea mays
  Intron number 1 from transcript GRMZM2G021276_T01 (locus G RMZM2G021276) derived from phytozome v7.0 (chr-ID 8; pos 9 6074 to 96777)
gctgctatctatctcttttctgaaggaaaaaaaaggtttgatactcctctacctagctagtcctgcatgccgctaatgtgcgtcttgcctgtttatttgttcttaataagggctgcctatctattatattttgcacctgttttgctgtgttcttggtaactagcttaattccttcgcctacaatcgtcaaatcccccccatcatcagtcagatgaacttttgatcgaattgaagttgttcttctaattcggccccagcagcgcccatgcatctggttttatttgctttctgttgggtataatatgcaagaccttttgttgctagggcaaggctgcaaccacatgcgtgtactgaactcatgatgtaactcatcctttttgtttgctcacagaatcactactctactgcacttccttttcatccgatccgcaatcttttttttcttttacatgctttagttttctctctttcttgattacaaacatgattactggaactttcttaggctgccttccccttccttggatctgctttagttttcttttttgggctaccgcgcgcggcttatttgagtttatcacttgctgcatatacataatatatatatacatgcatgcgatggcgttcatgttactcaactacagatctgtttctgttcgtgtgtttcagttcagcgcgcagttaagcatagcaggacgaccacg

SEQ ID NO: 5614 - DNA, 735 bp, Zea mays
  Intron number 7 from transcript GRMZM2G314692_T04 (locus G RMZM2G314692) derived from phytozome v7.0 (chr-ID 8; pos 6 6658379 to 66659113)
ttggctcatcattgtgatcgctgtatgtattacttaaccataattatgtttggtaaggtttatctgtaaaacatcaactctgcttggtgcaaaaattaatgagtgatccatggaatcttttatcctcttttaatgaaacatgtgtactgcacttcttttggagaatttttcaactcatagaacaaagtgtgtcataataatagtatatgcaattgtgtaaatgtagaaggtaatgaccttttgaacatcttaaaaatcatcatgtactatgagttcagagaacaattgcatactttgttattgatatatggtgaaatccaatgcaacacccaatagtggtgtatcttgtacaaaaatgcacccccttgtcggatatacgtgtgaccctgcagttcaagaaaatttcttccttctgtgatatatctccggagaggtcaatcccccagggattgagttttttttttgttagatattcatttgttttagcttaatggccaacttgttactaaggagctgttttaagtttttggtatggaagcaattcaggtggtaggaaaacaatggtttttttccgataaccacaagttttgtaataatatggaaaaatatgacatgctaactgaatctctttttcgaaactttaatattttctcttagcttaccagtgaatcaaatgaatcagcatctctgtgatttccagtaatacagcgaggggtgggacagtacattggtgaa

SEQ ID NO: 5615 - DNA, 717 bp, Zea mays
  Intron number 1 from transcript GRMZM2G000127_T02 (locus G RMZM2G000127) derived from phytozome v7.0 (chr-ID 2; pos 9 8602254 to 98602970 reverse strand)
taccctcccagtaagtttctatggcctaggcatccttgtttgtgaacaagcgtctagctgtgaaaagttttagaaatttagcagtatagcagttacagttttaccttaattcctatgccactgagagctacaaactcaaagatacatcacctactgtatatttgagaattctcaatggtaacttttgatgtttcagctacggagaaacatgtttattgacaaatattctataccttgatttatcgcattatagggtagcataaagcatggaaaagaaatatgaaaaaacaaatagttcatcattagtttcaaattagctaatatctagcttgccccaaattcacattcaagcttgtcatctgacaaaccatatacccttgacggctgaaagtaccaaccttatcgctccaaatctgtttgttcagatatgcatgtcttgacttattccttcacaaatagtagactactgttacttattgtcttaaacaagaaccttcagcaactcccttcattctacgttgcaccttatgtatatgtctttgcttggttatggtcgtaagctttgatctaatttcttccaaatgaataaaaaaagtgtgttgatatttgacggtttgggctccactttggcaatcatgcctgcttgcagtgtcaaacaacaaagtcgcagtaattgtgttcagcttgtttgttcttgccgtatgtagaaaaagaggg

SEQ ID NO: 5616 - DNA, 607 bp, Zea mays
  Intron number 1 from transcript GRMZM2G023293_T01 (locus G RMZM2G023293) derived from phytozome v7.0 (chr-ID 2; pos 1 93419887 to 193420493)
gccctcgttagccccagcttcaaggtaagcaactcccttaatcggacgcttcacttctctgcgtggttgcaacttgcaaggataatctcggttgcagtaacactttctgggcagttatgctagaatagttcagattaggctaagatattttggccatatcttggtctggtccacagctaaagtctagttttgggtgggcactttgctgcctgtttcttctcggatttgggaagaaaattagggttcagtcttcacttttcagtgatcattttgctcgtgggatcgtgtgtacaatgactcaaggaggactttaactgagttctgagtttcagagattttggtatgtacaatcaaattcggagagcggtactgatatcattttattgagctctagtgaaaggcttatatgagtctaaaacatgttccgacttcagaaagtcaaatgttgttgcaaattcattatgtatggcactttgtttgagaagattactgaatttagccttgcatcatctaacttttcatctcgtagtattacttttccttatttagctcttctcttgagaaattcggtctgaatatgcagtttgtcctgcagataaccaatcaa

SEQ ID NO: 5617 - DNA, 1014 bp, Zea mays
  Intron number 2 from transcript GRMZM2G040627_T01 (locus G RMZM2G040627) derived from phytozome v7.0 (chr-ID 2; pos 2 070281 to 2071294)
cgttcgaccgtgtcaaggcagtcatcatcggtcaggtatagcaacgccacggtattgcgatactagatattaggacaccaaattgattagttttccctatgctagtatttatcatttgcagggatatttggaatcgtgaatagatatagatgcaggtttgtggtatctgtggctctgtgctgcattcagggttaggctaattgattcgatgatcttttatttacagtagccatatgttatttttctagactagaatgacgtggtcattttttttcttggtctgctttcattagcattggcacatcaagtgatttcaatgtcatattcttttttttattttgtatccttgtatcatggatattaagcaccacagtaccagctcttcttattatgcagtggtaatgtgccacagtttttgtagtgcaacaccatttttttcatctgattatccgatatgtaaagagggttcagtttttctgactgctattcaatgtcgacgttgtatgactcgcaataaacacaaacatggatagaccaatcgttcgtgttgcgaatatataaattacggtttatgttctttgtgtcgtttactatgcaacaagatctgttagctcctgataattgatttgagcgtatgctgtttttgtttttgcgttgtttgaagtgactgcatggttttagatgccataatgtccgcttatgtggtttgtttccctgttatgctggtagcctgatttgtgctagaattattttcaaaatgtgactatttatctcctcaccctcccattcagcttttattggattacactttacagtctatggtgcatcgggtgttgaataaaccatgtgtttttatcttcatactcaaatctacttagatacttcatcttgtttgcaataggtttgcatttgtcatctatgacataaaccgtgtttcacctgtcaatgtttaaaatgcatctattgttcctcagtgctcatattgtagcatgcctgcttttcaggatccatacc

SEQ ID NO: 5618 - DNA, 438 bp, Zea mays
  Intron number 2 from transcript GRMZM2G040300_T02 (locus G RMZM2G040300) derived from phytozome v7.0 (chr-ID 2; pos 2 050401 to 2050838 reverse strand)
actctgataaggagaagctggttgatataattcaggtctgtcttatatatctttggttttacaacttgttggactcttcattaatatcatttctgcagattgtgggataggatcgcaattactttgagtcattcactagtttaaagttatcttcaaaagctgtgggttctacacaaatactaatctcttttatcaatctgtcattcaattatacttttgcaattgcatgacatttatccaaaaaaacgggaatctcagctgtgagcttcggttgtgttctctcctctaacctctatcagtgtgcaaattttttgtgcattcttgtaaaaaaaacgtgattacagcttacatcattttaccttctgaattcaggacttttacagttgaaacacttaatttgcaggattggaaaacagagagatacaaagaaataataaa

SEQ ID NO: 5619 - DNA, 353 bp, Zea mays
  Intron number 4 from transcript GRMZM2G066169_T03 (locus G RMZM2G066169) derived from phytozome v7.0 (chr-ID 2; pos 5 764083 to 5764435)
tgtcctgtttgcattggtgaacttactgttttgtatttttttttgtattttggggcctctgcaatacaatttatagtcatatgtacgtgtcaccatggtgtcacatttgaattcaatttgtgatctccgttgaagagatttaggcacctctgttctatcctggccatagttttaactttaaataccattctgtttgatgcaacagcaacccttcatctattattttcacttttcatattttgttggttgtttaagttgtctgccttgtttctggtacacctaactattttctgccatcttaatatgttaatttgtcagaaagattggatcaggacatcagtgggattttggca

SEQ ID NO: 5620 - DNA, 767 bp, Zea mays
  Intron number 1 from transcript GRMZM2G149935_T01 (locus G RMZM2G149935) derived from phytozome v7.0 (chr-ID 2; pos 2 32358879 to 232359645)
cgagggcttcgcctcccgccccgtcgaggacaccggtgagttgtcgtcaacctctccagcgacctccggatttgtcggggttcattttgatttgctattttgattattactttgattcttcgattaatcgtcctatgttctagctgccgtttttctggtttagttttcaattaactacaaagatcgaggtcggtacgagtacgactattaatgggtgacttgttagttacggaaattgaagccagtcaacttcagggtgtggaatagcttagcttggtggaattgggcatagaaggtacaaacttggcgcaggaaatttctagaaacggttagaattcatttccagatttgttttttctttcctgtttgcggagaaatgtgagcgaggggtctgatgccgacgcgtcccatttttaaaatcgaatggaatcttacaaggcacatattgacctgcaaccgcgttcagagctgttcagttttgacgaggcaactgacgtgggaacctgacccttcttgtctttgtttttttttcctcttattggaacataaacaatttctactgccacaacatgtgttgtgtttttaggagttcatgtgtccaatgagttccagctacttataagttacggatgattcaatgctgctaaaaccaggatttcttttacttcaagaatacaaccctgactttgctttgcaacattggcacatgattcatgtgacatgtctcactttcatgtttcagttgacgggcaactcaagtgtgagaa

SEQ ID NO: 5621 - DNA, 665 bp, Zea mays
  Intron number 1 from transcript GRMZM5G810139_T01 (locus G RMZM5G810139) derived from phytozome v7.0 (chr-ID 8; pos 1 58361059 to 158361723)
gaggtagtactattgagcagagctagaaagaaacgaagacttgtttgatggtgtttgactgcagaggctatgaacctgttgatatttccattggagctggctggtaggctgagtctgtatgttttttcttgatctatcatgaatgttaatgactgcttacacatacaaaaccaatgttttagatgtaaataattaatattttcatagttattcgattttcatagttattcgcattcaagaaatgaactctggtattatattcagtactgcagttttcagcacagctgttacttcactgaaactagaagatgcattcgatacgaatagagtgaagtgtgttgtggataatctgggctacgtgatattttttaagagggctgattccattcaataagtgaggcacaaatagctatttaactcttatattgactgtattttttcacatgaaaatcttctggccctgaccatttcagatcagggaacgtcaatccaaaaaatccatatcttcttcatcttggaatcgcataccttatcaagcttatgcttatttatttatatttgatacatggtcctttgattaaccgactttcatttggctaattaattgactaactgctctctctcacacagggctttcattcaagatttttgaagatctatctaga

SEQ ID NO: 5622 - DNA, 523 bp, Zea mays
  Intron number 2 from transcript AC205471.4_FGT004 (locus A C205471.4_FG004) derived from phytozome v7.0 (chr-ID 8; po s 125170698 to 125171220)
tttttggtttagctgttaagtatgcttcagttcgtagtttaaaattttctcccttaaccacaaatccataatatatcatcccatactatgactttgttcctggtactttttttaatttgtttgggtttatgttaaaaaacaatcttgtataaaacaacgaacacacagttttcaatgttgttggtaattggggttgcaaattatgcatttctaagatctcctgaaagccggaatttggatgcattttgatgtggatacttactgttttgaattgccgttagtgccacagtggtgtattatatctctactacttattaagacggtaagggtagtctgtcgttctgccattctgcgatctcagccgtccattctatcctgtaaataatctcagttgtccgatcccgacgtccgatcccgtaacaatttgatgatggtcttcttttgcatgaggagaatggtgtggcattattgggcgatgttcgcaatagttgggttggggtttcgatcttacaagctctttttg

SEQ ID NO: 5623 - DNA, 595 bp, Zea mays
  Intron number 1 from transcript GRMZM2G085921_T01 (locus G RMZM2G085921) derived from phytozome v7.0 (chr-ID 8; pos 3 0188327 to 30188921 reverse strand)
gtgctcctactttctggcgatctgtgtccttacctgtgagtacctcatgttaaattattttaccatttgtcttaaatgattgctattgtacttaaagttctactgataagtcgtacgctctgtacttgaatgagatcttttggttgcgatcattatgtatgttcaaagtaatagatggactccatcttggttattttagtgttcgctagcagccttaatacctaatcaaatcaggttcatattagctttccagtttatcatgctcatacaaaattagcaaccaccttttggaatgcaataatactttgaactaattgaaagacatactggttttgttgtgttgactgagtgttttctggctaaagctgaacacaaactcaccatataagcatttctttctattgattatcttcgaaaaaacagagctcagttccaattgtttaaagttgcacatgacctgacatccgctgtccaaatgtaattaattgtttgttcttactttggctatattggtaagcttgcatgtgaattgaaagcttgctccaatactgtaattggtaatgaagaaatgtttaacatttcaggtgataaatac

SEQ ID NO: 5624 - DNA, 932 bp, Zea mays
  Intron number 2 from transcript GRMZM2G168163_T02 (locus G RMZM2G168163) derived from phytozome v7.0 (chr-ID 2; pos 1 86894015 to 186894946)
attatctgcacaactgcttcggctacaccggcgaggtgagcacggatgcgcctcagcccagatcttggccacggccgtgctattctcgagtcagccccagaaaaaaaaaatattatagcaaaacaaatgtcgacgtgacaaatccgtgttgttttctcgctgagttcagcctccgtttctcgggctgcgcgcaggagagagagagagagtaaagggtttcaggagtgactgcagttgctgatagtcagggtcattccgtcactgtgctgaaaagggaaacggatttggcaaccgttagctaaacggcaggcatggacctgcgagctgaaactggaagcctgcagttgcccagattgcctgagttgatgcatgtactggcaaccccatgacgtgccattgctgcacctgttgcagtcctgattggcagattttcttttatcatgtgttttggttcttaacaccatgtttcttagggtactttgctcttttcgtgatgaaaacatccttaaatgatatgccttatttatttggataccaaacaataacaggctaacagctacagaatgtcagaatcaattatttctttcatgaactctcttgcatttagtagactgaagggataaaaaggaaagtaatggcaaccttttggaagaaaatatagacacttgaaagtcatgcagaaacatttggtgaagcacggtaactttgggtgtaagccgatggtaataaagctcaaaataaacaatttttttttgcaagccctggattactctgtcatttcgatagatacctcatgtgtttaactgaaacctatcttgtgatgcagttctgcattcttctctttatttagatacctagagtccaaacttgcactaaatacgccgtgatatgctgtaggttgtggcaattaaagttatccggaataagcagac

SEQ ID NO: 5625 - DNA, 617 bp, Zea mays
  Intron number 2 from transcript GRMZM2G006036_T01 (locus G RMZM2G006036) derived from phytozome v7.0 (chr-ID 8; pos 9 3571243 to 93571859)
gcgacctacacaactgctcgtcttggatccttcaggtttgtacagtgtgatgttttacgtcgaccaatcattaccttttcatttgcttacacaaaaatctctaaataatctggttttagcatatgatttccatttgaatgggtgcctgttgtagtgatgagattgcacctacatgatggtagcttctagtggttagcccctttcagatatatggctacaaataaaactttgtttgatgagctgtgctgctttcgaaatgactttacccttggagtgccatgaggttgactgttgtttgtttatctgcatcttttttgtacacagtttttcataaaggaataacgctattttttttgatgtgaatataaaattttgttccagaaaggggctcatttttttggtgttaggtgaactatatgatcttggaattacttcttttgtctaagtcatgcatgcagatctaaaatcagctatgaatattcgagctattttatcttggtttgtgaagtgatgttttttatcttctttccaactagagttagtatttaatttaaactagaatatctcttatacactattcagggttctaactaacaaagcagttgaaaagaacgaag

SEQ ID NO: 5626 - DNA, 645 bp, Zea mays
  Intron number 1 from transcript AC202144.5_FGT001 (locus A C202144.5_FG001) derived from phytozome v7.0 (chr-ID 9; po s 139943430 to 139944074)
tataggcagaggtattgggcgtgtgacaactatgcttattagctgacgattgctcgacgcgacattaacttgatggtgagaattttatggtgtaacatttatcttgtttcatatgaaccaatgcatgatttatttggctcataccatttgcatgctctctagacttctccactgctctttgattttaagcagtggattgacacagagatatcacagaaagacaaggagtggatggagaagctggaagtgcgatgcagaggacaaggaaaggatggagaaaaaaacaagaggagcttgcgacggagcaacaatgggcagaagaggagaaaatgaggcgtgttgacacagggagaaggagaagaagcttaagcatgcatgccgtacgaaggaagcaaaggaggagaaccccgatgcttttaggaaggaaaagtgacctcattgcactcagtagactcgggggttctacattgtttaagtctcaaacaatgttatatactaatgcacttttcattgtcctttaattaatggactcgattttgtggtttcttatagtgcatcttctagtacttcagttttcttgtgtgtgcatattttatgtttcatgcattgatacaaatattggcacttaaaataacatgctgcaga

SEQ ID NO: 5627 - DNA, 753 bp, Zea mays
  Intron number 1 from transcript GRMZM2G100116_T01 (locus G RMZM2G100116) derived from phytozome v7.0 (chr-ID 8; pos 1 06273732 to 106274484 reverse strand)
caaggtaggttgctgttcctcagatttcttcatcatatctgagtatatgcatgcctaaggtttctttagtggcactccatgttctttttaggaaaaaaatgtcaattttacttcctactagaaggtttttagttgtctggataacccctcaaaactttttttcagttcagttataacccttgaataattgaaacagtgtaacctcattcccatctaatgtttccccctgccttttttttgttctacacaggtagtgttatgctatgttatgaaaattttcatgactattagtataggttggaggctttggagcacttgaaactgctttaacccccaagatatgaaaacattggaagatagtaaacaagatgaagctatttcatagcatactgggtgatgttatctaccgtcactataacttaaaatgcaactttaacaaggagaaaagaaaacaaatgttattagggattgaagtgtcctaactttggtaatttgcgggctaatatgagccaaaagttttgaggggttatatgtgttagaatgagagtatgagaccatgaatggacggatgttcagttatggattttttgcagtcctgtttcagttctttagggctggatattctgagatcaccttgggaacataaataaaattgtttaatgttctaaattgcactcatttcagcagtgctacggtatgtgatctttgtagtctgcaggtctgggacaggcggtgtttgtccgcaggacaggc

SEQ ID NO: 5628 - DNA, 945 bp, Zea mays
  Intron number 1 from transcript GRMZM2G146358_T04 (locus G RMZM2G146358) derived from phytozome v7.0 (chr-ID 9; pos 1 2022889 to 12023833)
gctaactcgcgtaagaccaccaccgcttgctctccgcctcctccccccgcccatttcgtgtttgctgggcgtcgaatccgttcgtcgatgagcaacggcgtccgagtggtccgaccacggacgcccttttcaccccttgatcgttcagttcggttgacgtcgtaggagtatgtctgtgtttctgcgcgtatctattggttttgttaccttcttgtttatttttgcattctgttgctgcaggtgtccataatagctcactcactgcttgccacctcatatagctgtgttgcttatcttagcgcacatgattttaaactgttaattgtatctatgttatttttgctattatactttatttccttctaatgtgcagtctaggttatctgtatatctagttttgtgacaatgtttgctatgtgatgcaattgtgcatagagtttattgtgtcttttgattatttcgtgcactgctgatgattcgcaaagaattgtttatttagcaatacatattctgttcatggcgtacttgcaaactgtaccttctgtcctacttggtttattactttgtttttgctatgactgctattactttcatggtctgctgatgatttagaagtatgattttatcttagtctgaggtgttgtgctcaggcttttatttttcatgcatttgtttttctgtttggtttagcactgatatcgccatgcatgtctctgcagttttatgtgattagatggaggtgagatagttattatattactcagtgttgtcgcgggtacttgttttctctattctttgtgctcgttcaattttgatcagtgttatgtttgaacttttgttggagcattgaaatcttgtttcactgctttgaaacgcaaggaacataagtatgacatttctatacaacttactttacaggtcagaacattcgtaagctggtgaagg

SEQ ID NO: 5629 - DNA, 914 bp, Zea mays
  Intron number 1 from transcript GRMZM2G118022_T01 (locus G RMZM2G118022) derived from phytozome v7.0 (chr-ID 9; pos 1 17331592 to 117332505 reverse strand)
cgttccgtgaggtcagtggtaagttttcttcactaaccagtaatcgcagtttctatgactttttttactaattcatctgtcccaaattataagtcattttggcatttctagaggcacaacatatatctcggtgtgcagtaaaagctattccctccatccacaaatgtttgtcgctatgatattcatgtcggtcaagctttcttaagtttgactagatttatagaatatattagcaacatttgtatcttcaaataattttactacaaaaaatagatttaaagatctatctaatgatttaattatgtactataaatattaatagtttttttatataaatgtggtcaaagttaaaaatgtttgactcctagaaaagtgagaacgaccaatatttgtggatggagggagtattaatctagaaatgccaaaacttcgaacaaagcgagtaatagatagactagggtaactgtaacagtacggttatagatatttgagctccacttcaagctagcgaaagatgcttagtaacttcagatgttggagctccaattagttcactttgtcatccatgaaattgctacaagatacgctactagtatattttgttagcatttatttggttacattggtagggttgttccagcatattatattggtaatccataatcatgccctgcaagatagcaacacggatttgattcatgaactaatccagtcattgcattgatttctaaagctacgcaagaccaaacatcatatctgatgtgtacgatttagaattagccaagatactccagggaaaaaaacagtgtgcagtataatttttctgtcaatttgggtattgacagaatgacagctgatgatgggtcgttatttgtgcagagagggggcattcagcaaagaggtccaaggatttt

SEQ ID NO: 5630 - DNA, 636 bp, Zea mays
  Intron number 2 from transcript GRMZM2G343445_T03 (locus G RMZM2G343445) derived from phytozome v7.0 (chr-ID 2; pos 2 09807535 to 209808170)
gttacaggggcgcgtggtttcgttgcaaggtcaggcctccttgccttcggcttttttctttttcttatgttgtcgtaccataactcggtgttgttcaggccattcttggtgggagtttcacgtcagtgcgatacatcaacaagtttggtgacatggtctacgaagagatagagttttacgggaggtgagagagttttatcaggatacacaattgcatagacaaaagttgatgtagcattctttaaccgtgcattgaaactcctaccgggaatggtattagttgtcattctactctatcttttgctacggtcgtcttacatatttaaaacaagccccacccccgcccagtggccgctgccatacccagtaactcaaacccatgatacaaattacaaagtgtctaacattacaagagagcgttgcaagggaagagtcacatgttaggaaacgaagtcgaaagagaagggaacattcctttcttttcctacgttaaatggtatgaaacaaacttttttttctcattacttcatcatgcatcccattaattatagatggacgcctatctttcattcatgtttgatggacaaaagtagagcttgggattaactgagcatggctgtttctcaggtacataat

SEQ ID NO: 5631 - DNA, 825 bp, Zea mays
  Intron number 1 from transcript GRMZM2G069480_T01 (locus G RMZM2G069480) derived from phytozome v7.0 (chr-ID 2; pos 7 6948797 to 76949621 reverse strand)
caacaactccgcgctcgtcgtgcagtccgacccaagtaggatcttcctggtatctttcctgtttgcagacttgttctttaatgagtggggctgcgcatggactttgattgttttttttctttttagttctgcggaggtgggatgaatggtctggacggctcatcgggcttgctgggttcattgagcgggcacgacacttggagcagcaaaacgcaaaccttacataattcttgttccttgatgtgccatttcttttgaatcattaataacatgattgtttgttctggtgattgttctctatgatgttgataaagtcagccaaaacaaccagcgcctgataaaatggataatagattcctcctctgatgcatgcaagataataatgacttgccaggatgaatctaatctcctagattctataaagagtcgttgcaagattatttcaattggtgtgcccagtacacgtgaggtgagttctcatttttagtaataagccaggaattatatgttatctgtgatcaactataaatctggaattcataagacatgacatagttattcggctttattagtaggttattttcacttgacatgggaaaagtcattatagataaaaatactccctccattccaaattataagatgttttattttttctagatatatagtttttgttatgcatttagatacacactatgtctaggtatgtattaaaattcatatatctagaaaaggcaaaattcattctctctaataagctctcagatccttcgtccgtccatctgtcttctcatcgaatgccgcttccctctcgtttcgcaggct

SEQ ID NO: 5632 - DNA, 525 bp, Zea mays
  Intron number 6 from transcript GRMZM2G044011_T02 (locus G RMZM2G044011) derived from phytozome v7.0 (chr-ID 2; pos 3 928752 to 3929276 reverse strand)
gaaggacttgcccacctattcctcattggcaaaaggtcagtggaactgttgcaccatcacaaactaacaaatatttgattttaatatttattttattgttttattttttatgtctaagatgccaatgttgttaattgttatctacataagacttaatgtcttaagaattagcacctctggaccctggttcactcgtgctaagagtctgtgcaccacctgcataaatcctttgctttcttgacaccttttatatatttttcctgtcctgtatgtgtgggccatttattcattgttggctcttttggaggaatagtaattccatgaatgtgaaaatacgaaaaggagaaatattttgtatgcatttttgtctataggtttcctctccctaagtggttagcagctacatattttaagactttaatttatatttttaactgaagaacacatattgctatatagatggcatcctgatgtatcattttctaaacagcataacagcaacccgggcacgtattgaaacatcaa

SEQ ID NO: 5633 - DNA, 584 bp, Zea mays
  Intron number 1 from transcript AC208851.2_FGT004 (locus A C208851.2_FG004) derived from phytozome v7.0 (chr-ID 8; po s 124478853 to 124479436 reverse strand)
gattctcagcctggctccacagaaacgagttcaaggtctgtttactgggggccgggctgctcgtggcgtaagaataaatgattttaggtagttctgacctcttagcctagctgcctactggttggcaaactagcaaacatcagctcgcctagaccgtataagtgcacaaacaaggtgaattggcagtagctaggacaggctagtctcagactagaccagttggacggaccgaggtggccaagtacagggtcacaaacacgaccatagtgttagtttatcatatttgagattactgtataaaattattttcttttctatattatattagtaatatatttatttttgtaattgaaagtatgttacttaaaatattttgacattttataatataattttgaggtcgagttcacacttatgcccaggctcgttggctcgacgagtcgacttgtgagccaagccgagcctgccttttaggctcgctcgactcaacttgctgccatccctactcaatactatgatatgattttgtttgttttggcttctggtcagattctagccattagaatatacttctgccagccaaa

SEQ ID NO: 5634 - DNA, 850 bp, Zea mays
  Intron number 1 from transcript GRMZM5G827575_T01 (locus G RMZM5G827575) derived from phytozome v7.0 (chr-ID 2; pos 1 88822100 to 188822949 reverse strand)
ccgccgtggccctcttcaccaagctcctcgtactgctccgtgccctcctaggccttgtagctgtagctggcttctcctagggttgttttctgttgcaattgcaagtactgtgtatttccttgaatacccgaacattatgcgaatcttttgttgagtcaatgctatggcgcgtagtgtagaatcttcatattgctagatttggacatgtagacatgtaacctgtaggaatttgaaggtggttgtgacaagtgttctcagatgagagaagtgcggatttattatctagttgtctatttgcttcataagtgtatacagtgttttcttcatgggcctgggtagatttgtgttatcctaattggactttttactattggatctgtttgatattacattcagtcaacctttctttcctttcatacggatgaattctacaatgttcgttcagcttcacattttttgccagctgcctgtaggggtggtaatgagctctaaattttacactataaaatttaaggatcgaatcagattaggatcagactctatttctattcatttttgaactaaaatcaattaaagactcaaacaaattgtgaagaaaatatttgtttcacaatccgttatcaccccctaggtgcctaatgtttcgtggcgatttgtgtacacccttctggttaactaaatcatcaagattctagaatattgttttaaggttaattttgaactactggcaactgtatagtctatatggctacgaaagaaaacatttaaattgaatagtgttcttttttatgtttgttaggatatcaaaataatgttatgaatcttattttctgtttctgtgggaaggaac

SEQ ID NO: 5635 - DNA, 781 bp, Zea mays
  Intron number 1 from transcript GRMZM2G044800_T01 (locus G RMZM2G044800) derived from phytozome v7.0 (chr-ID 2; pos 1 0478950 to 10479730 reverse strand)
gcggaacaggtaatgctgtttctcgctacttcctgcgtacgacgtccgcttcgtcgctcgccgtcggggcagtttgatatgcgatgcgaattcgcatagataagtttgcttgtccctcacctggtttggtcccgtgtggagatgcctgcggctgctagtgtgtgtgggtttgttgggatctatgtgctcgatcttatcgacagcttatctttgcatatttgtcagcgtgtgggggtttgcaaatgagtagaatccgattatggtagaatctagtgatgcatccttcgtcaatcgtttgtcggggatttatagttaagggcacaagaactcatcgagggtttaaatccgattatagtagaatctagtgctggcacttgccaatctcacttattcttctgtagggttgcggctctgctactcggtaattagagggacgtgattattgtggtacttggagttgtaatttgtgaccattaatgcataatatgagacttagttgtataaactttattaccgtagttccattgtatgccttttaagccttttaggactaggtttagtttgtacttttgatatgatgcgtttacagcagtattagtacgctctgattatttcagaacacagtacttactgcattagtcagtgttttgccaagtttttttatttgttcttgtgtataagcaagtccagtaatttccagctagttgcaaagtagttctaatgttttctatttatcaaattttcagactgagaaggctttcctcaagcagccaaaggtttt

SEQ ID NO: 5636 - DNA, 658 bp, Zea mays
  Intron number 3 from transcript GRMZM2G017257_T02 (locus G RMZM2G017257) derived from phytozome v7.0 (chr-ID 9; pos 7 204966 to 7205623 reverse strand)
gaaagacgtggtatgatttgatcttttgacttttctctcatcgttccaagtttctttcttgtgcatctatgcacgctagatgtagttgaatttctgtcacattttcttctagggttctcattttggtgcactatagtaatagttatagtgttgaggaggaagaaggtaggggagatgggtaaagagaaccattgggagttatgctggccatgcaaaactttttataagagatgccatgccgaagaaaatttctcaccatgccttttacttatttattttctcttttcttgtgaaagggtctctagctgagttgtttaggtggtttgagtagcactccttaagtcacgagttagattccttgtgggagcgaatttcaggctggatttaaaaaaaccctcgtctgtcccactccaaaacacagttctatgatataattatttgtggctgtgttttgctagtttcagtattacatacacatccattctagcgggtagaatttttaaaatagtttgtactaatataaatatatatgttgttaagcagctcaatatttttgccctatttgtttgctgaacctggcatccacatgcaagttggcaccaagccagaattgtagtagaactacctgtaaccacttttctggtttatttacaggcaa

SEQ ID NO: 5637 - DNA, 747 bp, Zea mays
  Intron number 2 from transcript GRMZM2G002851_T01 (locus G RMZM2G002851) derived from phytozome v7.0 (chr-ID 2; pos 1 98028617 to 198029363 reverse strand)
acaaggtgacttttgggcaaatttgtttgcaaatatatgtgaaactgacttatctgtttctgataactaattttaaaactgaaggtgcagtttttattttcttaaatctttgctgtttacaagatagtaaagggcatacttggtgtagtggtgagagctgtctcacttagggatggtaatgggctctaaattttacactataaaatttaaggatcggactatttctattcatttttgaactaaaattaattaagggctcaatcaaattatgaagaaacatttggatcgtgatctattaccacccatagtctcactgagttatcaggtcgcgggtttgaagcatcctctctgcatgtgtgagggaaggcttgcttcagtttaccccttccccagaccccactcatgggggcgtctccggcactgggtctaccctttgctctttacaagatattgaaaatcatagctttactgtctacaaaaattgctttgttctgaatttaaattagacaagacagagatcttgttcgaatgttcacacttatggaacatttgatgtcatgttttttcctgaatttaagtagatatctttatctgtactattttctgctgagattgtattaagctatcttacatggaaaactagaatgaaatatttaaacacaatttgttaatctgcacaggaaacctgagttgcacttctggaattctgtagataatcgcaagagcaaatcagctgggggaagatcc

SEQ ID NO: 5638 - DNA, 956 bp, Zea mays
  Intron number 1 from transcript GRMZM5G854888_T01 (locus G RMZM5G854888) derived from phytozome v7.0 (chr-ID 2; pos 1 7797961 to 17798916)
cctgtcataaaattagcacaaatgcattcaatcaccaaatatacaccaaacagtagaaaaactaaatgtctactgaagcacacaaaattacacaggggtcaaggtattgaaaattatcacaaatgctgtattgaaagtgaatatagaagaccatggttgtgaattcttcagatgagttatatgccacttcgatattttctatgtatagagtatagacataacattatcctgtatgtgtttcttccttcagaagatgtaataatattgctgatcacgttgctcctaagttatagcagtgcaaccaaggtttgagatagctcagcagcaatactattagtcaaacaatatgtgttgtgcggaaaatattccaaatttatcattcttataaattgcagtaccatatggaattaggaactggattaaaaatggaactatgcatataggaatgtcccgaaacatgggaacgatttggaatagcagagtaaaagaaaatcatgcaacactacagcattatcaattcgctatagcatatcaattatgatgatattgtgctattttcaagcgctcctacaggttacaggtatggtaacagagactgccatgtatgtgtcccactgtccccattcatatgttcataaggttttttaaaacttataggtttatagctgctcaggtatgggagcacgctggttgttaaatttagctcctcaactcacaaggaccaaatcatttttaactgtgattacacactacacagcctcgcatatctttctcaatcatatgaaaatttgatatatctacattactagtatatcagacacctattttatttgtaattgtggtacaatactacgaaatttcacatagccagaaagttgtttagtaaaagagcacaagaaacaaaatttggtaaaattataatataccttaaaggtcgacttgaggcgacgctcagg

SEQ ID NO: 5639 - DNA, 969 bp, Zea mays
  Intron number 1 from transcript GRMZM2G063069_T02 (locus G RMZM2G063069) derived from phytozome v7.0 (chr-ID 8; pos 7 3728746 to 73729714 reverse strand)
ccaccgcggcatctacgacgctcacgacgtcgcaggtagcctgttccgccgccgccgctctgtccgttctctgcaccccgcacgcgctcgtctcgtggcgccggaatcgcctcgccggactgccagtgcggcaccggttggggacggtggcggctcgcgtgcgtgcgcgcccgacgcgccccctcctttctgttgcctcttttggcaaattgcgggagttgacgggctgctttttttggggggtttcccgtgctgcgagcctgcgagtgccaccccgtgacatcagttggatggatagggcggcttttggtcactcgtgtgagtcgggaccatcgtctagtcgtgattcttgagatcctctggagccaaaattcggcaagaagttgctttggggattccacaaaggcacagagctttctagagccgaaagcaatctagattttcccaccagatagaaacaactttatttgctgacccaccctacagtactttcccaagtatatttcggtacatgttaagcggttcaagcaggtgctctgcttgtatatagaatgatagtttgcactcactcatttctactatcttggcatggcttacataagttggcagtcagttgtttagccacaattcaatgccaaaagaatatgctggatgatgttatccaattatcctttgtagcgggatagtagtagttataattataatcgtctaaatttgagtatgtataatcaactgtggcatggataatggagcacatagtatctatgatttatccatatacctaccctacccctgcaattctcaaatccaactcctgcttcttccaaaccatggtacctcgatagcctgatcgcatcaagtctgtgttctagttttaagctgccagtttgttactaaaatgaaaacttattcttatgtgagattttgacttatgatgctttctagtgaaactacttgattggggagagg

SEQ ID NO: 5640 - DNA, 376 bp, Zea mays
  Intron number 2 from transcript GRMZM2G013607_T04 (locus G RMZM2G013607) derived from phytozome v7.0 (chr-ID 9; pos 1 1233704 to 11234079)
cgatcccagtggtgactcctgctgtattatcggtaagaaataaagattggtagtagaatttatttagttgaacatgaccccaattgcacttctttcccgctaatattaaatatgttactagctattgatttgcttcataaaacgactttgatttggactatatctattattttcatcatttggtttctattcaataaatctacctatacattcacaacctgaaatagctgttgcaaaagaagatcggcattcttttacctcaacatgttagtttttaaaattttggagaactgtaagcaaagcctttgtaccgcaggagtgatgatttatctctcaagtttatttgtgttaatttttggttatactttttagcgga

SEQ ID NO: 5641 - DNA, 454 bp, Zea mays
  Intron number 1 from transcript GRMZM2G398473_T02 (locus G RMZM2G398473) derived from phytozome v7.0 (chr-ID 8; pos 1 63588527 to 163588980 reverse strand)
agctgtgatagtgagacgtggggagaagaagcgctgtgcgcagtaggggagaaggaatcgaatacatgcgatttggagaaggaaagaagaatgtcagcttccgtaattttgataacataaccatggataatgggtcttttaccaaaaataatctcaatttgagattatcataatttgggctctagattatataatctggttgtttgtttgctagctagattatttacactggattatataatctggctagattataatcccaaacaaacatgctcataatctactattggcagttgccactcaaaaaatttaaccgactttaaatgaacgctgacaaaattgattgtttctattactggcatcaattaatactagaaaactaacatcaaaatttgagttgcatacaagttcattttctctatgttaggttccgctgaaagccctaagattctgg

SEQ ID NO: 5642 - DNA, 694 bp, Zea mays
  Intron number 1 from transcript AC203847.3_FGT009 (locus A C203847.3_FG009) derived from phytozome v7.0 (chr-ID 8; po s 132965100 to 132965793)
tggtgggaggaagaggaggttggggcttggggtcggtgagggcttcctagatatcgcgcaaaaaatccgataagcatcgacgcaaaacaaatattccgataaaacgccaggagtttactccaaccttgtacatagtacgagatctaacatctttgtgaacccctggttgaaaatgaaaatgctgtgaatttaatcgacaaactggcctcgccagcggtggcggtcaggcaacaactccaagagcaaggattcgctgcctccatcgtcaattcatacagagcaataccaccaccattgtggcagccaagcattcgctgcctcgttccttgcagtggctcttcctgtatttgagagtgattagaaccatccaaaccacagtgggagtcgaacccacgaccttctgatccgaagttagatgcgctaatccactgcactatgcggtcatttgatgatttaacatatcttgcaggctataaataagcactcatttaaatgacactcattagatgattggacttttctagcagatatattgttttgagataatattgttgctcatgaaaacaatattccctagatcccacatagaacgtgggtgtgcatatccatgaactcaaggaaaataaacaacacagggtattctttttatttatgttattgtctataagttacatcacattttccttggtggcgg

SEQ ID NO: 5643 - DNA, 808 bp, Zea mays
  Intron number 1 from transcript GRMZM2G042897_T02 (locus G RMZM2G042897) derived from phytozome v7.0 (chr-ID 2; pos 1 43673282 to 143674089 reverse strand)
accaccccgcccgccctcgccttttgcctgccgaggtaatctggagacctgcgatcccctcgcgcgcagacacgacgcgctttcgtttctgtcccgtggtggttagctcgttcgcatctcactgtcgatatgttttatgatgaacgattttgctgatatatcttgatctgttgtatttgtaatgtttggatcggatggatcttggcccactgctttgatgtaggtaggatttagttacccgatttgttctctaagccacaaaactgaggcagccagacaggggtgaccggctgaccgcgttttatgccttgatcgtcagtgtcgtcaccgtgtttctgcactaaaaaagaagaagctggaagcatctcacgttaccaaacgcacattcttgctaattcgattgccctcccccatcagcgttgatcaacgagtgaatctacctgatccaatggttaagtaaaccgtgtttgtgggttttgttgttttcttcagtatggccctgagttaggatgctagtgtcaagctgttcaactatgtttaatgctgacctgttaggaactactacttgtttttcacatcgaaaaaatcgactccgaaaatttgcattgcatcacccccttctctttcgcatgccgaagagagctgctgacacgcttagcatatgttgctttctagattgaatatacctaattctctacgccacacagagcaagtgttttcacatattgaaatccaatttcaccactctgctaaagaaaacaactgctgatcgaaactttggtgcagatttaggcctggcattctagca

SEQ ID NO: 5644 - DNA, 995 bp, Zea mays
  Intron number 1 from transcript GRMZM2G097983_T01 (locus G RMZM2G097983) derived from phytozome v7.0 (chr-ID 9; pos 5 3405468 to 53406462)
gtacaacactgttattaaatccggtctccaacccgccatggcgtttgtcatcctctagtcccagttcgacccatccgtgtgtttgctcttcatccctcgggcttcacgcgtgctcgcatttgtcatcgagctgttgaacccgtccttccttgctcgtgacttcatcgtcgccagagccctcactaaatttgtgtcctcgctagctcgctccatattcaatctcgtcgtcgttccgtgcgtcagcaagaaatctcaagaatcgggtgaagacgaggctagcagcatggtgttcaccaagtgagcgacaaaaagctcggacatcctgcgcaactcaagttcggttcgtcaaaattattcaatcgaggaaaagatcttcagaaattgattaccgaagaaaagaaggcccctggatgacgtcaaccggaacccatagtcgtgcttgcgactaacgcgtcgaattagtcagggtaagtaaatttgttactcgtgttagtggattggtggatggtttgactaggtttaatatttattagattgcctgagtcgttttagtaatttggtcgatgtcgtaggatgaaaaagatctcaataggtctcagtgtttgcgggattgtaggtgctaaaaatgggaagttatattaatatatatatgatacaccggttaatcggtaaatcaagtaattaagatacacaatttaaagagttaataaaaagctagaaataaaaatagatgttcgagtgttattatgtcaatttgattaatgaatatagtcgatgccctgcataattagttagtttattctaggtatgatattctatgtatgttggtcgatttcatgatttgaatgaatgttgattgctattttgaatatttaggattaagtaacatcgatatatctgtttcaaccaaaatctagggtatgtttgataagtaatgcgtataaacactttagatcttttagttctaaagttgaaattggtatattgtataaaat

SEQ ID NO: 5645 - DNA, 951 bp, Zea mays
  Intron number 2 from transcript GRMZM2G130889_T01 (locus G RMZM2G130889) derived from phytozome v7.0 (chr-ID 2; pos 1 1394625 to 11395575 reverse strand)
tctgggaccgccagtcgctcgtcagcgagtacgaggtgcgcccctctcgccccgcgggagctcccctgtcccgggctggagagtttagtgaccgggatctgattagttcctgtcgcgccttgcttagcatttcgatttgtcgccatgctgctttgtagctggatctggttaattgagacatgtggttattagtggatcttacttcatcagtttaaggattagaaacggttggggtagtctattgtgtttgtgtagtgggagattattatgttccggatttgactgcttattttaataatttttattcgtatattataagatgtcactcagtcgttctcgttccttgcaaacagagatgctaattagtggtgaaatgatatagaactaaaactttctatatttatttagctgtaagttcgattagcttgggttttgactgttatttgtcgatgaggtttgggtcttctctgatcagcaggaaatctacggatgtattgaaaattttgattatcttcagtgtatcccaatgttgtacgatgatcggtgaagatggggagtgtgaaacatttctttgcatgttatggcttatggaattataaagggtgtagagaactgtagattctgagtttgagttgctgggtcactgccaatgtgaaacttgtatatcttattaccttggtaccttccttattttttctagtcttgatttatgagatatatccatctttattagctttgtaactttgatcatatggagtatggacctgattcacttctttgttctgattcggaaatggcgatatgtacacatacaaacccctttgcctcctttatatcaagatagtccttagtttatcttgaatctgatgtgtatacttggagttgtcctgcttgtttctgatattaagcttctcttcccctattttcagtctgagatttcccgattagaag

SEQ ID NO: 5646 - DNA, 819 bp, Zea mays
  Intron number 1 from transcript GRMZM2G130889_T01 (locus G RMZM2G130889) derived from phytozome v7.0 (chr-ID 2; pos 1 1395899 to 11396717 reverse strand)
gcctccagtccccgcttcataagggtacgtataaggacaaacgacgggcttttgaatcactgatatttcagcgctgaaaagcatgatgccacgtactttttacattcctttccaaaataacacgacggcaaacacacacacaccacgtattgataggagagaaaaaaagatgtattcaaacaaaggaaaatgaagctagatctacacaagataatctagtcagtggtttggtgtggttcataacacgaaatgttagatacaccgcgtcccatgtattgtaagtgaaacgtttcggtcatagttttcagttatatttagggcttgtttggttcgtggctaaatgtgtcatactttgcctaatgttagtcgtttgaattgaagaattaagtttaaacaaaaaagttagctaaaatgtgacaaattagtgaacggatcaaacatgcccttagtgttctctacgccatcgaccatcatgatggcaaacatggactagtttatttcgttgctagaactaagcgacgcccatcgctttcaaggcgttaccagggagcgtgacaaaaaataaactagctgcaccgtattaccagggactagtttatttcactctttttatttatttatcgtgatttagttaaaaaataaactaacggatgacaaatattcgaacggaggtagtaatatctattttatatctaaccctttcaactaaaacctttgaatttagattggacgttttaatggtttatttgtacgattataggctaactgcactgtattttttcaggaaaaaggaaaactaattattactagtatactgtt

SEQ ID NO: 5647 - DNA, 650 bp, Zea mays
  Intron number 2 from transcript GRMZM2G518717_T02 (locus G RMZM2G518717) derived from phytozome v7.0 (chr-ID 8; pos 1 52248926 to 152249575)
tacgcactattgaccaggtctgcgacttctcttctgtatatttcttataaccatcaatgaccacatttgtttatgatcccttaagtatgacccttccattttatgggatattgagtttgtgtcttgtaggtttgccgtaactaggtgaatacaaaactagaaatatttttcacctggaatataaaggatatgcataaccttaagaacagctatttgaaaacttcaatttttatcagtgatataaataaaatgcttcagtggatatatgttggaaatttggaacttataaataataaacagcagaagggctatttattatgttattttctgtgtttttttatttttctgttcgtattttcagctgcttgtgctaactgtgctttttggtcatgtttctgatagaatttcctttggtagtaagaatgcttatcatcaatgaactagcattgctgactcattatatgaagaatattaggcacatgattctgggattgatttggtccttagcatttctgactcatttcgtgaagaatagtgagtgcatgattatgtggatgattcttattttgacttaatgtttcaatgagattgaagctttgattatcttttcaccagatacgaacgattgatcgcaattgtgaaattcccca

SEQ ID NO: 5648 - DNA, 229 bp, Zea mays
  Intron number 1 from transcript GRMZM2G494505_T01 (locus G RMZM2G494505) derived from phytozome v7.0 (chr-ID 2; pos 4 4391613 to 44391841 reverse strand)
tatttttttaattgtcatgtattttcttctaattattaagtactttatattttttactcaataaaaaatattatgtttgatgatttgtaagcgttgaaacaaatctatgtgcttacttaattttgaaataaacaaagttgatgtggttttggactaagtctatagtctgctatagggctatacacgacgaggagagtggagtcgagatctaacatagaagaacgagagg

SEQ ID NO: 5649 - DNA, 597 bp, Zea mays
  Intron number 4 from transcript GRMZM2G418370_T01 (locus G RMZM2G418370) derived from phytozome v7.0 (chr-ID 9; pos 5 8790378 to 58790974 reverse strand)
aacgtaaaacccaaagatattcatgtaattcagataatcatttgcaaattcaaataagccgtcacacttggagaaacatggactaaattagcccaaaaaattcaggtacatacttatcttatggaagaagtcatggtcagattggactgaattagcccaaaaaattcaagcaaaccatgcttgtccctctgagatggtctctgttctattagttcttatggaactggatgctgcaggctttgaaagcagtgacatgcaagaaactgatagtttgtcttttaaccactcatgaaaactatcatactaaaactttcagagaagtaaccaagattgctgcttagtgtactaaagtctgtaattgaaatgattgacgccaaggaagatctcgcagatttgtgacaagtaagggataccatatgagtatgggaaaggacgcttggaggagcgctaagagcagttggaggagatcagaaaagtgaagccaactcaagtttgtatatttgagatcagaaatgttatttgcatatcgaatcttgctgatgtgtgtcgcgagcagggtctgctaatgattaactacaggttgtatatttgagtgtg

SEQ ID NO: 5650 - DNA, 579 bp, Zea mays
  Intron number 5 from transcript GRMZM2G127893_T04 (locus G RMZM2G127893) derived from phytozome v7.0 (chr-ID 9; pos 1 1076608 to 11077186 reverse strand)
cttctacaggccgtgttgtggtaagtactactgaacttttagcttaagggcctccatgtgtttaaatgatcttgcctttatcctctgttgagagtaacgcctattctgattgaaactgagagtcactacacattggtgatgtcttataataactaaaaagttccaaatgatgggtttttttctcaaacatgctggagaattggatgtcgatgggcattaagaaagaaaacaattatgatacagtactcctttatttttagggtctgtttaaaactgcttcaccaactccatcatggtatagcttaaaacaaaaactagtttttttggagttggcctttaacttcagttttcttcaagagcggagtttatgaagttgtttctgtttgactaaagttggaagcggagtcgcaaaagatagaacagtcccaaataggcctttaagcattacattccacctgtgaacaaatttgattaccaacaaagctccacctagtagcgacacattcattgtgagagtcactggtgaagttattttgcagcgtaatgtttcattgtgatggtgcaggttggaattctccc

SEQ ID NO: 5651 - DNA, 282 bp, Zea mays
  Intron number 1 from transcript GRMZM2G127893_T04 (locus G RMZM2G127893) derived from phytozome v7.0 (chr-ID 9; pos 1 1078187 to 11078468 reverse strand)
ctggagtgcatcctcgacctcaagaggagggtcggtgccaactgccaagaaaaccctgcgctttcgtttctctctctctctcttgttccagataattcatttggggagaaatgttttgattttggatggattgatgtggttaagaatgaatcttcacgggaaaaaaaaaccatgattattggatctgccaccttctgcaatcccgactatttttcagccacccctgttacattaacgttgtcctgacctgttgattgatgttccagaggggatccatttctg

SEQ ID NO: 5652 - DNA, 1038 bp, Zea mays
  Intron number 1 from transcript GRMZM2G703158_T01 (locus G RMZM2G703158) derived from phytozome v7.0 (chr-ID 2; pos 1 21793193 to 121794230 reverse strand)
tccgtgggcagtgggctgcatcgtccaatcgaccggtgagtggcctgtaacgagttcgttgtgctctcggcttcatatttccatcaaccaacatcagaaatcgtgtgtgttgcaccgagattggtcctctctagtcctggctaccaccgtggtggctctgtgcgccgccgaatagatgaccaggggaggaagaaaggggtgagtccgttggatttcgatccagcgactaatattagatcgggttcaaattagatgtggttcgttcgatctaaatggacgggtgggattttaagtagcataccccttcgcttgattaaatcatagccgtcgaagttcgatctggcgaccgcgaggtgaattgcgcgcgttaaaccgagacccttggattcagatccgatggtttagatcgcattccggattggctgattgcggatctaatcctagcggccagatgttgatcgtgcggccaggaacgcagaataccccttcgccgtgcctatttgataaagagtccctggacttcttagtaataaacccgcggtccacagtggctgtgcgccgagtctagtaattcttgcgtagagacccctatatttatctgtttttgtgcgcgcagtccaaacagagattaaatcaggaaattaatttaagaaatgaatttttaatatgaaaacaattccagaacttgtaaaattcatataaaatttattttaactcatttttaacccattccagttcctataatttggtaatattattgtttatcacctagtgccactgttttagcatgaaaactatattaaatttgatcacctagttattcttgtaccaaacacataaaatcttcaaaaaatcgtaacttctccgttttgattccgatttgttccgttccagttgcgttagtctcatagaaacgcgtagatcattattattcactatattcttatgtttggtgtaatgttaattttatctataccatgtttgtttgtattgctacgaatagcagtgagatcacgagaatctgaagatcatcctggt

SEQ ID NO: 5653 - DNA, 363 bp, Zea mays
  Intron number 3 from transcript GRMZM2G135727_T04 (locus G RMZM2G135727) derived from phytozome v7.0 (chr-ID 2; pos 5 2172490 to 52172852 reverse strand)
tcacattgtccgtgaggttgagaagccaggatccagtatgtccacccccttcttttttattaatcaattaagttgatcacatagtccagttttttgatatctgaaaaatgaattgtaacataagcacgatttgatttctgaccagcagttttaactttagatgataagccacacacctatttcttcacaggcccatagacttacacttactcaaagcaacagttttttctgtttgaatatccacaactgcttgcacccatgaatctcgagtacatggataccatttcactccattatcgtaactgctcttcctacttgatttcttcagaactccataagaaggaaacttgtgaggctgttacc

SEQ ID NO: 5654 - DNA, 378 bp, Zea mays
  Intron number 2 from transcript GRMZM2G021223_T02 (locus G RMZM2G021223) derived from phytozome v7.0 (chr-ID 2; pos 1 11134875 to 111135252)
ctggcagacgcaggctttcagtagagtggtcacgggtaattcctttatcttgaactctctacccttacccctagtggtaaagctggctttgattagccaatgtttgtgtgttatcatgctgtggtaagttcacttatataggagatagatcaaataattttaaggaacaagaaaatcagaataatcttttttttctattaactaccattccgtgtcgtcgacttatattagtttcttttcttctttaatgcaataactgtagtttgatatataatccatttcttgaagtaatggaaaccattctcttgtaggaagtggtgccattctgatatattttgtgatattatttaatgtagggtgagcaagctggtagacgtg

SEQ ID NO: 5655 - DNA, 659 bp, Zea mays
  Intron number 2 from transcript GRMZM2G052671_T02 (locus G RMZM2G052671) derived from phytozome v7.0 (chr-ID 2; pos 1 89313113 to 189313771 reverse strand)
atttggtatcgcagacgtcgcccttcccagttcaggtgccagttgcaggtcctctcctgtattattttgatgactgtaacttttcttgtatatgggtttatgatgaaggcggataggtcggcatagaattttgccttcttttttcagagtagttgaggtttgatgagatcgtttggggatcgcaatctgtttttctcatttcagttggcgattaattgttttcttgtgggaaagtttgccgcttggtttgatatttacttgcttgggctgtagattgggttctttatcctgcatgcgaatgtgttttgggtcacacgttaatgaattttctggatttcttttgtaaaggttgcagtttgttttagtagatttgcaactcttcgattcctgtatttggctgctgtcatctcaatttattttagtcgacgtttgtttactggagttcagttgctgtgtgctattggccataccgccatttacaatttatttggcctttttgttctgccttttggctatttcttctttcatctgatcctgattggttttcaacttctgttttcctcgctatgtaaagagaaaggggaaatgtttttttttgctcaattttactaccggttctttgggttaatctcggcaaacgatgactctagataggcttt

SEQ ID NO: 5656 - DNA, 759 bp, Zea mays
  Intron number 1 from transcript GRMZM2G113423_T01 (locus G RMZM2G113423) derived from phytozome v7.0 (chr-ID 9; pos 1 47373606 to 147374364 reverse strand)
cctctgcggcctcgggcctctgccttctctaaaaggtatgatctctggtcttgctccttccggtccgatgagctttgcgtgatcgcttttgattcgcctggtttccttgcgttccgcgatgtggtttggttgctggggttcactagaacgccgcttcgggttgttctgtgtctgttcttcgtttgaaaagagtagatttgactaagaaagatgaagttttgatgtcaaataatctcgtctccatatatatttaatatttttcatttcagtttgttttcgtagcaactgcgctgtctgctggcatgatgtatgtgtagtttaacaaatgattctgcatggagtaatacgcgttaaaaattggatttggtctttctgaattcggttgctccggttagtgatgtcttttcgaggacgacaaattgctatggaaaatgtgcacattctaagattaatgccgctggtccccttgttccgttttttttcttcttttgcgtaatttttgtggggactttggctggtactatctcgcgcttttactcatcattcaagtccttgcagttttgagctggaaaggctgatgctggagcagtgtggtctagactctagacagcttggctaggaaaaaatggcttctgtttaatgatcggttaattggatgacgtatttatggaggagtgggatcttggatatgatgtctgcccaattctgttggttgtttgtacaggtggattgccctacatttagttcaaacttcaaaca

SEQ ID NO: 5657 - DNA, 761 bp, Zea mays
  Intron number 2 from transcript GRMZM2G138651_T01 (locus G RMZM2G138651) derived from phytozome v7.0 (chr-ID 2; pos 2 9176146 to 29176906 reverse strand)
ataagcacatagtgagaatctgggatcctaatacagtgagtttcttcctttccatcttgttcaaatgttttcttcattagtattcatggtgtaattttacatatatattgggtttgatgtggatttaaagcaaactctaatttaagacattactgatattttatgatccattgggtgttggtttgcttgccttcttgaagtaaaacatggccgtggttataccttaaaaggctttaagctagtttctattatggtgcaatctaaaattctgaacgtatcttgaactcttcctgtaaggctgtaacatttgaatccgtactggtaatgcatgcgatagcctctatctgaagcaaattagggaagttactacttactagaatagaacccaaattttgtatattaggttgtgctgacagctttattccttatttacccttgtttgactttgggtttatttgggaagcatgtatttgcatagcacttgaaacccagctaccttcaaacatatctgcaaattcttagggaatatgtgagttatcagttttaccaaattatctgtggttccaggctacatttatgtctatgaggaatatgtttctcacgacactaatatctatttagtacttgcattctttttgttgcttgttgatgatactaatactgtctgatataactagttgctttttctctctttggtaagaatctgcaattaaatttgacatccattggttatatattttttccttgttcagttaccacac

SEQ ID NO: 5658 - DNA, 435 bp, Zea mays
  Intron number 1 from transcript GRMZM2G138651_T01 (locus G RMZM2G138651) derived from phytozome v7.0 (chr-ID 2; pos 2 9176979 to 29177413 reverse strand)
tcttctcctctgagagttaaggatcacatgtaagtctctattttctcttgtgaagggttttcacttgttaatctttatcaaaagttagttccagccaatcaaccatttctacataaatcttctaaaggaattctcttattggatgggtttttcttactctacttccttctgcaaacagggccttaccttttcttggttctccatcctaatatcatgccatttcacacacattctgtctgttttgttaaaaaacagatacaactgctgcaattagtttttgaatctgtatgttttttaatgtgtcttggaagaataagctgtaaacagcgggtccaaatctctattacttttgaaatgcaatcaatagttgaatgcttattgagttacatattgtacctttcactgggcatgtaattgctgttatctgtttcaggt

SEQ ID NO: 5659 - DNA, 844 bp, Zea mays
  Intron number 13 from transcript GRMZM2G133885_T01 (locus GRMZM2G133885) derived from phytozome v7.0 (chr-ID 8; pos 157381086 to 157381929)
caaaagatattcccaagttccttgagttatttaaggtgcagagtatgactgatcctttttttacttaattcttgatgaagaacatgcataattgcacatgatttacagttccatgtagatgttgtaattgcttactgccatagccagctcttcctgggttatggtcatatgttgtttgtctgtattatctttttttcttataatatgtcagagccctgttaattccagcatttggttgtttcacttttaattttcaagtaacatatgcagtatggcccaaagtccttgtcattggatatatatggaataaaactttgaattgcaacatttttttaaaagaagtgtacttttatagagctttcacaataatttcctatccttcgaatggtgcaaagatatatataaaatatgtgctatactgctatgtgacaatggatttgtgatgttcagtggttattgaaggccttcttttggtgaatgatagaaaacacaagcaggagaataacaaaccctttgccctttctattttttgtaatttacatagaattattggaggtaatacgaaatctagtctttatttgttcttttgggagcagaaatcagcctttgtttgtgatcttttcacctcaaccttaactgtataggaatttggtccatggacgtgtttttttcaatagcttgactatatcgtttgattcttgctaaaatgctagtcatttggtcttgatatttacctgttgcttatctatccgaaattctgaatgtagtatgatcatttgcatttatataaatcattgttgttaacttatatattcattgtatataactgcaggatcaaattaat

SEQ ID NO: 5660 - DNA, 841 bp, Zea mays
  Intron number 2 from transcript GRMZM2G064896_T03 (locus G RMZM2G064896) derived from phytozome v7.0 (chr-ID 2; pos 1 48502711 to 148503551 reverse strand)
aacaacctcggggtaacatttctcccccagcttccgtttcgcgttattgttctgttattatcagttcgttgccattgtcatcggccaattagtgaaagaaatttaggcagttctgagtgatgaaacatctgtttatttgatttgttctggattaaggtcgcttgtgagagaatgccaattgttatctgtgtgcaattaggtcgcgtgtttatagttgcctgatcgcattttgtccttgtcccttctggattgcggtcctgtcacccaccctgaggaagaatacacctggttgtggtctccatttttctcagctactactgttcctatgccacagttttttagatgtgatgatgcggcattgcttgccttttatatatatgggcttgtctatgcagatgagtgactattttgttagtacatggcgatactttgaaaatattgttctcatttttcatctcttccagatttatcatgacatgctttcccttgataaccacatgcatgtaatcatatttatttggttcgcagcagtcaaatactctgtctataggttgttttatttttagtgaagcagagtgtcacatttggtacagcaaattaagcatctacaagatgtgttctttttttttgccattagttatttaggtctgaactgaatcaatcttatgaaactagcactgttacgaccacttccatttatgtctcaatgtgtgtaggagcacctgcttaccattaccttttaatgagcaagggaaacaatagagcattgagattagccagaaatgtacatattgtgtttttgttgttcttgatttctcgtttctgtagatatttattcctg

SEQ ID NO: 5661 - DNA, 349 bp, Zea mays
  Intron number 3 from transcript GRMZM5G818192_T01 (locus G RMZM5G818192) derived from phytozome v7.0 (chr-ID 2; pos 2 13578557 to 213578905)
ctactgcatcaccttccttgaacagtctgtgcaaggtattggcataaagtaacaataatgtctgccttatctgcttttgtttttcgagttgaagaaattttgattcatggtgccagttaaaacttagttcaaaatagtgactgtgaacccactttgtcttctctatttctcccccgagtttatacacaatagtgcttgatataactatatgtatggtatttcctacttctgttttagcggggttaattttcaatgatatgtgattgtatgtaactatgaatggtgctttaatctgcttatttttttcttcttaggctgttttggagtatttagttcgagaagaaggaga

SEQ ID NO: 5662 - DNA, 365 bp, Zea mays
  Intron number 3 from transcript GRMZM2G335126_T02 (locus G RMZM2G335126) derived from phytozome v7.0 (chr-ID 2; pos 1 30741418 to 130741782 reverse strand)
agcttattcgatctcttactggtgagtcggcaatcttaatggtgaagtgtgtccatgatattcttatttaaaatgtgtatttgctcatgtccatgggtgaagtttcatgcccttctattttgaaaatgaaatgtttttttttccatttgccattttgtctttgttactatagacaagaatatctaataaaagcagatgcattaagttatgaaatgattgaattgcaaatgcttatgggtgttatcctgcttgctgatggatcgatttgattattttctaatgtcaaatacaatttgtatcagctgccttagagagagagctgctctctacgtcaactatcaatgaagttattctgaagaccatat

SEQ ID NO: 5663 - DNA, 963 bp, Zea mays
  Intron number 2 from transcript GRMZM2G335126_T02 (locus G RMZM2G335126) derived from phytozome v7.0 (chr-ID 2; pos 1 30744300 to 130745262 reverse strand)
ctgatagacttgctagctatactgctaaccgacaggtgcatgtttcacatttaattttttctattttcatagaactcacactatctgagtaacttgttgcttaattcgagatattttctgcttcaaaatgctgtactgctgcatggagtaatctatgatgtactggtaatgtgaaaatcttagatccattttgaatcgttatcgtgactaacaatgttgggtctaagttttcctgtatttttacatcctcattttgattaatgctggataaaaaagataggtcacttcatatatccatccattacccatgcttttaactcaagtctaaaggacttctttactctggattggttcctgtaacagactgcttgttgatcaattttaggtgatctgttgacaagtgacaccagctatacagatgcatcagcacatatggtgtcactaagtcttccatgttacatattaaaaagaaaaccaatggccatttagactggtgatgacttttaaattttgggctattggttattaaaacatttagcctagaaacagaagtccactcatacacccacatataaaatgttgtattttgcaagatcaaagcttttggttggtctgcccatctgtttcattttttatatgccaacttgcctagtaagttgttggaaacgctgggctccagatttgtaccctttgttcttgataactccattgcttagataccaggtgcagatgtgcataaatattggacatactagttttactattcagttggtgctgactgctgagaacagaacaaacgagcagaattgtggcggtctatttatcatagctgaattgttctgcattccatagatcagataattttcattatttgttgcattacttgtctttttgatattgtactatttctactgttatgcctatttccaagtggtaatagctgttccatgttacaggaacagt

SEQ ID NO: 5664 - DNA, 585 bp, Zea mays
  Intron number 2 from transcript GRMZM2G130953_T01 (locus G RMZM2G130953) derived from phytozome v7.0 (chr-ID 8; pos 1 8319458 to 18320042 reverse strand)
ctcgtcggcgacgtcccctggaagtgagctccttcgctctgtctcttttactttccctgatctaattagctggttatctacgcagtttggctgtgctgagtagatttgcaaaaaaaaaaaacatgactgagttgattgagacttaaaagaggtgctgttggagtgttggtgttgccggataggaaggattgttaggaagccccctttccccattggattatgacaccctccctttgctgctcccttactccacttgttagcgcactgccgtcattactgcgacaatgcagtcacactgatcaaattgaactccgtttgatgcttctcgcaccgaatgtctcgctgctgctgctactggttcttctagctttttaacgtatccatgtacagaatcccttggtttgaaaagaattggctttggataagggctgtcttcctagctctattccccacttatagataggttgatccttctagaaaaatattctgtctcgatcaatgagacgagccgggcctgtccgagtttattttcatttataattttcttccttggtcatactgtgttttttttttgttttttgcagg

SEQ ID NO: 5665 - DNA, 706 bp, Zea mays
  Intron number 2 from transcript GRMZM2G145794_T01 (locus G RMZM2G145794) derived from phytozome v7.0 (chr-ID 9; pos 1 26448209 to 126448914 reverse strand)
gtcatcttacccgtttgcttgcccgtgtgcaaaaggtatcattaaagaaagactttgtgtgcttaattcctcagtctacctgaatttgtacagtttataaccattgttgtttcctgttgtcgcatctcgattttatagatgaaaaggccattgaattatattacaaagataatcctaattaattggtttccaacagtctgttctatttgtaacaatggagatatgattgagttcttcaaacagcctgtataccatgtctgtttatgactgtgcagcttagattgcctcatgttgtaaattgttatagttttagttgctttgtgcatagattcacaaaccaatccagcttgatggtttgctctgatccttttttctcaaacaaattgttatgatcttcttatctggtctgatgctcatgcaaaaagaattgcttgatgtacttacagttgtgtatccactatggattggtaaaagagccatgattatttttagctgcaggaagacagaggaatgagccattgaattttcgtttttggaatcaaactgtatggttcacttttgttctcctttaagattattgtttatatcatattgtggtgagctgctgagtatttctgtcgtgcttgtgagaatcttggtgatatctcatgtgctgctgtactgggatcttttatgtatttatttattgtatcttatcaggtcaggg

SEQ ID NO: 5666 - DNA, 1052 bp, Zea mays
  Intron number 6 from transcript GRMZM2G462537_T05 (locus G RMZM2G462537) derived from phytozome v7.0 (chr-ID 9; pos 1 25808008 to 125809059 reverse strand)
gtccaaccgtcctatcccctccggcctccgcccaggtccgtgcttctgcccgcactcccgcagcccaccgctttgtgaatttgatttcaaatgtaagatattggtggaaatcaaggtagacaactgtacagtttatctatctgcccagtaggctttgtgaatttgatttgctccagtaataaatcttcaaatttatttgatgtgagattgttttcctcatttgatatgtgactgagcagcactagtcattgccctcttgcctacttgctgacgttgggcgactgtacatcgtccagacggtcacatgtgaaagccatcaatggaacgcatcattcaagatgatcttgactgacccctcttcctctttcgttttcccctatagatggttcatatccctctaatcctcatttcaaatgccatcttggggagaagaaacctgttctggtacaactgctcttcacgttatagattataccttgccatttttttttctcaaaaactaaaatacctgtcaactttcatgattcctccactgataaagttgcaataccagtgtacttggtggtgaaagtccgaagctagaactgtcactgattatgaaccattcttgatagcattatcattgatggtttgcaaaccaacagtgatagtcgccatttgtgctgagaaacatgtaagctgtgtctagttcatgtcacaggcagagagttatgcagtgtaaccattagtttcaagttgtatagggagcgcttattgttttgttagataattaactacagaaattttctttgacggtgtgttcgtgttcagcaattgacacattctagttcgttctggttacattgaaagagaaatctttaatgtacttgatattcagaaaatttaaaaaggtatttcaaaataagaaaactagacaaatgcagttgcctaggtctcctagaactagactcaactagaagtatattattatttgacttgtttaacagtttttactttagtttgccatcattaactcattttctcctttttagattttattcagtattcactat

SEQ ID NO: 5667 - DNA, 1012 bp, Zea mays
  Intron number 1 from transcript AC233934.1_FGT001 (locus A C233934.1_FG001) derived from phytozome v7.0 (chr-ID 9; po s 24855991 to 24857002 reverse strand)
acctttgggtggctttgggggaagaagaaatcgcggtaggcgtggcagggcgagtcgcaaggcgggctcggcgagaacccaatcccatccatatatcttgagtcccagggagggaacgatcgccgaaacccccgcctgatttggtcttccgccgcgccttcttcgcgtgttctgttccggggtgggagacgagcctgacgcctggggcccacgcgccagtgaagagatgaggggcggtcacagatgagcaccgtccaactgacgaaggggccccacttggcggcgccatttcacagttgatagacgggctgcgcagtagggtttggttactaggccgaactgagtactgagggcccaagtaaggtctctttctctttttcctttttattttctacttttcttttctctcttttcaaattccatttgaattcgaatttcattcaaacttttgtggctcatcattacaaattatattggtgatattagaggtacaaattctgtggatagttatatatatattatttattatttatctcctttatcctttcttatttccaaaccctagtttcaatttaggatttaatccaacttttaggattattaacttcttattattatcattattcttattattttgtttaatgcacaaacatataaaactccaacaagatgcactttattttgttttagaatcatttgtttggattaaatcctcttaattacatgtatgctcttttcatgatgcaaatatgacacataaaataaggatatcaccatataatccttttatacacttttgagtattacacccgcgctcgaccaccgcagccgctacttcaagcagttagcttagctgtggggtaaaatgataggttagcgatcttttctacttttatttactgtctgcatagtacacagcagggggaaattaatgtttttcgcaattaagagttttggctttcattcttgttttccaggtagtgccgagaattgtcttgaaagcacttcttgc

SEQ ID NO: 5668 - DNA, 939 bp, Zea mays
  Intron number 1 from transcript GRMZM2G028921_T01 (locus G RMZM2G028921) derived from phytozome v7.0 (chr-ID 9; pos 1 19132083 to 119133021)
tcggcgccaaccacaaccaggcctttgtcgagttcgtaagtccttcccccgcccctcacccttccttcctgtcgaccgtacccatcgatatcatttgcgatacggtcgggaattgggggtgggcgcgccgctggatgttctctgtggtttcatacttagtacagaaattgatttggtcagcagtttaattgttgggcttgttggcaaaccactgaatctagctaggtttaacctgtgtggtattggagttttgtcagcgctctggatttggattatatcttttgaaggattcagcgaaagattccaacatatttagttacacttgattaaacctgtttgagtgatccgatcaatccatgaagctgcacaattatgttctattgagttgcatagatcagacatgattaggagatttgggagctttttattcttttcagcctgcttggtgaaagctgctaaaaggtctttcatatatatttgcacagttccatccgaaagccgatacaagcaggcccagagatgctttcaattttgcaatgcgagaaagccggcttttggaaaaagctgctttggtttggcttttaggggataaaagccaaaagtcaaacaaacacacccttatatggctggtagagaagtgtagtactgtagttccccttgtttcatccattttttggtgtgtgttggggagggggggggggtccctgtagtagtgggaactggattggtgttgctcgaaatcaaatcatttgcagtactccctccgttctttttttatttgtcacgttttagttcaaaaatgaactagcagacgacaaatatttgagaacggaggtaatactatatttggatctactgttttagtgccaaatgatcatggcaggattacttatgtggaatcaatttcctttgcagactgacgttaatcaggcaatctcg

SEQ ID NO: 5669 - DNA, 770 bp, Zea mays
  Intron number 1 from transcript GRMZM2G158575_T02 (locus G RMZM2G158575) derived from phytozome v7.0 (chr-ID 2; pos 1 61597671 to 161598440)
cgaggctgctggacaagaaagagggcgatctcaaggtgcacttgtaactactctttgtgtctttcctaaagaggagttaggagctcttgcagtttaagtttgtgtgcggaatctattgttggacactaacatagcaaatcaataggttagacacatctgtggttatgtacaattggtctggtttggctgtttgggttccaatcatgtatgtttgagttccaagttccaactgtgtagttcatagttgtttgagttctcatggttgttttgagttccaactgtactgtctgtttgagatgtctgttaggcgaggggttcaagacaggttcaagtttgcttatgaactttgctgtatggattcatcttcaccatatcttgttctctgtgcgtgtgcatgcagctgtttcttgagctgccttttcgaatgccaccacccagttttactcaacatccatgttattatgtacggttctgttttctcagaaattgtgcctaaggtaacttgttcagtgaaactgtttaatctggccgccttattatgctataaattcagaacataatctatctgaattctgaaaacagcaaggtaaacagttactttggaatggtggacaatatggttttccaatttccattgtctttgtataggacaaccattagcttagaccaatacactttcttcttttgctttgagaagaaataattcttctatcagaattgttttcctttcatgtgatgtcacaattttgaaatttcaggtacaccataac

SEQ ID NO: 5670 - DNA, 712 bp, Zea mays
  Intron number 2 from transcript GRMZM2G095695_T02 (locus G RMZM2G095695) derived from phytozome v7.0 (chr-ID 2; pos 2 18112245 to 218112956 reverse strand)
tccggcggccctcatccgaagccgcgctgcgattggtgagtagagtatgctctcttttagcaatttggtaatgatacaattaatatttcgagtagtaagctatatatggactacaatgggagctccccccctcacctgaacaatagcatgtgggcgtttgctctcatgtcatctcaaatagcttacgatcatcctgttgaatagtagccaccacccaccagtataggttacttttagggaggtaaacgatgaagcaactttcatgggaaaacttatgttcactgttgcagtttaaacattgatggcgccatttgcctgctacacatgatttctttttttattggatttgaagatttgtgtgaaattgattcatttcatggaatttcttgatgactgcacaaacaggggacagacggcagtttaaacttgcatgtacacctttgttaagctaggatttgcttgtttacggcaccaaaaactgtacaactttgtaggttaggtagacagttcatttttttgatctatttcaaaagtaaagtactctgtgcctttttctttgttcggcatgtaaccaaaaaaaaacagaatgcctgcgaagctgtctttgctgtatgccttattgtcatccttttttttttcatttattgcgtagctgcacacattttactaatttccatccattgctggtatgtggtgtaggctacaaaggcaa

SEQ ID NO: 5671 - DNA, 838 bp, Zea mays
  Intron number 3 from transcript GRMZM2G100548_T01 (locus G RMZM2G100548) derived from phytozome v7.0 (chr-ID 2; pos 7 4875031 to 74875868)
aatacctctgcacaggaggaagcgatcagaaagttgtgagttgcttatttgtccttttagtttcttatgtggcttatgttatgtcatactggaaaaggtatgtttggattgttttgttggttaacaactgaaatcagtagaaatgcaatacatcttattgatgtagttattttttttctcaaacacgtaggagagttgtgtatctttatattatagagagagagaaaagggatatgaacctatataaggcaactggcaacctttatgcctcaactatgagacaatagaaggttgcaaggaaaaaaaactacacagcactcaaaccctttttacaaggaagaaattcatgacctttctagcctcgacatgacaaaaaatagctcctgaagtttttgagcatcagtgaagcaccaacactcagcctcagtttctctttgaaggaatgctgttgttgtgcctttactagggaagggccgcaagtgtcaaaaattcctcttttcctgtgaagccatgaggcccatgctcccaggatcaccatactattcaaaccttttctttgggtagcttggctagtagttacatgaaatgggcatggtttaaaaatactattggcatacttgtattcattatccatatgtatggttcttgccttgatgtgcataactgactaatgtggcccttgaagagggagttattgtaaatgatgtatgatattatttccatttatggctttgggcagaaccacgagtgtttgctttgtttttatgtttagttggtcctctcattgactattggcttggcaggttttatatcataacagaagtgcgcgtacacatct

SEQ ID NO: 5672 - DNA, 792 bp, Zea mays
  Intron number 2 from transcript GRMZM2G337845_T01 (locus G RMZM2G337845) derived from phytozome v7.0 (chr-ID 2; pos 2 07024861 to 207025652)
gggctttcaagacctatcacgccatacccagccaggtgagatgaattggttcacttcacttcttggaactgtgtatgttgtgaatccgtccgttataatcctgtaatggttggatgtgttgtaactgggagccgggaatgagatgaaccgaaaataatactcaaagtgcaactaacgcataattacagcatgcccagcctaaagaaattccctgctttcaaggaactcatttcgaaattccaggaaacgcaaaaggcatctcaccgcttttccagctggtccgtttggaggagcatccaagacaagcactccacttaacccaagctgctctacggattgatctggggcaaattttattcccagaataggtcttgtcaccctgccaaattttatgagttggtccacaatgcccccgacctgaaaagaggtattgctcgtggtgttgtcaaaacatgcgagttaactgcaagcaagaacgaaaggaaactaaactgaacttaggagctgacttgagtgaactactactgtcaagagatttttaaaaaaaacagagttacaaatgtacatactgtgtcaactggaatggaaaacccaacaccagatgatgctcctgagggcgtcatctatcctaaatgtcgaggtctgcatctctttctatgttcttcaaattatcgtgtaaactgaaagggctttggttcacattcagtatcttggactcttggtaaatgaatgtgctgctaaagtggttgaacctacagggttgattgtctgtggtaatctcaggcaaatcca

SEQ ID NO: 5673 - DNA, 1029 bp, Zea mays
  Intron number 4 from transcript GRMZM2G139463_T03 (locus G RMZM2G139463) derived from phytozome v7.0 (chr-ID 2; pos 2 0203937 to 20204965)
gtgctacatttaaaattccaggaaggtgagcactttgactactgttggaatgtcgggtgacttcacatcacagcgcaacaggcttatcataattttaactaatcatggacactaaatctactagtttctgttgatggctagttaaaactatggccagctgtttgggcctggtttcactcaaactgtttagctagtacatgtcttaactaagtttgtttctttcctgtaactctggaatttcattcaccaccgtcttgtgtatccaattcctttgtgccattagatcttaccatttcatggacctttcatatgtttttttgactgtggtatctagtcactgtaagaatcagtcagatcctctggtcttgttatactggagtggtatcctgtattggatgatgtaaatccgccagttgtattttttctatgcaccaactgtactatgcatgttgcatttttgttacatgtgcttaagccatttttgctatatggtgaaacatgtcagcctagtgctcctttccgtaagccagtgtcagtgtcatccattatttccttggaaatctaaatgttgcccattgaattgggactctttgcttggcatgtattcaattttgcaaccatctaactcatagaaatattcaatctactccctcggttccaaattgtatgtcgctttgacatttttagtacaccaattttgctagatataatgtatgtctagatacatagcaaaatctatgtaccaaaaaagtcaaagcgacttataatttagaacaaagggaatatatgaattcatatttctgcgggaggccaatctagttctaaatcctcaatattttggcaactgaatgattttttagagttttagggccatgcctcagtctttcaactaatagccaaaagacggtttactttaaaccgttacttacagcatcaaggacaactgaatgaacttggtgaagaattaccaatttctctctttatagctagtactgtgtaccaaccaatcatttgattccagggtgggcg

SEQ ID NO: 5674 - DNA, 907 bp, Zea mays
  Intron number 1 from transcript GRMZM2G367367_T01 (locus G RMZM2G367367) derived from phytozome v7.0 (chr-ID 2; pos 1 10084875 to 110085781)
ccattggtgctggcaaggtaccataggtgtatctcatcttctgctcgcagcaggagttaaattgaaggtgggccgttttgaatatggcatcattccagtgatttcagatcatccaggtgcctagaatgaccctggaattaaatctcttgcccatgactatcacaatgtgcccatgttccctgctccaccattctccaaacaccttgttggcttatcacgttatgcatttgctgtgatacttttgtttagttcactcaaacatacaagattcgctaggacaaatttgtaagtcgattaaaaaaaacaatgctgtcgctgaatcccaagatgaactaattgctagctataaagtttcagttaccatcaaaacaattctctgaagattttcaattcccagccagtgttgcaggaaatctgcctcatctcatgttgaaacactagctatctatcggcattgactccactctgatgaggaacatagttattctttaggcaattgcatttgtagtatgcttgttgctttgtccattgttctaagattggtattgtgctttgactttggccggtagcacatatctgtagggcctagaatgcaatccatagtacggcaggtgggcttcttgtttgcattcaaatttaggtcaagatctacaaatgactgatcatatcttttccctgagttttttttttaaattttctgtagcatgtgatgtgattacagtaacaaactttcacatcaaattggcagttactacattgttctgttgtctgtggacgagattttactgcactttatgattaaaatagagttttccatggaggtgtggatactgcaattttctgctctcttagactcatatgttaacttacagccttggtattgtccgtggatttcaagaggaggaat

SEQ ID NO: 5675 - DNA, 903 bp, Zea mays
  Intron number 2 from transcript GRMZM2G030275_T02 (locus G RMZM2G030275) derived from phytozome v7.0 (chr-ID 2; pos 2 9629893 to 29630795)
tcgacgccgccggcagcggtagccgcagcatctctgtaagctttctcttttacctggagctattaatttcctgaatcccacaccgcatactgttctattatatcgcagacttttatccttcctgtgggggaacagaaatctgcccgtgggatgacttaacaccatgttagctgagcatgctttacattctttcagcaagtaccagagtaggtgttccccactagcacttccattaaacaagaggaagagcagagggggaaatgggaccagagcgttttaactaggcactagcattctcctgattgccacggttgttttctgctaaaaggttttgtggttggtcggcgttttgcctttgaagttttgcagattgcaatcagtgctgtgatagaccatcttctcaacattccaaacatttttgttgggtaaccaaatgatttgcctgcttgaacatgttcaacttgttgatgaacccatgtactttgtcacccctattataagttatatataacttcagaatggttatgccagctgcagttttaacattgcactacagatcatggagatagcttaaaaactaatcacagtatctgaggctgagctgctaggctgtttattttgatgatagtaatgatttgcctcaatggcacacatatttacaggccttcatttctctcgctgtaccagtacctcagaaatgtacaacttgatgcctgaaatacaacctctaaatgtttgcttggacaaattaaaatcatataacctaagtgtgcaagcatgattctgtagcgaaatcagtgaagccttacttcattaatatcaaaaggttttattcaatttgctattagtcaataactcttattttcctgcaggtaaaagttattcaggattctagacctatac

SEQ ID NO: 5676 - DNA, 783 bp, Zea mays
  Intron number 2 from transcript GRMZM2G098988_T03 (locus G RMZM2G098988) derived from phytozome v7.0 (chr-ID 9; pos 7 7700716 to 77701498)
gtcagcgcagcctcacgtcgtcgtcgacgattcaggtctccttccttccgttgcattgttcaaaattctcttagagcttttcttttccccttggcattgccgcgcagctgctgtaaactgtaagcatcgcaccgtcacctgttcattcctacgtgggtgagcaacttggtgcagtctgttatgctacgactaacgtagaactgtagatcggaaagcgatcggggtccactacgtggcggctctcgacgtcaacggcgagggatagggcagcgtgtttgacgaaatgctttgcgcagtcaaaagatggccaccacctcgctactctgtttttagttgtacatcctcctctgttctgcgacatcctcgcgcttctaatggacttcccataggatgataagctagtttatgagtcggcaagcgcatccaaaaaaaataaaaacaaaaactcgcaaccatacgttgtcgccacctttaaccggcattgctgttcacgaattggtagacacttgtgctcgctttagcttttcgctctaatatcgtcgtgcactttgctatgtacaacttgccaaattgctctagcagtctagcctctttgtgctgtgctctcttctcaccttccattaaactgatccttaatgactcgagttcgcaacacacagcactgtagaacaagtttgtccgaaaataaaccgtaaccgataactactattctcactccaatttgttttccgttgattacttgttgcaggcccgaatacttccgccagctgctgaagcccgttg

SEQ ID NO: 5677 - DNA, 355 bp, Zea mays
  Intron number 2 from transcript GRMZM2G043817_T01 (locus G RMZM2G043817) derived from phytozome v7.0 (chr-ID 2; pos 2 17127938 to 217128292)
cccataaagtacccaaagtaagctatccatttcttgctaaaagaaacaaaactctaaggagaatatcaatctatcaacatgataattcgtacaaccgttatctctttgttgttgctaaaaagtactgaagttaaatatattattggcctgttcttctactcaagcttttaatttcgaaatatgaatcaaatttagtgaagactattaaaagcatgatgataccccatactacacaaaatatataatgtggatacaatggtgggcatatgaagtagtgccattctttatgttttttcactattgatgtgcatattgtttgtgctattttcggatacttcactggtctcctttctcc

SEQ ID NO: 5678 - DNA, 493 bp, Zea mays
  Intron number 3 from transcript GRMZM2G171372_T03 (locus G RMZM2G171372) derived from phytozome v7.0 (chr-ID 2; pos 2 8036044 to 28036536)
agtgttaagaacaacacccaggtatgcaattcccttcctgttattttgctagaaacttatgtgcattgtgctattagtttttgttctttgggtcccgcacaagtttgagggtacaggtttgggaaaacccttttggtgaatgggaatgacactgtacatgactgagctcctgctatgcacactagtttatgtcgttttgctcccaataaaaaaccttaatgttcattgttgcagtagaaaaaaaaactgtcttgtatagcttcgtgaatgctgcagatattttaaaacttattatgctgtgttcaaagtagcagttgttttgatgtaattcttctggtcttattctctccgataatttgatacttaagtatgtcctcaccgttatgatgtccagccactgtattttgcttgtaattagtcaatagagctaaaacttgttgttttcctgatgtattcaggttctcatcaattgccgcaacaacaagaagctgct

SEQ ID NO: 5679 - DNA, 1036 bp, Zea mays
  Intron number 1 from transcript GRMZM2G500737_T01 (locus G RMZM2G500737) derived from phytozome v7.0 (chr-ID 9; pos 1 16941981 to 116943016 reverse strand)
ttttaactggttgtgatagcatacttttgtctaatgtaggtgccctatgctgctctacactttagtaggtctttacaatctaatattttggaaggaattctcccctcgtttaattaaactggtcctagctatacaaccactacatttcttcctctaatcttgtagaggtagagccagtatgacaatggagaagagaagagcagtgcttccaaagaaaacgacatatgcaaacctcatggttagtggaagtgtaaaacccaatagaaaaaaatgaattagcttgtggcatcttttgttattgctagagacagatttgctgtaaggtagaaggatcctaacagtcaaataaataagctagagaaggtacacaagacagattaatgtccagaagttagtagcacagtatcctatatgacctagttctgctacttgagctaattgcaccattgcagacaaaccggttgcctcactaagctataatgttgtacagatcaagtggataaagcaaagagtatgctagcaagttaatttgaattttgagtcaaaatacagaaaccaaaacactgaagagtatgaaaaagaaagtgatagaaagcagataccctttcctttatgatataaattaaggtggatggagaaacaaacgcatccatcttacaaaaatatatgaggcaagaggctaacacaggacaaagtccaccaaaattttagacatataacacatatgccttatttctctgatagacaaaaaatactcattaactaatgaaaatgaaacatctagatctctttcagggaatcaagaagtgtgtatttaagcagggacaaatatatattatatccattaaaatatgcaaagtttctagatacaatagttttcctaaacttgtttcccttgttaaaatgttagagagccaatttgaggcaaagaacatagatattctgataaaagaagaaaggtgttagaagaaaggagccaatgtcatacctgttggtaggggtagaaacgagccgagccgagctcggctcggctcgg

SEQ ID NO: 5680 - DNA, 622 bp, Zea mays
  Intron number 1 from transcript GRMZM2G143377_T01 (locus G RMZM2G143377) derived from phytozome v7.0 (chr-ID 9; pos 1 01332962 to 101333583)
ctcagagctggtagatcacttaaatcttgtcttttactattctattgccaccaaagaggctcttgtcatctgtctaacaaactgaccaaataagataatgatgtggccttggaccatagtggtcttaatttccaatgcaactggtttaattctctaatgagcaagtatgatgaataaagctatctaatctgcttggcacgataattcatatctggtatccaaactgactttgatttccacgatgtctctactgggtgcatgatctgcttggtcagaagaagttattctctatgaaaatttgttggttatatacttcttctgttgatgcattattgttatttccataggtatgtgtgtcacaccactatctttgaactaaattgtatagctttgccgtcatcattgtatcattatctaacaatatgttaagcctgtcctagtaatctgttatgtctgttttttcttctgcaacattatatccattgaccatcaagtttgcaaatttgttcattgttataggacgcaccaaagttttgacatccttctaggatggtatatacaatgctatgttttctaacttattatatcatatgtgtaatcaattttacttgtaactgacagg

SEQ ID NO: 5681 - DNA, 781 bp, Zea mays
  Intron number 2 from transcript GRMZM5G871262_T02 (locus G RMZM5G871262) derived from phytozome v7.0 (chr-ID 9; pos 2 4947500 to 24948280)
ggtagtgtgcggcctcgtcctcggcatcctatacggtgcgcgcgcgcggaccaatccatgcttctcccattctctctcacctcctccactcagaatgctcttgtgatttctccaggattggagtgacatcctgaaagctactggagtaccatttctagtgtagttcaattaaaaaaaagtggtgtcctttgcccgaaccttgtggtggattccagcgtttccctgcattggtgttcggattgaagcgacatctttgagctccgaacctttttttccctatcctaattcaatcttttatcgctacaagcctacaactgcccaaacccagaattcagttaccttgttctcttcccgtgtttcatgaacttggtttatatttctttctactgtgtatatgtgtttctttccctcaggggattttatttagtttacggaacaagattagcttgtctccttgttttacagttatatgaccgtcagacaaaactgtacaacttttttggtagttgcaatgcgcaggatggtatgccttgatggaaaccttatttttaccttatatacagatcctattgcacaaatttctgataattaacaacatgcgatgattatggatacacatttatgtcatcaaatgataaacagatatcatcaagttcctaactttcagcaatgtcaaaccttttcagttttgtgatggtgtgtgtttacctaagtaggctgatcccatctccattttgtcgcttcaggacttgttggtaaagtggacttcactgtcaggcac

SEQ ID NO: 5682 - DNA, 1002 bp, Zea mays
  Intron number 2 from transcript GRMZM2G046011_T01 (locus G RMZM2G046011) derived from phytozome v7.0 (chr-ID 2; pos 2 04337836 to 204338837 reverse strand)
caaggccaacaagctcaagcagtcgctcccgccaggtccgtgctccatagtccctaccccctacatgctacatccatcgactactgctcttttttatttgatctattggaccttccggatcccggtcccgcattgggcggttcgcaattgctgtgtggtgattggttactggttactgaaggttgtagaccgtgttgctgttgtgtgagaatgatctagttagaaaaaaacatttatgatctattcaatcttgactagttgtcctatctacgcgccatgcgaattttgatttagcccgatttttcatttttgtctgaaacattttggtcacacatctacaagtgataattagaggatactctggacattcagttattcacttattctagatagatagactagcagtcataaactagagcatatagtatggacattctgttattcacttaaatctgtcataaattaggggatggtctggatattcactattcagttattcttctggatattcggagattctttcacaattagaggcaaacatcccttcttgattctttatggtttgctgttatcatttttccatggtactaatacatgaataggatatcactgcttgggaataaaatgggcgaatcatatttggccctacatgttgtgatgtccagagatgtttcaactaaactatgcacatgccaaacaatggcacctcatggttacaattgtcactgtgcatatccatagacgttttttattataaattgttcagaataaatactaaggatatcctgtttgtttgttataatcttgaagtagtacatgatttgcatcatcataccgagatctcagatcaattattcctttcctgtgttaatgcctctatgatttgctgtgcatacaatttggctgggaaattattgctcaaccaaatccacattcgctgattacgattcccccccccctttggcaggtctgactgtccaggagatttaaggtatcaagcca

SEQ ID NO: 5683 - DNA, 631 bp, Zea mays
  Intron number 1 from transcript AC202386.3_FGT002 (locus A C202386.3_FG002) derived from phytozome v7.0 (chr-ID 8; po s 22437323 to 22437953 reverse strand)
agtatgatcaagaactcctagttgtgtgggcaggttgtgatttcttatttacaatagaaaggtttcctagaagttgctcttcactttgtgaaggatgagaagaccatctttaacttagcccttagagagtggtaacattcaaattgtagttgctttaacttctgcaaaggagattaacgacaaggatcactggtacaggttgggaattgaggcctcgaggcaaggaaatgttggtattgtggaatatgcataccaacaaacaaatttttttgagaggcttgtttttatgtatcgcattactagttacttggacaaggtggccttcatgtgcaaaattgttggacagaataataatttgatgggacaattccacaatttattgtatcttgggaacgcttagaagagagttgagatcttggaaaatgttgggcaactacctcttgcttatgttcttgttgtcacctatgggctcactgaaattgctgagaggattgctgctgaattaggcgagcatgttcctttgctgcctgaagaaaaatcaactcattactgattccccctgcacctctcacaacatgtggtgattggccattactaatggttatgtgtggtatttttgaaggtggattgg

SEQ ID NO: 5684 - DNA, 872 bp, Zea mays
  Intron number 1 from transcript GRMZM2G052935_T02 (locus G RMZM2G052935) derived from phytozome v7.0 (chr-ID 2; pos 1 56725151 to 156726022)
gagttgtgaattggttcagcacaaaaatgtttgggcatcaatttattcattgttaatttcttgttcatgactatatttcgccaagatttatttttttttcttaatccgcgttaactagataaagatagcactttgcttcaagttttccttgtcttctttttagaaaaaaaactaactgtattattttctcaactgatgttatgtgagcttgacttgaacctatagtagcaccctaggattcacatcctgccattggtgcctcgtagggacagttttttttttcttgaacatagaggagagctgtctatcattatattaaagaacatggttaggaaactttacacacacatttggttacaagatcacccttgaagccaaagataactaaacgaccttgactaacaggactttggttacttgtggtattagactgttatttggctgggtcataatccatattcttgcaggatggattcattttattagcagctctatataaagaaatatttgtcactatattaaagaaaaaggcattatatatgattatgcgcatttctcaattcctcttcaacactttgacctcatttacaaccctagaagcaatacactaatgcacacaacacacgatcatcaggatctggaaggaatcaacaagtgtgaaatattttcctttgtactcaataagagacatgtttctaagaatttaagtcctttgtaatatggaaaattttcgatattgttaaatgacaattgactgaggccagagttggttcattatagcagatgatgatgatgcatcttggctttcgttcaaaaaaaaatgatgcatcttggcaaatttaattttgacctttctatataccaggaacttg

SEQ ID NO: 5685 - DNA, 1011 bp, Zea mays
  Intron number 1 from transcript GRMZM5G820287_T02 (locus G RMZM5G820287) derived from phytozome v7.0 (chr-ID 2; pos 5 5075777 to 55076787 reverse strand)
atctccctcggcgtcaagctcggcgtccagtacaggtccgtgctagcaggatcgcgcgcctccgtgatatattgagctcttgactgctttgcttttgtagagtagtttgcatgcttcaattgatggcgatgattccagactccgcgtgtttcatgtcgttaggtggtggcgttagttaccagtgtttgttggtgttagttacttagttatcagtgttcattggttgtgttcaagtatgcaattcagtataacatgactgatcgtaggggacatagtacgtagaccatgctacctaacttatgggtcaattaaccgatccagctgtctctacagacacctagcaaccttttctttatagagctcacatgcaatccgttgtcgcattcaaaaggattctaaggatgctttgccttacctgtattggtgccagtggttttcagtgacagggtttatgaaaacacagttcgagctcgttttcttctccattatttccccttcttttattgcgataaaactttttggtttgggtgtacgtatgatttcagttatctttttgtgaatgaggtcatgcttagcatattatcataaagatgcgttgattattcaggacaatgatttggtcaactcaatcccttgcaaaaatgtacttgagcagttgaggatgcttttggagaagttcctgctgcggctgtttttcaggcattcaactcatcagacagatgataacaatcaattacttgccttgaaatcacaaccaatatggacacttcttatctcagctatatggttttgtttcttttgatgatgggcccagatccaaactctgtcgccatatattatcagttgtacatttcaacatattcgaatttgtggaaatgtccttctggattaaattttgtagccagctatgtactctctatctgatagaagtcttagtctctcatatagtattaactttacctccttgctaatgcagtctctggggtggttctgtcataaatctaggaacca

SEQ ID NO: 5686 - DNA, 976 bp, Zea mays
  Intron number 2 from transcript GRMZM2G152438_T02 (locus G RMZM2G152438) derived from phytozome v7.0 (chr-ID 2; pos 1 58371797 to 158372772)
aggactcatccgacttcaccttctgcagggtatgcacgctgctgcttgtgtcacttacaccatagtggtcgtttatgtcatgctgatttgtctgttgttttgttgctttgtgttgtttcttatcgatgctcttctgatcataaaaccatcacgcttgattaattcatgtttaagcagggtgatcagagaaattggcagcagaagcacttcattaccaaaactgttggatgacacctctctctctctctctctctctctttgccataaaacaaaattatggagttgttttaatgagacctccagagacaccaacggagacctccagaggcactagtgcgtagtggtcctaaggcacgatagtaatgagaagagaagaatatgaagatcgaagacttgaaaggatggaatatattcaaagatttagccttcaatacgagtgcatgaaaaataactattcatgtgcctgaacctaaagcaactattcatgtgcctgaaccttgacttgttggtttgttgggttttaactctagtcttccccaacttacttgggactaaaaggctttgttgttgttgttgttgttttaaggagttattgaagatgctcttgctgctcatgccgttggattgagtcaattacttgtgaacaatacaaagctagtgcatctttatgggtagtcacttcattacctttttatttaggttattatttggatataggttgtagtatatatgcatcacttttgctggacaaactcaattgcatgatagcttatcagttgttattgtagcgggctagcagcctaaaccttttctgttgaatatttatcagctatttctctttaagacccttgagtagttaagagcccaaatggtatgatctacaaatttacatgtgccattttgatttttcttgctttctgatatgacttctaagacttgttttgacatatctttttttaggttagttctgcagaaa

SEQ ID NO: 5687 - DNA, 462 bp, Zea mays
  Intron number 5 from transcript GRMZM2G173641_T01 (locus G RMZM2G173641) derived from phytozome v7.0 (chr-ID 9; pos 2 0465402 to 20465863 reverse strand)
caatagtctatccgctggccttggtactgcccttatttgttcattactgtcttgcatggcaaattgaactgttctctgcaactggaatggaattgaaatgatgctcggagttatttcttagtgatatttttcacctatatgattttttattacttcaataaagttggatttagtttccaaatccaattatttatgcggcgctaagagattttatttttaaggatagatcctaatctaaattgttctgctcagtactttcagtttctattctttattttcatatgaaattgcatggaatcctcacagtaaacgatgcttacagcccacagattaatcatcgcaaaactttacacatcatgataaaatccaagctctattcagtatttcttgaatcttgcttcttttatagccttgtaaagtttcatttcgtttctttagtttttgagttacttcttatcaggg

SEQ ID NO: 5688 - DNA, 917 bp, Zea mays
  Intron number 2 from transcript GRMZM2G438811_T01 (locus G RMZM2G438811) derived from phytozome v7.0 (chr-ID 2; pos 5 8012601 to 58013517 reverse strand)
ctgttcttaggatcactaaccggtgcaagcttcatgtaatccatattatagaactaatatcctcacaaaatcaaaaagtgttctatagctttatgcttataatagtcctaaagtatgcacaacacaagatgcattgtttcaggaatggaaataagttagacaacaagttccattagccactacactacacatgattattacctcaagtacctagataaattttctaactacatttattgtgccctagaaccaaccaacagctccccagacatttgtgttgcagagcatttgagcttcaatcacacatgttactttatacgttgtacgctaggtttacaaaatgaaattagaattaacttcgtcaaaaggattctggcatagtggcctttcttagaatacatagaaattggcataacaagaacaccacattaaatgaaatagttgaaacaaaaaaagttgaaattaatgaagtcataataggtcttggtaggtttcctttcttttgcatggacacaagacgacgacatttacactaaagggcacaattgtttcaacctgcagttcagaactatcacccagtaatgacagtgtttttgtgaactcaatcagacgaaacaaatccaagtttggtacccacaaaaataaatccataataatacaagagagatgaaaattaaaattatcctctcttttttcaaaaactatacttgatgggtaacatacaataaccaaggtaaggtgagcctaacaagaggaacaacaagcccccagggggaaaccttgtatggtcagcagaagacgtccaggctaacatccaaatgtcatacggttgctgtctcgagcaaatatgtatcttgcagcttcataaatgtcttccatcagccagaaaagagaaaactcatataagtctcagctca

SEQ ID NO: 5689 - DNA, 616 bp, Zea mays
  Intron number 1 from transcript GRMZM2G438811_T01 (locus G RMZM2G438811) derived from phytozome v7.0 (chr-ID 2; pos 5 8013485 to 58014100 reverse strand)
tgaaaattgccctagaaaaactttcgagaagaaaggtcaccatctcgaataggtcactgaaatcttgccaaaacagaagcaatagtatgttagatgctcaatagaaataggtaggtaatcagtaaaaatggacaagccacaaaatgatcatctacattcaagaattaaatagcaataatggactggacacagtagagtagaatggtaactcacttgttgagtcatgaagtacaacgactccaagaatagtgtcaggatttaaatcaaatatggttcatcccagtctccccatgtaagtcctaaaactggcatggttatggaataatcctaagctctctgaattcaataggatgcaacatgtagagctccatacatgaaatcaaaacataaagtacaattggcgtcattgagagcacatatgcttctgatgttgtttagtacttacattcagtaaaaacaaggacgaaatagaccctgctgaaactctgacaaggataaaaataaggattccaaagacaaattgataactattgatggacccttacttctagtattgcactgaagtttcttttctctgcttgttctgttcttaggatcactaaccggtgcaagcttc

SEQ ID NO: 5690 - DNA, 768 bp, Zea mays
  Intron number 1 from transcript GRMZM5G818192_T03 (locus G RMZM5G818192) derived from phytozome v7.0 (chr-ID 2; pos 2 13578138 to 213578905)
gttcatttattttcaggcgtggaaagtattgcagatagatgtctctattttcacgtcatcattagttgatgttcaggtatattgtctttaacatctatgtattttctatgaataaattatctcatggaagttatattccttttctagaaatcgttggagagaatgttatccaaaggaaatattttaattggccatagcttacatagagatttatgcggtaaggtgtggtttgtattttttgtctgatctatctgatgtgtcaatcagatgtgtactttgcgtttagttgaacatgtttctttactgtttttagtaccatttaattcaattggtctcattcttctattttgcagccttaaagattgattactctcaagttattgatacaacatacatatttaagtatgcaaatttaccgactactgcatcaccttccttgaacagtctgtgcaaggtattggcataaagtaacaataatgtctgccttatctgcttttgtttttcgagttgaagaaattttgattcatggtgccagttaaaacttagttcaaaatagtgactgtgaacccactttgtcttctctatttctcccccgagtttatacacaatagtgcttgatataactatatgtatggtatttcctacttctgttttagcggggttaattttcaatgatatgtgattgtatgtaactatgaatggtgctttaatctgcttatttttttcttcttaggctgttttggagtatttagttcgagaagaaggaga

SEQ ID NO: 5691 - DNA, 836 bp, Zea mays
  Intron number 1 from transcript GRMZM2G065696_T02 (locus G RMZM2G065696) derived from phytozome v7.0 (chr-ID 9; pos 1 25170308 to 125171143)
gccgctgccacgactccatagacggcaggtgaacatgccaaacacgcccaaaatccaccataccttaaattctatccgtcctccgccactatttacatgtgcttgtatagcatgattgtaaccttctattgatatgtgttccactcaaattatagttctctatttacataagtatggtttatgtgattttaggtatcaaattatttatgaatatattgttattcattgtgtaacgtaatttgaacaaaatacaaataaatcttgtgaaagttttcaattttttcttgagattgcaacatctcttggtcatttggcagcgaaaaccgccgagaagtagctgtttctcgagcgagaaattcaaaaaccgttgaatttgaaaacattaccattcggattctaacggttttcagtttttttcctgttttcgctgttgaccgagaaacggtagaaaaataggttcgtcaaccctctattaaacatcaaacgcatggacctcttccatccattcagtctgtggtccaccagtttcccctgttttgtggatgtgtttagattgggcgaggcaaacagttcgcttaattagtatttttcgtatttttctctctctaatagacaaatttcaaactaaagaatttgtctataaataaatcaagtcctcatatttattacactccttctatctctcaatttaatatatgtaatataatcttttctataacgtactaatatgttctgaacttagtaaaaaaatctgtttattgagggataagaagagtactacttgcttaatgtttattgcagtattattagtgtccggcacttgaagcgacaaccac

SEQ ID NO: 5692 - DNA, 870 bp, Zea mays
  Intron number 2 from transcript GRMZM2G170148_T02 (locus G RMZM2G170148) derived from phytozome v7.0 (chr-ID 9; pos 1 10840948 to 110841817 reverse strand)
agttgagcaagaaattgtggttccatcactccgtgagcactcctctcgaaaagtttttatttttgggaaaatcaaaataaaaggcgaatggaagaattcttcttattccataagaaaataaaggaaccttcttcaacatgcactctgcaaatctaccttgcaattgttctgtgcatggccgatgtttgatcttggagaaatataagcatttgccaactgcagtttccattctcaggccagattaaattacattctgtcgcacttaggtacctaggtgcttagaagaatgcaaaccttttgctgaatgcattttccttcattgtgtcagattaaattagctactgtcctaaagagtaaatatgccttggtcagttgaaattaagttgtcaaattagtaggctttgataccttcatatactaaccatttctgtataagggtcatgctatgctactaaattttagtttgcattctgactcttaggtaattactattggatttggagaagaaaccattttttctgtgagttaacatgatcatgtccaattgcgtcaatctcaaatacagtggagcgactcaagaaacatgtccaatttaataatctcaagcccctcgagggctggagatgcttgggttactttatccttttagccatgctggcccagcataaagaatgtatatatatattcttactttttggtatcttccactgggaacctcttcttgattccaacataaacttagaggccagttacacattgttatatctttaaagtagatctctatgtgcgaatgcattttttccttcactgcaaatgtatcttacttttgttgcatcttacttttgcttctccgtggttacacacacagct

SEQ ID NO: 5693 - DNA, 524 bp, Zea mays
  Intron number 3 from transcript GRMZM2G021223_T04 (locus G RMZM2G021223) derived from phytozome v7.0 (chr-ID 2; pos 1 11136047 to 111136570)
gacggtcctggtcctgttcgtgatcgctatcggaggtaatgccattgaattgttttcattggtgtgcatgcttgtcctgatgtccgtgccatatgctgtagcagggctcctggagccctcttcacgttgaataatgataggacatcttggtagtctattgtacttgtaccatgaagttaagtggttggtggctgcactcaatttttgtttggtatatctgtgtgatttcctagtttgttacctacttcaatcatggtttatagtttatttgaattcaagctcaagatttctttgagcaaacattgtcctatggaatatttttcccagaaactacgtcatgcgccatgtaaccttccttggttgcaaccatttcatctttttgttttgttcagtctgcagtttttagcatactgcttcctttttagtatttttacttattattaggggttctcttgttatctaatgagaacacaattgtatattctgcagatctcctgcttatcgatcaaggtccccacctgcga

SEQ ID NO: 5694 - DNA, 474 bp, Zea mays
  Intron number 2 from transcript GRMZM2G353895_T01 (locus G RMZM2G353895) derived from phytozome v7.0 (chr-ID 8; pos 1 4548710 to 14549183 reverse strand)
acaaaaatactgaggtatatcagataaccgatctttgaatttctgattggctcttttttcttgaatagtgcttttttttactctattaatatcctggtctgttttcaataaatcatctccacttcctatttgtcggttgatggttaagcacttgaatttaatgcatcaccatgctctctggttatttgtttcccttttagttcaaactagtactagtttgtctgaactggtctgccttctgcgagttagttactacctgtatacatttattttgggttttttagttgtagagtttgtatatctcacacttatatggatgtagtgtttaatacatgcagtttatagaagttccttcttccaaacctagatacagttctacacggccaactaattcattcgaagttgactccccttattcctttaatttcttctaattcaggttacaaaaaaacagaaggcctcccaaaaaaattc

SEQ ID NO: 5695 - DNA, 815 bp, Zea mays
  Intron number 1 from transcript GRMZM2G131202_T01 (locus G RMZM2G131202) derived from phytozome v7.0 (chr-ID 2; pos 5 1224314 to 51225128)
ggtggtgagggtgaactgcgcctactctccccgcggtaagggcctagttgctgctgatagatccccgtgaagctttatttctcacgccctcttactgctcgctttagtagcttacggtggttttaccactccttggaaagtgccatagcctgcctcaagcttttattgtagtttccggttgccagtcggcctaaattctgtggtgaaaaagcaacttgatagaagctaagatgtaacggatggaatggatattgtagttcatcgtcatcctttgatttgaagcggtgattagctagtatgttggaaaattgagtctttatacatgttggaattagcctctggcaactctggctatgaaattgaactttgctggaacttctttgaaatattctaatagctgtttgctgtccccatgcaacaatggaaatttcatgggtaccgtaaatacaactaaaatatcaattatttttataccataaagatagataggcactacacatctatgctaattatgttatcttactgccatcagctttcagctatgtccatttgtagtttgattgagtagatttcactctgttttattcatcttctttgtgtgatagatagcccatcaactttgggcatctttgtgttcgacctaaataaaactttcagatgccctgtatacttgtgtttttcccaacttttctaactctgttatttgagcagaattgttttatatttgacatggattttatctgtgaagcttttgtagaaatatttagaaaatttctgatgatattgtctacttctacagctgaaacaatcactgc

SEQ ID NO: 5696 - DNA, 932 bp, Zea mays
  Intron number 1 from transcript GRMZM2G416698_T01 (locus G RMZM2G416698) derived from phytozome v7.0 (chr-ID 2; pos 1 53771017 to 153771948)
aacccggagtccatcccgggctgtggatccgggaggtgcgtgaggatccgctgccggaggaggtcgcggcgatgcggtcgtactcgtcgacgaggttgtcgaggtcctcatccgtagagacggagatgagggagtcgaggttctcattgggtagctggtacttgagcgtgaaggggcggccgcctagcaacgaccgcgagaggcgcgcgtggacgtcggcgagcgacgcgtgccggtccatggccacgatccgggtctccccgcccaagtagcagagcgacttatcggtcgggcgcaggacaatccggcccccgaagctgcacaacaggcggagccagccccttcgcctcgcccccatccacctccccaattggtatgaacacgatctcagtcgcaaacctcgccgattataatatttgtatcagtgcctaatgtagtcgagttgcatatcctttcaaacaacttatggcaattgtaaaggattttgctatgttgaatttgtttcagctgaagctgctgcaaaggtaattttgtgtttttgtttattcttttgtattttgtcattttgagattcccgtccccgcatgagtgatttttttctccgttcttgccaattcttgtactgattactacatagcttctggtcctcgacacttttttcttctgcacttcactgtcgcaggaactactaatttctgttatgtttgagagcaagaaagtccatttcatttcgctcgatcggttccaattttctttgatgcttggttccctgctaatctaatctaatccatccatctatccttggttcaattaggttctcgttcttcagagcgcgatatcaatccactgaggcgctgggtgcagttaatctcccaaactatatttgggggtgttcagcaaaaaccgtgtcaactgcgcccgtgcgggtgagg

SEQ ID NO: 5697 - DNA, 500 bp, Zea mays
  Intron number 1 from transcript AC226253.1_FGT002 (locus A C226253.1_FG002) derived from phytozome v7.0 (chr-ID 9; po s 123831850 to 123832349 reverse strand)
aaggttaagtgggccgtggtgaagtggattggggcaattcggcccatgaggccgagaaggagccctttccttttttaattcttttcctattttattttctaattaattttctgtttcagttttaactttaaattatgaattcaggttttcaaaaatagatgcacaggaaaaataccagcatgagatgcagagtacaatttctttgtattaaatatttattaacattttagcatggataatccatggaagaagtgatttaatgaatttaaacaaattgaaaccttctagttgtttcttttccgagtctttagttttcttggtttataggttcaaatttgaacttgaagaattttaatataccattgaattattccaggagaatcatttcaaaaagcaagaaactcctaataaaagattatttattctaattcttttttggaggctttttccttgattcaaaaaataggattgtaggtgttacacattgtccttgtccaggt

SEQ ID NO: 5698 - DNA, 865 bp, Zea mays
  Intron number 1 from transcript GRMZM2G443985_T04 (locus G RMZM2G443985) derived from phytozome v7.0 (chr-ID 9; pos 1 9155431 to 19156295)
tgccgcacgtgtcggactacctccccgatctcccggtgagtgccgccgatccgtgcgaggtggggtcgatctggtgtttggcgcggtgaatggttgatcagtcgctgccgctcgagggagaggttgcccgctgcgtgccatcgtggcgcgatattgtgggatctagcgatgattggtgcgagtctgcgagaacgttaaagttgtcagcgaccttttgttacatttagtaatgcttttagttcgtgggccttttgtgactggaacattcagtgattcagcgcccttttctttagcaatcgctcctttgactgatcagtgaagcacatacccaacgttttcactctttcttcgtttctagtttggccattcagggggtgtttggttagagggactaaaaattagtctctagtttttagtctcatttagtcccttttttgccaaacactaggactaaaatatggactaaaatgatttagtctttagtccttcacatatgtgctaaaagggactaaaccatattaattccacatttacacctcatttagttcaattgtactaatagcaagagaatgttaaaggtcattttagtcttcttatgagtcatactatattcttactatttttagcccctagaaccaaacatgttagggactaaactttagtctcctaactaaagtttagtccctagactaaagaaaccaaacatggcctcagttatacaggcggttcccattagttacgaagggtacggtacggatgaaacgttaaatctgagggatactcataaccgatttgtgaccatgacattttttttttgttccatgttgcagacctactcaaatccattacaagataacccggcata

SEQ ID NO: 5699 - DNA, 733 bp, Zea mays
  Intron number 1 from transcript GRMZM2G110509_T01 (locus G RMZM2G110509) derived from phytozome v7.0 (chr-ID 8; pos 8 4607240 to 84607972)
tctacgcctccaatttggcctctctcccttgcaaggtattggctcatcctctgccactcgacctctgttctagatctgcttgatgcgatagcgattggatcaaagttgtactctactgcctgcccgtgcctgtagtgattaagtcctttgttttgcgagcaattgtagctattgcacgtccattccgttagggattttgggttttgtttacttccgtgttttgataacctgattcttgcggattgtttcttctggatccgacgaattacttacgcaccgtcgttggacgacttattgattgtgcttgcggtaattttacgtggtcataataaagtgtcagatcgaatttttttatgtgtagagcagctgtagtttctgttttgcagatactttcctctgtatccgtcttcgtagttcatgtacagtaagagttgcaacctcataatatgaccaaatttctgatctggtttttatagtatgtccaatttttactggctcaacattctatgcgcacacttactagtttgctctttttatgttttctaggcctgctttgtttttatattatattgtttgctctgttcattgtttgctgctttattttcccgtgcttatgtgtatgatgctttttctaaagctgattgttttgttagtggggggggggggggtttgtttactagtgtttctaattattgattcgtctgtcttaacagtttaagcttcaccttcaacc

SEQ ID NO: 5700 - DNA, 752 bp, Zea mays
  Intron number 2 from transcript GRMZM2G110509_T01 (locus G RMZM2G110509) derived from phytozome v7.0 (chr-ID 8; pos 8 4608417 to 84609168)
atttgctgctgcaacaaggtatgctctcaggaatttctattttacttttcactagttgagactctagtataatggtatatgagatgtatacactatttttagttgaatgtagaatttgtgaattgcaattagtggctagagcttccattaaccttctgtttcttttgatatttagtagttaattaacttaatagccttcaatattgctagtcagatctgttgcagaaagattttctctataattttgatataaatttcccactcaattgttctgagtaatgtttataagttattggaacacttagtggataagtaatgcatgtgcaagtgtagcagcatttagttgtcttcatttgattcctatggttacttaacgtgctgatggtacagttcagtagtaggatccattgacatataccttgtcagctctgtatttaccttctttgcatttgttacatccaggacttgctatgttggttacatatatatgaattatgatatgtggtgatctacctatttatgtgttagttcttacagctgggatgtcagtgtaaacaactttattcctgtgcaccatactaccagtcagttaattttgatctatgtgttttaacatatttacagtttgcctgctgttcatgtgatttattccattaaactaatagtattgttctgtttcaagcatacactgtctttgtgacatggataatcaaactaatggtaatgctattctgttgctgttctgtttttag

SEQ ID NO: 5701 - DNA, 998 bp, Zea mays
  Intron number 2 from transcript GRMZM2G150496_T01 (locus G RMZM2G150496) derived from phytozome v7.0 (chr-ID 2; pos 3 734745 to 3735742)
aacaagctggtctacgtccgcactcttcgcgcgaggtacgcgcgcggctctgctctccaatggcgtacctattcctctgcaactgtggaggaattcggtcctggatttttatcaatcgggcaaatacactgaattgtgttgtgaacttgttatgctgaatttagtgtttggttgatatttaggccctgtttggtatagctgtagctccacaaaatttggtggagttggtggagcaggtcattaggtgctacagaaaatcgtaatcgtggagctggatgtgtaagcctttagaagacatttagacaagttattttgtttattatttaaattaaaaatgtttttaaaactatttaaattgatattataaactacagctctacagccatcccaaacacccacttagcctgcaaaatctaggttgtttttcctgaatttgtatgtttggtcattaatgtttcaaagcctatatttgttggcgctgaagtagtgtggtttacttgatcttattccccacacttattcatgtttttgtttagaaaaaatgaactgtcaagaaaaaaaacttagcccattttgttcacaagaaaaattaaccagcttagcgcagcccacttccttccactggtaaacgtcacgcccgcccgctcatccttctttccgcagttcctctccgtgggcccgagcccctcgccgctgctcctggatgtgtgcgccatctgctcgacgaaaccccgctccgcctaggagcatgtttgcttgctgcttctctctcgatttcgctcccttcctctctatcgactggcgtaccggttccagtctcgccgcggcttggggctttgctgcggagctagtttacgagcagagctaggcttggggctttgctgtggagctagttaaccaacagagctagatggcagatgcagatcgctcgctcctctctagtttgactcttggagtaaccgtttctggttggttcgtgttacagctgcagattctcg

SEQ ID NO: 5702 - DNA, 831 bp, Zea mays
  Intron number 2 from transcript GRMZM2G017784_T01 (locus G RMZM2G017784) derived from phytozome v7.0 (chr-ID 2; pos 2 28939060 to 228939890 reverse strand)
ggtgctgtggcattcaggtgactttattctcttgtttgcattcgtctctttaatgaagaaaacttgtcctcagagagtgcaaccctctgaagtgtacttggacagttttgagtttttaccatcagttccagtattcggattacttgttgttccgtctcctggaagcctgcgtatgtgcacatggatccatgcttagtttctacacttgacacttccttgcctgtttagcatgctgcagtttctccatctttcacctatttgagaattatgcccttccaaaccttgttattccttccttgtacctgattttccacctattttacgtgcatacatcatcgttcttaggaacttattactagaactagcaaagtgtccatacattactacagtttccatcgcttaaatatatatagtataaaacataaatacatgcgtgttatgttggctaagtgtttgtgaatgtgggtttgaaaccaacggtcatagttgaaatcctcattttgtgcattgttttagcttttttaccatttaaatgtgaggaggcacgctaactatggaaaaaagtgctttatacagtagacattatttttatatttctttttctcttttttcttctcttctcttgttcattcacgtaaaagttaggttttctatttatttactttcccgcatctcgtagtgtttctattttattatcccccctccctcctatcttttgttcgtcttttttatttttagttatttattttgttcatccttttaatttatttgttttgtattgctctctgcacatcaggctgaggcgaaacctgcgaacctactgtatattca

SEQ ID NO: 5703 - DNA, 1000 bp, Zea mays
  Intron number 1 from transcript GRMZM2G171752_T01 (locus G RMZM2G171752) derived from phytozome v7.0 (chr-ID 9; pos 5 454140 to 5455139)
cgcctcggccccggccgtgacaccttcatctacatgtgcgtaagcctctctgctttcttttggccggatttgttgcgtgggctctgcttttttttaggtatgcgtagccagccaatgtttctgctgttggtcgaatctctttcagcctgtcgatctgctgcttgttctttccctcgctccaagatcgtttccgcgcaactgctttgatctcggtgcttctttggcgcaggatatttttgggtgatctggcttccttttgttttagaggaactatgtgcgattagtttatatccatttttgcctgaaaaaaagaaaatgagataaaaaaattttgatcgcattgcctatgtctccttgcctgaggaatattctgcgagtttatcgtgttagattctctctcttttttttctttgctgttacaaatgcttggtgatgcatgatgatcctatatatacggatgccagtttgaacgggccaagtggacagaacgaaaatgaaacgaacaagttgattgagaggaaaacaagagccatctgccccttgggttgctggagaatcactgatgcacttttgtattagtaatatctcttgtccattgctttcctcctcttaatatgagtgaaagagaactcatttctcttagagagagaaacgaaaaagaatcttttgttttcctcttctccgagtggttcagttcctgagcaagtggcgttgctcagtaaccgtaaagtccataaccaacctcgacatgcgttctgttcatggacatgtgcataggtctccaacataacacttgtccaacactcaaagatctgccgccccctctattttgttagcagaaagattgttagttagcaaaaatacaaatgcctctcatgcatccaggaccagctcagatacaaacttatcgtgtactcgtcagccatcattaggattaaacttttttttattgtctgcgcatgcaggggtgaggtggccttctgcagccaggagtgtaggc

SEQ ID NO: 5704 - DNA, 663 bp, Zea mays
  Intron number 1 from transcript GRMZM2G170890_T03 (locus G RMZM2G170890) derived from phytozome v7.0 (chr-ID 9; pos 1 28653815 to 128654477)
cttgaaggtgatatgtatatcctgtttgtctccagcagcatcaatagttggacttttctttcaataacaaaaattatggcttgagaaacattgtcggggctcttcttctgcccctctcaaaatacataaatataatatggcccgataaatttactcagtatttgattgttatttccacgaaaaagtgtgattgagttggacctcacgttttgattagcgattgacttggacctcatcttttaactagtgtgcttatgaacttagaacttgccatcatcgttagcatgttgagaaaggtgtggtggtacaaggaaatgactacatgccataaggcgtgccttgtttgacttcctactcccacttctctgaagaaacccagttaacactttcatgaatgtggggttacattgctgatgttgaaacctgttaaatttagaggacctagagtacagcatagttaaaaagaatgaaaaccgctcttcttttcaatctagaccagtcccatcctaggctacttgacatcgaacctttcacaattaacttaattaacttcaataagtcaatattgttcactgaagcgtatttctttgccgttgtccccatagctcatgatgttatctgttgccagcttcattggacaggtctagcagcccagaggaaaca

SEQ ID NO: 5705 - DNA, 759 bp, Zea mays
  Intron number 1 from transcript GRMZM2G412986_T02 (locus G RMZM2G412986) derived from phytozome v7.0 (chr-ID 9; pos 4 9015287 to 49016045)
tctttcttcccagttcggttcacgaactgccattggttagtactataccgtgagcttggtgttcgcgagcaaggttttccttttcttgtgttgtataattcttcaaattaaagctggagtatatatttaacaactcccaatccgcagccagtacgttcttgtctccatggcagcaaagccatagtgcttttcgtgttttcttttattctctctttcctttttgtttataaaggaagacaactgctttaatttgttcctcgttttgtttaatttcgtccgctagtagtcctctgtgcttctttgaccatgctacgctcggtgacgtatttgttctaccttcctttgacattcctatggcaaatgattcggaaaataaaaactcctagcagctaacaatcacgaatcaaacaaaacaaccgtatcgaaatatatacatgcatgtgggatgacaggatgtcgttgaccggcagctgtttattatttaatttgtcttctcgacctttgctggcatagcaacgagttgtgatttgttttggagccataaatatactacgtacgtacgtacatgctcagctcggacaaattatatacagtttcaaaataaaatttagcttttagagttgtttaaaattatatgaagttgagaattggtttattttgagatgaaggtatatatatgatcattaatacataaaaccagttctttcttggtacacgcatgcaggtgtcctgcagtctttgtctgccgtgcgtactgat

SEQ ID NO: 5706 - DNA, 800 bp, Zea mays
  Intron number 2 from transcript GRMZM2G007957_T02 (locus G RMZM2G007957) derived from phytozome v7.0 (chr-ID 9; pos 1 4907992 to 14908791 reverse strand)
tggtgagtttcatatttgcagcagcatatgttgattaatttcttgataaagcatttagatatcagttattagagcatcttcaatagtcccctaaaaaagtcactaaaattaatttaggttgttattagcaaaaaatcatgctccaacagttacttaaatgagattcccaaatataccagctttctaaatgtctctatttagtcctcggacttagggagctgtttggaactcccaatagccaattttgtgtgtcaatcacaacgtaaaatcacttgtttgccatcgagttcgcaccgtgtacaattaatgcactttgaataatttgagctgtggaaagaatgattttatcatcctcgttgataagtctaaagatacccatccaaaaaaaatagagaaaaatgaccgactgtaattcatgcgaataaaaatagtaatgaagagaagaataatgattattaaattttaccgtacaaataaaactaactttaaagctgcaagtattaattagaaaaaagttgagccaatgtaatttgaaaatatttagcaacctaagaatttggaaatgttggaggctagagtttttttttttgtgttcccaatatatatttaccaactcgctaaatctgagtgtagggagcattttctagggaactaatggagatactcttaggcttgtaaaaatcttcaaagagctataaccttgttgttatgctgacatggacaagaattcttataacatataagactgtgctcagttctttatttgcttttggtgtaggatccgaaggcagagaatccta

SEQ ID NO: 5707 - DNA, 644 bp, Zea mays
  Intron number 1 from transcript GRMZM2G083822_T01 (locus G RMZM2G083822) derived from phytozome v7.0 (chr-ID 2; pos 1 06404956 to 106405599 reverse strand)
gggaaaggtatacttctgaatattctggctttacccatatcatccctaaagaggtggcaatggttactagagcttctttatagtctgattcagacataatggaaagatatgccatgaacaaggtcatcagaaatggtaaataaaacagatggaattttctgatacctaatcatatacatatttaggcacatgacaatcttcttttcaccatcaaatacttaacagtcgccagaaggcactttaaagcttataaagaattggtaaaaatcatactgtggaacatgtatcaatagaataacattgaaacaagaaagtaactctttgaatcttgaagaccatgaaaaaacttcttttcaggcctcttatattctctttggccaccgtatcttttttctgttcatattctggtcctggcatgagttaggtgtttttttgtagcaacaaattaatctatgaacatgctggttttatttacataaatcttgtgctgcatcaaagaatttggtttattcacggtaaaatatgattctatatgatctgggatgtacatgaaatctatagcgtcctcaatacatgttttcataatctcacagtagtatacatttacaggaagaagggcgagcccatcaagctcgtcttcaccg

SEQ ID NO: 5708 - DNA, 949 bp, Zea mays
  Intron number 3 from transcript GRMZM2G064563_T02 (locus G RMZM2G064563) derived from phytozome v7.0 (chr-ID 9; pos 1 54339266 to 154340214 reverse strand)
ccttcgagtcctggctcgtcgccgagcacaacaaggtaatccattgccattgccattgccttgcccccacagatctgcggcttgtctctctctccatcgccgaattactgctgctctgcctttgcctttaacccaaagtttttctttgcctgcgcctctctccggaaggcacgtagtagtgtagtacaagttgttgcttgcttttcccaatccttgtcgtgcataaattactatagagggagcaccatttggattagatccattcgtcacatgcctgtcgttgaagccagctaagcgtattggatcttggatgtttgactgctaagtgcattaccgcacttattataatgagctgactgacgtacgatttcaaaaaaaaatgaacattgaactgacatgagtagcttggagtttcgagaacataaagatgtccatgttctcatgtttgattgccaagcccagtgaaatgtggctttttcagggtctggaaagactgaggaaaatcttgctggatgcaagctgaaatccaccctgtgtttggtttctgctacttgtgtcggtggatcaggtggttgacacctgacatggccaagacggtgagcatttaacaagcatggcccaatcttacggatgctcttattgagatttgtccttttattcggccatgtccttttattcgcagacaataataaattgtcaatataatccaaaggatctactgtgatacaaagtgccatgctcttccacttgcggcaaaagctttatcaatactgcatgatcttacatttgtgaattctggggatggatggacacattgcatcttgttggtttgtacagacgtctttttttttacacaaacagaagggagggccctactgaatctgaatatcaacctttctttcctatttttacagagaggctttgacccgcagtggctgtccataacatt

SEQ ID NO: 5709 - DNA, 1004 bp, Zea mays
  Intron number 2 from transcript GRMZM2G038238_T01 (locus G RMZM2G038238) derived from phytozome v7.0 (chr-ID 9; pos 5 7722134 to 57723137 reverse strand)
acgtgagccccgtcactatccttgcaaattaatttggtgaatggatgattagatgttcgtgtcggtgatgctctcatgattaccaagtatggttttataggttcgatgttgtgattttggggaactaaaatattgcgtaggatgagtttaaaatttatatcgattatccgacaggtcctattagtcttgtgtgctgattgtgttgaggtgttgaagtcaatgatttgctttaggagtcacccaatccatattagtggtaaaatatgcaagtgagcctcttctggggtaagttatatatagagagcatgatcatgtgaaatttgtgtcttaatcgtgattggttatcacctatcactcataaaaatactagtccaaaactgaatgtttccatatagtgttaaaataatatctattatctaattaaaagtagaactagtaaataattagaaaagattgagttcatgtatgtttcttggaaagcttggattgtgctttgatgtaactagaaatttctatgactaagtatgataatgtagggctgagtagtagtggtcctcctcataatcttgtttaggtaatcaatttaaatctgattctacgattaatgtgacaatggcaacatgatcatttgcttcaaagagcgatgtatgcttgtattgatgaataaatctcctattaacatgttttgattgaagtactttggttgatgtctaggatactcaggttttatgtttcttcagtcagatatcatacacgagtacaaatgagattaatggtaaatgcataaggatagagtgatgtctggttattgtggtacaatattgttaacttacttcacgctgtataaatatatacaatgcagttttagccgagtcctgtatctgaacaagacatgccttacaacaaattatttattgttttgtcatgctacctgattgttgttcctttttctccctttctaaaatctagattggataggagctccgaacgcgagccatagacgg

SEQ ID NO: 5710 - DNA, 839 bp, Zea mays
  Intron number 3 from transcript GRMZM2G464401_T01 (locus G RMZM2G464401) derived from phytozome v7.0 (chr-ID 8; pos 7 7431114 to 77431952)
aagaagaagaaaaggaacctgaggataaggtatatttctggtttgtactaagatgctcttgctaccatattccgcgttgcaatgtgtatggttgtagtatgcctagcacattctgtaagggtgatggtagcaccctttaacatgcctagcacctcttgtgattttgggtactgtgacacttacaatgttcttaacatttgtttatatatatggaaaaatgtgtagtagactggtggaaatattttgtgattcttttagtttcattcatgtcaatccttgctcggtagtatagttatttattctagaaccttttgctttaaaattagtgctgctgtgccaacatggggcgcttcttggtgattgcattatttttgtatttagagtctcttctgcttttcgatccattactttttgctcttctctgccaaatgcaatggccatatattagagtgtatgctttcacatcagttttccagttatgtgagattcatgttgtatctcggatattgtactagcacctaactttgactatggtgtgccattgactcgctgttttcaatgtttctggatatgaccaaccgtagcacacacaaaagaaatggattgttgatattcattttcactcataccagttcatgatttgatgcatcagatgtgatgtgatgccacttaatattgaatgaactgtttttgttgcacagttgatatatctagagaaaaaaggatgctttgatcaatccagaacctgcatacttgctggaattaagttgggatgttttttttggcatcaaaataaagtagtctgtggaatgatgtttgctctgatcatgacgcaggag

SEQ ID NO: 5711 - DNA, 793 bp, Zea mays
  Intron number 1 from transcript GRMZM2G052434_T01 (locus G RMZM2G052434) derived from phytozome v7.0 (chr-ID 2; pos 1 98930085 to 198930877 reverse strand)
ccaccgtctggctcgccttcgacgtccaatcacaggtaggtgggcgcgccctctggcctcctccctccgcatgagatcgcggcttctccccgcatcctcagcgatcgaggggagactaaagatcgtccgccttccccggcgcgatccctcccctccgcttcgtaatgcgattgcccgcctagatctcgcgttttgtcgattagcgggccaccggtcgatcgcttgatcggatcgcaagtaccgctgccacctcgcgcgcgccctgccctgccctgcaatcgggccccacgcgaggggaatgggcgcgggattgtgattgcgacggggctgtccgacactcactcggattttataggcttcatttcactagactagggattcggtttgtcgtttcttgccccatctgggagtttggttcatccgtttgccgctgccattgggaagagaaagcttttaactcttccgttcccaagcaaccagaatcaggtgggttcaggtctggagggaaacaatgccaaattaaagttttcatctatttcactagccgtacaatacaaaaataaacccagttgccagtaccgatcttttaatgtccttttctcatagtaataatgtgccttacgtttaactataaccatgattaactataaccgtgattgtaattattgctctggatactctggtgtctttgattagagttatgaaattggatgaaaaaaagaacattgttttcacaaatggtactctcctttctgcagagatacgtggccctgaagatccaaaagagtgcgcc

SEQ ID NO: 5712 - DNA, 744 bp, Zea mays
  Intron number 1 from transcript GRMZM2G063988_T02 (locus G RMZM2G063988) derived from phytozome v7.0 (chr-ID 8; pos 8 8669268 to 88670011)
aggtgatcttcgaggaggaggaagatgatggacaggcaacgtgccctgaggagccctcacctgtcgctggcggcatggagggcggcagggaatcctcatcgttgtactgacggtacgacatacaacaggtatgtactgtctttgattgtgcttctgtttacaggtagttttgtcagttcacagtaccctgctccactctgatgaaaattgtattactcttctttaaaatatggtgtttgctttgctcaagaccatatcctagaagtacacatttgcttatgctttagaaaatcaatcagtgcttcatgtatttgattgtgctagtacttggcataaaaggatagtgctatttgtaagctaatctcaaaggagtatcaaaaaacaagtgattaaacagcaaaaacaatatagtaatataagcacaacctggcattcctctttcatagaagttcttattttcatgtgtaagttttgtatcattgtcgtgcgttataaaccatgcttttccaaactcagtcctatggctttctgagaactatcatgtccttgaattgttgatcagagagggtagcttgatagtaccaatgtcttatcaccgttaaactattgttatatagaatacaaataacaattttcttctacattatgtacaactaactactttctttagatactactaacacatatagtttgaattatttattccactattatggtctctttttttgtagaaaactggtagag

SEQ ID NO: 5713 - DNA, 693 bp, Zea mays
  Intron number 2 from transcript GRMZM5G879278_T04 (locus G RMZM5G879278) derived from phytozome v7.0 (chr-ID 2; pos 2 12407202 to 212407894 reverse strand)
gtgacggaggaggaggccgagagcctcaacaagaggtgagcttccgggcgtttgcccggccatattctcttgccagggtgggggtgggattttgtgttctgttcttattctgttgcctgatgacgaccttctggccttggcgaccagatctcccgagatttacggcacaactttgggcactgttatttcttttgtatgtgccgttgttgatctgtgctgctgtgggtggagaaattcgttggatttgaggtttgctgagatttgcgcgccaaagtcttaattctgttcttttagagtttctttctcggttctgctctataggctcctgaaaaagttttgctagtagtattaccgtaatgtgactatggtttagctgttcatgtaattgccatctcaccaactatgttggagtatcgaaaactgatcgcatccttcaaaattttcagctaataaggtatgctgaagacgagttgctaaacatagtttcgttcaagatcacttgcactgtttaaacaactaatacggctctagtgcacaatcgatgaatttgtgttggtcacaagtctcctgatttgtccatgttttgtcaagttctgtatatcgtcatagtttcattgattattaagatttcagattagtacacggagggagctgtggctcaccaagccgttccttttcccccttcaggaaacc

SEQ ID NO: 5714 - DNA, 588 bp, Zea mays
  Intron number 1 from transcript GRMZM2G129196_T02 (locus G RMZM2G129196) derived from phytozome v7.0 (chr-ID 9; pos 3 7629574 to 37630161 reverse strand)
acagaggacgcacggcgtgtgtttccttgccctcggttgtaaggctgcaccaaatctgggccatgttttcacttgtctgagtactgctgcatttcatagcagtttccttatactttagttcaagtaaccttgtactagttcttattgtttctgtagttagcagatgtatagttcctctgatttttgtaactagatattcatagcagtttccatatacattattttacatagcatcctgttaggtgtttttcagaaactgcattgcagacacattgtccatagttgtgggatacttggagctagtggtagtaatgtcaacttttacatgacttgtttttatacgatgtctaaatacttgcagacacattgtactttgtttgaagttttagagatgttagtaaaacaatttttcctcattgagttgggctctgtttcagactccaagtgtttattaaatcaagtctgttgataaattcttttctatgttggccattgtatggattaatgctatgttttactgaactccatttacatttctagaccaactaattacacatgataagtttttattttggtatgccagcggac

SEQ ID NO: 5715 - DNA, 513 bp, Zea mays
  Intron number 4 from transcript GRMZM5G807767_T04 (locus G RMZM5G807767) derived from phytozome v7.0 (chr-ID 8; pos 7 6494530 to 76495042)
ttatcgagtcaacagatccagaggtaggtggatcaaatcttttgttgcaaagagaaaactgatctcttaaaattccgtcactagtttctattgaatgttcagcgaattagttaatagctttgtcacgctaatcattttgttaaccagttgttggttctcctatatttattttaggattcattacataacagccatctaattgacttgtgttgaagttgtatgggtgcaatttagcattcaatgttcatatagtacatttgagtttccatacagctaggatctgtgtaattgagaatttgagactgcagagcaatttatgtgcacattccatccatatggttgaagttatcgacccataagctcacagttgcattagagaggagtgataccactttcaaaaactcaatcatctgtcttttcttcaacaaatattaaagcgccaataaatgatctatgctggaagctgatgtaatttgtattactcttgcagacagattgggatctaagattagc

SEQ ID NO: 5716 - DNA, 944 bp, Zea mays
  Intron number 3 from transcript GRMZM2G412254_T01 (locus G RMZM2G412254) derived from phytozome v7.0 (chr-ID 9; pos 1 24271202 to 124272145 reverse strand)
ttggttccacggttaaggtctgtggtcaatcgatgatacacagaatcttcctcttgacgtaacaactcatacttctcctttaccttctctatttcttggttgcactctgtttgaagttgtgatttctgtccgcaagaaattgtgcagagaaggaagaaatgaaaagtctcacggttagaaaatttcaatctaatgtaaggataaaacatctatatagaagtaaatatgcggcaaaccttctgttcatggtttttacaaagcacgacgttgcaatatttcagtttttcaagctcattcattagtggttcgttactagataatagacctgcaggtgtcaatgtagatagttggcctagcagctcaggaaccggtgtcgtatttggctgaagacctatttgaattctctcattagggtgtgtcctcaatggtgagatatgctgagctaaggttgatggccacgtttcaggctgcaagttctgagctggaatggtgctaaaaatgcctgctccttctgcttccgcaatttgatcctgcaattgagatgatgactgcattctggactgcaaatctgaagctgacaacataccccaagtacctacctcttctgcatgtggatcacatgaaggttccacactctgcagaacagttgtactttgtgtcacaggcatgccagacagattagttcttttttctatgtgctatctcattcatgatttccttggaactttttttgttcattcttccttgttcttacatgcgaagtaagtgaacttttaaacaaagaaagacaaatagaaaatgttttgaatatacacttctgaacctaacaccttggaattgtgtatactgatagatttgcatgttcttatcatgtagcattgcaagtaactaacatgacaatcttacgattcacccccatgtttgtctgttggacagatattcag

SEQ ID NO: 5717 - DNA, 680 bp, Zea mays
  Intron number 1 from transcript GRMZM5G857986_T01 (locus G RMZM5G857986) derived from phytozome v7.0 (chr-ID 8; pos 3 4664768 to 34665447)
tcgtaggtggttcacgccgacccacgagcctggaggtaggcatgcctgattttgctttctgtttgcttacagtgtgatcagcacgtgatgtttcttagtctagtctcaatagtcgttttatcatagttttatgctaagtaaataagctaatatagcgtattattaataaagagagataagatacatatttatatgataaaataagttgtgtaaggataaaacttatctactatttgcagtactctttataaatcttataaacagtgacataaattctcactgagattggacttaccataactggatacacgttccaccgtgtcacgtcggcattttatgcgttcaaaattataataatgtactccctatgtttcaagatactagtcgttctaaacttttttttgtccatattcaattaatgataatgaatttagacacgtatataaaactataaaacgcatatatcaaatactatatgaatctacgaacactctaaaataaatactataaaagtatattgggtaaaacagaaaatttcggtcaaagtgtgattctgaagaccggatcgagtcaaatcttatattgtagtttgtccgccatggaagcagtttttattatgtatctcgaattagattttgtgatgaactgatgagacttctttggcctttcagaaatcttgt

SEQ ID NO: 5718 - DNA, 971 bp, Zea mays
  Intron number 1 from transcript GRMZM2G146761_T01 (locus G RMZM2G146761) derived from phytozome v7.0 (chr-ID 2; pos 1 99181246 to 199182216 reverse strand)
cgccgatctcttcgccagcgaagagcgtccatcaggtattcttcccatccccctctattccctgtctgctgtgcgagaccgagttcccaaatctaacctcaggctatatggctatgcatactaacttctacaaccaaaaaacaatatagggtttacatggaccggcccctggatgtgttacattgtaatcgataaaagtgtagctaggtgcgtgcacatatcctgcaatagacattcttggcccagttgtgttagctgatctcccccagtagttgcgttgttctatctgatttctgagttctgcagatgtagccattccgtgctcctaattagggtttgttcgttttgctttcaatccatgtggattgggtggttttaaatccccaacaagtcaaaatctttcatcatttttctaatccggataggaacaaccgaacaaggcctagattgtgtaaagacataacacatgagggtatttcttatgatgctggattaaaagtccacagtttgagaaagttcaattccatctttttgcacattcgtgccaaagctttcttatgcatatttgtggtgctggattaattatgttgctttgttaatttgcaacatgttgaacttgctggagatccatttgtaattttttgggttatacctgaagaatttggactagaggccaaatacataacctgtacacaactatgtgggaactgactagttatttgtattctttagttgccgtttagtttatatatcctgtgataccttgcccctatgtttttccattttagctgtgttcaactgtgtggttcaagttccacataacattttgttttagtttcaggcaggtcaaacttagatgagtgctttgtggaattttagcttcacctctgcctttcgtagcttttttttgtatcaccgtcattttggttcttttaatcattattagcttattttcgtttgtaacagtaaaa

SEQ ID NO: 5719 - DNA, 816 bp, Zea mays
  Intron number 2 from transcript GRMZM2G095302_T01 (locus G RMZM2G095302) derived from phytozome v7.0 (chr-ID 9; pos 1 09313073 to 109313888)
gaaggatcttctcgcttcttcgtcagataaggaaggtgagcggcgcttcttttggtggcctggccttacttccccaacttctgtggctcacagcctctgctgtatcttttctttctccattttgatgctcgtcttgtggaaaccatcatttctgacgggtcccttctttgtaaacctggatttgatttatggctttccagattccaagcttcgaggtttgctgatgcaatttcgaagtttgaacagccgtttgcccgttttgtttatttgtgaggggatggttgatgtcaggttttgggattctggtcgaattcgaaacagtaaactaagtcccagggcgtgcggtcttttccttccgttttgtatggtggactggtagatggtcaaattctgccgaatttccaaccctaccaaagcctctgaaacggacactttcgctgtttttatttaagcgccccctttcatctccaacgcctgtgtcactctgtggtagataggaacaaaacatcagtgggggcatggggtggtgcagatgtcaattttttttgggaggtattcatatatgtatttcttgaaaacaaaacttcttcaatagagtgcgtcatgtgatagcttctggcagcacgtgcttttcaaggcaagccagacaatcggcgtatcattgtgccttgtttcttgctgtgacttgctttgcaatttgtcctgttcttgattgtagttaggtagctgttttttcttcttctttgtcacgatcatagttcagctaattatttaaaaacaagcctgtcacagcccatgctatatttgcaggagagg

SEQ ID NO: 5720 - DNA, 678 bp, Zea mays
  Intron number 3 from transcript AC191257.3_FGT002 (locus A C191257.3_FG002) derived from phytozome v7.0 (chr-ID 2; po s 226555827 to 226556504 reverse strand)
gtgaaccattggagcatgtaacaacaagcatcttgcaaggggcatgtctgcctgacctagatccaggtcgtggtgaaagaattagacgacttgctgaaattcttccagcccatcaggacatagaaaaaaacttgcacacatgtgctcatccatgcatgccaatttaaaggtgtcatatacagtgcagtgcatgggtgtttatggccatggttgtggttgtggttgcaaggcatgagcgagcaagaagccaaccatccatttaaactgtttggttgtactgcttctactatgtgttgttactactaatgaatactcatgcagatttgaagggctatcttcccattgttgttgtagtagtagtattgtattagtttgtttatcttttgttttgatctgggtcttaatttgccttgatatgtgcaaggcctacagttgaatgcaatgcgagcaacagctcagttatgtgtgtgtgatgttgaagggatctatcctatgctcaagcataagaagcataattttgttagacattgaatggagaactggctactctatccgttccaaattatatatacttcaagttgtacatgataatcaggtggcaaaagaatgttaactcaattttttctatgttttcttttttcaggtggcagcaaattttgatagacaaccttgttggat

SEQ ID NO: 5721 - DNA, 595 bp, Zea mays
  Intron number 2 from transcript GRMZM2G007801_T01 (locus G RMZM2G007801) derived from phytozome v7.0 (chr-ID 9; pos 1 5915790 to 15916384)
acaggtatcagggataaacttttgacttcagtagctacctgtagcagaaattctgtagcttgcttatctgttgcatgttggttctttacactgtttttctgagcttgtagttattctcgtgttcactccatattggatagtaaattggcttaacatttttgtccgaagacataaaactggggtgccattacaaatgttcttctttcaagtgaaactgtgtttttcgtttttacatgcagtaaaggctgtaaggctgtagacttatataatgaatcttcttggtgatagaactaatgttacatatgattgcttctgtactataatttcgcttccatactagagttctgttgtctcagtttgttcgactagccatagtctcaggaattgcacatacttgtttgttaatgcatgtgaagatggcttctatatgcatctcgtagtattctttgcacaggatctgtatgctctacatgatgaaaactgaaaaacataacaaaaagtgttagtttaacgattctttctttaagcagttgatatgtcaagttttgttactcatgttatgcatattgttcagggcacttgacatctaagagtg

SEQ ID NO: 5722 - DNA, 661 bp, Zea mays
  Intron number 1 from transcript AC191735.3_FGT014 (locus A C191735.3_FG014) derived from phytozome v7.0 (chr-ID 7; po s 149990794 to 149991454 reverse strand)
atagtgaaggttattggattactaatttgcaacaagtaaagagcgaaaggataatacaagtagaatccttagctaaactttggcgcaaccatgttcagtgcttccacgcacagtggacaagagttggagttcaggaactaaataacccatttgggtattttgttcagatcattagggtattttgcatgataataaccatgttattgtacttgaaaaatacagaagaataagtagcccctacccccccacaaaatagagatataacaacacaaagctattgtcatgcctggacggacatactagagacatcgacatagaacagctcaagactggaggtccaagcaaacacgttcagttttgtggctaaaagaacaaaaggacttgagaaagaaatcaaagcaacaaaccttgaaagtatgctcatcctaacaagggaagcaacaccttgcatcagctggttcaaagtgtgtcacagtcatgtttttcctctccccattaagctcatgcacactacaaacagaaggttaagttgtgaatatgtttcttgatttacagaaaataaaacaggtcgatccattggacacaaactgtagagacatctaaaacatccccataaaatgaaacaggtcgattcagtttgcatatcgacttgaagtgagac

SEQ ID NO: 5723 - DNA, 828 bp, Zea mays
  Intron number 4 from transcript GRMZM2G056166_T02 (locus G RMZM2G056166) derived from phytozome v7.0 (chr-ID 9; pos 9 0837809 to 90838636)
gttgccaaggagaccccatcacttgaggactcaaagtaagctgcttgtttctttgttttacacttttgatcctgtgttagtgtgttgcttcatggcttctgtttctcatttggattctgccattctggacttaaaatcggtgctctaagcatccaattaagccaggcctactaattactcaaattgtaaggaactgatcctagctcagttggttgtcggtgtggacatatgcccagaccacctaagtcaagtcttcgttggggtgaatttgtgtgtctatttcttaattaaaaagacaactagttccttctaggttggtcgagttttttgattacccagattgccttgagtgtgaaaattctatgaattactggcacaactatgtttgctacatttttttggtagcataagagtataggtatagcatgatttaatgatttttaaagtgtctgttctgttaaatatgcaaaagagtgtttcctccttgggtccatcttatttatttgaacattcattgttgtttgtgccacaaacattttttagttacaaagtattttttaatttgttctttgcatttaccattttggaaactatgtttgctttggcttccatcttgtgataattgaaactgcactgtgaaaccaaccttaacattagtttctacacatattttttttcaaccaagtcatatcctaaatacttttttctcgtaaatttatctcttacctagcacacttagatataaaagagtttcttgcaatataaatatataatgtgcttcattcaaatacagtgagaagaaaaaaactcagaaggcatcaaaccaac

SEQ ID NO: 5724 - DNA, 715 bp, Zea mays
  Intron number 2 from transcript GRMZM2G445689_T01 (locus G RMZM2G445689) derived from phytozome v7.0 (chr-ID 9; pos 1 26411631 to 126412345)
aggcggaggaggaaacagaagagcttacaaaccaggttagctagctcatgatcctataactcagtacctcatgtgttagctagctcatcaggatataagttgacgggacctggtctaggcagagttgtttgcatgtttttgtgcattacacatactagcccttgcatctcctatttgtttctttaatgggaagtggactgaagttatgtctgatgatgctcagtgaagtaaattcagttcttctgctattttgatttgcttttacatgtgtttcagttacagcccgctactacgtttgtctgatgatgctcagtccagattgggagtaattttgcttgatcatgtgcataatgcatgattggagttggtgcaaatgtatatcttcagtcagcttgtactgcttgctcacatacttccttcttgtccttattcacagctgtcgaagtgtcataattcctaaatatgctatttcttaatatattgattgttctatctctatcttttattttctctttcaaggactgaagtaatacgttaagtggatctgttccacataatcctgataacctatccaatcttacatcattacaagtgttattatttgggaaaatccatctaattgttcaatcaccatctcgtgtgttcaataacctaattctttctctctcttttttaatcaggcattgttatacaggctatctggggattacaatcc

SEQ ID NO: 5725 - DNA, 661 bp, Zea mays
  Intron number 2 from transcript GRMZM2G063511_T02 (locus G RMZM2G063511) derived from phytozome v7.0 (chr-ID 8; pos 8 1161202 to 81161862)
ctaccgaggtgaggtcaagcgatttctgggtcgctgtgatttttgccacatctcttatttgaatccgtgaatctcttcaatttgattatgtctgttctgctctggctgagtagttacgtgctagtgtctaagttgtgtgtttaattggtgtaaattgattgttcaatggtcgtttggattacacgaacagttatctgtttatcttttgctgttttttgtttgtatatgtatgttgtatttggttgccatttgcaaccttccagtttagcttccataggaataatttggttattttttcctatttaaaacaaagtgatacagcagtatagggagcaaagaattgttgttgttgttggattccaagaaacgcgaagattctcacgacgcgaagattctcgcgattatttgattctcgcttattagtacaacaggtgaactgtcgattttgtgagaagcgaaaataatctaggcgtttggtgggattctcacttattttcatccataagcggattataagtgaaaccaaacacgccccttattttatcaacatgtggtggagtatgcaagtctgatttaaatgtcttcttatggactatggttgtgaaatatgtatttgtcttctgcagccactaccttgacaagctggcatctgctggttaca

SEQ ID NO: 5726 - DNA, 422 bp, Zea mays
  Intron number 5 from transcript GRMZM2G063511_T02 (locus G RMZM2G063511) derived from phytozome v7.0 (chr-ID 8; pos 8 1162699 to 81163120)
tgctggcaattatcacgacttgcattgctcaaattgtatcctttcagcagcagctcatatttattttccacaaaatgaagtttcagtacctaataatgttgtctttctttagtatgatttacacatattttagacggcatctcctattttcatgtggctaccttcgttttctagtgttctacaaggcaaagaatatctagtttttgttcacatcaaaacatgatatcaaacctgccatcatttttctttacactgctctcctataaataagcagaaggttgtcatgttttgacacaagaacttgccagtctcgtattttttgtagtaacacttggtgtgttttcctcctgctgcatataactcttaatgcatttaagtttctgtttttttgtctgttcctgtaatccttgaccgttcatcag

SEQ ID NO: 5727 - DNA, 907 bp, Zea mays
  Intron number 1 from transcript GRMZM2G539821_T01 (locus G RMZM2G539821) derived from phytozome v7.0 (chr-ID 2; pos 1 2568853 to 12569759 reverse strand)
aggagctatcagtacgaatacaggggtctcgccgggtaatcttaaatacttgggatttttggatttagttattcttatatacttatgtgcagacagtattgttgattgtaccttctcactatctactgttttatctccatatgaatcatcatcagtgcctcatgcatcatatgctactgagagactgaaaaaatatctttgttcccctgtgctagagaacatgtattggcaggctttcacttcctatcacgaaccattgttgagtaggtcggactgataactagagtttcttcttcagggttccgttgtattgttttgctcttatcttatcttgggtggtgtggcaaagaatttgttgttgtaacggttgatgcagctagagttggcagcgacattttctgtaagaccacacaacaagacacttaattaaatatattcccctgtagcggttgatggaactatagttcataactggtttatgttagagtggacacactaaccagttcaactcaaaagcttaagttgatgggagaaggtagccaatccatttatacacctcaacacacccactcacgtgcaaccagagagaaaggcgcaaatgcagccagagagaaatgcgcaaacatggaaataaatgggtggaggcacaaataaagcctctaccaggattcgatttcaagacctctggctttgatatcatgttagagtggacgcactaaccagttcaacccaaaaacttaagttaatgagagaaagtagtcaatccacttatacacctcaacagtacatatagataccgtgttgccaagagttaattaaatatgaattggctttatatttttgatttttggaagaaaagagtgcatccttataattgatttttacttcttggagattagtagtgcaa

SEQ ID NO: 5728 - DNA, 931 bp, Zea mays
  Intron number 2 from transcript GRMZM2G047104_T03 (locus G RMZM2G047104) derived from phytozome v7.0 (chr-ID 9; pos 4 8746213 to 48747143)
ttcatatttgggaccctgttctttgttacaaggtaggtagttttgagatcgacggtagttagtttgcactatctcactgtgcattcaatagtatacactttatatgcctatatcaaaagtgattttcaaagttagtggattcttttatacactataacattttagactatactccctccattaaaacagttaataggtttagttttgtactttatgctaaatcaaacttatgtaactaacttttatctgaggttatagaaaaccaattagaatatacaacactggataatatatgcactattaaggcatatcttatgatgcttttaataaaactagtataattgttatagttgttcgtattttttctatatatttattagaaaacaactatacattaaaggttgactatggaagatgtaataattgagtggaggtgtcattgaaggaacagaagagtgaagagatgaacatactgtgggaaattgataagctagtgcgacactgatatgagttaacattttttaatacttctgattgagggctgggtttcattgttcatacagtgcctgtactagaattgaattctgtagaggctaagaatttatattcttgggcttcgtttaattttaatgtcagcaagctctaaacagtttttaaaacaaacatataaaacaaataattcacaactaaaaaggaacttctagaaaaatactgtccatcatatataactgatttgaataaggcaatcctttttactattggttttgtttatgtaacattgttaaaggttcaacaacatagaaataattcatttgtcttcatattttattgttcagtaattctatctcctaccatggtagtgttgcccctgatgaatatatacttgtgttctaaactgttcaggtaagtgaacagagtggtctctattttg

SEQ ID NO: 5729 - DNA, 1035 bp, Zea mays
  Intron number 1 from transcript GRMZM2G393146_T04 (locus G RMZM2G393146) derived from phytozome v7.0 (chr-ID 9; pos 2 6478915 to 26479949)
cccccctcccctgtcgtagtctcgtgtctgactgacggagactaattcggaaccgacgcaagggtttcgggccgccggcgccgtagtgccgagggttgtcggggtatacgcctcgccatcgttggagtacgtcgccgccgtcctcgcggtgctcaggtgcggcgcggcgttcctcccgctcgacccgtcgtggccggaggagagggtctcgtgggctatctcggcgtccaacgcggcgctcgtcgtgtcttcagttgggtcgcgaggagccacgctgtttgagagcagcgcctgccctgttctgcgcttttatggtggcatccggcggcgatttcgggatggaaatggcggggatgacggggaggagcttgtctggccgtgcgagcacgagtggcaccgcaagttctgctacgtgatgttcacctctggttctaccggaaaaccgaagggtgtttgcggcactgagaaaggtaagccgtgctcttgttggggcctggttgcttgagataggcagagtgtataatctcgtgcagatattgagatgccttacccctttctcattgttgtgactttggcatcgtgaattagtaggtcccactatgtttctaattgttaggtgtcaaaccttgaaaacataaatgtactatttgtttagtcatgattgtcttatggtaacaatgtcttgttcagtcaattaactaaaagttctagtgtattgtcttgttggaccaggtacatatatgcataccagaaacttatagcatagaatatttgtgaccaacggtgaaattgtatgtcccagagcatagggtttatttgtttgcgatggcatggctacttggctaggtttgagttgagcagccaccttatgaagactttttttttgacaccatgcctaggtcttctgaatcgttttttgtggatgcaaagaaggaatcctctgtgttcagatgatgttttgttgtttaagacatctgtcagctttgttgaccatctacaggagttcctttctgcggtcttgacttgctcaacact

SEQ ID NO: 5730 - DNA, 569 bp, Zea mays
  Intron number 3 from transcript GRMZM2G080139_T02 (locus G RMZM2G080139) derived from phytozome v7.0 (chr-ID 2; pos 1 56860412 to 156860980 reverse strand)
gattatgtaagtactccgtgtcctctgatagcatattgcttttttcgtgatgaaaacacagatgtttgtctttctgaattgctttctaccttgtctagtgtgtgccttcttttgtgttttgatgtcatttttactctcatgcttgatagctcttgtttcattctctcatacttattttagcccttatggccttatataagttcatgtgtttataatggggttcccattacagtttagccttctcaaaaaaaagtctaaatacttgtgatttacacaggttatttctattgtattttctcacgccgataaagcttatcagatgtcaaatctatactttctttagctaatgcctttcttggtattcttcatatttcctagccagtgtgctactttttatacagcatatggagttcagtgtagcattgtaagcaataaccagtggagtatgagtgccagggcatataattttatcagtccactcttagatgcaatgcctaagtgaacatcaaacattattttgttggaaaatcaccatctggtttcattatttttatttttaatttgcaggt

SEQ ID NO: 5731 - DNA, 444 bp, Zea mays
  Intron number 3 from transcript GRMZM2G030284_T01 (locus G RMZM2G030284) derived from phytozome v7.0 (chr-ID 8; pos 1 51441279 to 151441722)
ttagacaggttagtttctgtgctttgaagtatcatataccatgaaagaaacaagtaacatttgagtactactgctgtactgcagaaagatattctacagaattttctctcatgatcttttttgtcattgcaactttagggctgtgatagtgtgatagctattggctagatgtgcaggttacttgtactctgctatattgaaggcttacaaaaataactgtagtgtgatctactggtaattcttaccctctgtagtgaaaaatgttagtagagtaagaacttgaatggtttaagggagtaaccgaacaaaattgtgcggtattaaggtcaggaactgcatgcattctgttatgaagactgaatgtttcagtagtgactccatcaataatttgttttctttcaaatggcagtcaaatcagaagttacaaggtttaagggaagtatt

SEQ ID NO: 5732 - DNA, 995 bp, Zea mays
  Intron number 1 from transcript GRMZM2G138782_T01 (locus G RMZM2G138782) derived from phytozome v7.0 (chr-ID 2; pos 6 820747 to 6821741)
ctctcgcgagggtccccagaccgatcttcggcgaggtacgcggttccgttccctttggttgtcagttaatcaggttgtttgttctcgtagttgtctgttatgttagattttggttcttcttaatgcaatgcccgggactgtattacgcctgcaggtctgagttagaagattggttttccgtttgagcttagtcaggacacttttgaattgatggattagctaggtagattgctgctgccttaattagttagaaatgctgctaaggctggtaattgcatatggtgtaacggtagggattctagagtttccacattttgaggttgaacaaggattttttagaatgcaatgctgtgacgctgtgacaggtgtgttgatccccttgttcacatgtctgaaaaagttccaggatctaggatgattaggggactcgagctaactgtagtgtctacttgttggctataaaagtaatatcaatcccatttcatgtttggttcaggtattcaatattgggatacttaagttcatatcataatggattattgttggtgactggagtactgatctccacaaagattattgagatgctttatttttttaatcaggaaaacctattttctgtgagagtttgaagctgttcccggctatgcctgattgttgtaatgttattggttcctgtgtagtaagcttttgatggagttatttagttgtggtacttaagttcatgtcacaatggaatgctatatcccacttggattggagtctgtgttacacatggccatgttgtttgttggttaaacctaacaagggttaacgattcttttatcttagtatgctatgaccagttttttttgtacttttgttttgatttccgcagagcaccgaatataatcctgctgtaattattttttcctactgctttcataaagtttgtctagatagtatatgttcagtggaactgacttgacatatccggtccagagtccaacatttcttaa

SEQ ID NO: 5733 - DNA, 859 bp, Zea mays
  Intron number 1 from transcript GRMZM2G028183_T04 (locus G RMZM2G028183) derived from phytozome v7.0 (chr-ID 2; pos 1 43265025 to 143265883)
cgggaggcgtctgttgccatcttcttctcctttgagtaagctcagttttcgtttctttaattttgcctaaatgcctttttttatgtgcatggaaattcctgagatgtatctatgctttctgttttcactttatcactgtatcaatatgacacgctacaatattcgatcctctttcgcaacaatattagagtaggtgtagagatcgattaaaatgagtgaactctttcaaatggcatttcccaatatgatggacaacaaattgcaaaactaagtactatatgttaggtctatatatcaagcgagtgtctttttgtagttgcactgtaccatgcctgcaaggctaccacaaagatcttaattcttcagtaacacgacctctttccattttgtgtatcgtcctttgcagtttgcactgccctataccatatgaataatgccagatttgcagttattgttctttttttgtttgcttgatgtgtatatgctaagccatgaatatatcttaatttcactacctcaatattctcaatcttgctaatcagttcatctatatgttgttgttgctatattatgaaatgttaggctatgagcttgtgcagttgtctgtttaggtttgagcaatacattaagtgttgcaaagtattaggcccattagcatgaaacattagctacactatcattttttttcttgttccttccaaggcaaggcgtatggcttgcaggttgggtatagttcttattctactctggcactgggtctgccttttcttatttcaagattcaaaatactcaataatagctaacaagtataaatcatgtttcagatatacgatactagcaacatccactttatcaacat

SEQ ID NO: 5734 - DNA, 813 bp, Zea mays
  Intron number 1 from transcript GRMZM2G153386_T03 (locus G RMZM2G153386) derived from phytozome v7.0 (chr-ID 2; pos 1 88103895 to 188104707 reverse strand)
tcctcactgggctccttagattcgccaacacgaaggtgcttccctgtttctgcttatttatctctgtaccatactagcacttattaggttgtagcttgatagtttaggtactagtcttaaattttcttgctattacagttttgttagaggtgcactatgtttaaattactgttagtataagctaataactattgagatgtgcaacaatataactaaaataagagcttaaatactgtaggaaacttaactatattggagatgagacgtaatcattttgctcactgtaaaatgttttatgcgatgtgacctaattattttggagtcttcgcttgttctgtatggttaggtatatgtgacagaggtagcagcaaggatgggagctaataatatgatttgacttctctggtgtctctatatatgtctgtacctgttcatacatacatgaagtacatacctgttcttggtatatacgactcaaaaagactaattcaattttttaaattttaggagtaataggagctaataatatccaaccatcaatccagcagaatttaataggatatgagttggtaaggaatgttgtctttcaagcaatattttcattctgttagatgtgaatccaaccttgatctgaatcaataactagttactattaccacaagttgatttaatgaaactatattagtaaacatataattataaagtgaacctgtttttatttaaatattttccatttgatatgtggcctgtcaaatacatgttcattttttcatgcttatctgactttacccttcttttcctggcagatatcaa

SEQ ID NO: 5735 - DNA, 385 bp, Zea mays
  Intron number 3 from transcript GRMZM2G324314_T03 (locus G RMZM2G324314) derived from phytozome v7.0 (chr-ID 2; pos 1 38310321 to 138310705)
tcacattgtccgtgaggttgagaagccaggatccagtatgtccacccccttcttttttattaatcaattaagctgatgacatagtccagtttgtttatatctgaaaaatgaattgtaacatgagaacgatttgatttctgaccagcagttttagtttttttatgaatttgagggcacttaactttagatgatataagccacacaactatctcttcacaggcccatagacttactcaaaacaatagatttttctgttgaatatccacaactgcttgcacccatgaatctcgagtatatggataccatttcactccattatcgtaactgctctgcctacttgatttctacagaactccataagaaggaaacttgtgaggctgttacc

SEQ ID NO: 5736 - DNA, 1060 bp, Zea mays
  Intron number 1 from transcript GRMZM2G137964_T03 (locus G RMZM2G137964) derived from phytozome v7.0 (chr-ID 2; pos 7 5256842 to 75257901)
tgaggaaaaggaagctccagtgcattggccggtgaaatgaataaaatggattttgaagaaaaggaagctccaatgcatcagccggtgaaatgaataaaatggtggtaattatggtccttgtgaaatctgagatcaacttagtcgcggtaagctcatatatattactctagatatttgatttgatttaatttagagtgtgttctgttagtcaacaaattttcgcataattagaaatacttttcctttagtgaaataaataacttaaaaaaacaattaaattgttacactagctttgaattttatggagtccatggacccaattctcaatttaatccatggtggcgttttatgttggctagagtcatattttaattatttgatggagtcaatattctgcgttaatagttaatataatcggtctatgtctgtgatcggtaaatgacatattcagatattgattagttagattaatagtcatgactaaatgtttatttttaccttggttatgattacccaaaataattaggaagcgagtaaccttgataactctatttctgtaaaaacggaggactaccggtggagaatgcgcataagcgctttagatctttggttgctaggaaagcgatttcatagaactttatgatgtatgataacgttctacttattagattatggataaataagatattttatttagttcgtgtattatgcataatagtctagaataataattataaaaactaattagtggacattgttttttagtgttttaaatctttaggatctaagtggtttacaaagttgattaatatgtttctatccttattctgaattattggtatataaaaatagtgaattaaagtttggcgagttgtttgacattggactcagttaaattaaaatagcgtggacatgcatggtatttagtaccatctcgacacctagtaatttcttttaagtggtattatgtgcctcgccatcaagtgttcagttttctactgtgttcaccttaccgtggccatgatactcgaagcagtgacacaccaagataacacgtgtt

SEQ ID NO: 5737 - DNA, 645 bp, Zea mays
  Intron number 1 from transcript GRMZM2G128518_T03 (locus G RMZM2G128518) derived from phytozome v7.0 (chr-ID 8; pos 6 891635 to 6892279)
ggggtcggttcttgcgaaacctagcttgaccgcaggtaggtagctctgttcttgttaattttgatttgaagggcatcacatcagtcaccagagacctatttgtttctttggttgatgatgttttttccttcagagatcctatgccagatttctcagtgaaacactgtcttctcccgttgtcgagatttcaggaaccagtcctagttctatatgtttcacccataaaactccattctttcccgtcgctaaattttttttcaccacatttcacgctactgcctcaagatctgtttggattaggttactgaaaccctcacgaaaaaacggcggaaatataaagaaacacgagaacgtgtttcgttttttccgtatagaaggcaacaccttttcggcaccaagcatttcctttgcttcttttccaattggaggtcaatgccgtaacgaaagaaggaaagctcgtttgcatccttttttgcgggccatcgcggtgttgataaggaaaaggcgattgccccaccagtcctgtttggatttcctccgttgttttgatttttttgtacgcgcattggttcctccacgcttgctcgctctattgtagtcatttccttccaatttagcggactcaatttctcctgatcgtcaggc

SEQ ID NO: 5738 - DNA, 469 bp, Zea mays
  Intron number 1 from transcript GRMZM2G496584_T01 (locus G RMZM2G496584) derived from phytozome v7.0 (chr-ID 2; pos 2 24562922 to 224563390 reverse strand)
taattttattttaagtatttgtaatacatctttttttaattcaataaaaaattatgttgtgtaaattttagatgttgaaataaatcagtatgaatagttaattataaaataaaaaaaactgatgtagctatgagctaaggatactgactgatatagtctatggcggggggcaagagggagatagtgcattggcacccgccttatacagagatctcatccaaaacttgaagtcaaaagcttcatggcagatttagcagaggctccacgaccactcttcaacgccactagcacaacgccaatcagaactgcaaaaaaccccagatgccaccatgccacggaaaataaacactacctaagaaaaaacaaggcaaaagcatgaagcgcatagtaattccaatctttcacctacgaggtttatactatatcagaaactaataaaccaatcagtacttgattactgctaacttat

SEQ ID NO: 5739 - DNA, 946 bp, Zea mays
  Intron number 1 from transcript GRMZM5G832248_T02 (locus G RMZM5G832248) derived from phytozome v7.0 (chr-ID 9; pos 1 52751943 to 152752888 reverse strand)
tcaggtgcatgaactagctcaactcgagtttacaaactgctgaacgatctatattgcgtggattgtttttttgattgacctttaaaattatgctagaataaggcattgcaagcaactactcacaaatttgttcttctttatcacttgtacataattataagtccattagttttaaactacatcgatcaaatcagattgctactagtgctttctacctgtacccatatgttattgatgtaagttctatgattcaataaaatcgaaaatcagtatgctagtctgctagaatgctcttaatcttaagatgttttttcacatcaatatatcctgtaaattcaggtgtcagtgtcggattcaaatacctttttttgaaatagagattagcattccactagaatatatggccacatgtgactacttatttcctgcataaaaatgtagtaagatgagcagtgatgaactgacaatgccatacgtggccacttattttttgcatccaaaatgtggagctgaactgtgtatgttttgttacagaaatgtcggtgttgttgtgctccttttgcggaagcaccgccttttactgttaacaacactcagcgttcgatcacctgtacaaacaagatatccattttcttttgagcaattctttttaaatatatggacacaaaggcaatgaaggatgttgatattgcgttaaacctctgtctgtgatattaagttgcaagagagaattttatacttattacatgctacatgttgttatccttatagctggttagcatacgtgcagaaggtggttgaacctgtactttgagaccaaatatatgttgcatactttctattctactattatttgatcttgtctttcttattgtactcttatctgttcttatggagaattctctttgcagacgtaggaaagaggaagttgctgaacctgaagttg

SEQ ID NO: 5740 - DNA, 592 bp, Zea mays
  Intron number 5 from transcript GRMZM2G124239_T01 (locus G RMZM2G124239) derived from phytozome v7.0 (chr-ID 9; pos 1 23422028 to 123422619 reverse strand)
gaaacagttctgactggattccaggtaattatacacccccgttttttgttttaatattatatgagacattcctgtacatgctggatagccaagcgagtagctacctgttgtcaaatttgggatgtgcattttttgttgttagcagttcagttattttttcttaacattgattattagttacacgaaaatctacctagtgtatgccactttacatttaacatgtcaatttgtagctataatagagaactgcagatgcagctatgcacaccaagttctgcattctctctgctgcattccatgcgttatgcaaggattgtaatttcaatttatgttatccacttatcatattcagtgatgtgctctggatgacaccttttttcgacttattaatgattcaggaatgataatttgatttaaatgtaatggcaaaaccccttttaattctagagtattcaggctttaccgattctatgtatttctgcacgtttagattttttaaaaaactggctcttctttctttactaagtcatatttcaatgttttaacttctgtggtagacagaaattggttccataagttcagagataaaggt

SEQ ID NO: 5741 - DNA, 371 bp, Zea mays
  Intron number 4 from transcript GRMZM2G124239_T01 (locus G RMZM2G124239) derived from phytozome v7.0 (chr-ID 9; pos 1 23422663 to 123423033 reverse strand)
ataacatacgccaaatcgagctggattctatccaggtgattgctttaggcattgctatatcgtccttgttaaatagttaatgccaattatgctctgggaaatcaaatgtcgatagaatatcaacctgatttattgaataattctatgttgaactgatattgtcattctcttaattaaaattttatgctgtcaccaaacaattgctcaagagtagtgaaggtgacaaggtgtagatcatggacttgggactgttgaggttctttagcgttgctgaaaaagaaatcactagtgggttacttgtcttggcattaagtcctgtcttccttttgtttgtaggattacattaaggaaagtgaaaatctagtttctct

SEQ ID NO: 5742 - DNA, 655 bp, Zea mays
  Intron number 4 from transcript GRMZM2G398736_T01 (locus G RMZM2G398736) derived from phytozome v7.0 (chr-ID 9; pos 1 5585378 to 15586032 reverse strand)
atacggtcagtagatatcttcgagatatatgtttccttcgtaaattaactgtgaaggttataaaatatgggttttctttagcttagagatctgataatctgatagctggttgtgtaagtacacgagcaatcccatcatgctggtgttactggtaagttacttgcatcggaaatatttggcactagtatttagcatgtcaaccaggcaaacttctagtaaatatcatgagaatatggtagtgatgaaatgctgaatcatgaagtgacagctttcagatttatcaccttgacatcttatcaacatgttctattggaaattgtgatcgtaatcacagtattggatgtatgctttgcactagaaaataaaattaattatgcaggagtggtgatttagtgatcaaaggggcaattgagttttagggtacgcaagaatttgctatatatctagaattctagatgcataacagaatggatgtagcgaaaaagtcaaagcggcttagaatttggaacgagagggagtactattttttttcttgagatgttgatgcattgatgctgtgttggtgtaaatgccaacacttggtgctcttgcaatctgtaacaggctgctgggagttctcagggtattagtggcggggcaggagttcagggccagt

SEQ ID NO: 5743 - DNA, 1045 bp, Zea mays
  Intron number 2 from transcript GRMZM5G845398_T01 (locus G RMZM5G845398) derived from phytozome v7.0 (chr-ID 9; pos 1 47660904 to 147661948)
taatttgctgtctaaggtgtgtatatttctccctatcttcctacagagcttcgatacattttcggattttccttcccttgaatcatctcttattatatcgtatcaatggaaaaaaatcctcaatcccaaatcggaaaatgtttccaaataaatatatgctccaccctgtcctaaattggaaatgcctctagataaacagtctttatgctccagcttgatggattgttttgttcatacagaaatttgtattgattatcaacattatggctgtattttgtaaaatgtaatggcgaggacaatgtttttggtgtattttgtagtaattgtgcagcttgatgtcctctgatttcaataccagtgcattttcatctctcctgatgtgatatacatgtgtataggggtggtaatggatcatgatctaaatgtttcttcataataagttaggaccttcaataaattttagttcaaaaatgaataagaatagagtctgatcctaatccgattttgatccttaaattttatagtgtaaaatttagagtccattaccacccctatttgtgtccaatgttctgattcatttaattgttctgtgtacggactgtttaactacagatcgtggtctatgtaacattgcgatacattctgaagtttataacttcaaattaaaccaggcttacgttgtggttttcagaaaataaaaggcagggcagtgacgtggactttgttctcagcgaacaattgttccattggctgctgaaatatgatatcaccgtttcctggctaaataagtagcttacattgtctgctcaaatctttggcaatgtattgttcattttaatggttgtagtgaccgtaaatagaaactatggattcattgcctgctctattagtgatgtgattcattgcttcatgaactaagcttaacaggcatttagtcttacatgggcacacattacatgttgatgtctaatatttactgcagaaactaatgatacattattcatcttcaggtcgagggaacaagctctgtggtgtctgagctttc

SEQ ID NO: 5744 - DNA, 678 bp, Zea mays
  Intron number 1 from transcript GRMZM2G056632_T01 (locus G RMZM2G056632) derived from phytozome v7.0 (chr-ID 2; pos 1 98455062 to 198455739 reverse strand)
ttggagaggagaatttatctgttcttggttttgaggtattaaaattgcaacacttttctcttctatattacagatattgttggacttatatcatgaattctttatttactctataatgttacttgtttttctaatgttaatgcaccaggagcgctcggtactgatggctgtggcaaatgcagctgcagtcgccgccatcactgccgagcaagctggacacagactgagaccaaagacttgatagtgagaaataatagtgaaaggcagaaaaatcttagtaaattgagaagcatttctggggtaatttcattagactaaaattggactctgaattttgcccttaaacatgcaagcagaccttaccttttctttgcagctgtgatatatatctagagctgtttgttgatgttctgagcatgatgtttgataaattccaaaatactcgtgaaattgaagcatcaaaaggtgtgcctatgtagtttcgtactgtaagagtgcaaagcatgagttgcatttctttctatttgtagcacaatcttgctcgttctgcactgaaaatgtaacaccgtattgatggtttgttttcttttttaattttcatttgtcaatgagaatccaagacaaatttatctttgtttcttaaagcatgaatcataaagttatgttgttttccagata

SEQ ID NO: 5745 - DNA, 593 bp, Zea mays
  Intron number 1 from transcript GRMZM2G302673_T01 (locus G RMZM2G302673) derived from phytozome v7.0 (chr-ID 7; pos 1 18677337 to 118677929 reverse strand)
ttccagtgcagacagtgtccaagctgcatcagaaggtaacctttgggttatatgtaactgtcaataaattttactgggtggaaattatgaaacaaaaacaccagttgtattttcttttgtgtactctctctggcccaaattagtattcgtcttagctcttgatttttatgtttatattcaaatggatgatgataaatctagacacatatacaaaacacatgcatcaattattgtatgaattcagtaaaagtctaaaatgaattttaatttgggacggagggagtatcataaagaggttaatccattttggtccatagtaaacacattgaaggagcaggttctagtgtattttaacaacaaactatctattatgtgctctatgttagcagctggcgagtttgcaccaccaatgtctgaaaaacctgaatccaatcatccaccattatcctaagaaatgtctagacagcatatgtcattgcatcatctctacttgaaatctatattattaaccacagtagaatcttcatatatgttcttaaaatgattctttcctaattcaaattatacagctgttgacctgctgaagaattaca

SEQ ID NO: 5746 - DNA, 860 bp, Zea mays
  Intron number 3 from transcript GRMZM2G034791_T01 (locus G RMZM2G034791) derived from phytozome v7.0 (chr-ID 9; pos 1 35802425 to 135803284 reverse strand)
ctaacatctgaggcatccaagcaggatttgtgaaggtaactactagattctgtcaaaaaagaagaaatgaatagtgctaatcacttaacaacctttcgaatagttgcagagcaaatacacaggctgcagagactgcacaacctgtataatctttataatgttctgtgccattcttttgagttatttttttattcagtccatgcgaaaaatgaaccataaaaacattgtgaagctcaaagaggtcataagagagaatggttttttagtttatggtatagacaattcatagcccactaaagtttatagtatttgttgtgatttgaggaacgcggtctattatctgatgaaaagcagagggaagcccttctcagagactgaaatccaaaactggtgctttcaaatatttcaaggtctgagtcacatgcattagcgtagatatttccactgcgaccttaatctgcaaccttaatcctagtgtatggttttgcatttgttttttacgttcaatgttccaatggtttatctatggttcctgtttgttgtgaaacaaattactagccccaaccatttttacatgatatttcaaacaagaaaatagttctacacgtagttcaatatttatgtctaacatatcatgtgtatttggcagaaggaactatcacttacgagcccagaaatagctgccttgcaatttttctatatgaattgcatcttaaatttgcttgaagtatacaaaaataataatgcacctgtataacagcaacgaagaattgcatcttaaatttgcttgaagtatacaaaaataataatgcacctgtataacagcaacgaacacaacgcgcgccaaggcgcgcataagt

SEQ ID NO: 5747 - DNA, 878 bp, Zea mays
  Intron number 3 from transcript GRMZM2G057243_T02 (locus G RMZM2G057243) derived from phytozome v7.0 (chr-ID 9; pos 1 52090390 to 152091267 reverse strand)
aaggtaaaaaatgacttgtttcgctcaaaacctatacattttattaggaaatgaccatttgacgttgtaacacctacttatctccatctccaaagtctgctctttttagctaaccatagtgtgacttttctctcttgattcactaagattctgaatacatactaggtgcttgtttgggtccaccatttttctatggaaatatgtgttctgaaaccagcttagattttaatgatatatccaaaggttcaaatcgatgaccatcgtcttggagtatggtattccttttggttaatttcctctgcttataagttgtcatatcttcatggtgacttattttgtgatgtcatctttgtttctttgctgctatattggtagcatgtttggatttcagagcccagtttatttttggttatggcatcaataagtagacaatagtatcatagaagtgatgtttagatcttaccatcggacagttcaaggatcctgaagtactaattcaccccctacaactttagctttgcccatcagtcctatgcgcaggaattactgttcatgcacatggatagtacctttgtattgtagcatgaaattagggatgttagaatatattttatttattaagctcccatcttatttagatttgttctgtcaagtttatagaggctgccaccctttggaaccaatcaagcaatgaagagtcagtttaactatttgagcctttcagtctaattcctctctaagccagctccacctggctgtcctccttcagtgtttaccccttacaatcaccttcctgcaaaatcatacatgcatatgattatcctctctctcaattatttgcagattggagaccttaagggattttttggattgtttat

SEQ ID NO: 5748 - DNA, 676 bp, Zea mays
  Intron number 2 from transcript GRMZM2G057243_T02 (locus G RMZM2G057243) derived from phytozome v7.0 (chr-ID 9; pos 1 52091376 to 152092051 reverse strand)
tcctgttgcggggtatcactggtattgactcttacttgatggcaacttcccttttccttagagaaactgtcgtagttactcctccacttttctataaaagcctaaaaggctaaacaccattttgcagttccaagggcatttaatcatatggattatatactgtgaccattcctatttcccaatatttaagtgtaatattttgcaactaagttcctttttattttatttatgcaggtttgatggagacgggtatgtggtacttcctgtttggcttggaataatatcatagttcgtgcagtacatcgttctgtcctgcagtgctgccacttgcatatttcattcatgtatatttgattctttacagcggcatagcattagaagaattatatcatcagaaaattctcttcatatgcagttgcagctagtgacaggaaaacataatgaagtaaatgcccactgatacatgtaactgtagatgaacaatttaagatgtaggttatgtagtttgattgttgagtgctcatcagaaaaggagaacatgaagaaacatagttataaacacgtcgatattaaaagaattaccaggatgtactgaagaaagacatgtgatgcaaaaggtcatgttaataattcatggtgtactaactgtgataccatcttcattttatctaatagg

SEQ ID NO: 5749 - DNA, 434 bp, Zea mays
  Intron number 1 from transcript GRMZM2G057243_T02 (locus G RMZM2G057243) derived from phytozome v7.0 (chr-ID 9; pos 1 52092092 to 152092525 reverse strand)
cggccccaaaccttagcgtccgcggacacctcccggtatcattttcatccttccctccctctcttcttcttcgctgaagcaactactactctcctccgtcccaaaataaatcaactctagaatcacgcaaactatctttatgttgaccaaattcatagttacttaggacactaaataagtagattatgaaaatatatttatgtctctatcctagaagttgatttattttgagacgaggtattaataataattctatttctacagcttcaaaatacttcagccctgtgtttcaacaggaaaaaataataatcctgttacacattcagattctcacgctccttgcataaacaaaccaaaacatgtgtttgctagactgttcatatcttctatcgttgtctcaccattcctttttagttatctacaggagtgcttga

SEQ ID NO: 5750 - DNA, 345 bp, Zea mays
  Intron number 2 from transcript GRMZM2G371776_T01 (locus G RMZM2G371776) derived from phytozome v7.0 (chr-ID 2; pos 4 821358 to 4821702 reverse strand)
attgattggcaactattaggtaaccatgttaaatcttgacactgaatcatgatattactgaaaaactgaaccatgtatgtgattgagcagaccaattttataccaacaaaaacccagaggatagccaaaatagataacaataggactgagctggtggtggccattcttcatccatacagtcaaattcttctttgcaaacttgcagtaaactttttttaataaaaaacagaaaaccaaaaggatccagtgcctagacacattcaggaatttcacaaaagtagtaagcataatggtctaacttacagattgttaacttcacaggtatcgcagcggacgaagccgacg

SEQ ID NO: 5751 - DNA, 960 bp, Zea mays
  Intron number 1 from transcript GRMZM2G328963_T01 (locus G RMZM2G328963) derived from phytozome v7.0 (chr-ID 2; pos 2 0531289 to 20532248)
aactgtttatttgagtaaaccatacaccagtgtttgagtttatgctcataaaatcatttatctagcagaatgcaagctaccaaatgcaagtcaagaagtaatgacaaattgacaactacgagttgtacaactattttttaccgagaagcaatggtacaccttatgaataaatactgtaaagattacaaacaagtgtaccactgaaaagtgaagtacagattcttcagtgttcgtctcgaacagcaaataagccttaaaacacacgtctaccaacattgcgaactaatcaagcaattgacaattgcataacatgtaggactagtttggcgacaagtgaattggagaaaatccatgaaggaggaaatctcctgctatataatttgaatagcagtggatttcctctctattggatctccttcaattctctggtcaaaccagctcgtaaagacaatgttcatccttactactcaaaacttgtcaagtgtccatccctacgccaccgacccaccgttcaactggcatatttagggtccatcccctatgccacccttactacagccttcaacaggaaaatagctgcgtaaccatcagcctgtcagaaacagagaatgtaaaaaattgaaccccgatttagcagttttcttccgtgcccagattattcgaattccttttcttgcttacggacagcagcagaagatcgtaacatccagggaattcaaaaaaaccctatcgcaatattccgcccccttctcttcaactgtaaactatcgttgttcccctcttcaatcactagactacggttttgggtaactactagttacagctgaaaccttatcccctccaaacaggtattgcacgagcacgagaatgtgtacaacttcaacaggacaaaaggtagtagaaacataggtaccttcgattccagagtggaaaataccgaggccgaaccagtagaggtag

SEQ ID NO: 5752 - DNA, 940 bp, Zea mays
  Intron number 1 from transcript GRMZM2G400704_T01 (locus G RMZM2G400704) derived from phytozome v7.0 (chr-ID 2; pos 1 08380404 to 108381343)
gaggtaatggtcattatctccccattctccatatttattgttcaatgtcacactaccaatgctgattgatgtgtagaagttgagatgtgcaaatttctgcagttgttttagttgaaacatactgcataaccttgtcagacatgatcacatatgaaattctgctaatccagcctaaaatatgtttcctgaaacatgattgcttttccagtgcgcctgcaacgtgtgtgagggtgataggctgttaagcattttttgtgctaatagatagtactatagtaactgtgtgcaattgtagttttctgtattggttaaatttattagacgtacattgctggttctcgcttgtcaaagtaaagttttcctggggcttatgaagtgtgatgattagatcaaattctgtatcagtagagtccttgtgtatttcctttgcgcaaactgctttgtactagtactgaactacttcatattgtttgcaggtatgtcctagtgtatttctcaattctcttcataagatttcgcgctgggattgtcactagagaaatgttagcgcttccgaagccacagttcatgctaattggtttactggaagcgctaggtgctgcttcaggcatggctgctgctggtaatcaatgatgttcctgtttcgccattagaaactcattgtttaagtttgtgatttatagcaggttcagtagttgtaaccatggtttaatatcaattatacataatcttaatatgtttctcgaggttggtccaaccacatttgaagcaaagttgtagcctcatcttctttggagtcttgatcaggtcagtgcttaagtgtcccaaacctgcttgttgttttcttcatgactcactggattctttctgcatatttcgtagcaactaatagatgattttctcaggtgaaagagaacatcaagacccagacacatcaact

SEQ ID NO: 5753 - DNA, 1021 bp, Zea mays
  Intron number 1 from transcript GRMZM2G029632_T01 (locus G RMZM2G029632) derived from phytozome v7.0 (chr-ID 2; pos 1 71232323 to 171233343 reverse strand)
ggcagccgcctgtgccgacctactcgtcgaatccggtgagcgctcggccttcctctctatcttctctgtccaagagaggcctctgacgcccgtttacttgcggattggaggagggtttccctttcgttgggttgggctgctggttttgggggtcaggaaaaggaatcccttcgccatgatatgggattggggttctattggagcccccaaacccccgaatggtagttttatcttatttgttatgggtggtggtgttcttactcttttggggatgctctacattttcactgtttgcactacactgcatcataaaaggggtagcataaacgataaccagaatgtatgaatcggtgggcactgcaaaggcatgaagcaaatttccacaaaataattgttgaatcacatagaagaaatcagacaaaaacaagagaatgaaagtcactcgaattcaactatggtatgctagctagtgcaataaaagccatgttctcaaacaggttaccttgagttatgggtaaagctatgtctaaaggaagccagtttattggaaactagcagcttgatcaagaagtgaactaactctgagatttccttttagcaagtaacaccacatgatattcgtgttagcaaatgcactttatttgaggttgctaaaactggtggggtagaccttttcgtttcctcaggtttgaatgaaactaaacacattggtagcaaaacagaagatataaatagaggactttggtagctgggtgaatgaaaaatggctttagccttatgtgcaattcttgtttggtctttttatggttgaatcctcatcatgaggtaatgcctacttgtagtctctttcatattgttgttggcattgtaagttattaggccattttactgatgtaggtttaatatgtggtgcattatgttgctttgctctgtcttttcccctttttaaaaccagcagtcttgcatcatgctatgcttaatttcttttttttttgttttggattttcagttatctaacgta

SEQ ID NO: 5754 - DNA, 643 bp, Zea mays
  Intron number 1 from transcript GRMZM2G523815_T01 (locus G RMZM2G523815) derived from phytozome v7.0 (chr-ID 7; pos 2 877936 to 2878578)
aggccatcgacgccgaacccggagccctttagtaggtgagttggataactagaaaaatcctttgagtgctaatttattttaaataggtctggttttagttattttgttctagatttgtataaagtgccttttgtacataaagggatgctaggctaatcggatatttatctttggtgcacttgtgtcatttgattctcactcaactagctgtgtacttattttgcttgcatgggccaacttttactaaaatccgtgcttgttgttatttgtgttatagcaagcgatggatccagcggtggctcggggctcgagtccccccaaccgcttctgttcccatggagcttcactaaagcctctcataatttaaaatatacataatataacgtagaagaggcttgctgcaacagtttagttcagtctctgctaaacttttttttggctccgtccctttgttaccttatgacttgcaaggtatatctaacttctttctatttctgatgtatttgtttcttttaactagcagtcaagtgctatcaataaccaggatgaattaatatcgagtaaatcgatggttatgttccatatgttttcctttcttactgtgataattattgataaaattcattattaggtcaaaaatcaa

SEQ ID NO: 5755 - DNA, 596 bp, Zea mays
  Intron number 9 from transcript GRMZM2G367206_T04 (locus G RMZM2G367206) derived from phytozome v7.0 (chr-ID 2; pos 2 33482277 to 233482872 reverse strand)
gggtggccatcataccaagcgttccttgccgaaaggtagtaacctaattccattagatttaatgtgtgggttacatatttgctacgtcaggtcagtttgagcgcatatatttctggcctgtgagcttgccatgcctagctaaagaaggaatgttgtgttggattttttctgctgctatttggtttattacattggcaatgcctttatggcatcacttaaaaataaataaaaattctgactgtcctagtgccttattcatgttatcattaatcttcactgtttatcgatgtggtgtgttttttactaaacaaactttatattatcttttgataccagtcggtgaaatgaaacactttcacatgaatgacaagttacctttttctatctgaaggcaactgttgataactttctatggcgtatgctacaatatctgctaatagtttgaagtttcatatgctatatttatttatagtttttaccataatgtataatttatttttttttagtattctgagatcatttcacctcaattttttgtcttcaattttgaagtatgtaatcatttcccttctctagcagataaagagagtaccaaa

SEQ ID NO: 5756 - DNA, 538 bp, Zea mays
  Intron number 2 from transcript GRMZM2G362088_T02 (locus G RMZM2G362088) derived from phytozome v7.0 (chr-ID 9; pos 1 52647725 to 152648262 reverse strand)
ggttgctcctcctccgtgccaggttcgcacctcctctccctcgagtcttcaaaattcgaaggttgcggtgtaggattgttgtattttctattcaattagttgccggagggaacagattcaaagtttagcactgattcaggtggggtttgttgtgcagcagttttttgccgcgaattcgctcaatccctggtgtgtttttagggttttgggctgtcctttgtagattaaattgactgattggaaatggaggttacatactcaccaccaccaaaaagaaagaccgtgtttatgaagcctggctaagtgcgtactgtggaggtggacttagttgtttctttagttaatttggggagttagttgtttctttagttaatttggggatttaatgtgacaataaggtgtcaacaaatgtgatatgtggttggggatcatacagttatagcagaagatagtgaaattagttaatgtctaagtatataacgccttctgtttttcccattcagctagaaatactggagggctgaacactatcagcaac

SEQ ID NO: 5757 - DNA, 767 bp, Zea mays
  Intron number 1 from transcript GRMZM2G375504_T03 (locus G RMZM2G375504) derived from phytozome v7.0 (chr-ID 8; pos 9 5715616 to 95716382)
aaggacgtcaaacgcgtcatcatcaaggtgattgaatcgtacgattggcgtgttgttttagatccaaaccgcgatttgtttggtgctatttgcattgtgttgttcatattatgctgtgttttctaatcgtgtttttgtatggcgtgaataattcttgaataaccttgttcgattttgggttctcttcgtcgagcctcttcgtctgagtaagttgtgaggtagcagggttttgtttgggttttatattttgcttctacccttatagtcgagttgacgggttggtggtgtaagttcatacgttgactccaatgtttgaattcggatgtcctaatcttagtttgctatatgatttctatcagatgggaaatgcgcatagaaggcagaagccatcttgtctgaattctgatgtgttcttctttcgcatgcgaatcaactcgttcgaattcccttattgtttgttctctgttctttttacctgggttagtttatctatgaatttgtacgggcaaagggaaagagaagtaatgctccccgggacgcggggggggggggggggggggtagttttgcggggtgggaggggaaacttgtgctgagcttgacaacaccagtgtgctatcccaccccaccaccatacgtttggcaagttctgagagttacacatctgtcaggactcaggaattaatttggatctccttttgattttgattacagctgattcttaccttttttcgtgacaggtgggcactgcagtcgtcacgaggggtg

SEQ ID NO: 5758 - DNA, 993 bp, Zea mays
  Intron number 3 from transcript GRMZM2G433450_T01 (locus G RMZM2G433450) derived from phytozome v7.0 (chr-ID 8; pos 6 2910012 to 62911004 reverse strand)
ttgccatctcagtccacaccaagcctggttctaaggtcgccaccatcacaggtcgttctgcccttttcagattctcggttgctgccgctgtctctctactcagaagctaaccttgaagcattttgtatattaatccatttcctttttgtgctatggtagaataagctgtttgcatcagttgcttggcatgggtgaatctacctgtttacgttttgaagtgctgaggaaaccacagaacatgttgatggaatggaatacattgctaagagtagctagctgagtctacacggagtgtggcactgtaaaatggtgccacaagttaagaaccaactgaattcatgcaattaataataacaaagtcacatgcacatggtattgctgtcaagaacccctggtgttcaatcgaaacaaagtatagtttggagaaataattcctgcaatacgtggatcatcagttgagcaagtttacctagagtccgaaaagcgttgcttgttgcatcttacatattataaccgtataattgatgtcatttttaccttgttttttatccttatccctggtttagcagtaacctcttggttgtttcatactttcagcgctcatttgcaaatgccaagttatctcaaaaacaacaaatataatggctatcttttcttagttgtcgcactttgaattgatagttaatgatacactgatgtggacttcatacctgcatgtgagttaaagagcgcattagaattgaagggccatagtaatagcacctctcaggtcattctcaacgtcttcagttgtagcacaaaccccagttctaaaccatttaccacgcaattgcaagaacaatataaatttgtgcatttgtttcaaattcagctggctgaaacatgactgaaaagggttagctgctcctttccgctcatgtgcttcgttctccagaaacaaaatattccaactactttatgcactcagcactcctattgacttaacctacgcag

SEQ ID NO: 5759 - DNA, 971 bp, Zea mays
  Intron number 4 from transcript GRMZM2G171556_T03 (locus G RMZM2G171556) derived from phytozome v7.0 (chr-ID 2; pos 1 8763287 to 18764257)
cttattcatcccttcaatagtaaatacactatcaggtgtgttttggacttttggtcatgaaaaagaatcttttttgtttagctcttctgttacatgaatatcatattcattccccaatagatgcatctgatatgtaatgttattatttatctattttatttcacaattgcttagacagtgcttctgataatgttaagtggatttagtgtgtaacttgactctatttccctgtttaattcttaaatcctaagcaactgtcttctagtgcaagagaagtcagtccagcatttggaactgatagtatgttttttttggtgatcactatgatttggaagcaacacacccgaaatggcttcgttagcaatttactgaaggacagagcatgtagatttagcagtcagttcaactttctggggtcctgtatcctccctggaatattgaggatcagtgaaccacggatgtccatgtacgaagaatttcactcagatgtttacttcagtgctgatgggttcttctagtgaaatggttaaaaaatgatatggagttacttgatagttgatactgatgttagcacatcaaccacttttgtattttgcttgttcggccatttgttgtaaatgaataccattttttgtttttagacaaaagtaagaccctgcttgtatagaagattacagaattcaggagaaatgtgggttgggaaatgaaagaacttagagcataagtttgtgggggcaaccaggcacaaaaggatgcaaaatgacattaaataaaaaggccgcttaacctgttgatagagtgatgtaaaatattaaccaaaaaacacaaactactctatcatgtgaaacatttttgtatcaacccactctctcattttgctttattgcgttgctgatatttgctcttaatgcatggtgttttgtgttggttttccagtggtcagggtacagtatcccttgaacttttggagc

SEQ ID NO: 5760 - DNA, 801 bp, Zea mays
  Intron number 1 from transcript GRMZM2G134559_T04 (locus G RMZM2G134559) derived from phytozome v7.0 (chr-ID 2; pos 2 30357813 to 230358613 reverse strand)
cgagcaggcgcgcctcctcaacgccatccagcgaggtgagtcctcggttgccgggacctcctgtagcattcttgttccccttcttgcgaggagaaaaaggggatttcttttagcttcgtgttttgttcggtttggttccaatcataaattttgaaaggacgttatttgttactggtcgatccatctctccttgtgatagttagaatcatcggatctgattaggcagctgcgatgcagttagtaatgttaggaatcggtgaatcgatcgatccccttttcctctgaccatgtactagttctgattataaagttatctagctatatgtaaccatgttaaattgtaatttgcaataagccttttggtctctaactgatactatacttatctctggattagttaaatattacgtctcccagtagagcagtagcaaactaccctaagcacctatgcagaagtaactcagctctagtttgttgttcctcgagaacagaaataacaatggctcgacgctagtcataaatctgatggcttttctttttgtgcagaaggatggtttattaatgcagacaaccaagtaagtttcttcctctcatcttttccttgcctggccaatgttcatcagcgttaggattttagatacgtctgtcctgattagttccatgaacactgccccgatttgtatatggtttcctaaagtaattcaaactgtacagagaatttgttacatccttgtacgtctagtctgtcgtttttatttaataatgtttaaattccacttgctcctcccttcattataggcg

SEQ ID NO: 5761 - DNA, 716 bp, Zea mays
  Intron number 3 from transcript GRMZM2G125889_T02 (locus G RMZM2G125889) derived from phytozome v7.0 (chr-ID 8; pos 2 2085526 to 22086241 reverse strand)
cctgcaggttctgcagaacagagggtacgacggctgaaatacacacaatttagttgaatttaagttatgcctagtgtgctatggccactagtttgaatttaagttagatttaaaggttacacacaatttactagttttattatctgaatggttgaattggtctcgtactactgtacataatgacagctgaaatacatcatgtctctaccactttagcctttcgttttttatacactaatactgatctacatggactgcaatagtattcacaccacagtgaatgttgagcgtttattcagtaacactaatataggcaagaggtatatgtatttcataggcaaaagtaacactgaagacataggcaagaagtataggcaacaataacactgatatacttagagggaaaagggtatatgtatttctagcccttttataacagtcatttctagcagttttagcaaatgactggttcagtgtgtatttatatagcagtttcagttttatagcagttttagttctagcacttttagcaaatgtatatatatatatatatatatttcatagcagtttcatagcccagccgccgcggcctccggctgggcacgaggcccagttgcccgacaggccgtccagggcgtgcctgagaatacagatttgtcttcgaaaatcatctcacctgttttcttttttgcagattgtactttacttggagcttt

SEQ ID NO: 5762 - DNA, 862 bp, Zea mays
  Intron number 1 from transcript GRMZM2G145635_T01 (locus G RMZM2G145635) derived from phytozome v7.0 (chr-ID 2; pos 2 29018286 to 229019147)
tagctttccaattaaaaaatagagtttcattctgaaaagcaatgaaaaaagctattgaattaactaaaaaagcggatataaagggaataaaaatccaaattgcgggtcgtctagcaggaaaagaaattgcacgtgccgaatgcatcaaaaagggtagactacccctccaaacaattcgcgctaaaatttattattgctgctatccaattcgaattttaaagatacaaaattaacaaacagcgttgctgctgtatggcatgtggttcagggtgagagtctttccaccaggtcttggtttcaagtgtaggagcgatttgttgattgttggcaaatgtttgtgaaatatttgtactaagttttatgcccgctagcaggtggctacactccagatcatgcatagtacatttttcttcttcgatgaaggcaagtgaaagtatcggtaattgctaccgttttgacctgttatttctatcgcctacactctaatattcagaattattggattcttccataattgaactatatgatgatattttacttgattgtattatattgatgctctgtaatatattgatgatgattatggttcgagtatgacccatgagattaattcacacctctgaaggcagatgaagtattatttgaggtttatattgtatctgtaggcagatgaagtattaattgaggtttgtattgtatctcaaggaagtgaagtttattgataaatgcagcatgccatatacattgcatgactcatttgcatctgaagttttgtcgtaacctatggtccgaccgtaccggtacaacttagcatatacgttgcccgaggaggggtacaatgcggcttcatacccttagaggt

SEQ ID NO: 5763 - DNA, 906 bp, Zea mays
  Intron number 2 from transcript GRMZM2G158717_T01 (locus G RMZM2G158717) derived from phytozome v7.0 (chr-ID 2; pos 2 15734220 to 215735125)
ttcaatcatcgggtagtctttttattttcaattatcgttctggaaactgttcttttttcagattgataatgcggaggagcttgtctcgatgaattactaacattgtgatgctagtcattctaaggaaacccaagcatgtggattttgttggatagtgtttaacttttgagtgattggtcacttaggcattctctcactgaggcttttcgttctagaggatatctatgtgtaggatggtctttttttaattactatgttgatgatattgtcacaataacaaaatatgtcaactggatacagtatctttgtttgcattagaactcactagttttcttccatcttgttatgttgttcagttgcaaattatataccatagtatcagtatggatcagcactataaactaacttcattcatgagtgatgacttgtttcaactcgcagtgcctgatactttagtgctatacatgagtatcatagacaatatgttgatgcatgtggaataatgtggtagtactatttaagcttctgaagagtacaagtcataacagtatatctttgtgtagttaggctagttgtaaataaaaaataatggtagactcttgaaaaatcacaattttaggcctcatatcatgtctcaaagttttgagtttctgattcaatttaattgttatgggctctaaactgtaccttgtgacaaaggagcatatgtacatgttatgttacttgtaggtttgatacatgattacgaacctagacacaaaacagaggacaataattggcagtggttggcttaaccaataacatgctgtttcataccattccattattctgttgcatgtagtgtatcatgtttcttttaccatctctattgatagctttaatgagcctatcttactttgcttgcag

SEQ ID NO: 5764 - DNA, 941 bp, Zea mays
  Intron number 1 from transcript GRMZM2G463227_T03 (locus G RMZM2G463227) derived from phytozome v7.0 (chr-ID 2; pos 1 04961745 to 104962685)
ctgcacgcgtcgcgccaccgggagatcctggccaagtacccgtagatcaaggagctcttccgcccggatccgtgggccttcctcaaggtgttgtgatctgctttctttgcggcttgctctttgcgtctgttaatttctttctcctgtgattctgtgtgtgcaatgcggaatagaggatccaggattcagctctctagaaagtttgattcacgctgttcccttttacgacgtttggcgtttgctgagcggatgcaagtcggtttggatccattaaagttttgtagccatggaccatgatatgcagatgataggttgtgtagttatagaggaaaagatatgagccatgaatgaatgcttagactgaatcatgacatcttgctggcaaacctgcatcacattcaattgtgctctataagtagtatcactttaattatgcgcatacaaaaaggcttatcttgcatgtttttaatcaggtgaaacaacattttctactgtacataaggaaacacaaagagtagtacaagtaaacccgttcttataggtaggtggggagagattttttagattctaagaaacaggagtggcaaaaccatggaaattttcgatatcgggtgtgatcattttttgtttaattcctataggtgttttcagccgactagttggatctgaatttatcactaagagacaaagcaaggtgacatttgagattgttctttttaactatcatgttatttttgttgggacttcattataaagattgatgtttcataatgatttctactctgggacataaagactaggtactaaagatgatttaacaattttaactatcttagccggttgatgtcgtggccacctttttatagcctaatattatttccccttttgaaccaaactggagcaaaataacacccctacttttgtcagtcgtggcttgcctt

SEQ ID NO: 5765 - DNA, 845 bp, Zea mays
  Intron number 2 from transcript GRMZM2G167338_T02 (locus G RMZM2G167338) derived from phytozome v7.0 (chr-ID 9; pos 1 28397909 to 128398753)
caacaacgaacgtcctctccagcggttgccgtgcggtattaattaatggcttctaaatcgtacagaatgactggcacagtactattaatatctacgtcttccattcccttctccatatgtttatccatacacataaatccaagtaaaagtaaagcattttcatagtttttagacaataccgtattttgtaggaataccatttctctactaactattaagcgctcaacgtagtataccataagatggttggtttaattcctcaaaactgtgttttcaaaacattggggtatttttgtagtgttagaaactccactctacccaaagtttcatggcattactagttttttggggtctaaataccatgttttacagtgttatccaaacaatatctagtatttttggagctagccaaaactatggtattatcataacaatttcaaagtataatactgtaaaaccatggttttgagagacattgctatcaaacaggccttacatagctttgcattttttccttactaaattaagtatgtgaagtgaaaccaaacctgtctccttgccgaatatggccgaaatcttaaaagggtgtcttggagacagcctgtaaaccctgtcaaaccattaaatgctaacttactgtctgtattgctgtctgttgctccttctatttacttgaaatccttatttgtatcagggtggccaaactacttgtgttattgagcttgtttcttcttcatcttgggacattctcttgcatagggtcagtaaaggtttttttatgatgaatgatgtctgtattgcattttcttgacatcaattgttgtttttagattggggatttactc

SEQ ID NO: 5766 - DNA, 719 bp, Zea mays
  Intron number 1 from transcript GRMZM2G066041_T01 (locus G RMZM2G066041) derived from phytozome v7.0 (chr-ID 8; pos 1 20871125 to 120871843)
aaccttatcacaggtgtgcgagatgtgcccctctgttgctaagttgctatgaaaatagggatcgaactgtaggtggaattattgaagtgtataagtggattgcatatcttcttcgcttaagcttttggtttgaattggtgagcgcgtccactctaaccggaactgtggaagttttagaattgcaaacagatccatatacgtttaaattgtgagttaacataatagcattgtggtaatgtgagtgaatgattggattggttcctacgtggctatgaattcatatagcacaaattatttttgaaccagaaatggatgtagattttaggccaataacgaaaaggatttcagatgtctactgaaccaggatctgcatattcggaagatgaacctaataatttagatctgcattatgtgttaaatggtactctatgtcacatgtgtttactttaccagatcaaatactatacattgtaaatttgtgccttgagagctgaaaatgcagtttctgaaaggctgaaactgttctgatcactttgacaactgtggaaaatattaaaatttgggatcccatatcagcaaacagctatgcctgaatcctgaatgtatgccattttacctggttaatgtttggatgctccatttagtggttgaaataagtaactgatgttctgttatgcaccgcagaccaagatttcacggagcttgcgcaaaaagtcccc

SEQ ID NO: 5767 - DNA, 803 bp, Zea mays
  Intron number 1 from transcript GRMZM2G100102_T02 (locus G RMZM2G100102) derived from phytozome v7.0 (chr-ID 8; pos 9 7739802 to 97740604 reverse strand)
aggacatagttggtaagtattgtgcttttcttgttctacatttttgtgctaatgtaatagcagcacttatatgtcttactttgcatgtgccgatgcatttagatgtatttatttctaattatggtaaaaaaacgaggctctttactgatatagtttggtttgcctaatgtttcttctacactttatctccccttttccttcctcaacctcaatgttataggattaccatcactgagtgactttctagagttgcattgatggttccttttggtgagaaaaggtcttaccgttggtcgagaatgtaacttgtagagcatgatgttgaatcatgaaaattagttgtgtacttttgatctaacaaatagaaggtcgaattgggaaaggaaatactaaacacttcaaccatttttctagagcatcaaaataacaacaaatctctaattggtactaattcatgactaagtttttctagagcatcaaaataactgctgcttggtattggtcagcttctaaaaaaatttcaaaacgaaggagatggttattggtactaattcatgactaagtttactgctgacgtattttagctgtcagagagttcattttgtcactttcaatcattccattgcatttcatctccttcagtgcacactatgacaacctactgtgatattattactgatagtattctttgcatatttttctctcttttagttggttacaatattagcaggatatattgcaaaggtaccaccattttgatgctctggtaacaatctgcgttttctttttgttaggttacatac

SEQ ID NO: 5768 - DNA, 520 bp, Zea mays
  Intron number 1 from transcript GRMZM2G092147_T02 (locus G RMZM2G092147) derived from phytozome v7.0 (chr-ID 8; pos 6 6557136 to 66557655)
gcctgcacctgcacgcccggccgagctcttgaccggtggggaactttagttttgttatggtgcacaaccaatagttctctgtgttggtctgcttgtgggtcttttcattattcagcaagttgctattttcagttttgttcgaactttttaggttgtgtaactctttagttttgtttgaactctttagtaaaatctgctatttagttacctctggtgttatttacttacctctattgtttacttgcttaaatctgctatttattacttctggtgttatatacaagcatgctcagaacttcaaataggattatttattattctttcatgcctaattcctgtattttagtcactatttagtatttacatgtccaattctttcatgtcctgaaacagttttgatgctcttgtttcttagcattaagttcttagaagatgaggaattgaaaatatagacatttgtctgagttttttttcctcatcaacaggtggtacaaaagggtttttcatcaacaagtggtca

SEQ ID NO: 5769 - DNA, 801 bp, Zea mays
  Intron number 2 from transcript GRMZM2G472770_T01 (locus G RMZM2G472770) derived from phytozome v7.0 (chr-ID 2; pos 1 35047657 to 135048457)
gcagaattaccctacatctaaaggtatagcctgattggtgcatctctctctactattaacttggaatatactgttcatcagtcatggttactgctaatactgctttgggacttcacatcctaattcggaatttaattattctaatgtttgtgtttaaaattaaaggatttttaataaaaaaagtttgcacacttgttgctacattagtcttaacaggaatggatgttcttatacaaatagacaaagtgctgaaactagttgatatgattaatgttcatatagaacaagtcggacttcaaaagaaagtggccttgatgtcccacatctgatattgtaaaaaactcgacacgcgggggtaagacggctccccgttattacattaagaagaagactttctcacgtaggtcgaaaaaacctccgaacccctgccccacccatatacagcggcaccgtatcccatgtgagaacgatcgtgaccggggccagatcttagacctatgttttaaggtgggacagacgagaggattttttaacccaagcctgtaatccgctcccgtgaggagtcgaactcaggacctgaggaggtgctactcataccacctaacaaactcggctagaggccctttcacctgcatctgatattgtatttgactataacaacaattacaaataattcttcacatgttgctttgctcaaaggtcgaattgtttgattaggaacatattatcatgtcttttgactagtgtgtgctctgtgctgttgcagattttaaatttgactgagctggaactcaacagggt

SEQ ID NO: 5770 - DNA, 647 bp, Zea mays
  Intron number 1 from transcript GRMZM2G445667_T01 (locus G RMZM2G445667) derived from phytozome v7.0 (chr-ID 8; pos 1 0636127 to 10636773 reverse strand)
ccaacgatatcctgtgtaagcagactgctctgaaggttggtgattgttttgttgaacttctggtgtaatttgactaatgtgttaatgcaattaaataattctggtttcactgaatgccagtactttgcatagagttgtttttgcacatctaatgaatggtttcaagtgttctaaacatggaatattttagtcatcaaacatggtgaactttaagctatttgatcacataaccattttatggatacattttatggatttcctgcacatgaagacaatatgattctgcgcatgtgtataagaaatcaccaagactatgttgtcctttcatttggttacgatgtccaattgtccaaggattaattaggtggacaacctctgccccacagtcaagaattgtcatgtgtgtgtatacataaacaagattgatttttctaatgctgcagtaattgattagttttgatatcaattgggagtcatgtttctatagcgaatttcggataccttaaattataaaatccttcaaactcagtttcttttaataattttatacattttttctctgttactgaaatatattgactaacttgttttttttgtgtcccatgcatgcagagggagagaaaaattacagttcttgtcgggattac

SEQ ID NO: 5771 - DNA, 868 bp, Zea mays
  Intron number 1 from transcript GRMZM2G121897_T01 (locus G RMZM2G121897) derived from phytozome v7.0 (chr-ID 9; pos 6 7719846 to 67720713 reverse strand)
agggagtccatccaggagtgtgtctccgagttcatgtaacaccataaaagccatcaactaaaaataataaatttggttattatgttaaatatggtaataattttttaagtgtttaattatttatttgcactttgaatcattttctttgtatgcgcatcggatgttttatagcaatgtttcttaaaagaaatacttgtaattaatatgataattaaataattattagtctaaaaataaatattgtatttatatataattttggtgaatttttatgaatttttgagctatctaaaaatgtatttcgaaattagaaaaaaaaagaaaaaaacaaaaaccctcctaacctagccggcccaactaagggcccatcttctaaccctacgcgcgcgcgcctgctggcttccagccagccaagccgccgccgcccctgctgtgttccctcttctctcccctaactctctcctctctctgctctcttcaacgcacaaccgcccgaccgagctcccagcgccatcgacgcccagcgcgcgccccaagccggccgagccgcccaggctacgctcgacgcccgcgcccaaggccgagctaccgagctccctgcgcatcactgccgcgacgcccacgcgaccagcggccgagcccaagaccccgaccggcatcagcaccgcgcgacccgagcgtcccgaccgcgacggtccgcgcgccctgcgttgagtcaggcggtcgaccaagccgacgagcccgacgtccgcaacatcaacgcgacgtggcacagtgcactcgccatccgttcgtctcgcgcgttaatggaacatcaactcctccgtttcttcctcttcccaacgcaacgttatttttcccaacgtca

SEQ ID NO: 5772 - DNA, 1012 bp, Zea mays
  Intron number 1 from transcript GRMZM2G400655_T01 (locus G RMZM2G400655) derived from phytozome v7.0 (chr-ID 2; pos 1 08441403 to 108442414 reverse strand)
actcgtcaggttgatatctttatggacgtggcctttgatagtttgcatgaagatgtgaggctgttaagtattagattatcatcaatgggctttggtttctttcctgttggttctttgcaatctcgtcttgctcacttcatctgatcaaagaaaaaattgacaacacttgatgctaaatatgttatgcataaactttttataaaccagatatatacatgtgcacagcattttccgctctcaatcaactgacatccaaaataaacaagaatgcaatcacatttcccaataaccaatgcagttatcagtgtttatatgcaaagctaaacctactattccatgcatgcatagtttttggccacggtgatattacaaagattcatttctagaaccatacaacaagttcttcttgcagtagtgtcatgacacatcaacaccgcaagggactctacaccagggtgctaattgatcaaaccttcatggttttccctaacagccatgcattgtgctctatgcatctatctgtctccacataagatggatctcagtgcaagcattgaagtataggtttatttcgctatgaaacttcaaaattgtgtttaatccaccaaaccaaacttaaattcaggaactggcaagtataacattgaaagaggagatagaacatcccattgcataaaggtataccatcatgatttaatgaacaaaaacattaaaaatagatgggagatttgtcacatttgctatcacaacaaaccacatgataaacacacatattaagtcataaacagtaaagccaaattttcagcatgtattctcctagatatcatggggaggagagaaaaacattgctaaagcacaaatacaagtgtacgacagagaaatatctaggacatgatatgttttccatcaccagaaatagaatcagttacatatggtgcattcacttaattgtcttttctgtttgcttacacttgcaggctaaaagacaagtaccacccaactaacctattat

SEQ ID NO: 5773 - DNA, 581 bp, Zea mays
  Intron number 1 from transcript GRMZM2G095670_T01 (locus G RMZM2G095670) derived from phytozome v7.0 (chr-ID 8; pos 1 66915382 to 166915962)
tccgcccggacttggatcgagtcctcctgtctttggtaaggaaaccctagtccgcttcaaagcatgcctttaagccttttttattttttgctgggatggatcatggatgcagcaaatggaccattgaattggcacatcctacgatctgagcctcgaccttgaggctgtgatgttgtttgcgaattagggcttactgctgaagtgctgagcatgcgtacgccatggcgtgcatcgacccctagtgcggactgcggtgtcactgtcgttggatgtttccttgtcttatatagcatccagcaatcagtaccgtttcctcatgtaaagcccctcagtttaatactttgagagctaattgggtagcatactgccgtcactgcaatgttgttttgactttaatccgcacaggaactcctaggctccgtttatgatgtgaatccatactctgctgcttttattaatgcattgcaattacatcatatgtattgaagattatgtctacattaatattatgttggccctttttcttacttcattacatgttcccaggacattcattggagtgctccattcattgaggcagc

SEQ ID NO: 5774 - DNA, 752 bp, Zea mays
  Intron number 3 from transcript GRMZM2G095670_T01 (locus G RMZM2G095670) derived from phytozome v7.0 (chr-ID 8; pos 1 66916311 to 166917062)
cagaccgtaacctgattgcaaagtggaaaaaggtaatcatccttggtttcatatttgttgtacatggtctatatctcagttggtttgatttttttttctctccacagcatcctgttcttttgggattgagggtgggtggatgggaggcacgctaatgttccttatgttctgctataagttggtagattaagtggatatgtggtgtagacattgcatgtgcaaattgcattataaatattttactattacacttcgtctctgggtttgtgagatttatatagctacatggtagattgcagtagctactgatgcaggtatgacttttatgagcaccagaatgagctaaccactagccgaaacctagaacaattacttccaccccatttattttcctcaagtttggaaattggagattacgactaatactgccatgcattctgcagtccagtttttgcttatttttgaaacatgagatttccgatgtaaccagtaactggatctggtttatttaattgactgaaaatggattatcagacatccaatatgttcttttgattccccttaatttggatagtggtgtcttaaaatggtcgactgaagataaacaatgttttgctctgtttcctctataggttatgctgctcaagtttgtgactgcgcaatgcctgcttattctagcatcctgattacttactgctacatttcgccctcttgcagccaggttacgagcgcctttgttgcctccggtgcat

SEQ ID NO: 5775 - DNA, 957 bp, Zea mays
  Intron number 2 from transcript GRMZM5G862017_T01 (locus G RMZM5G862017) derived from phytozome v7.0 (chr-ID 9; pos 9 0035677 to 90036633 reverse strand)
gcacaactaggaacattataagtaaagtgcttttgtaatttgaatgcaatactcatagtttggccgttgaagcttcttttttcttgttacttgcactttgtttagggagcctattatatgcaaaaacgttccaagacttgttccagatatttaacaaaatgtgaaactactctgcattttgatgtgtaataatgttttcccactcaactgaaatgcttgtgcaatcaggatggactatgcacatctgcattggaaggcatgctattttggttggcttaaaatcatactagaaaaatagtgctgctctggtctataagtatgaaactatattattgttatatggatgtgcttcttactactacattacaacaacatgtgatcgtgcgcggtgcaacaagaacttgaagaaccagaccaagagtccaagacaggtgcaagataatatcgagtttattctatgaatggtgaccaggaataagtaacagtgttgcaaacttgtatactctctgcccacctctgctcttcattttctttgcttcagttcaacccaacagtttgattctcacctttttacatgttttgcttggctcatatcattaaatgttttttgcatgcttaaaattgaaagcatgatgcaatattttctctcgatagctatgcacccttcttccttgtgtattctacattttgttctcattatgtcaggccccggaacaactactgttataatagttgtgaaattggaacaaaagttgtacctattggagtgtggcgacatccaaattttagatattttatttaaaatgccagttcatatttttccttgtagaatgtaaatcctgttgattttgtgtattatatttagagtgttacgacattgttttttggagatctatgttttaaacgtaaggatattaagattttttattttaaatgttagttcatatttttccttgc

SEQ ID NO: 5776 - DNA, 712 bp, Zea mays
  Intron number 1 from transcript GRMZM2G153369_T02 (locus G RMZM2G153369) derived from phytozome v7.0 (chr-ID 2; pos 1 98391080 to 198391791)
ccctcggcgtcttcctccgattcggctgctgcagagtaagccccccttcccttccttcccttcgccaccggtcaccccatgatccgatgatgctccgtgcgcacgcctcttggcgcggacctgctcgttgattcctagctagttgatttcacggcccgtttgcccccgcgagcctgcctagcttcgggctaggtttcagtaggcggattgttcggctccaagcgtattcggaccgtgcttggtctgaattccaaaatataggggcgtcaaacgatgaactgcctctgaatcttatgccgtgccctcgtagatccctgcataaactgtagtacctgatctgcttcgttcccgtgttggccatttgactaggtcataaattcatgtttgatgtttccgtagccctcagaagcccattacgttgatgtgatgtgacagtgatgctctgttataggacaagccagcagcatccatttcgcaaccacaatttttctcctgatgggaaggagtgggtaaatcagacaactaatttgactaatctgaaccatgaatgaaactcagcgtgggatggagcagtgacatatacaattgtctgtttttgtcgtggtaactctgttgatgacattttactatccctggaacatactgacggtacgctttcttgtcttcttaacagatagagttctgcatctgcctgctgctcacaatccttggc

SEQ ID NO: 5777 - DNA, 921 bp, Zea mays
  Intron number 1 from transcript GRMZM2G037923_T03 (locus G RMZM2G037923) derived from phytozome v7.0 (chr-ID 2; pos 2 33738246 to 233739166 reverse strand)
ctcctccgcacccatccccgccgccggtcgccgatgtaagctcccgcaccccctccctgcgcagacgatgtctacatcgtcgtcctgccgcatctttttcttaagattttttttcggtcgccgggtggtgctctggggcacgttttccgcgcgatcggccggccattcgtggggaacatcgatccgatgaggcgcgcgtgccccgatgcatccgccgtttgcgggctgggttcgtcaaggctcggtcgcggggggcgcgcaggcggtggatttgggtgagggttgctgttttcgctgggtttggtgtcgggatttggggtcagttgcgggtttgtttcgatctattttccgaccggcggtaatctggtgggcaaagccgagatttttttcccttaggccttgttcgtttccgtcggattacacccggaatcgttccagctaatcaaagtttgtataaattagagaaacaatccggccaggaatcattccgacccaccaatccggtagaaacgaacaaggccttaggttgggaatcggcgtggtgcatccggtgatggggatgggatgctcccctccctttcccttttcagtgctgattggcgcattcgattcctcggcaaagggtgtggtggtagggaagttggccgtcacttgatggcgatgaggatccacctctgttgattctctctaccttttactctattggtcggcgcccttggccgtgcccactgcccagtcttagttcgattgttcttttggggatgatggtagatacctagatggagaggttgctggagtggttttgatgtgtattctttgcagtatttgacgttgttctttatactgattaatgattgtaactgtgtctgcatgtggagattggaaggagctcggaaggctgggacgctgacccgaatttta

SEQ ID NO: 5778 - DNA, 826 bp, Zea mays
  Intron number 1 from transcript GRMZM2G454449_T01 (locus G RMZM2G454449) derived from phytozome v7.0 (chr-ID 9; pos 1 11253033 to 111253858 reverse strand)
cgtcgaggccgtcgagtgcctcggtggccaggacggtgagtcggcccgcttctaatacttcccttcttctccgatccgactgcatgcgtgagacatgccctagccctgcatgctttcattgatctggatctctccatgcatggttgcttacttccttttactacctttatttgtcgggaggtgaccgaagggcgcagcttgtttttctttattcagttcgcttgtagttttgagggttttgattatctaattcccctcagtgtttaggttgttaattaggcagagagtttgttggtggtggaatccaccgggcaaaggaaaaaaataaataagaaaacacgtgtttcgcatgcttgaatgacgaacatatattatcctcgggtgatttatcctgtgtagtttaggcgattacatatagctttttttttgctgatagataaatcctgttcacgaaagtttgaaacgtttctacagccagttccaaatacttttgatagaattaccgcgaaagatacgaattgcatactcgaattagtaagctatatatatgagaaagttattaatttcattactatttcatacgttatacaacgatattcatgcaatatatatacccacaaaatcatttacactggttattcttcatacaaaaggcaatgaccatatggtttatggggtagcaacatatatatatgcgcacatatcttgtcagaaattagtttggagaaagatcatgcttcagaatcagttgtattattgtgtgtgttgttaacctttcgttttccaatgtcatgcagaagcaactccgaagcgaattcttcagctg

SEQ ID NO: 5779 - DNA, 616 bp, Zea mays
  Intron number 2 from transcript GRMZM2G071494_T01 (locus G RMZM2G071494) derived from phytozome v7.0 (chr-ID 2; pos 7 0224938 to 70225553 reverse strand)
ttgttgttataaatccaggaaacccaataggacaggtaattatttatctgtttgttacatgaaaaaaaaatgacaaatcttgcatggttctcactaaaaaatatacctcacaaggcatcttgggttactattgtaacatgttgtaatattatgagataaaaaatacctacaaaataatggcatcctatcccattttttacaagaattatggttgtcagcgtccaagacgaggcaatataccatcaaatgctggtaaaacgtttttcgagagcatctccaacaatgtgacctataaaagtgccctaaaaattaaaaatagatatatttttaagaacaactcagctttgatcattctttgaagtgatgcattgttgttttttgccctttcaaaaattgtaagcaccatcttcggattgccttggggctttctttggcaattactcatgctgatgttgtcctttctttggcactaggcatgttgttctgaaaccaaaccaggggcgtcactcgaatagacaaactcaggtgcctgctatagtatcaaaccacttttaaatcgttgacaatgtgtggagcttactaatcgttgttgtccagagtggtccgacagtgccgg

SEQ ID NO: 5780 - DNA, 862 bp, Zea mays
  Intron number 3 from transcript GRMZM2G140223_T01 (locus G RMZM2G140223) derived from phytozome v7.0 (chr-ID 8; pos 2 1755536 to 21756397)
ttctcgctttgcttcatcagtgaacactgaacacggtgcgtgtgtggccgttcggttctgctttgacagatttctatattgattactcccaccttcgggctttcgatcagcttggtctagtaattctagacacaagttgcttgctccgtttggttcagagggtgtgtcagctcgttcttagcaagcttatcatggttctgattccatgtagtgtcagtaccaaacaaccaccaactgtggtaggaaaagagtagtcatatcaacatgagacatggttggtggtgcgtggtctggagtgataaaccgaagagatcaaatgagctatttcaatctgttagaataataagtggctagttgataaagagcatgaacataatgtcctcttatatttttctgtttaattagtttaatcaaaagcacactttacgcaaccttaaatcttatgactaccattcgctttaggtacttagatctatccctaaatatatgtagggatttttccctgttacagcggcattcacgtatgtatggagttttctatatatgattgttgggcctaataagtgaatttactgaagcaatattttcttttgttttttttcaatttaaggttttgattatctgcatagctgtattatacatttcactcctacatgttcagttttaatagtagtgtctgctattagttcttgcatctgttgtgttaaccaatcctgctgctagttcaattctagtgatctactaccattcactttcctcctgctgttattcgctttcctactgctactagttcagttcttgcatctgttgtgttgaccaatcatgtgtgttgcctctcaggtccttagcgatccgaagaaac

SEQ ID NO: 5781 - DNA, 485 bp, Zea mays
  Intron number 1 from transcript GRMZM2G042080_T01 (locus G RMZM2G042080) derived from phytozome v7.0 (chr-ID 9; pos 2 5815668 to 25816152)
cccgactcgtcctcctgcggagaggaggcgccgaggtgagagttttcgtcttccccgtccctcctacctccccttgccattccattacttggtagcttcgaatcgggaggtacttgtctttgtttcgttatctgtgcgctatttagtatatttgcaactctgtctgccgaagcagaggggggtgtttgaatgcactagaactaatagttagtggctaaaattagttgaagacatctaaacatcctagctaatagtttaactattaggtatttttagtaaattagttaatagttagctctctttttgttagctagctaattccagtagcaattttttagctaactaattattagcttcatgtcaagttgtaccatttttcttttgccaaggaggtctcctgacttaactgcaaggctaatttgatgtgattgagtgaatccttttgatcagggggaggggacgaggacacggaattgcccaatatt

SEQ ID NO: 5782 - DNA, 910 bp, Zea mays
  Intron number 2 from transcript GRMZM2G037104_T01 (locus G RMZM2G037104) derived from phytozome v7.0 (chr-ID 2; pos 2 29610114 to 229611023 reverse strand)
ttgtctgggtggtggactggtgggcaggtgttaaggtaggcgtggatacgaccagcagcaaaacgattttgttttcaccatttcatttctagtagatagattgacttgcaagttgcaacatcttctccttcagtatcagaattcaaaattacatttgtgcctggaagttgcagcattctgttggtttgctatattcaacttcaacctttgttgtagcgtcatatgatgccttttttaaatgttctccaatgtaagtacgtaggactaatgaagaagtgagttatatagctgtctgcagtgttgcatcctaacagaatctgctagatggatattccaaactagataaagtaagcaaagaagtttctagatttgcacacatcatgcccaaaaacatgttgtaaaggcaatgccggcaatactagtagggacactgacagggcttgacagcctacgttggatagagttgagtgatatttgtaaagattctaatttgaagattttcatggattgaattattgaaatgttactctggtgatctttttattgcatatgcacttgaaacgttagtcatataattatactgtgtatgaatttccagtattgttgggcttgtcaaactaaggaggaagatagtaactttttttatcttgcagagttgtggcagtaaattagatgaactatggaaaaaaactctgatgagaaacatttatataaatagcttaaatgtgtatcaattgaattgataattgaggacttttttctacccttttcatcagcagatctaaatgaacatacttcataagcacttagcatacacgctttatgtttgtgtggtgtttatgaagcaaacattgttttttccctcccggtgccagaataacttcagcttatgttctgcaggtacaactgc

SEQ ID NO: 5783 - DNA, 853 bp, Zea mays
  Intron number 2 from transcript GRMZM2G179452_T01 (locus G RMZM2G179452) derived from phytozome v7.0 (chr-ID 2; pos 2 02317831 to 202318683)
actcgccagaccgtgcctgctcgctggtcaagcatgttccccttctcctggtgacttgagggatgacatgctgttttatgattgggttaattgtgtctgtgccattataattttctatgttttgatatatgccactaaacttcttaagcttgcaaaagtgccattaaacttttaattaagtctgaaataaaccattgtcaacagtttagtctcaaacagacccacccaccagtatattttcgtatttctctttctacccttgcccttgcttttacgaacacgacaccggttttgctatttttattcagaaacagaagattttttgctatggtcacaattggttattctattgttgacagttcatgatttgtacatgtgtgttgcaattttggtacctagttctgctcagatggtagcatgttactctgttggactgtttcttcacaagatttcactaggcgttgttcaccagcaaggctctgacgactgggtaacagcaaaacaacaatcatgttgaagaagatgtgatgcatttgtaacagtaatcgtgttcgtaactggtgagacccaaagagacgtgatgccttcgtaacagcaaaataacaattgtgttcgggcaatgatacaaagggaaatacgaaaaatacatgtatagtggtgggtctgtttggaactaaaccgcagataatggtttattttagatttgattaaaagtttaatggcatttgcaagcttaaaaagtttagtggcacatatcaaatatatagaaaattataatggcacatacccaattaaccctttatgatttgagggctttggttccaggcattcgacgaagctatttcagagttgg

SEQ ID NO: 5784 - DNA, 667 bp, Zea mays
  Intron number 1 from transcript GRMZM2G416308_T03 (locus G RMZM2G416308) derived from phytozome v7.0 (chr-ID 8; pos 1 11625527 to 111626193)
ctacggatacccgccgcccccgccgccgtacaagggtgagttagatctctctcgcagctcccgtgtctacctgcctgcctgcctgtcgctgtctagatccagatctagcatgtgggtggcgtgactaggtactagtcacgttactgtcggtttcaattctggtcttcctggcaattcggctggctgtggatcttaggtcatggcattaacatgcgtgttaggtttcagttcatgctactttggcataggtgttgttcatatgtgcatatatagtggttaaaagtgttatttcagtaaattacagtgctcttttcaatttcaagggatttggacctgtaaattttgtactcattaatccgtaatcatgatggttaggcattacttttaataaggtgtacttcccttgaagttagaaaatgcattacctggcactctccgtaggtgtcatacctgctgtctaaatcaaatgctgtattatatttggtctacctattgtctatctgttttgtttggaagacaaactaacttgtatagcttttcttatagattctatttaagcatatggtgctttctgtaagcagtttcaaaatgaagacaaacctttcctcacattgtattctatcttactgcagaggatccatacggtggaacgtaccagagttggcag

SEQ ID NO: 5785 - DNA, 707 bp, Zea mays
  Intron number 1 from transcript AC211152.4_FGT004 (locus A C211152.4_FG004) derived from phytozome v7.0 (chr-ID 9; po s 17630428 to 17631134 reverse strand)
aagaggtttgtgacataatagcaatttaaaaagtgttctaggagcgttcaagcttgtcttgtttagtgtttccttgcccttcttggtggcagtgttgatgttctttttgtgtctgtaacttttgtaaactgatatccccagtggcctcctatatgtgcgagtgtgctgtaaactgaaaaggtcaaaataaactgcttcttgccaggacaatgaaaagggcagacccagaggactgtgcctccaattaaactaccagaaaccaaaagaattactttctctaaaactatatgaagcaagaaactacggtctattctggagtaattgtatacgggagaccaatcccaaagttactgtcagcagtcctgctctcacatgcctctagggtgcggaagcggaagagggtggtggggggtgaccgttcagatgccgatgcgggtccaggttgaggtgcatccacatttgggtgtcgcaacctcatatatactagctgaatttgcaatcgacaagtcaactaggaagcatgtaatggttgatccaactattgcagcaattcaataatctaaaacagtttggtaaatgacaaaaaaaggcaataagtagcaaggccaactctattggttgactactcaaaataactaaatattttaaactgattgtgcttatctacaacaggtttcaggttttttttccctaactgaacaaagctg

SEQ ID NO: 5786 - DNA, 1012 bp, Zea mays
  Intron number 1 from transcript GRMZM2G045581_T01 (locus G RMZM2G045581) derived from phytozome v7.0 (chr-ID 2; pos 1 0489148 to 10490159)
gtcttcgtccgggaacccaactacgatatctaccggtgagtaagaagagccatttccccctttgtgttgctatttcagttaattttgggttaggcctttcagaatcgttcgcgcttgttgtatgaattggcttaatttggatttgatagtttgctatttgctgatcatggagaacgttcacgtgcctgctaaggtcaaacagagaaattgagctgctaatggtcactcggtgcttacataaatcataaatgcagtagtagtgggctagtggccagcatgaacacaatggtgatttttcagtgatgccagacagccagtcacgattctagaaatgaagtatactgattgtttgcttatttcacctagccttctagtagaactgagaatcaatagatgagcaacaagtttattgtttggttataagactaggctgttagagggcaatgagatgcaacagtcatcatttttttataatgaccagtctatcaagccacgtttttcattaagagtaaacaagttttattaagtgatgttaagtcatagcttactgcccagagcagaacagacatcaatctaacactgaaaacaattacaggctatatggcacactagtttgtgacaatgacaaattcagcacatgggtggcgatctagttttaggattgagagtcatcagggtgccaggacctccatttttgtttttggctgtgttctttttacacaggttagaagtgtgttcgagataattgtaattacatcaactctacgtaatgatcttgagttaataaaaaatgtctttgccaaaagaacgaaattcagcacaaaggcatgtgcaagtcatcatcaacagtttgctattaattatctctgacaagaacactaggcctgaattttgcaatctcttgcaagcttattctttgtaggcatgacactcatttgaaaagggaaactgaaaatatttttttacatctattgcagtgaagacatcacatttgtcgacccactaaacactt

SEQ ID NO: 5787 - DNA, 907 bp, Zea mays
  Intron number 1 from transcript GRMZM5G831993_T01 (locus G RMZM5G831993) derived from phytozome v7.0 (chr-ID 9; pos 1 5610336 to 15611242)
cctcggcgacaacccctacgtccgggtaacacatcaaaccctagccctacctgaatgatttgtgtgcttctctttggcgtcgttatccgatttgtggccggtggtccgcttgatttggtttcgtctgtgatttcttatgctcgacgggaactaggtctaggtttcgctgcgtcgaattctgtgcacgttttttttttttggcatattgccttctttgtgaaattgtctcttatagatgtgttattaaacttgggattggatctttgaggaagtctgatgcagtgatgcttgcttcgggattgtgctctgcaaaatgctaaattactggtagtggtttggaaaccgtttggttcgcttgcttctcctcatcataccttgcttagccaggaaatggaaagaggtagctgtttgatttgggaggcttgtttttcttggggcttgtgctgccaagaaaatatcatgctaccattggagagctgattcggctgtttccaaccacgaggtagggcagacccttgctagctaggaaaggcaatctctgcctcagaactgaacagccctggtttccattaatttcaccccaagtagccactgttgatgattctgcaagagcagtagtgcagtaaggtggtttcgccatgcgcatagtgtgattagcaagatgagtgatagatttaagccagttataaccagggtaaattagtttctagaatgctaacaaattaaactagctaaccaattggttttgccatatgcaatacacatcatgtagtaccagataggtgttgtgtaatacatgaatgggaataactttccatttagttgctccttattttgcatttgcttcagtatttcatgtaaatatgattcactgactcttgtttttctttgcagttaagagctgaat

SEQ ID NO: 5788 - DNA, 380 bp, Zea mays
  Intron number 1 from transcript AC210158.3_FGT003 (locus A C210158.3_FG003) derived from phytozome v7.0 (chr-ID 9; po s 10899217 to 10899596)
tacctgccacgtgacgcccattgctactacatcttgtatgtgtaccatttctgtattcatattccttctgagattgtctctgttcatatattttgttctgcttgattcataaacacagtttatgtgtagttcggtatataaatttgttttagcttgtggtttttcaaatttagtacattgtttgaatttagaatgcatctttcattgtttttggagaaagatttagtcaatgattacttaattaatatgcagatatgtttttgtgatacaaaacataagttttttgtcatatgaatctagtaacattcaatgcatctttttgtgctcttctaaatgtgatttcttttaaactaactcaattaaatcttccagtggaaagc

SEQ ID NO: 5789 - DNA, 337 bp, Zea mays
  Intron number 2 from transcript GRMZM2G099130_T01 (locus G RMZM2G099130) derived from phytozome v7.0 (chr-ID 2; pos 1 8513268 to 18513604 reverse strand)
cggggctacgggtacgagaccaatgtaagctttacttcgtgcacttcggtcggtttcatttcgatcaagtatatgatcattatagcttttaaaggacgcaaatcaaagttcatgagggaaaactgaggtagacagcggattatggtacttcatttttttatttgaccaaatgtaggaaaaaataattgtaataaaataaagaatgtagaagaaaaaaataattgtaataaaataaagagggagctgtagaattgactgtcgtgaaaaaaacagtgcaatttttttggtcccgaaacgatgacgattattgtgcagggtaaccaccaggaagtggaag

SEQ ID NO: 5790 - DNA, 1015 bp, Zea mays; identical to SEQ ID NO: 4513
  Intron number 2 from transcript GRMZM2G056572_T04 (locus G RMZM2G056572) derived from phytozome v7.0 (chr-ID 2; pos 3 969584 to 3970598)

SEQ ID NO: 5791 - DNA, 753 bp, Zea mays
  Intron number 2 from transcript GRMZM2G360541_T01 (locus G RMZM2G360541) derived from phytozome v7.0 (chr-ID 9; pos 1 00946774 to 100947526 reverse strand)
gttagtttgttcagtttactaaaagcggaatcaaggtaactaaaagggtctctgttcattcaagtgtagggtgttcatctgcttttagttcttcaaaacaaagcggaatcaaggtaactaaaagggtctgttaatctaactgaaattgtgctacgtggtatgactatttttgttttaagttcctatcttttattagaaaactaaatatcttctttttttagttccaacaaatttttgccgactaacaaccatgcagatagcactcctaactataactataattccacctgatcaacaatgtgcccagtcctagcattatgtactgctcataatttgtcacttggtctgtgtttttttgaatgcttactagaccaaggtacttgatgtagtggctcatgaggtttgatcttgagcctggataagcagaccaggttcatcagctcagatttatttttttaagatttaattttttagttgttataatttatggaatctaagtaactagcaaactaattactaaccagtataggaaaatgttgcttgctatcacattggagccagcaattgtattaacactttgggtaggatatgaatattagactgtcatttgtcagaacatcagtaaggcgtgaagaatcagaagaatattcagtcaaagctggtgatgaattaacatgccttattgccatgctacttgaaacactggtcagcgctcgtgcatgtctcaccaactgcgctgcaggtaccgtgtcc

SEQ ID NO: 5792 - DNA, 816 bp, Zea mays
  Intron number 2 from transcript GRMZM2G456932_T01 (locus G RMZM2G456932) derived from phytozome v7.0 (chr-ID 2; pos 2 09580529 to 209581344 reverse strand)
tcgtcgtcgtcgcgtaagcctccctccctcttgcctccaacggccccctctctctccgatatactcttttcttccttttctgttcctttcctccttttgtgatcctgctcgataactttaattcaggcattctaaatcttaagtctgcttttgtgccagaatcttgtggaggagaaagagaaaaaaataaaggagctaaaggacaatgttgctgctgtcaattttactccatccaacaaactggggaaatgctaatggctaaatgtagaacattgcaagaggaaaatgaagagattggggcgatggcatcagaaggaaaagtaagccgttttgcagactcctgcttaactttgcaaccatataaatttggatatgctttctggttgtttttaatatcatcgaaacggaaagtgtccttggtcattttcttttgagacaacagacttcatcagaaaagctagatctgctcttatttttctgaagtacccccactttcattttgtaggatgctttatggtttggagaagtatttaaaagacattatatttagaattactacaaaattaatgttaagttaaaaggtatgtgaaatataaatatattcatacaacttcactacactaagtatgcataaaatttgacttcctaagatgctaatatgcccctgtaaaaggagatgaacttctaaccatctcagttttcaccatctcgcaagctctagaaacaagggcatttccattccaatacaaaatcttaggattttgatggtggctgaaaatcttatgattttgaattttggtgcatgtccttgcaggc

SEQ ID NO: 5793 - DNA, 701 bp, Zea mays
  Intron number 1 from transcript GRMZM2G080252_T01 (locus G RMZM2G080252) derived from phytozome v7.0 (chr-ID 8; pos 1 32989196 to 132989896)
gcgaactggcttgttctgtgtgcttgctgttgctggtatggatgatcaggctgggcaatcatgggtggcagggcagcacaaggcagacatacatgcaaggggacgagatgatcggttagcagttatcagcactagctgtgtccaccatgtgcctattataatataatgcatgcacatcgtccaacagtcgtgatcaaaatccaaagattccacgtcttgagaaaggaaacaaaacctgatactatactaatttgcttattggttcagatgatgatgtgcgatacctgaaagaaaggaaaggcttgagaaattgaggttaaatttagacataatgaaatgcgacttaactatattaacaatttagaaatcacatatctaattttgtgcctcaatgtgctacacaattttaaatttgtttatggatggaattaacaatctgataaattcacactgatatagctgaatatttgatttaatatgtaggcaatgtgatattgtccatactatagtaatgagttgtgttatgtaatgctaatacttaacataaccacctcacatgcctgatctattaatatgtgcattgtatatgtttggtttttcttttctttgtccacattctgttttttttaaaattcttttcagaaatctgagcagtgtttctcgccacattgtttatgaacatttctattctctttccaggg

SEQ ID NO: 5794 - DNA, 696 bp, Zea mays
  Intron number 2 from transcript GRMZM2G029292_T01 (locus G RMZM2G029292) derived from phytozome v7.0 (chr-ID 8; pos 1 70384146 to 170384841 reverse strand)
atccggggaagtacctacccaaggtatgtctaattaatcattcagagtctgtttggaacgtaggaacttcaaaggaaacagttcagtttttcacacgaaaaacaaaggaataattttttccccatgttccaaacaagacctcagtcttttatcttgcattcttttatattgcattttctaatcagtggagttaataggtacagactcgtgtaatatgttaattatgttgaagtctggcaactcattacataagaactactacctatgctaattattagcatcgatgctcctcagctgaaatagaacttatccagatataatcacacatgttccaacttccaactgggccacgctctctgggtcttgcagaagcttcctaatatagaatatacaaaggatccaagaagagcttaaaaaagacagagatgttattagtgaagatgtgtcccctgcctaaattaactataatacatgtgatcagtctagcgtgttgtattaggacttgttcgttttgctcttaatccatatggattgggtgaaattaattgagtttcaatcctaaacaagtcaaaacctttcatattttttttccagttgcattcaatccacgtggaatagtaataaccgaacaagacctaagctgtatataatacacgtgtttgatctggtttggttagctcatcttctaaagcctga

SEQ ID NO: 5795 - DNA, 740 bp, Zea mays
  Intron number 1 from transcript GRMZM2G317728_T03 (locus G RMZM2G317728) derived from phytozome v7.0 (chr-ID 2; pos 1 79289586 to 179290325)
tggtagtaagtatttccagcttatctaaagattataaaagatcttacatttccagttaaaaattaaagatggctagagctcttggaaccctgagttatacctgctattagttcatatcgtctggtaagtagaatatatttcacttcagtagaagtacagatcgtctgttgttttctatcaacagtgatcagaaaatcttggcatgcattactttgtttcagtcccttcgcatttcttgtcaatggcagatttctcccagaagaaaatctgtgtctgaaatttgctaatatgaaatagtacagtatggccaccagtacttgactttactggctcaatgggccaggcagaaggaaattccaattggttgttttctttgagttgaatcattataacaaacttagccctcattatgatgtatctgcagtttttgaattcaattgaagtaaaaggaaatatcatagtttggtcctttcgtgaaatttttttgtccaatttttttgtccttgtaggtttttccgttgcattagaaaacattgtaggcaactgattttctaacatgcccctatccgaacttcctccgagaccatttcttgagatcttggcacgagaactacggcgacgactggtaatgtgattcttgcgccttcgtttttcccctgtttagactttagagtgaattagtctcattttgctttttcctttcacctgattggcagggtcttagattattcaacattgat

SEQ ID NO: 5796 - DNA, 989 bp, Zea mays
  Intron number 2 from transcript GRMZM2G158717_T02 (locus G RMZM2G158717) derived from phytozome v7.0 (chr-ID 2; pos 2 15734137 to 215735125)
ggggcactgctcctgcgcagcactctctaggtcagggagtggatggagattgtggagaagtgtcttctgttgctaatgcaatgttcaatcatcgggtagtctttttattttcaattatcgttctggaaactgttcttttttcagattgataatgcggaggagcttgtctcgatgaattactaacattgtgatgctagtcattctaaggaaacccaagcatgtggattttgttggatagtgtttaacttttgagtgattggtcacttaggcattctctcactgaggcttttcgttctagaggatatctatgtgtaggatggtctttttttaattactatgttgatgatattgtcacaataacaaaatatgtcaactggatacagtatctttgtttgcattagaactcactagttttcttccatcttgttatgttgttcagttgcaaattatataccatagtatcagtatggatcagcactataaactaacttcattcatgagtgatgacttgtttcaactcgcagtgcctgatactttagtgctatacatgagtatcatagacaatatgttgatgcatgtggaataatgtggtagtactatttaagcttctgaagagtacaagtcataacagtatatctttgtgtagttaggctagttgtaaataaaaaataatggtagactcttgaaaaatcacaattttaggcctcatatcatgtctcaaagttttgagtttctgattcaatttaattgttatgggctctaaactgtaccttgtgacaaaggagcatatgtacatgttatgttacttgtaggtttgatacatgattacgaacctagacacaaaacagaggacaataattggcagtggttggcttaaccaataacatgctgtttcataccattccattattctgttgcatgtagtgtatcatgtttcttttaccatctctattgatagctttaatgagcctatcttactttgcttgcag

SEQ ID NO: 5797 - DNA, 1013 bp, Zea mays
  Intron number 1 from transcript GRMZM2G014187_T02 (locus G RMZM2G014187) derived from phytozome v7.0 (chr-ID 2; pos 1 4336038 to 14337050)
cccaggaggaggagggcgcggaaggcgacgatctggtgagcctgcttgcttccaccttcgattaatgctttcggtttagccatttcgctacgtgttcctaaattttcactgtggcgttggtacgggactggactgtgctgatgattttgcggttcactgttccgtatgtttgagagttctatagcattatactagcattctgagttattgggcaatcgaagttcattgttgagcggtcgcgtcatatgtttgttcacttgatgtctgggaaccggaaggcttaccttgggatggagcaactgaaagaaacctgtacgtggtggttttagatcagccagtacaatagaagtaacatctctccatctaaagtaacaccttctgatacaacactcgtctagtcgtctcattctactgtattttcggtctcagtttcagtgtatatccatctggaacaaaattaccgtctcttctaggaatactgttgaattagatactttagttgaatcttgataaataagtttaagtctattaatgtttgctgctggccatttttgtcattcgctcttttttcaagtatggattgataatatttttgcatcctcgataagccaaacaatttagcaacgcatgctgcgaaccttatatatgtaatagttatgctcgtcttccaggtaatcacaaactgatggtggttgttcacatggaaaatgctgattgtgatggcaaatgaaattgtgaactaggcttacgagaacttactaagtagcgatcatgctgaagtcttgctacttgtatcagtattcattgtaatatcttgtttgatttttgctgcctgtactatgcatttccccgtcctgttggctctcagaagatccgttctgttttggttttgtgaattttgtgtttgcataggcagtggataagtcactttgttcatttatttattggtttgcaattaatatataatgacctttacaggacagtgaagatctcaaacttgagcgagtcctaaa

SEQ ID NO: 5798 - DNA, 997 bp, Zea mays
  Intron number 1 from transcript GRMZM2G095124_T02 (locus G RMZM2G095124) derived from phytozome v7.0 (chr-ID 9; pos 1 28714950 to 128715946)
ccgagctgaaggaggagctcaactcccagtacaaggtctgcgccctcactcgctttaccttgttctcttcctgtgctctgccgcgcctgtcgattggttcctgcgcgtggatccagatccgggcgcgacgttagggctgcagacgcgtctgcttctagatctgcgggtctcggctgctttcctgttgggtttggtcgtgttgagggtgcgattttgcgccggaagtgcacatttcggtgttatgttggttacgaatgagctggaatgtgcagaattcagtgctggatcgcgctgtttaagctgcgttagacatttctgggctgaaacgggtttgaattggagcacttgaatggattgaactttggtgcttctgaaacttggactctgagaactttgaataatctgattgtttcattatatgccaatatgaattagcaggggtcaagccgttgaccattgattaattcctttcaattagtgcagaagatgagaaatgcgtgcttatggaattcaatgcagttcattagctctgtgttcagctatattattttatacccatatatacatgatcaccaaggacaggcctgacacagtggtaaagactttccaatgagtcaaaggtcctggattctacgcagcctctctgcaaacacatgcaagagaggcacacacaataagctgtcactttgtcatgagatcagttgatttatgataaataataaaattcatgtttccaaattccaatttatgtacacttaggctgtattggtacatttttttttgttgaggggggcacaagtgtattatactatgtaatgtggtagttggaccatatacacttggtcaaattaagtactatgtaactgtagtgatgttaagattatagttgttgctgcaaaaggaaaccaatttaggactataagctacatttctgtgtttccatatttcctgatgtctgaactttttccgaaatgtggcttgcaggacaagagaaaag

SEQ ID NO: 5799 - DNA, 740 bp, Zea mays
  Intron number 2 from transcript GRMZM2G068557_T01 (locus G RMZM2G068557) derived from phytozome v7.0 (chr-ID 2; pos 4 6159112 to 46159851 reverse strand)
tggtggagtaagtttttttccccctttgtcttctagttttcagaatttagaagactcgttccagaattatgggaacttgagtagtttaggggtgcttgggaacaaagtttttctgcagttttggaagaatactgcagtattctcaaatactgcagtattatatacataatggtgtttggcaagctgggtaaaatctctgttttcaaaactgaagtattgcaaatactatagttgttttaaggcattctaaacttagctctggacctcagttttcaaaactgcggtattataaactacggtattgtcataactaaagtatagtatagtatttcaaaaactgtagttttcaaaaactttgttcccaaacagggccagtagtttacttctgagagggtgaccaactggcactgaaagttcagagtcgcacatgttgactattttatactgtatctattatagtactcgaatggtttcgataacttgaactagactaggcatgtttagtccaattatttggaggctatttatggctacaaaaccaacacagcgcaataggttcagattcgaacactgcaagttcaggatgatatgaacattttgaattcagagcagaaccttgcataatttttacatagatttcctgctcctgcttccggttcatgtacactattctagtattcatctctacttttacttgcgcgccaggaaaaggaagctgcgctcactgagtttcaggctct

SEQ ID NO: 5800 - DNA, 545 bp, Zea mays
  Intron number 1 from transcript GRMZM5G881054_T01 (locus G RMZM5G881054) derived from phytozome v7.0 (chr-ID 9; pos 1 39161946 to 139162490 reverse strand)
gagtgcctcctctaccagaagaaggacatcaagcggtaggcggcaacagttcacgctctttaattacttctctgtcttgttaattgcgtccttgctttagggggtggttggttgggccattgggggagtagagtagggtgcgccatggcagggaggagagaaggctgcatactttgagtatttgtgggaagaatcgtcaggctagtttatcactgctgtaaggctcaggcggctaatgattttttgtgcggatattaggggtgtttggttcacccttctaagctttagagactaaattttatctatgcgggagatcttatttatttattagtcatactgttttcacgcaaatgtatgtttgtttgctaaagtacattttaccagcaaccatgttcattagccactgatcattaaaatagtacgcatcttatagttgccttacctagaattcatattgttcgtggcagacacaaaaaaaattaagtatttggtcctaaactatctacttttctattacccttgttcttccagcaagctagcagcac

SEQ ID NO: 5801 - DNA, 817 bp, Zea mays
  Intron number 1 from transcript GRMZM2G002879_T01 (locus G RMZM2G002879) derived from phytozome v7.0 (chr-ID 2; pos 2 02635931 to 202636747)
gcctctcgctgcccctctccgccccgtccgctccggtacggatacgcaacccccccccccccccccccccctcactcctctgctcgccattccatcgctctgcccatgtcctctgcatccgcgtgccgattcgcaataactagcttcgttgccggctctcctgtcggtgttcttcccaccggtcggacacattcatacggggccatgtggctaggcttcagagaaccgtggcacgtttcgcggcgcatgcttactacgagtttaagtgttgtagcatactgaacgaaatgttgggtttgtccgtttttttttatgtgaaagattggggtaaattgtcaggagattccaccaatttatctcgttgccacctttttgccctttgtggcagcagtagttgagttttgagcgaaccgaaactcgtcggtctatacaaaggagagacttgctcgggttggttatgttatatgccagattgaaaattagctttatgccgtgctgcataggaaccagattcacgtgtcttcgtgccattaaaaagatttttgttgccacttgtcattaacaccctacgtggttattagacacctctagtaagccatacactgatacactctccatatctgtttctgcgcatgcaaatatatagtttgctttctccttgctgtttcaaggtgcaattatggaaccatccggtggctttggatgaagctagttgttttttcgtatgcaggttacaactaaggccattttgctacaactgtgcctaactgatcctccttgttcgcattgttgcaggcaagttcgttgtgccaaagcg

SEQ ID NO: 5802 - DNA, 860 bp, Zea mays
  Intron number 1 from transcript GRMZM2G087194_T01 (locus G RMZM2G087194) derived from phytozome v7.0 (chr-ID 9; pos 1 0322689 to 10323548 reverse strand)
ggttcccaaatccagaacgaatttccaaggtatctgactgccaacaacagcacattttctcacgcaacagaatcatgttgatgccatgtgtaacaacagttaaagtagctttgatttcatcaaatatcaatgtcatgctttgtaagatgataggttgtttaatatgttggtgtgaagccgtgccattgcaattcttccacgtatcattccttctccttcgcaaatcgaagtcattttccacttttccttggccctgccttgtttcttggttgttcattgtttacatttgggatttcactttcctgagctttctagttattattggccttacataactgtaaatatagcatactaaatatttttttcccttattgaccctgaccaatgcataatccaatacattagactaaaactgagtcggttctctttgtataatgtgtgttactgaatactcttgaattgctcaccactgaaccctgtagccaatgtaatccacaagttcatgtatcaaaagacagcggttcataacaactaaaacattagtatcctcccggcatatacagaaacagttgagaactaaattttggctgtggagcatcataaccattaaaaacaaaatatcagaagcatgtgcaaggtgacctcgacatgcaaaaataatcattaacattttaagaatgtaccaaggagaaatgcccctccccccatctatgtgaacaaacaatgttcttgttgatgcgcactgcatttctcatcactgtgcgtcagtcatatcatatgtttctcctcatgctatttatttttctataactgacgtttaacatcttttttggtttgcataattttaggtaaagaaatca

SEQ ID NO: 5803 - DNA, 1008 bp, Zea mays
  Intron number 2 from transcript GRMZM2G009894_T01 (locus G RMZM2G009894) derived from phytozome v7.0 (chr-ID 8; pos 3 6504025 to 36505032)
agcccaagcgccaccggcagacctccaccaagggggtaagatgatttacttgatgtccctcttccgtcgtcccgttcggttgattgtgcagatgcgtcagagtggtcattggttgataccggaatcatgtagctgccgacttcattggttgttccggataggtgaaatctatcttaggttgtgaagttagttcctggatgcgaaatttttgtatggtctgttctagtcgctgaacttggttcctacatgctaattgtttttgcctggttttctagtgccgtactagtagtggctcatgctcgcggtactagcaaatcctgttagctaggatgaaagatatctaagccatttgtgaaagtctcttgcggtagtgtggtaatgggacgtcctggttttataaacctattgtaactagttatcaaaaggatttggtgcatagcctttttttttatatccaaggccacttaattttctctcaagtcttgaagggttgtgagcttgtcattaccctgctggaatttgtttctacttgtgatttgaaaacacatttagtccccgtttgctgctgcggtgtgtatgaattcttgcagctgttatttttcttgtctttgtacagatgatattcataatgtttttgttcatgttggtccagttgatcagtctattattttactagagttacatggagtttacattgaagttgaacttaatcttaatatcaagcgttctcctgctgaggtttaggctgttgctatgatgagacgtaataccttctgagagcagattactgctgtatgaacctgggaaatattctttcattatttcctcctgagcggttacctgagcaactgcacaactttgattcctgttgcgcttcatttaggatgctatttgtattgagatgtagcacaactgttacttttgccaatttttcatctctaacagctgcttgagatgcaccttggtttttgctctacaactgaccctttgcattgaccatgtttgcag

SEQ ID NO: 5804 - DNA, 819 bp, Zea mays
  Intron number 1 from transcript GRMZM2G092648_T04 (locus G RMZM2G092648) derived from phytozome v7.0 (chr-ID 2; pos 1 70390291 to 170391109 reverse strand)
ccacgccatctgtgcccgtgcactacttgcccaaggtttggttcctcagatttttgcccctctttaggtggaatttaagtggcgtgcttgccttatcttgcaccggttgtgtacttgtgtttcacgcgcgtgcgtggcgatgcttggtttgacttcgacgaaacgttttatggctgctagaagcatgatgcaacacggcttctgattgttagatttctgcccccatggtgcaaaattcgtattgccgttgtcaatcattgttgttggggaaagtttgggatccgtagaaacttcgcttttctctagtgccaagttacacctcaatgattggagaattaaattagagaatattccatttccccagtgtttatgccaacttgtcatatctgtgctgcatgaatgtgttactattggtgtttttttacaacttttttactagtgcacaattgaaagtgttgctagagtgattaatatccactgcactgatgtagaaactattttcttcaaacaaagaactgttagttcaaaaggttgggatgggttccctatgttgatgttgcagtcatgtcatcatgtgagtcagccaacataggttctttccctgggaaagccggttgggaagcatttagttccaaaaagaatctagtcagtagcattattttatggtcaggctagcattattgcttccaggagaggtacaatttatattcatcagagcaaaaagagttttttttgtgaatatgttgcttttgaagtttctttttgttccttcggtttggtttttttacgataaatgatgatgcatttattcagaccagc

SEQ ID NO: 5805 - DNA, 756 bp, Zea mays
  Intron number 3 from transcript GRMZM2G146472_T02 (locus G RMZM2G146472) derived from phytozome v7.0 (chr-ID 2; pos 1 37978576 to 137979331 reverse strand)
tcgctgcttgaggtgacgtgctgtgattcaatctgggctttgttgtcacctgtcataaaaactaagcattgatgttgtcttatcagatatatctattgttgggaagtgtttgcaatctgaaattatgtgaagtagggattgtgttggggggcaacattttgttttcgggtggacacacatttgtttttgtttgtcagtagccttttctttctatgattgtagtaaaccattaaatctctcatctgctagtctatattgtttatttgtacgatgtacattagtcaaacgatattttttcgggcttaaatgccttcatttaacattctcattttgtttgcacatcaatgcacaactgaaacagagttacctatcaactggaaagactgctatttgtttgttgtagtctagtacatggtttgttgcattgccaatactttcatctcccttcacaagttatttgctcttatgtcctagtgctcttttccttgcactatttctgattagacctttcacctgaattatgtgaagctcaaattatttaagaaataataatgctgatgccatgtgcatgtgttgtttcttcgccttgttcattgttcttctgaaactttgcacctgcttcattctagcattcacaatatatataattgtcaaatggtagctttacttcattctagcaatcttaccacaattgaagtgatacaggttccaactttttcttattaagaacttattcacttccacttttacaggaaa

SEQ ID NO: 5806 - DNA, 666 bp, Zea mays
  Intron number 1 from transcript GRMZM2G153541_T01 (locus G RMZM2G153541) derived from phytozome v7.0 (chr-ID 9; pos 8 7061800 to 87062465)
gcagaaaccacaccactctactgacgcccgacgaggtacacttccgcgcgcgcgcttctcttccttcttttttcgctcgacgaggtactctgcttcacgcgcgggcgcgcttctcttccttctcttttcgctctgccttgagcctgttcgtttgatgcccagatctactaggtttgtcgatcgtcgttatgtgtgatgagctgagccgattcatgcactgtatttttaattaagtgtttttttcctccgccgctacctttattgtctatgtatgaacttgcagcttacaactggttattgagccataaattgtaactgagtttccgagatctataatattacgtggctgaggcgcttcatctctgttttgtttgtatgacagtaggagtactaatccaagtttagcttccgcttcttcatctacctttagtatgtatttcgtatataaatacgattgcagtttgcaactgattctcggccatagatgattaccgttgcgttgttcatcgggtctagtttcggatctctgatgttgtgtgggtggggtacttcgacttgggttttcctgccctttgtttgattactggtttattgacatatatttatctattgactttttatctgctatgtttgatgtaagcagcagtgtaacattttccttcagcc

SEQ ID NO: 5807 - DNA, 932 bp, Zea mays
  Intron number 2 from transcript GRMZM2G382104_T01 (locus G RMZM2G382104) derived from phytozome v7.0 (chr-ID 2; pos 7 28402 to 729333 reverse strand)
accgctctgcctggcccgacccgcgccagttcctggtatcccacctgccttctctttcacgctccctaattgtgcgcatctggtgggtgtaactggtagttcggttcctggttgtttactttgggcattatagattccttgcaacttttggttgacatacttaagctctgagaatgcctcttatcatggaggttgttgatttgtacctgttccagtgatgatatgtatgcttgctatttacttattttgcttttggatgcattatgatggcttgcaaatggaatggtggcacctaccaactgtttgcctagcattttctctcttgttttgtttgattgttagattccatttctaaacaagtattgtgtgagacagctatcatatcggttctatgagtcccatcattatgtccactgctgaacatcactttttgccccgctttccagatcgaactggttaatgtgaagttacacatgtagctagaaatagagcttgtgttgtcatctcagtaatgatatagtgccaaatatggggaacgtatatgtttatttctgtagtgaatcaatgttatatacatctcaatggtgacgctttaatgatgtccatcaacttttctcaaccaccttttgcatctttgattccatcagatctacttgtactaatgctttatgtgcctatcaaattgcgatacttatccacaaggcattttatcacttatggttctgttagtctgttgtaatttttctgtgaatcacatgtggtagtgtaatacatagggaaaaacgtcctcttctttgtgcataggattgaattttatttgctttacccacaagtgcaaattttctaggacatggtcaaacactcaaaatgaccttttgtgaaatacgtaatttgtaggaagaagctagatcagttggcctgctccgaagcaa

SEQ ID NO: 5808 - DNA, 596 bp, Zea mays
  Intron number 4 from transcript GRMZM2G124239_T02 (locus G RMZM2G124239) derived from phytozome v7.0 (chr-ID 9; pos 1 23422024 to 123422619 reverse strand)
gaaacagttctgactggattccaggtaattatacacccccgttttttgttttaatattatatgagacattcctgtacatgctggatagccaagcgagtagctacctgttgtcaaatttgggatgtgcattttttgttgttagcagttcagttattttttcttaacattgattattagttacacgaaaatctacctagtgtatgccactttacatttaacatgtcaatttgtagctataatagagaactgcagatgcagctatgcacaccaagttctgcattctctctgctgcattccatgcgttatgcaaggattgtaatttcaatttatgttatccacttatcatattcagtgatgtgctctggatgacaccttttttcgacttattaatgattcaggaatgataatttgatttaaatgtaatggcaaaaccccttttaattctagagtattcaggctttaccgattctatgtatttctgcacgtttagattttttaaaaaactggctcttctttctttactaagtcatatttcaatgttttaacttctgtggtagacagaaattggttccataagttcagagataaaggtcctt

SEQ ID NO: 5809 - DNA, 971 bp, Zea mays
  Intron number 1 from transcript GRMZM2G336513_T01 (locus G RMZM2G336513) derived from phytozome v7.0 (chr-ID 2; pos 2 29611840 to 229612810)
tgggactgggacgagagggaggaggtggagtgtagcggatgcgtccataggtggcattggcagagcaacagccaacacgagaggatggtgtgccacctcagagcatctccaacaaggtgacccataaaaatgccttataacatgaaaacgagatgttttgagtcacaaaaaaacaatttaagtccaacaataaagcctcaaatcaggttagttatccaaaatctggtttactccaaattcccgccaaccctcccgtgcgcagccaggttttcaatttctctcccgtcgaacctccgtactactcatcgtcgcctcttgctcctgcctggcgccgttgacctacacccaaatgccaacccaggatcgagaccaggaatagccactcccctactgccgcccgttgttcctccacccaggcgtgctgcgctttcttcctcctcctgttgtgctaatcggacatctgcctcctacacctagtacagggccttggaatggcaacgcagcgacgaaagtaatagttgtggaccgttgtctcatggtcatcgccttagtcttcgacgaaggcgcagggcgcttcccggtaggttgaactccttgaggcatcacacgcggaagaagggctgttgtgcttctagcgaggatcggagaggaaacaagtagtgcgcagcggagggtcacgagagccggcagcgggtcgtgactcgcaagaactagcggcgcgaggtctgtatgagaagaaacccgtgaacgttcagttcattaagatgaggagataggtcagcccaattgggtgcaatatatttgtggcacttctagaggtgccctttatttttttgatgaaatttggtaaaatagggcactattggagttcttttttctgtgctaagccctatattttgatttagagcacttatttagggcactcttggagatgctctcagacaactcattttcttttcttttgggtgaaa

SEQ ID NO: 5810 - DNA, 835 bp, Zea mays
  Intron number 1 from transcript GRMZM2G009632_T01 (locus G RMZM2G009632) derived from phytozome v7.0 (chr-ID 2; pos 3 704345 to 3705179)
ttttttacaccatcaagttgttgattctttatcactttaaattgctattgatgtgtaaaaagagttgattatgtgttccacataaattgctagaatcctttgtggctacaaaagaattgaatcaattgattatagttttaagctgcttccattcgcactggttgtctgctacatggcgcgtagtgattttacagttacttttcttgaactaagtttaaatgctccgcgtcttatatgtactgtttgtttctgctcttttatcgaagcacgtggagtgatacctctgcacctcagtggctttatcggcgaggcttggttgctgaggtaattagcattagttttgatctactttccttcgtgctggttgttcactaatagattaatgtttgatgtcctgttcggcctaggatacttaccagtgtgtctatgtgttccaccaatatactgcattatgcacgcttgctagtttaaagtgtgatttcgtgtacagaacacagtacagagcttcttatttaaaaatatttgtaactttaacaaatcaactcttagatatacaacctaatgaaatatattcaataggctcgatgtgttctagcatattccgatgtgccatgcagtgcagaggtaaattcagtgtacttacatgcttaacttctatatatactaatgaagatagatatctgtatactgttaatgtctctacaacaaatgataaaaacatgttttccaagttaaacacctacaaattcttcggcacaaaagtgctctcccactttggactaccatagtaagatagcaatgtttatcttatcgttcacaagtcatctacaaagac

SEQ ID NO: 5811 - DNA, 708 bp, Zea mays
  Intron number 1 from transcript GRMZM2G153369_T01 (locus G RMZM2G153369) derived from phytozome v7.0 (chr-ID 2; pos 1 98391080 to 198391787)
ccctcggcgtcttcctccgattcggctgctgcagagtaagccccccttcccttccttcccttcgccaccggtcaccccatgatccgatgatgctccgtgcgcacgcctcttggcgcggacctgctcgttgattcctagctagttgatttcacggcccgtttgcccccgcgagcctgcctagcttcgggctaggtttcagtaggcggattgttcggctccaagcgtattcggaccgtgcttggtctgaattccaaaatataggggcgtcaaacgatgaactgcctctgaatcttatgccgtgccctcgtagatccctgcataaactgtagtacctgatctgcttcgttcccgtgttggccatttgactaggtcataaattcatgtttgatgtttccgtagccctcagaagcccattacgttgatgtgatgtgacagtgatgctctgttataggacaagccagcagcatccatttcgcaaccacaatttttctcctgatgggaaggagtgggtaaatcagacaactaatttgactaatctgaaccatgaatgaaactcagcgtgggatggagcagtgacatatacaattgtctgtttttgtcgtggtaactctgttgatgacattttactatccctggaacatactgacggtacgctttcttgtcttcttaacagatagagttctgcatctgcctgctgctcacaatcct

SEQ ID NO: 5812 - DNA, 456 bp, Zea mays
  Intron number 2 from transcript GRMZM2G410831_T01 (locus G RMZM2G410831) derived from phytozome v7.0 (chr-ID 2; pos 4 9684861 to 49685316 reverse strand)
ttagtgctgcgcccagagtacggcaccctctgccggtgagttggatttctattgactgtacctctttctctcttttccattttctccctgtgcaagcattgcttctatcccaacaaacaacttaacatgacgaactagggtgggagggtggggggcacagatctagattctagcccgaagctatgatggactttgaattcatgttttttgctctgaaatttggatggtattcccgactccttgtttttctttccctggctgcctcctctggtcaagaacagtatggccatgccctcccttgctaagaacatccagtcatattagtttcgtagtttgttggtctcatcttgttctacctgtgtattattttggtggttatttgctacatgcattgatactgacaaccttgttgcatttgcagagtggaacaaccatcgtggatcaaatagatcttct

SEQ ID NO: 5813 - DNA, 930 bp, Zea mays
  Intron number 1 from transcript GRMZM5G864923_T01 (locus G RMZM5G864923) derived from phytozome v7.0 (chr-ID 8; pos 8 6259843 to 86260772 reverse strand)
cacccccgcgtgttgccgcttgtagcatcggggaggtaatatgttctctccttctagtctatttaatgatttaatgaatgttgatattattactgaaccaattaggagaagccaattgaattgtaccatttcggtagcccctgatgggagttctttgatctgagtaagcacttctgcagatgcaccggtctatagtttgtaatcaaattagcatgatgaatggaactagtatcatttctgagaatagccttgatacaaccgattgtggtcagattgttgtggtagcacttttctgatgataacttatgtttcgtgttattccagtttctgtatcaactaaggcttaatcaaacattaatcttaaatttggaagcttgcgtttaaagatggagaaactgacagtaaaagattgaagatcctcattacacaccagaaatgttacaaaaacagcactaactatgcgaagctagtaaccgaaacaaagtgaccatactgctttgggcatcatgatcttttaacagacaatcaaccatgtgaaaatgactgcccaaacagtgaaattctccatataactccttaaggccaatgctgctacgtgcagctagcttctcagaagagctcctcacaaacaaactttcacaaacagggcctttgtcatcttgcttgacctgttcacaccggtgtggggtttggttgactggttttgttcagttgattttcaaacaaaacttaagatgaaattgagtggtaactatagtctgacttttttttggttgagatccataaggatttacttagataaattgtgtttgtcagctttggattgcgagtgaatgaattatttttcatgtatgtacatatttggttttcgcactgcattttaccaggctgttaatgccatctttttacagaaaaatacagaggaaggac

SEQ ID NO: 5814 - DNA, 539 bp, Zea mays
  Intron number 1 from transcript GRMZM2G089878_T01 (locus G RMZM2G089878) derived from phytozome v7.0 (chr-ID 8; pos 8 2835941 to 82836479)
ttagctactcagaagtatgtgactatgtcaaccttactgatgcttgatatgattcctcatgcttgtctgcagtagtttgcaacatgcaaatggtgaaactgaccatacttttcttttgaatcattggattggatctacttattatgctacatcaacctttattcagtgacttctactgatcaagtgctttatgtagcatattcattgttttagaaacaatgcttgagtcattcaacaatgttcttcgtgctacattaataatcctgggaccaaacactgtcccttcagataataataataataattataatgcatgtttatggttccttgttgcctttattgaaaacatttatgcgtctgatataaatcctagtttgatttacgctaatgaactaccttagtttagtttctttgtcgattcctcatttgttggcattgttttacttgcagaggcagttcttgtgcattattatcctgataattttatatttctgttttgtgcagccatttcgcttccattggtgtccatttggtcgctt

SEQ ID NO: 5815 - DNA, 603 bp, Zea mays
  Intron number 1 from transcript GRMZM2G168829_T01 (locus G RMZM2G168829) derived from phytozome v7.0 (chr-ID 2; pos 1 42864986 to 142865588 reverse strand)
ggatccgaggaacaagccgtctttgtgggctttaggtatacgaggtagctctaatctctatactagcagtcttattcgtatttgtggtaccggtgtccggtgatctctctatatatagcaagcgtagtgtcagtgtcactgtgtcaggtagtaggattactggagtattggctggaatctgtgtctcgtctcaaatgattcgttgtgaggactctcaatttatcttcttctacaacctgtttgagttgttgtttttttggatattaattgttctatagcctaaacagaagaaagatgaaagggtcttctgttgaattcagttgctggttcatacgaagggctgcattgctgcaaattttgttttccaattagatcgatgcattctggctggcaagtagaaagtgtattcagcaaaaatgtgaactaacacattcagtttctctcttcaatgtgagccatgttatttttaaggtggtgcctattggaaatgttggcgctttttgtgcattgttgtatagctcaaataattaaaagttgtatcaaagcattctttttgtctacattaaaacaactgatgatgtttggtgggtgtgctcattcaga

SEQ ID NO: 5816 - DNA, 839 bp, Zea mays
  Intron number 1 from transcript GRMZM2G047910_T02 (locus G RMZM2G047910) derived from phytozome v7.0 (chr-ID 2; pos 1 70149781 to 170150619 reverse strand)
ggtcttcactgttcacggactacaaaaagcaccaatccttgcacctgcgtatgagcgttgcgctatcttcgtatgggcatcccctccagccgtacgcgtgggaaacataaacgtggagcctcaatgcacacggagagatggattgaggaaggatagaacgcgtcggatgctaattttttaggaagagaatgcgagaacaagaaaaatcactattctttactgatgatatctgttttgttttaggttagtttacattcttttgaagttggtctaacgtcatcaatgacgtcaaacgaagcagctgcgtcttcattgggcacatatgacatatgtcgccggccgccgtttggacgttagcagatggatccgaacatctttttcttgtcaaggacaaattttgttgccacgcataaatgacgcatgtatgtatgccaacacacgtaatcaattcgatcatcgacacggcccgtaagtgaaatttagaccctttttggcaggcctatggttgctctgaaatacctccagctcttgtttgtctagctttcttgcttctctggaagagctagagttgttttaaatttgtttgataaaacagtttctctttgtattttttaatgacgtgtggaaaatataggagtagccgataaaaatcaggtttttagtgttcttgctctcaacaacaacaaaaaaaacgatctagctagttcttgacaggcattcagccttttttatagtaaccgtatggcttcattgcgtgcgcgtgactgctacataccttgtgttcgctagctagcactcttgtttgtccatccatcagcagtagcgcacagttagcaata

SEQ ID NO: 5817 - DNA, 769 bp, Zea mays
  Intron number 1 from transcript GRMZM5G894110_T01 (locus G RMZM5G894110) derived from phytozome v7.0 (chr-ID 9; pos 3 5462591 to 35463359)
gaaccgaaccccgtacgcacaccaaagcaggggtagatggcccttgtttttgtttcaattcggcccggtttacagtttttagcttttatttgaagaaactgttggagtaagtaccatatttcacttctgaaaattttaacctgtccccaataatcattttttgggagaaactttttagcattcttttggagttgctcaccctgccaaacagcccttcagcgcaaagggtctttccctcatgcgtggtctgttaggtggaaatgaaaattgagcctctagtcttttagtcttctgtgttttagcgtggtttggcgtgttgtaatgagtggttattgtagggtttctaacccatagtttcttcttaatataaatgatacgtagctctcatgcgtattcgataaaaaaagaattgcccatctctccctattagtttaagcttttggattgaactggttagtgcaacttaatattttctaccaaatcctctttatcactaattactggagaagaggattgagttttctcgatctggtggagatgctctaatcatgtttagctcgattctgtttagacggtttttagtggttgaaatgatttaaaactgtcttattgttgaattcatagtttagggccttaacgacacaggtgaccttactgtttaaacggccgcctaggcggacaatgattagaagtccttcacaggaactcaaagcaactattattgaactcttgtttcaggtcaaagatatagactctgttactctagaag

SEQ ID NO: 5818 - DNA, 704 bp, Zea mays
  Intron number 1 from transcript GRMZM2G573072_T01 (locus G RMZM2G573072) derived from phytozome v7.0 (chr-ID 2; pos 8 3015314 to 83016017 reverse strand)
ctgaagctatcaattggcccagtggttcctactctgtaagaatgtgttcatttggtacactacaattatttatcttatttatcttgatatcacattttctatattgcatccaactatataaagttattctgtataagaaacattgtagagttccctagtttcttaatttcagtgttaaaattatttaagacaattattactgtacacagttcacagaactatagggtagtatttattatcttattgtctcatgaattgctctatcttgtaataacagattttgtatccgaaagaagattctttatttgttttaaatacctagattcctccttttgctgcataggcaaaggaacaaattttaccatttcctaagtgagatttaactgtttcctaagtgttcatagccaatgttcatattatatactttttgtacaattgtttatcaagtggcattctagtatgcactgatcaggtgatgtgttggcgctatcagttttcagtcttcttcgcatcctccaattttcacctgaaaatcgtattctaacccaaaccaaagtcgaagtatgaaatgggtgtttctttgcacatgtaattgaattgaaacaattgcacaaacttttaagtttgagccaatatgtcataagcacatcatggattttataaacttatgaagaacatcatttgcaattttgtaggcaactagc

SEQ ID NO: 5819 - DNA, 897 bp, Zea mays; identical to SEQ ID NO: 4481
  Intron number 2 from transcript GRMZM2G177575_T01 (locus G RMZM2G177575) derived from phytozome v7.0 (chr-ID 2; pos 8 3268407 to 83269303)

SEQ ID NO: 5820 - DNA, 1029 bp, Zea mays
  Intron number 2 from transcript GRMZM2G157749_T01 (locus G RMZM2G157749) derived from phytozome v7.0 (chr-ID 9; pos 1 28117237 to 128118265)
tcagccgccacatatctcacgctgataccagccaggtacccactgtgattcctgatccatgattcctgaaccgacagggttagccgagctacctgctcttccctatttggctgaacagcgaccagtcatgtaatctataattctgtaccgccattcacttactgtctgtgtaattggaaacttattttacgagtaaaatgtagtcctctaactttgtcggtccgtgcaaaaccgtccaaaatagagtttgctcaaaccaaatgccgacgccacgttggagtaaattgagtccccgaacttgacatgctatatcaattgggtatctgaacttaacatgttgtgctacttggatccccaaactttcattaatgtgatccaacgtggtacgccatttgagcaaatctggttttcaacagttttgcatagactagcatagttagagaaccacttttgctggttttataaattcggtgacccaagtgacataatgtgccaagttcgaggaccactactgcatttgactcttattttattcacgtttcccttccgttgctgctcagttgtgcctaactgaaatcaggggaaaaaatctgaatgtatatgcctcccgtgcagttattgctaatgctcttctgtatatggggaaagtgcaacttcagtaaaatacaaaccaattcgattacttgtcagttgtgtttagttggaattttactaatttgcattcctttttttgttactgctaggttgcctttgataactgaaattagaaagaaaaaaaggtttctgaatgacagtagttaatgcgtaattttaatttgatgtaagtttcaatgtccatttccacatctacctatgttatattgttggaaatgaccatatataactacgtcaatctacctacatactaagatccttgcggtgccatttcttcatagtagattacatgaatagctgttttcaggaggttaactaactagatgtgctctctgtacaggacaatcccttttgcttggaacctggttaccgctg

SEQ ID NO: 5821 - DNA, 516 bp, Zea mays
  Intron number 2 from transcript GRMZM2G387076_T01 (locus G RMZM2G387076) derived from phytozome v7.0 (chr-ID 8; pos 1 66501792 to 166502307 reverse strand)
atccggtacggagtgcattttctcttctgaatcaggtaccaatcgttatcccctagactcccacttgccttttgcttttggtttaagcccaggttaccaattgtaagctgtagccagtcacttttcattctgttcagttaaaagtttgtttttctgaacacagtgtctcataagattgttagtataacaatagatttgtatgaatgctactattagtttgctgcttgctagcatacaacatactatgtagttgcagttgaactcaacacaactacaatgttctgtgcattggacattggcaatgccaaaactgtttgctccttgctagtttcttaattttcattactgattgaaaattaatatcagtcgtcttcatcaattatcaaaatgctgctcttcttttatgagactcagtaacttactgagcagtctttatcgattgtcaaaatgctgcactctttgtagtccctttatgagattcagatattgatatggtgggtttcatgaaggttcttg

SEQ ID NO: 5822 - DNA, 1022 bp, Zea mays
  Intron number 3 from transcript GRMZM2G074665_T02 (locus G RMZM2G074665) derived from phytozome v7.0 (chr-ID 8; pos 1 45151324 to 145152345)
gaaaagtggaacccatatttaaggtatgtctagctgagtagaagcatgcatcttatctcaagattggatctgtgttgtcgcttctactaggaactttggtatgatctagtcatgcttcccaagatcatatttagttgggtgtttcatacaacctaagatgtttataaatgagttgtagacaattttataagctttctagaaattcttggatcacctgttttggatgcctaaatctccagttatggagttttgaagtgagtagtcgaattccgtccaaatctggacaacattatcatttaatactgattgacctttttaagtgtctaaactcatggtgatgataataccaaagttgtatagggtttcttaggctttccagaaagtcttagttcactatttttggatgaatattttgtgagttatgaacaaaacaattgactactgtgtgctgtccagaaaatctgcaattgtgcacttgattttgttcttgtttggctaagtaggaattattagtttttgattcttgagtgatgaagacttgtggcatttgaaatgtttctccaaatgtcttgttgcatatggttgagttttttctttcttaatgtgtgctctaaacctattagtttgggaagtgatgtgcctgtacttagagggatcatcgtgattttgtgctcatggtagtatacaacaaaaacatgtgcttttatcttaacgtctgtttggtatatattgtgtgtttttgtgagaaatatattgcaaaatctctctctctctctatatatatatatatatctacacctgactctgcaatatataggacatcgctcgaattgtttatatgcaggaataggttgtacaaataatttgaaattgacattaaccactaggtggccacccatcattgttttttaccataaggagtctcattttccagttcttactgaatatacaaatttatctaaatttcgattgtttttatgcttgtgaaccttttaggttctgcacaacaggacttcctagcg

SEQ ID NO: 5823 - DNA, 608 bp, Zea mays
  Intron number 1 from transcript GRMZM2G145944_T01 (locus G RMZM2G145944) derived from phytozome v7.0 (chr-ID 2; pos 1 70880822 to 170881429 reverse strand)
acaaatttctcttaaaaacagtaggattctttcctcccgtagaacctcttcatttcctactttgctgaaattgatatatatcgaaactattttactattttgcttaaatggtcgtcaaggggtagacagatagcaaacatgcactagatagtactcttgtctatttaccagatgataatgatgaaaggaagaatcaagaatgtaataactgaaaaggtagatgtattttgatgatgtgtaattccttactttcaatgtccctagtgtctcttctaagattgttgtcaagatgaatacacaaagaactaagctaataagttgaataaactatttgaacctgcatatgttgtgtgtctgttttttcttctttgtcattcttgttgtattttggatttattctgtaattattattatttatataaaatataatgataatcagtcttcgtgtgtttttctagaaaaaaatatgaacaagataagcctaacgaagtatagaatgcagactgcaagtttcagctcctcctcctattgttttgactattactccatgtttgctgcttctttttaagaagaatagtctgatagaaatggtgtaggtggaatgcagg

SEQ ID NO: 5824 - DNA, 693 bp, Zea mays
  Intron number 2 from transcript GRMZM2G154156_T01 (locus G RMZM2G154156) derived from phytozome v7.0 (chr-ID 2; pos 1 07092461 to 107093153)
gatctgttcgcatctgggactacaattccggcaaggtagcttggttctcggctcccgacgatgtatctgattatgcatggattaccaacaatatctctgatatgcacaggctaccaacaatctctttgattatggacgagtaacgggctgcttccacggaggttccagtgaggaggttgtcattgttcgtggtggttcatgtgctgattagcaatgtgtgcaccctatggaaccaaccataaccgaatggtgactcctaattttttctgattggttgtgcctaaatcaccaatcgtcagcggatttcttatgattagttgggtgatcctgtgctcctggtttggattggatgttatctgtcaggctagccttgttgctatatattggaggctcttcgcctgattcggttacccgtttgcctgggatcagtttgtggcgctatctggttggttgtcacttggttgatacatatgattgcatgatctgcaagtgaatcttcagagattacaactatctcattagtggatagtcatgcatttatgtaaaaatatagcaatgagaaaaaggaacaaagtaaagaaaaagagaaaatatagatggagatatgtgggagtatatccaagaggatggaaaaaatataatttgttatcatattacaatttttgttcttaatgtttctgcaatagtgtgttg

SEQ ID NO: 5825 - DNA, 243 bp, Zea mays
  Intron number 2 from transcript GRMZM5G873123_T02 (locus G RMZM5G873123) derived from phytozome v7.0 (chr-ID 2; pos 2 09496531 to 209496773)
caaggtactattcttggaatacttaatctagtgaacctgatttattttggattgttaattgcaactggtctcagttctctattattgtttttgagttatgcacctttgaacctttggcattctcatttttggaatgtaaccttttgcatgtttatgtcaactcgaaaaatatcttgctgccttgtttatgatgctgttttttttcttccagacaactgataagaacaaagtcttgtgtccgga

SEQ ID NO: 5826 - DNA, 600 bp, Zea mays
  Intron number 1 from transcript GRMZM2G097502_T01 (locus G RMZM2G097502) derived from phytozome v7.0 (chr-ID 8; pos 1 01670853 to 101671452)
ctggtgtgggcaaggcaaaagccggcgctgccaaggtttgaggaattcttgtgcctcttgtttgatctatgtttaattagatcgcaatatagcatgttttgttaagtagcagctgttccaagggattcttagtcatctgttagattgcagcaatatacagtcttcctaccgtacataaaaaatctaactaattctaatcatgatagtgttatatattggggacagcactcactgtttgttcagtatctatagtcttcttcatcatttgactgggaatagttcaagagattttcttgtagcaggagaccatgttattctgtatgtcttatcaataaatttttatgacaaaagaaattgagcttatcagcttatgtcctctaaacgtcttataattaaaaaaacaattggtctatcatgcacaagctcaattgtctttttgcagctacatgtgcttcaattatcatttagtacacctcatagtgtaggttaatgctgtgtttatggcggagattgttaggtaggcatctctatcattcatattggttcctttcctgtattgaaacaggtttcagaagtgagctcaattttaggtagagctag

SEQ ID NO: 5827 - DNA, 744 bp, Zea mays
  Intron number 1 from transcript GRMZM2G002828_T02 (locus G RMZM2G002828) derived from phytozome v7.0 (chr-ID 2; pos 1 95915387 to 195916130)
gctgacaggtacgcatctccggaactccctttcttacgctacagcttcgatctggttctatccaagtatgtagtagtttgcgctgatttctaggatatactgtgccgcgtgcttgttcgcctgattttgggtctgggacgatggatttaggtgaggaatgtgacgtggggtttcagggctggttatcaccgcgcgcgggttgggggggtctagatttggaacgtctgattgatatattttcgtcgacggctttttctatattcttgctgggtttggtgctggatgattgtcccttgcattggatctactgaaaatccgctctttcataggatgggaatcgatgtaatatcattgatttcatcaggacctctcaaagattcggtttttatttgggcacacactaggttcggctagagtacttgtgctgctcccacctacgcatcattatgctgtgcaaaattaagcattgacaggttcatcgtgatggcatgtagtacctataccttaaggcacgcgattttgttagcaaatgatcattctagactgcggcatttattatacacacattaaaaagatattgtcacatatttctgatttgggcgaatagttgcacagtactcaaactatgtcgatagctaatttgatttaagctgtgtggaccttaaattttgtaacatctgccaaccttatgctgacacggaccatgtcttctgcaggctaggtcttgtggctactattaaggta

SEQ ID NO: 5828 - DNA, 875 bp, Zea mays
  Intron number 1 from transcript GRMZM2G367267_T01 (locus G RMZM2G367267) derived from phytozome v7.0 (chr-ID 2; pos 2 04660498 to 204661372 reverse strand)
tacaagctcaggggcgccatcctgcacccctacaggtacctctgcacgcatgcgaactgaacttctggaacacctctgcaccgtactcatacaaatctaatatgtttcatttcatgcgcacacgtactagctagtagctagctgaacaagtgtagtgtagctttagtacatcctcccgaaagaacattcatgaactgtgatattaatctagctaaaatttaatcatagttatgtaaatagtagtaatatttgtttttttcaaataaatctattatggaaaacgtattttataaatattttaatgaaacttattgtattgtattatgaatgcttgtattttttatttaaatttaattaaaatataaactgtttagtttgtcggaaaacgagaactgcattcttttaaaatagagggagtgtaatttcactgcggaaaccgtggagtttcctttctctctctccctctctctctcaaaagtcgttcttgttggagatgcctgcaggagaatcgatcttacaagttacaagcacactaaacaacatacgagtaattatttacgaagtttctttaacctatccgtccgtccggtgttgacctgcacacattcacgcggtgctccacgttctaggcactcctttggatgctaataaatgtcatttactcgatcgcactcgcaccactcttgtttcttttctctgttgacattagcaatagcaacatgcacgatcatttgacatttcagtaacaacaacaccggaattaatacatacccgacgacacattctttcaccacagccatcatcattatctgatgccaaccattaattccactgttccagggcgctaatcttggtgcgcctcgtcgcggtccttc

SEQ ID NO: 5829 - DNA, 986 bp, Zea mays
  Intron number 2 from transcript GRMZM2G365160_T01 (locus G RMZM2G365160) derived from phytozome v7.0 (chr-ID 2; pos 2 12181952 to 212182937 reverse strand)
gatcacaacgagcaaggtgataggtgagaaaattcagtcccctttcctgtgatttttcagtagcaatgttgctgtggaaggttgtcgctgtcatttcagaatgaaaaacatatctcgttatcacgatggtacgatgaagaaaaagttatgcaatatatgttgccagtgatagcacagatccgcctcttttggtgataatttcaaagtggaagtaactattcttagttattgaacattttgatgaaagtttaacatatggattcaactagaaccattcttaaaatagagcaatagtgctcagcattttttgtggttcttattcgtttgttagtcgtcaatggtgtaaaaatcatgtggctcatttggaccataataagtcagtagtatgaagttgggtacaagtagttgtagtagagtatgtcggatctttccctttacatgtccccttctttcgcagaagctgctagcagggcatcattgtctttgggtggatatccttgttgcatatattgattcttttgtgtgtaaacaaggtaccatgagaaagtattattgtcagtcaataaaacatgccactgctaatctgaccatgtaattcctttattgatcatatttaatgcatacagtctttctttcggtttaaggttttggtttagtcacggcaatatggtctatattgtttaatcgatgtactttatgatattttgtggacttagtatttggcttttcctagaaaattattgcctcaccaaagttctcacaagtctcagtcagaagggcacatgtaaagcaacaatttgtaaccagagatacaggaatagtttagctaatcatatattattgctacattattacatgaaatatttatctaattttggttgaattaaaattgtgtgtctgcaaatggctaaatatatatcataatctgatgtttgatattttcattggaatgatatataggtaccgtgaattggcccatagggtgg

SEQ ID NO: 5830 - DNA, 620 bp, Zea mays
  Intron number 1 from transcript GRMZM5G866336_T01 (locus G RMZM5G866336) derived from phytozome v7.0 (chr-ID 2; pos 1 52919416 to 152920035)
atccacacgggcttctgtacgcttctttctccgctcaccccctacctgctcggcatccaatcccaccttgttgtttctttgagatttctaatcatgattatacttggacgaatcatgtgcggttcatgtgagagcaatatatttagtctccatatttttttgtctgtagctaccgacgtaccgttagtcagattgcgaaatattctgctgcagcattgctattctgtattctccttgttccaattggcacttgcactttcgctgtcatccgaattcagtacctaaatctagcattaagcagcatgtggcaatttatagactaaaatggaataaaatggtgggactaaaaattagtccctagaaaccaaacatcccataaatcatatgtaagttgtaagtgctcctaaattacctcaaataactataaaaatcgggctgttcaatgcatcttctcatcaataacaatccaaatatttgttactttggtggccacataaataattcaaggcaagttacctagtaccattcatcgtgtcgagttcatttagttttctctattttcactgccgcatcagaatgcatctttttaacatatttttctctatggttctatgctacag

SEQ ID NO: 5831 - DNA, 729 bp, Zea mays
  Intron number 1 from transcript GRMZM2G001283_T01 (locus G RMZM2G001283) derived from phytozome v7.0 (chr-ID 8; pos 7 7234142 to 77234870 reverse strand)
acccctagctgtaagttgatttaagctcaagtttaattttcctgttttcaaaatgtgttctttgcgatatgcattgtcagaagatttatattcctatgatggctttgccacaatatatttttgctcaataatttcattgagcttttatttattcgtattgttagaagattatatacacatggctgccgaaataaaaacaacaagctggcatttgatctgtaccagatttcaatcaatgatttcgcttcttagtgtttacataaatcatgttgtcatttagtattttgaaattcttgaatacttctgacagtttgtttctgaacagttggagacttgaaccacttgattagtgcaacgatgagcggtgtcacttgctgccgaaataaaaaaacaagctggcatttgatctgtaccagatttcaatcaatgaattcgcttcttagtgtttacagaaatcatgttgtcatttagtatttttgaaattcttgaatacttcagacagtttgtttctgaagagttggagacttgaaccacttgatcagtgcaacgatgagcgatgtcacttgctgcctccgcttcctaggacagctgaactctgacctgcgcaagcttgcagtcaacctgatctcgttccctcggctccacttcttcatgatcggctttgcaccactcacctcgcgtggctcgcagcagtaccgtgcgctcaccgtccctgagctaacctagcag

SEQ ID NO: 5832 - DNA, 907 bp, Zea mays
  Intron number 1 from transcript GRMZM2G035063_T01 (locus G RMZM2G035063) derived from phytozome v7.0 (chr-ID 2; pos 2 13660854 to 213661760 reverse strand)
ccggcggcatcctcctcccggaaacatccaagcaggtagcagcaccatcgcccgctaatgttgtttttgattagtttagtggattcagtttccggcgaggggcgtttagatcatggtgtcaggaaaggtgttccgcgccgctcgcttgcctaactgaaaacgtctgcaggggttgggcggttgcaggttgggcgatttggatcgctttgtagattgcgaatagttgtaagcagctgcaaattttctcgattcttccacccaccggtgaagttagttctcattgggttgtagctaggtctatgtgattcagattgcttggtttggactgcgattcttaacttaggtataacaatattatcgtacaactgggtatgttttttttatgaagcataaatttaaatagcatgctttatggctacatgcagttccaaacttttgtgtcccgttggttctgaccacattgtctgcgggatttcagtaagctacatgagtttctattcttaaaaaaagaacaagtttttaagtttttacctgaaaacgttcatgtgctagtagctatctgagtttctattttcttttcacactttttaatttagcatgcttttaatggctagttgcagttttacattttcctctctttatggcttttgggtagtgttggttttcaactggagaaacgaattgtcttatgtttttgaagtgtacattaattcactgtttaacaatatttctgtggaaatatccttctgtattgtttcaaataaagatactttcgttttcaatttggacttattaattaattatttagtattcaacattgtatttgggtgtgttcaactggaggaacgaattgttgtagctttagaatcaattctctgtttaacagtgttgctcttggtgcagctga

SEQ ID NO: 5833 - DNA, 788 bp, Zea mays
  Intron number 1 from transcript GRMZM2G020104_T01 (locus G RMZM2G020104) derived from phytozome v7.0 (chr-ID 7; pos 9 23350 to 924137 reverse strand)
caccaagtgcagcggattcgtcggcacaatccaaggtcctactctgttttctttctttctttctttaattaactcttatggggattgagggttgagctttccaaccttggtgagattggcatgaatcgttatgtgatgtgatatgtctcctccgttctgggtggttattgcactgccaacaaatcatgtcatcatacatgtggggattgaaatttgtgggtgcagccaacatctcctttccttcactgaatctttttcttttcttttttcggtcctgctgcaggcaccgtattccattccttgcttgtctgaattgcattgcaacttgagttctccctttctccacaagaacatcaacattcattgcatcaagatgtcaatcctcccattcctctgttcaaactgcatggaactgggttatgcgttgcagattcattcagagtttcatgttccacacatcgtagcagcaggagtatggcaatagggaggaagggcactcttctagtctagtcaactccattatttttcttcaaagcaaatcatgctagcttgcatagctttgttcaattaaaaaaaacaaacacgagcgcgagtttgattttgtaagaattgccgcgtgtgagttaaactgatcaccagatgagatgggtcagacatccagccagcctcgtggtatcaacagtcaacggctgcatcattgagtgttagccaaactgcggccttggatgagatgagagtatgggactgactgacctttcgtgaacctgaactctgcagccctggagctg

SEQ ID NO: 5834 - DNA, 868 bp, Zea mays
  Intron number 3 from transcript GRMZM5G869350_T02 (locus G RMZM5G869350) derived from phytozome v7.0 (chr-ID 2; pos 4 0682521 to 40683388 reverse strand)
catctactgcagctctgcctaaggcccctgttgtttgtatctgtacttcctctcgtagaccataattcactgattgactgatgcatttgagaaaacctaatgtaattttggagcaatttttttttgtgcatagcattttttaaattctttccgaaatcacacctgcctgtttttaatgctgttggggctatgaaattggcatacaatccagagacattatgacatccatttctgacaatgatgtccttgttgtggtttgggttggtcccagttgtatatctgcttatttgtgtggctatttgctggcagtatgaacaaacttcttagaatttagaacacaaacaaccttctaaagttaacattgttcagatatgattatctattgatacatgatactacctccgttcacaaatatatgacaacgttgacttttttaaaaaaacttcgaccactcgtcttattcaaaataataattcaaaaatgtaaaattttaagtcaagcacaaactatcttaagtgataaaacaaatcacaaaaaaatgataactcattatttttttgaataagacaagtgttcaaagtttttttttaaaagtcaatggtgtcatatatttatgaacagagagagtataacttattggaactcactgtgaatatcaaagtaaaaacagtttgaagaggattcaatcttttaacattttttaagcttgctcatggttatctaggcatctaggttcgaaatctgaatattaataacaacttatgtagccttagaatttttctagttagatatggttatgcattcctatactaatgttcatgcattcatacttgaagcttaatggcatcgctctatgcaactttgcagg

SEQ ID NO: 5835 - DNA, 515 bp, Zea mays
  Intron number 1 from transcript GRMZM2G340408_T01 (locus G RMZM2G340408) derived from phytozome v7.0 (chr-ID 2; pos 1 68892154 to 168892668)
tcggtggtcttccagctcactcccacccggaccaggtgagatcatcctgtagatctgctcatgaagcggccttgattcgggggatcgatcgttccttgggtttcggtttctggaatggtagcaagaacagatttttaagaatgaatattttcgcggttagataatttggtctttgcgacggttcatgtgccgtgcattttgcagttgcagtgtcctaagatgcttttgtccatgtcaggactggagttgcataatctcggtgcagtttgcccaatcaaatgatttcatctttgttattattgttttgttgggattggtggtcttctgttagctgtaaacttataataagagaaccggcgattattgcatactgttaaaaaaactataactattagacggagtagactagttctctttcaggttgtcatggaatctactgttttgtcgaaggtcactgacggaagctgtcctggtcctgttttcgcttttcaggttcgacttggtcctcatagcga

SEQ ID NO: 5836 - DNA, 501 bp, Zea mays
  Intron number 1 from transcript GRMZM2G586810_T01 (locus G RMZM2G586810) derived from phytozome v7.0 (chr-ID 2; pos 2 11810217 to 211810717 reverse strand)
tcgtcccagcgcgcgggcacgagactttatgcatatgtttttgcattgaaaatatattttcttcaagtttgcaattgtgctacatttttctgcttttacttcgactatatgtcaatgtgccaccaaaaatgtcgtgtttcatcaacttatgatggagtctgctcaattgtttcttgaatatacttttttgtagaatcaaattgaattttacaaggtggaatattgaccgggaaaaggtgggatgctgactgggaaaacgctaccccttgtatgaactacgctactcccttgtatgaactagctggtcgatgattttgttttcatccttttggttttcttgacatcggtttgttcattggggagcatataggtggaatgatgattaatgtttctgcatattaatgtattttattataacatgttgtcgtcgtaacaacgtacgggcatacaactattattaaataatttgtatgtcgtcccaacgcgcgggcacgagacttt

SEQ ID NO: 5837 - DNA, 392 bp, Zea mays
  Intron number 1 from transcript AC212970.3_FGT006 (locus A C212970.3_FG006) derived from phytozome v7.0 (chr-ID 2; po s 73944825 to 73945216 reverse strand)
gccactgcagcacgcaacaaggtacgtgagtttgtctttttttcttttttttacattccacacggtaggtaagaagaaaatagtactaaattaaaatctacccttataattaattattgctgagttttatgctgaataccctgcatctgtaacaaacgagaaatgcgaaatttcggtagaaattctaattgatattgcctgaaaacaaatattcgcattctatttgaaaaatgttttgacttaaatttgaccattgtttttttttgaattagacctttgtagttcgaacaacagttaaattatgcgagtagttctatcttaaaattcttgccgcttttgttcgttctaaattttaagattgtgctgcgttataggtctacgacagcggtcag

SEQ ID NO: 5838 - DNA, 543 bp, Zea mays
  Intron number 3 from transcript GRMZM2G023037_T01 (locus G RMZM2G023037) derived from phytozome v7.0 (chr-ID 2; pos 6 027998 to 6028540 reverse strand)
ggcacagagagaggtttattaggttggtttatttatcttaaaggcacttctagtcttctacaatgtttttacatctattcttattcgctctgggagtatgacatgttttatgtagtattgcccatttctctgtgtatattggaaatcctatttctggaagataatattttttgtacaatccacggctgcaacagtatccctaaattgttcttcctatagtttataatttgtcctcttcagctttaacaagttcaaaattgtttactatttttgttttgtggtaccctagaaatctgatttttatcctagtactctttcattgttcgaattggtctttgctgctttacaagctaataatttttgtcagacctatgagagtcttttccatgttgagcgttcaggagtgttaaagtaataaatgcttttatcaaatgtcttatagacctgaaacttcttgcactgcatagaatttccatgttttttgtgttgaacccttagagtttttaagttgtatcaccgatcaccatattttctgtaggctgg

SEQ ID NO: 5839 - DNA, 926 bp, Zea mays
  Intron number 1 from transcript AC211738.4_FGT005 (locus A C211738.4_FG005) derived from phytozome v7.0 (chr-ID 9; po s 23142567 to 23143492 reverse strand)
ccgcctacagggcaagtacttattccacgagcagagtaagtgacaccaccctccggcacacgccctcctctaaaatcaccctcccgtgtccatcgattagaggagtacaacgggtgtagaggggatttcagttgttggaaggattgagcgaatggggattgctgggtagggttagtagcagttagggaaatgttatgtttttgcatagcctggttcactcgagttgaaatggacctgctcttttgtgcacgttttcacttgtgttgaactttggctgattgtattaactataaaagaattgataagattgagtaagtcaacgatacctgtacgagttatggatcattcttcggtagcattgggtagagttagtagcagttagacatgtttctatgtaagtagatgtccatctgctttagtggcagcatgaaaatgtttatttcatgagttgctgggacttcaataatagatcttcaagaatactcatctcaaccttatacttctaggaatcattcaagtggaattttacctttttaggttctgttgtcttgtattttcttcttattttctacctagctttcaagtttgttgctatattaagtggtcacagaagcatgatactgaggttgtgcgctagcttttctttatttctgttttgattatgcacctttgttattgttattgttgttgtgtttggggattcagctttaacataacttgttttaactcatctaattaaagttgcaagctctcttgtgcccatattctgttattgttattgttattgttgttgtgtttggagatccagcgacgagttgccgccgcagctagtcgcctccaccgtgaacgccatcatcgccgtgaacggcgttaatttattctgcattgcagactggagagaccacggagccatcaccgccgtgaag

SEQ ID NO: 5840 - DNA, 971 bp, Zea mays
  Intron number 2 from transcript GRMZM2G315341_T01 (locus G RMZM2G315341) derived from phytozome v7.0 (chr-ID 9; pos 9 7848470 to 97849440)
tttgtttacgggcaggtaaattgtaggtttcactcgctaggtaatgctgcaaatacataacttttaagattgtgcattattttgtgtttacccttcattttcaatgcttatgcatacaaaattacatttttctgcaagtttggaagtggaaaaacacatacaatgtttggtgacatagaaaacaggacacgaagaaacaatgtgaattgtggtatgatgccccgagcatttgatctttttcggaagcctatctcgaaagaacctccaagttaagcgtgcttggcttggagcaatttgggatgggtgatcgatcgggaagttttctcgggtgcgcatgggtgaggacaaagtgcgcacaaaagactcgtgttggtttgtggggacgatatatgatcctagagagctgccaggagtaagtaccgctggtccaggtattggacaggttgttataagtggtatcaaagccgaccctcaaggtttcatgggtgtgtgtgggctagggggttcgggtttatggcgcatgacgcatgtgggcctggagtggtcacatggcattgcatatgatgacactagacacatagacgtggctaagaggggaggttactggattggggttgaccgacaaggacgtcggtcttctaagggggaggattgtgatatcctggcccctaggatggtgatatcctgtcccaaggcttaaatataattaatagagtatccataccaacaagatgcatcttctttttcagaagcctgtctcgaaagaacctccaaattaagtgtgcttggcttggaacaatttgggatgggtgaccgaccaggaagttttctcaggtgcgcatgagtaaggataaagtgcacacaaaagactcgtgttggtctgcggggacgataaatgatcctacagagctgacaggagtaagtcccgctagtctagagattggacgaggtgttatacttcttaggaggac

SEQ ID NO: 5841 - DNA, 729 bp, Zea mays
  Intron number 1 from transcript GRMZM2G351417_T01 (locus G RMZM2G351417) derived from phytozome v7.0 (chr-ID 2; pos 2 08196331 to 208197059)
gctcccggagcggcgacgccaagcgcgacgagaaggtgagatcgggtctgaccctctgtctagggatttcgtggcttcgattccccatttgtgcccgatggttcaaccccgattgcgcgtgaactttacctaatttgtgatgcatgacacaatctcgtgatggaaatggtgctggcacagccagagtgccctagtttccttgatgtcattcatgatcaaattgtagcaagtatgaagtgaatatcgcatggaactcctagaaatatgtttttaggtgtatcagcagaactgagctagataggtatgatattagttggcgcgaatatacgcatctcgtagtttatcaaccatcagctttttatcaaaagttcataactcattgcggagttaccagtgggtatgagcagctgcggaaaatatcttatgcaatcacttatattggtgcaagcgtgcaatcaagcgatttggtgcatctaatctagatctaatgatgactgttaatttacatttaaccccttcaacctcaaacatagtacctattttacttttaaccccttccatatgaaaccgcatgttaccactagacagcttcatgctctatatgttatatgaacctttggatacatgtagaggcttgtggccatctattggaaaagaaaaaacagattgtaaatgcacaatgtcttatatccgttagaatgagctgtgcctaaggatgagtttatgcag

SEQ ID NO: 5842 - DNA, 588 bp, Zea mays
  Intron number 3 from transcript GRMZM2G345238_T01 (locus G RMZM2G345238) derived from phytozome v7.0 (chr-ID 2; pos 4 4549278 to 44549865 reverse strand)
gcttctcgacgctctcctaggtaattttcccgtctcttcattcgaactcatagcagtaccacacaagtttttcttgattattggtatactcggatcagtggtaaaatgaaaatctatttgtacctggctaaattagttcgtttatgctttcttgcccgttttctgccatctttctctcttgataatttttacactcattgaccctttgacttataagaaataaccacacaagtttgaaccatttgttctcctggttgtgaagtgtccatttcttgcccgttttttgcccgattcgatctattcattgcttgattcaagtctgcaactaattttgtgtctataaaatgcatagataaaatggggttacactgttgtagattggctagatagagattttagatgatcttaatctaactgttttcactacattaagttctgaatctaactgttttcactacattattgttgtttaccttcacatttggtttaaaaaatgctggcgatatctgctgcgtttacatagcatcatagatcttaacatcgggaatcctttttttgattaaaggttttggacttcaaaactttgtc

SEQ ID NO: 5843 - DNA, 747 bp, Zea mays
  Intron number 2 from transcript GRMZM2G071214_T01 (locus G RMZM2G071214) derived from phytozome v7.0 (chr-ID 9; pos 6 1714340 to 61715086 reverse strand)
agaatctgggatcctaatacagtgagtttcttcctttccatcttgttcaaatgttttcttcattagtattcatggtgtaattttacatatatattgggtttgatgtggatttaaagcaaactctaatttaagacattactgatattttatgatccattgggtgttggtttgcttgccttcttgaagtaaaacatggccatggttataccttaaaaggctttaagctagtttctattatggtgcaatctgaaattctgaacgtatcttgaactcttcctgtaaggctgtaacatttgaatccgtactggtaatgcatgccatagcctctatctgaagcaaattagggaagttactacttactagaatagaacccaaattttgtatattaggttgtgctgacagctttattccttatttacccttgtttgactttgggtttatttgggaagcatgtatttgcatagcacttgaaacccaactaccttcaaacatatctgcaaattcttagggaatatgtgagttatcagttttaccaaattatctgtggttctaggctacatttatgtctatgaggaatatgtttctcacggcactaatatctatttagtacctgcattctttttgttgcttgttgatgatactaatactgtctgatataactagttgctttttctctctttggtaagaatctgcaattaaatttgacatccattggttatatattttttccttgttcagttaccacac

SEQ ID NO: 5844 - DNA, 434 bp, Zea mays
  Intron number 1 from transcript GRMZM2G071214_T01 (locus G RMZM2G071214) derived from phytozome v7.0 (chr-ID 9; pos 6 1715173 to 61715606 reverse strand)
tcttctcctctgagagttaaggatcacatgtaagtctctattttctcttgtgaagggttttcacttgttaatctttatcaaaagttagttccagccaatcaaccatttctacataaatcttctgaaggaattctctcattggatgggattttcttactctacttccttctgcaaacagggccttaccttttcttggttctccatcctaatatcatgccatttcacacacattctgtctgttttgttaaaaaacagatacaactgctgcaattagtttttgaatctgtatgtttttaatgtgtcttggaagaataagctgtaaacagcgggtccaaatctctattacttttgaaatgtaatcaatagttgaatgcttattgagttacatattgtacctttcactgggcatgtaattgctattttctatttcaggt

SEQ ID NO: 5845 - DNA, 904 bp, Zea mays
  Intron number 2 from transcript GRMZM2G444039_T01 (locus G RMZM2G444039) derived from phytozome v7.0 (chr-ID 9; pos 8 6974265 to 86975168)
gcataggagctgccactgggagcaagcacggggaggtgcgcaggtggcacgctcactgcggcacagtggctaggttatcctagatctcccaaccacgcggggtcatcgaatatgagtgtctgcgatttggtacgtgttggactgggctgcgattaataaaaaatttaaatcccgcccatgtgagaaaaaatatatatttattttctgtttctatttttaattgttttatttattgtgtgaaattcaatagttcagactgattaggggcaattggtagaacaggaccagtgtattcctctctttgcaggtgctcaaccatgaatcttgattagtacaagttcaatcatgttattgcgatagctatagttaggaaggaagctaaatgttttcactatctctatctaagcacaacactctacatgtgaattcacggtcaggtttcaaggtgagattttttgattttattcaaccgaacttatttccatcatgagagcctttccatcacaaaatacatcactattcgatgattagtctcattgtaacttacatgtctaattttgtagtggcttaaatggcatcctcatgtacatttgataattcatagaatcaaaggattctaatgtatggatgcggaacattgatgccattctaaatacgtttgcttgacacagtaacatagtgacatgaccaaactattctttagtttgtaccatgtagcgatgaattttctgtagtatttcaattgtgccgtgtagtgatgagttttctaggtcctcttcctatgtcatggaactgaaataccataatacagtctagctatctcaaatttctgtgaactgaagtgcatgttctgttctctgtcattgtagaaggggaagaaacgtggaaggaaatctgcagtaag

SEQ ID NO: 5846 - DNA, 373 bp, Zea mays
  Intron number 1 from transcript GRMZM2G391673_T01 (locus G RMZM2G391673) derived from phytozome v7.0 (chr-ID 2; pos 1 46214395 to 146214767 reverse strand)
gtaaatagatcattgtaaacagatcataaacagaaacataaacagaaaagagaagaaaagaacataaacagaaggaaatcataaacagaaacaacttgagaagagaagagaagaaagaacataaacagtgatttgtatgaaatatggtaacaacataaacagaagaaaagaacccaacttttgaccatacatggggagtgggttcttttatactttgcctcagaaattattatcaattcaaatcacttgatcaactcatgagagtaatacaataaattgcctcaaatttgtatgaataaacacctcaactgttctccaccgccgtcttctccggcaaggccccacgcacgcccgcaaggccgtccacctggcc

SEQ ID NO: 5847 - DNA, 970 bp, Zea mays
  Intron number 1 from transcript GRMZM2G102625_T03 (locus G RMZM2G102625) derived from phytozome v7.0 (chr-ID 2; pos 2 10088002 to 210088971 reverse strand)
ggagaaggtagtcaatccacttatacacttcaacactctcactcacgtgcaaccagagagaaagacgcaaatgtggaaataaataggtggagacataaataaagcctttgctaggatttgaactcgaggcctctggcttcgataccatgttaggcgccgttcggttgttacggtttggtgggttggaacgattcctaaccgggttgcttctctaatttatataaactttgattagctggaacgattccgggtgcaatccggcaccaacgaacaagaccttaaagtggacgcataaccagttcaactcaaaagcttaagcagatgggagaaggtagtcaatccacttatacatttcaacaattgtgtatcctctttaacaatcattaaactactcttgtgatcttgtttccacatgttttgctcatatgtagtcgtagtgacaatgggcctacacctatagcatttcacagatggatcttgaatggcctgtcttggcaggttatcacatgacaaagtttctgccttttctgaatgaggttgtccttgtccttgatagttggaaaataatgtgagctgagtaaataggtcattatattgatcatgtgtgtttaccatttagtgcctactcatatatgattaattgttggtctaaaaatattaaattgccatgatgtagtatgtagcaaatgctacgatttaatcatcgacttcaatgataataattcagttagttattatacaaatttgccaaacatatgcgaacataagtttttgcgggagtggtgatttggacacctgctgtctatcatatttcactactatcttcttttttacgagtaatttcctactctcattttgccgttttatgcgacaaccttgttcattcttcattcttaactacagtaaatcaattaatttggatcattcaacaattgtacttacagactgctgatacttggtttacagatac

SEQ ID NO: 5848 - DNA, 978 bp, Zea mays
  Intron number 1 from transcript AC190507.1_FGT004 (locus A C190507.1_FG004) derived from phytozome v7.0 (chr-ID 2; po s 87754363 to 87755340 reverse strand)
gtctaagcactacgaagctggtgctctagaaaaaggtactttatgcagggtattgttcatctatttataggaagatgaaccgactttgtatagatctacggtaatgcccatcaaggctttcatatactatttacagatggtataaggataatatcgtattttccaccatagtttttgagggtctcagcctttgttgctcattccttttttactcggccttgaagctatcaccttcgtttgccatttctaccgcttgcacatagacgaagcgtatttgattactactttaatcgaaagtccgcttcatctgtaagaagaaacgttcctgaaacacatctactcatggccgaagttatgtgttaggcagttgattgttttttcgtcaataagtagtcttcggcatcgccttttgttgtgtccttaaggcaatcatgtaatataactaatcaaaggaccttctacagtgtaggccctcaacagtagtgccttgcgggatgagtttgttgtttcataacgagcttaaatcgcaaaaaaatataattgggaggccttgtgccaaaggtccaaaaaagactttcccgaagctcgttatcaaaacagcaatcctccatagtgggacccagtggtcattgggtgtgacagttaaagtcaaacaattgcgcgtataaaaggggtggtacccggcattatagggtacgactcttgttgtttgtattcacttctagtagtgcccactccaccttcgaagctagctttgaacattgtctacctgcttccgaaacagccttagccagttttagagatcacttgcttttctcctagagtgctgcaaagatgtcactgagaccttcgatagatgtgctagaggcacataccgaggaatttgtttcagcgatgggagttaccacttcccaggccgaagctggctctcttaattagtcagaagatagcgataacaatatagacattgaggaggac

SEQ ID NO: 5849 - DNA, 942 bp, Zea mays
  Intron number 3 from transcript GRMZM2G341089_T01 (locus G RMZM2G341089) derived from phytozome v7.0 (chr-ID 2; pos 1 5269848 to 15270789)
tgctctggaactgcgtcgtccccggcaaggaaggcgtaagcccacatctcactgtgtagtcctccccccatcttttcttcagttctgtgattctgtcgaatgtgtctggcttttgttccacctgaaaaacataaagtggtgagtctaaaaaagggtaactggagaagaatatatccaaacttttggttttgtcgtgctgagaagaatatatccaaacttttggttttgtcgtgctgagatgttagagcatctccaacagcgtgacctgtgatagtgtcctataattttaaaatgagtatattttataggatttagagcaccaacaaaatattctgtcccaacaggaaagcctcaaatctagattatagtacagaccactacggtgtacttaagagagtgccctataattttttgaccaaattttataaaatgagacattgttgaagtagtttttttctacgtagagctctatcttttaatttgaggcatcactttgagatgctcttagattgatcatcgttgtggaagcttaaaggccaaatagggggattaggctgtgacactagttgctaggggtctgcagttcttgatcctgagcacttgcttctggacttcgaaaacccttgcaacgatgcttcttcatctggtactttttgtactactaaaggttggcaaatgaatgcattgagcttattctttctagtgtacctatatttgggtttacagtgtttgttctgttgttcatgaagggtccagcaaaatttgcaggcgtgttgctttgtttggaaaccaaatgccttttcaattggttgccagtggcgcgttattctgatgacatgttaaatattcaaacgacttagtaatcattcacacttaacttcctaactggtttttttattattggtagaaaaagaacaattttagtctgttgtcccaaaacag

SEQ ID NO: 5850 - DNA, 775 bp, Zea mays
  Intron number 4 from transcript GRMZM2G341089_T01 (locus G RMZM2G341089) derived from phytozome v7.0 (chr-ID 2; pos 1 5271064 to 15271838)
cgcttccgcatccgtccgccgttggacacagtgtgtcttttgcatctccttttttactcctttctagtaacataacatggtaaaactcttaacatctttccgagttcttttttcagaattcaagtttcaaaaattactagcctttcagcttaagcagcgtagaaccttaatggtttcccagtattgtcgccaagccaacgatactgggtggatgtgtcgaacaatctgatgctctggcaagtaagctgtaaggaataaaaaacaccagagcttatcaaatgtttcatgtatgctggtactgtggttgacacttaataagtgtggggttcttgttcaaatttgttgtgtgcacatgtttttcgatcctgtcccacatggaaatagcatatattatgtctaaaaggtaaagattgaaaagaactcatgtatctactcttgcatggaagagctgttccactagaagaaatcaggattttccgtttgcatagaaaaatcagtcccattctactataacatattcagggtattcctctttgaatagaagagtttatgctgctattctactataacaaatattttgtgttccctttggtgtacaagagattatacttgtaattttggctgcatgttttttttttcaaattggtcggtgcaattattttatgatattataggttaaactttgtaaaatgctacaactttctagggtatctaagatactgtttgatatatgttgtcagaacacaactatacttctgaaccttttgcttgaaac

SEQ ID NO: 5851 - DNA, 629 bp, Zea mays
  Intron number 1 from transcript AC204277.3_FGT006 (locus A C204277.3_FG006) derived from phytozome v7.0 (chr-ID 8; po s 118652795 to 118653423 reverse strand)
tcctgacatctgtttgttcattggggagcacataggtagaatgacgattaatgtttcttcatattaatgtattttatcataacatgttgccgccgtaacaacgtacgggcatacagctagttcgtttatagggctgccagcggtgctagtgctgtactatactattttacttaagtatcactagaatatttatagaatatattttataataaacttatctaaagatataaacacttatactgtttttgtataaacattgttaaacttagtgttgtttgacttttgttaagcaagatttctattttctataattttggttaaagtaatatgctttagctctacaaaaaaaaacttataatttggaatggaggaagtacaagccatggatcgggatccaatttttttttattctcatattaaaatattctgcacgtggacttttttaacaaataacttatggggctacttgtttcaagtgtctgatgtatcagttaatgaattactctttataattacctttgccagacagtttttttttgttatgccattaggtggctgactatctgattttgtttcatttcactgcacatccagatttggtacaacaacgtccctcacccaaagctggt

SEQ ID NO: 5852 - DNA, 825 bp, Zea mays
  Intron number 1 from transcript GRMZM2G470091_T01 (locus G RMZM2G470091) derived from phytozome v7.0 (chr-ID 9; pos 1 23378467 to 123379291)
gagatatctatcacccacatcatcttggaaggtcggtaaggatacaaataagaggatatgggtatagaggttgtggacttacgcaacaaaggcagagagaaacatcctcccaaataggagtttgtttcgtttagctcatgccacatcgaatgtttgaaagtctattacaagtattaaatattgtctaattataaaagtaattacacggttaaagactaaactgcgaggcaaatttatcaagcctaacaatccataattagcaaatatttcttgtatcctcacatgagtgaatcatgaattaattagatttaataagttaatcttattgtttaattctcatatgtgtaattaattttataattatactatatttaatatttttaagtagcatctaaatatttgatgtgatatggactaaaatttagcacgtagacccaaatgagccatggaaacgaaacgctgtaaaaaagagacttttaggccctgtttgggaacaaagtttttgaaaaccacagtttttgaaatactatactatactttagttatgacaataccgtagtttataataccgcagttttgaaaactgaggtccagagctaagtttagaatgccttaaaacaattatagtatttgcaatacttcagttttgaaaacagagattttatccagcttgccaaacaccattatatatataatactgcagtatttgagaatactgcagtattcttccaaaactgcagaaaaactttgttcccaaacacccccttactctcatgtaattactgttgtgaaatcaatgtaattcttatttatatttattctagg

SEQ ID NO: 5853 - DNA, 1029 bp, Zea mays
  Intron number 1 from transcript GRMZM5G887543_T01 (locus G RMZM5G887543) derived from phytozome v7.0 (chr-ID 9; pos 5 787839 to 5788867 reverse strand)
agcacaagaggtacaacaagaacatccacgctcattggtccctaggcccgaaaaatgagcatccacatttgtttgggctaaaggcacccaaaaatccctacatttggttttggtaatcgagaaaactagtggactaacttctacatcaagtgttgtgattgagataggttatgcacacaccaagattatgcgtggatggcactcctagaggtgatgagaggtggccagaagttgatcaagtgctcacatttcgaaaaaagaaaaaaactactaattgaaggcaaatgtataaatagggattttattttgccaatcatgacacaatagagtgcacgatcgaatttagaataggtattcatactattaataggggatcaatgagcggctattggtgattgttggtggcttgatcaagcaattgtaagaggcttttgttctcgtttccatgagagaacataaagagaaactctaatggaatcatggttagtcgctttccgtggtttctaccaaacaacttttagttttttgcagctcacagcccacaacaacttttgcacagctcacaacaacattttacacagccacaacccaaccaaatagacccttacttaggtgaaagtagtgctagtgcaagacgagactatttgaatttttattttactaatctctttgtatttgttttttgtgaagtttgtaggaaaaattttgtaggttattcaccctctttagccatctaggtccttttaagtggtattagagccaattcgccatctatttcaaggtcaaataacctacaatgtagtgaagactacaaatcatattggtaggccaccacactttgatggctgaatgtgcatgcatttgaaggctatgagtagaaaaatctgaggtgttgtgtatgagtcatttactaagttattgtactactttaagtggtttataaattgttggagtaatttgcgtcctgtgctaagttgttgtatggtaaatatagcggctgattggttgagtgcctcccgcacgcaggcc

SEQ ID NO: 5854 - DNA, 903 bp, Zea mays
  Intron number 1 from transcript GRMZM2G099167_T02 (locus G RMZM2G099167) derived from phytozome v7.0 (chr-ID 2; pos 2 06628715 to 206629617)
cccaggtgagtgctgcatccctgtcgatccgcccgacgcgctcctcctgtttacccattttttgcagcttaaagctgttgcgcgttctatggagccggcgcctcaaaattctggcgtgctcatgcgtcgcatttcctagattcgctgcgttgttttcttccaattagtcggagcaaatgacgggacgtgtaggtgtagtgatggtacttccatatccgtttcgtatttttggttcgtctgttcctttccgttgcactcgcagtttggtcctttgcgactggatttgtttgttgggtgggatgtgttgttgttgtctgttgggttttggtgcattttgccggttgttgagagattgcatgagccggaccagatgcaacgtttcctaattaagagtttgcgttagcgttttttttgactattaatactaggcctgttaattaggcaggcgccacagaaggatgcgttgaggtcgtgtagaggagctcacgttaattcttgtgtgcttggggacagatagggtttccaactctgtatgtaaggcgcaagatctgaagaattgaatctgcagggatgtcatctaaataaataatttaactgggatgttctgatgagtgtcagaccatggatctccctggattcacgagtttcatctgaccctctgttaaaagtagcacccttctctgtttgcctgatcttgtagtaccatagaaaattgccctaatgctgctccgcctgataatagaaaaaatcctgtttaggaccccaaggaggcaggtttcataggctataaattctctttaagcgcatatgccaatggttcgtgccttattggagttccatgctatctattttttataacactggtttgattgtgatgcagtgattcctcggttggcgtcgcac

SEQ ID NO: 5855 - DNA, 588 bp, Zea mays
  Intron number 4 from transcript GRMZM5G854007_T01 (locus G RMZM5G854007) derived from phytozome v7.0 (chr-ID 8; pos 1 74919241 to 174919828 reverse strand)
gtctgggctccagcacgctgaattagtgcatcaaggtgaacttaacagcagctcctttcttgctatgttatggtactatttacattcctttacttttcttcaatgtttgatgattttttaaacctacgagcaaactgtgtgcttttttcatctatcaaatatacctcttgtatctctcatattaatctctcacatgaatagcctcaagatttagatgctcacctttatatgttatttactgccacgtgcctactttatagatcttcagatttatgtatttcaaccaccttctctgtttaattacattgcagatctgcgcttgttctactttctaccacaaattttcctttgtcaaaactacaataacagtattgtttacagttaactctccacattccttttccatatgctgctttatatagttgataacaaacagtccagcttctatggattttccaaaaaaaccctatttgccttctattcctagaagactgttgctaaacaaacataagcaattaatgctacaggcttgtatctagatatgttgcaacatacaactcatctataaactctaaaaaatgcaggttc

SEQ ID NO: 5856 - DNA, 403 bp, Zea mays
  Intron number 1 from transcript GRMZM2G105187_T01 (locus G RMZM2G105187) derived from phytozome v7.0 (chr-ID 8; pos 1 57550285 to 157550687)
attggtgagaccagaggagcacgagcgcaacctccgtcacccctaagatctcctcaccattgtggccatcctgcaagatcagtactcattatctattaagaaggttacggttagcttggtgtgtaagtgtgttggacaaatgaggtcccgtttttttactggatttatttgccttttcttttctgttttggatatttgaagtcttatttactagctattaatacattgtttttaagtcatcggccttgcaagcattgcctctttctttaaaattatctgatgactggtgaattctgttttgatcttttagattattggcattgaccttttatctcaaacgctgcgacccgtcattgttgaacttgcagaggataggcactggagagtttgacttgcgatattt

SEQ ID NO: 5857 - DNA, 1003 bp, Zea mays
  Intron number 2 from transcript GRMZM2G163178_T01 (locus G RMZM2G163178) derived from phytozome v7.0 (chr-ID 9; pos 4 2793975 to 42794977)
cgtgaggtcgttgccttgccattcctccaatccgggttagtaatgtatatcataaactaaatgactgaagcctttcattttaatttgtgtgcatttaactccatatgaagtagtttttttctttgcacaactcattgtttctggttcaaaggatggatcatttgctctctcggattctcagttgacttactctgataatataattttcctctaaagcaagaaagttgttgattctctctttagtgtgtacaccatttaaaaactgtcagattaagtttctccgtcctatgcaccgaagaggccctaaagctttatgtacacacgattttttcttgtattgtcctgttcacctctatccaaactatttgatgattggaaaatttaaaacagagggagtattatgttttagttttgttggcgtttggaaattactaaacttttgaggaaaattacatgcttgatattcaaatcgcaaatgttgtacattcctgcaacctaggcttgtaaatttcccattagagttttctctatttttttggcaatctgtttagttcatctgttaatgaaccgggtaagatgattagttctttgtcatgttatttactttgcatttaaactgggtaagatcattagcgctttgtcatgttatttactttgcatttagtcataatagaaattacttatttgtttcaaactataaaatgatttgacttctctacatacattgttcttaatacttatctaacatctaaaccctaaattgctccatagtttcaccaacaatatattttacttttgtagtttctgatgctgccaaactaggtccataagtattatttgcccatctatgatattgttccatgtacgactagaagttcaaatatctggaaaatgttctcttaacgtgatatcagacagcaccctgatttaaaatatcttaaccttcagtattgtccatgtaattgcagagagaacaagaacttgactggaacatcaagataag

SEQ ID NO: 5858 - DNA, 675 bp, Zea mays
  Intron number 2 from transcript GRMZM2G044805_T02 (locus G RMZM2G044805) derived from phytozome v7.0 (chr-ID 9; pos 9 2311806 to 92312480)
cgaccgcgctggcctcgctcgacaagctcaacgaggtgaacagatcggctgatatctccacctgcgttagatgcagttacttcgtggtgttcatgtgtttcagctatgatgtagtaactaagaagctaaaggttaattagttgatgtgtaatttatatgcattcggatgcgtgtcagattagctatagcttttctgaaattggaacccgtagtagtttctatcgcaattgaaacccagatgtgaggtgtaatcccactgagggggggggggggggggggcaaggtatattacattaagaatatggctagcttttcttacctctgttctatgtactgactaaatgctacgggaagagagctaatttttttttttgattgcatggattgctgctagttttatttttaagaagataaggtttcctgttcagggttaaacaggttgattctctgaattattcaatgtattttgcaaacctgtttctgtaaaaccaatgcgttcagtagtctctgttgcttatacatttctttaggttttagtgtcactttcacttatccagaataaggtctttctttcgataaagcttgtgtaactatgtaatacttaagactgttcttgtagttggaatgatggaatctgtaaaactaactttcttaatgttcttacagacacttgaa

SEQ ID NO: 5859 - DNA, 598 bp, Zea mays
  Intron number 1 from transcript GRMZM2G061277_T01 (locus G RMZM2G061277) derived from phytozome v7.0 (chr-ID 9; pos 1 9604393 to 19604990)
cggcaggcccttcgccggcgaagagcacccatcaggtactcccgccccttcgtttcccttcctgctgcgcgaagccaagcatccaaaccctaactatcctaggctgtttgtctgttggtattcggatctggtataattacaagtgcgtatgttatgcctaagaaatagcttcgactttatctttgccaaaaaacatcgggtgtgtatttgtattcaattcaattcaactgtagctagtacccagagtttacgatgtacaatcgttagagtactgtctaagaccgatttttctgcttgtacgcttgcacctaatggctgcttacatattagtcgttgcctttgtaagactacttttcaggtagagttacacactgtgcagatggatatagtacttcgatatgatttcatgccttaatgagactttcgtcatgttttttgtttgtctgcattttttcttttttgttgtcgagttttgcaacaatgtttgttcttggataagaactgattgacatgttttttttttgttttcactggctaacttcttaacttcatttgattggcagattcccgagttgtttatcccagttatcttgcaccc

SEQ ID NO: 5860 - DNA, 913 bp, Zea mays
  Intron number 2 from transcript GRMZM2G461286_T01 (locus G RMZM2G461286) derived from phytozome v7.0 (chr-ID 9; pos 1 45663020 to 145663932 reverse strand)
gcatcacccacaaggctaagcagttagagcttcaggtaatatcatacccttaaccccctccccctccccagaaaccaatagttcatttttttcctctgatcaaagtaggattctgaggatggtttcccttccatttccatcatgtattacttttgatttgtcttgtccctggtgttagccagttgtaatgttcaagtttcagtgtatctcaaaatacttgtaagcaggtaggtcttgttgctgaatggcttggtttccagactgtttggaggacgggtgatgcaactgccatatcattggtctaaaaaatattgttaacctggacaaatccatttaagttttccaatcaagttagtgtgcttgtttagactttgctagtcatcatttttcaagttttgacatcttgctaagaatctaggatataatgtgcacacgttgaattgtggaagtccttccaataagttttcttgtttgggatattcagttagatttctttttgaatgtttctggaaccaggtgtaaaattgaaatgatgggtgtatccgatggttccagggatcatcactttttgaatacctgggagaatctaacataagtagctaaaaagaatattgtattgcattaatgtttgcacactaagtggggcgcacaacttcacaaaaggtccaaatcatgcagtgtgttcagatcaagtttcctagagaggcagcaattgatcactaaacatattgttgtggttattcttgtaccttctgaaaaggcatgattcttgaagctggaaatctaataacttgtttggtgtaaggatggtgttccatgttgaatgctaaatattttagattctagcttcgataggctatatggtctattgttacaaatttgttgcgctgcacttaacaggtatccaagaagg

SEQ ID NO: 5861 - DNA, 888 bp, Zea mays
  Intron number 1 from transcript GRMZM5G876434_T01 (locus G RMZM5G876434) derived from phytozome v7.0 (chr-ID 8; pos 1 28488231 to 128489118)
acgtggtatgctgcttccatcttctccttgaattactctttttatattgtaattctgtggttgatagcctgctgaaatctgaagtctggtccagtttttagatatccagttacattacatcagcattgtgttaactataatttatcagctacaaacagtagtatcatgatggtcccagttagtccccattggtaaccgaccattttttccagaagggtctgtccgcttagggcttgttcggttattttcaatccatatggattgaagaagattatatggattgagagagattttgacttactaagtattgaaacccctacaatcccctcaatccatagtactggattgaagggaattaaatcccttgctaattaaaatggaattgaaggtgatttaatcctcttcgatcccttgcaacataagagcatctccaacaacgtgacctatagaaatgccctataatttaaaataagtatattttatagaatttagggcaccaacaaaacaccccgctccaacagtaaagccccagatctagattatagggcagcccactacggtgtagtatatttgaggcacttgagagggtgccctatagttttttgacaaaattttataaaatgaggtactgttggagtggtttttcctgtatagagcctcatatttcaatttgagacactagtttgaggcattgttggagatactctaacagagcctaatgtggatccttgttgacacagcattagctgcagatcccatgtgcattgacacgtttgatctttcagcataaatataaatacttggtttgtcctgcgtccttgctctgaaccggctgaacttgctgctctcgcaggtaaccggggaggctgtcaagaggctttcgtggca

SEQ ID NO: 5862 - DNA, 684 bp, Zea mays
  Intron number 4 from transcript GRMZM2G119079_T02 (locus G RMZM2G119079) derived from phytozome v7.0 (chr-ID 9; pos 1 15324240 to 115324923)
ggcctagggtattactagcttctgcacagtggcaagtaagtcatcaccaaaattacatgtttctgtatgcaattatttcattacccccctccccccccacccccccccccacacacacacaaaggaaaggagaacctaccagatgccatgtaccagttatgctcattgttaattagtgttcttgtcctcaacgtttttaattaatgttcttgtcctcatttttatattgaaattggtacaaaaattatctgccttgttgtttggttaatgaatagtcaaagtaacagtatttgtgataactatgcgttcttggcaaattcctgaagggaatggaactacaaaatactctgtctgtgcttataagttaagatggctggcttatgtttttgtctttttgtttgttcaatgtatgatctgaaagcctcgttgttagatatacagaaacgtaaactaatgttggcaatctagtttatgttcagttttaaggattatatgcatattaaagtgctattcaccactggttcacttgtctgtggaccataagtggtggtggggttgattcatattttgactgtttttttatgttgatctaacagtttgcacgatccctccttatgtgttatccccccccccccccctcctcttttaggctgtgcaagagttctaccaactaacagtgaagaa

SEQ ID NO: 5863 - DNA, 544 bp, Zea mays
  Intron number 1 from transcript GRMZM2G021202_T01 (locus G RMZM2G021202) derived from phytozome v7.0 (chr-ID 9; pos 1 39050842 to 139051385 reverse strand)
gagtgcctcctctaccagaagaaggacatcaagcggtaggcggcaacagttcacgctctttaattacttctctgtcttgttaattgcgtccttgctttagggggtggttggttgggccattgggggagtagagtagggtgcgccatggcagggaggagagaaggctgcatactttgagtatttgtgggaagaatcgtcaggctagtttatcactgctgtaaggctcaggcggctaatgattttttgtgcggatattaggggtgtttggttcacccttctaagctttagagactaaattttatctatgcgggagatcttatttatttattagtcatactgttttcacgcaaatgtatgtttgtttgctaaagtacattttaccagcaaccatgttcattagccactgatcattaaaatagtacgcatcttatagttgccttacctagaattcatattgttcgtggcagacacaaaaaaattaagtatttggtcctaaactatctacttttctattacccttgttcttccagcaagctagcagcac

SEQ ID NO: 5864 - DNA, 862 bp, Zea mays
  Intron number 2 from transcript GRMZM2G047095_T04 (locus G RMZM2G047095) derived from phytozome v7.0 (chr-ID 2; pos 1 73244637 to 173245498)
gtccaaatcttggggtcgaagaccggggccgcgatgtgagtgcccctcggtccctttttctcttatcatttttttgctttgtgatccggtctagtcaggtccgggatcgtatcgtggaactaactaattcagtttttatgatggttggagtgaaaaatgttgtatatgatcctagaattgatcattttaccactgctcctgaccttggggctgtgaagccgtggtattctaccattatttagtttttccgttctaacatttttttcactagtgatccattgtttccccacccgagcaaccctcatttgggaaattagtacctgagtaagatcaatttctatttgatctcaatagaagatatgttacgagaagaattgagtgtatctaatctgctggcataatacaataccgtgggtttacaaaccttgggtttgtactttctggaagaagggttaatgctacgaggcagtttataaacccacagtatctgtttagttgattgtttttgtaatactctgaaaactgaatttatacgaatttaaaaggacctactcgtcggagtatatgtaagtatttaagttatatagctaaatcaaggttatggctagctggtggtagacattttgatttgaacctgtagtaaatcagggcataatgctatgtgacacttcatccttcagaccttcacatcactaattttacaatcttttagagatgtgctcaagctgaggttagatgatatcgctactgggggtggacatacggaatggccgttgtcttcagattggctgatgtcttctgttggcatccaagcatacatcatggatttgatatttgattgttggtctactgttggcaggtc

SEQ ID NO: 5865 - DNA, 875 bp, Zea mays
  Intron number 1 from transcript GRMZM2G014276_T01 (locus G RMZM2G014276) derived from phytozome v7.0 (chr-ID 2; pos 1 3346611 to 13347485)
acctcgcgtcccgagcttgcatacgcagctggaaggtaagtattgagctgtcgtgtgtttcgtggtgctcactggtatccacattccacattgctgtgcacagattagtgaattcgaccgaacttattcacggcataacaaaagtctcggagtcctggtagtggtttgacagtgtgtaagctagacagctcaaatgtagttgccacaagcttaggaagcttgtatccttgtgtgaatgtaagaactgtcaactgcacacatattctaaactatccctcctcatcctggaacactattcgtttgatattttgattacagtgtgttgctagagataggggttattgacttattgtatagtatagtaactgtgggaaattaaatggactggagttttagaagcttcgcaagagctctgctataaagctgtgggactctaatagttttcttacaaaaaatattttattgaacacttctagaataccggaccacaggcactggtcttattaattgtgttttgtgcgaaattaaattaaatgttgttgttgtattgtagtgtcttcgttcaccttcttttatcttttctggttaattgtgcaaagataaaggataccattattatttcctataaccagtgtgaatcatacgtactaattttacagagcatgtgcacagttttttaatttttttatcgtgtgatcttaatcctgccatagtaattgttttgttaattagttaatttaaagattatggctgctttaccactacaggccaacatcttttacaattaaaacttgctcatgccactatgttaatactatgctagtatactgccatgtgaggtaaagtaatgtatttaacttatgctgtacagggac

SEQ ID NO: 5866 - DNA, 904 bp, Zea mays
  Intron number 3 from transcript GRMZM2G447432_T01 (locus G RMZM2G447432) derived from phytozome v7.0 (chr-ID 2; pos 2 04190272 to 204191175 reverse strand)
agactgtgtttgttcaggtaagattgtaagaactttgtgattagtgtatccattgcattaataagggtcaagttaagctgatccttctaccgccttgggatgccaccgttatgcttgtgtgttcgtttttctaagttgcagcatccttaatttgttattactcctttatagcatactattacaatcttacgtgaacaaacacagttccatcggtgtaggcatgaggattgatggccctgatcaagttaagctgatccttgtactgcctttaaactgctatgcttctgtcttcgtttttctaagttgtagcatcgttaatttgttattactcctttatagcataaaatttaggcaggcttctggatgttaggaagaaatgaccaattcagttaatgattagtatagtatcactatgggatacatgttctccctcaaaatcagagagcagtacaattcaaatatgaagggcttggcttgatagttggtacttaatatcatgacaaaagagaagtcatgttgctatattctgttgcatttcttctgaatattgaaatacattactaacaccatcgataattagtacaatttcaccatgggctatatgttcttccacaaatttgggtatatgcacggttcgaatttaagaacatggttattctagagatgagaatctcttgatactttatatttgatatcatgagaagggagacatcatgctataataactaacgcaattcttctgaatatttgaaaaaaatgactagcacacattgttggtcatcttgtttcttcttcatgcttcatactctgtgctgagatatgtagaaaatactgagtgatttgccttgtattcatgtattgtctcgtagggtgttcagaagcacgaagaggtcagtaaagtcaa

SEQ ID NO: 5867 - DNA, 667 bp, Zea mays
  Intron number 4 from transcript GRMZM2G085806_T02 (locus G RMZM2G085806) derived from phytozome v7.0 (chr-ID 2; pos 1 02424383 to 102425049 reverse strand)
attcttatcagttgcataagaataactcatttgaggtgcatagaagacttggcagtgaaaaactttccacacatttgtcaggtgttggttgagatgatgttttatttagaagtagttagatttattatgtttcataatcattgttgatataaatatctactaaaaatctgttataatgactgttattgcaactatctactaaatcaatgtttacattgtgtagatgaatgtccacaggtgtttgtaagcgacagaagcatcaaaaatccgactgtacattgtgataacactttaggtaattacatgtatctgttatgttatttcactatatcatgttgttacactctagataacatgcaccattagttggttgagctctcatcattcaacctatatgtacacctaagacctttgctattttcaactttaaagtcgcattgggtcagacgagtcatcaacatgattccaatcaaagttcagaagttttagatccaagggaacgtaagagaatacgagaaagaactcgatttgcaactcaaacaaaagaacaaagggcattgcgtaatacggaatcatgtaataagatggcaaggaaaaactataaaagacgataacgagaaattaaactccaggacttaatcggcattgaggacccgaagtttacacc

SEQ ID NO: 5868 - DNA, 991 bp, Zea mays
  Intron number 1 from transcript GRMZM2G116327_T02 (locus G RMZM2G116327) derived from phytozome v7.0 (chr-ID 9; pos 1 13704771 to 113705761)
cctccctccccatcgacttcccaaatcccagccaggtaattcttggagctcgtctttccggttgtctcctctttcctgtgcatcctgctgctccgaaaatctctcagatctcctcgtcctctggcccattctcttcatctccatgcatggatgaacaagagacggagggagacagatgcaaacatcgagactgggtaggtgtggcgtcgtgctgatcttcctcccaccttacttgaccatggaacctttagagctaaaaggcaccaggcactgattatattaggttacttgttaattaacaattagcatcgcgattagactagaccagttggttactaacaatcaaacaattggtatcgagatgtcaaaggcagtcacctttagtgggatcgatactgttcttttagtctattcaattcagtagcagtctaatcagaagacgccacttgtttccctcgcttcaacggcgctgtcacgggttcagacgtgtttctatttttcttcttttccagccttacttttgattaaactaattatttgtttctggtcttcgttacgtgtactttctcgctcctacaatttttttcgcgtgtgccatatgtgttcccggaaaagtttcctgtccctttcgggtactccggatggttcccattttttttctttcataaaagttctattttgaagcttggagaacagtgatgtacatgtactgtgagctatttgatttgactgaaggaaaaaaaatgttgctgcagtctcctcgatcttcagagctgtgatgtgatttgtccagatacctacaaaaacgtaccaaatcctatctttttgtcctacccattgtttggttcccgtgcttccagaatttatatggactgtggattttaatggaagaaaagaaaggaaaaatatgaatcataaactactgactcatgtcataacattgactttttgtgtagggttgttatctgtctttgtagcagaagaaacagtc

SEQ ID NO: 5869 - DNA, 895 bp, Zea mays
  Intron number 3 from transcript GRMZM2G154664_T02 (locus G RMZM2G154664) derived from phytozome v7.0 (chr-ID 9; pos 1 339415 to 1340309)
cttcagttcaagcctatattcctcggcaaggtgcgacatgcattgtgttagtgaaggcttgtgtgcttgtgaaatgcggcaccacatgagacctaagggcatgtacaacctgagacttggttcggtttttaaaatacaagagacaactaagagactgcataatacaactgagactctgggatactaaatgtagctaagagacaacatgtacaaagagtcatgaagagccgttctcttgtatttttttcacttagccacttagaaacctcttaagagaccccatatttttttcacttatgatttatgaactccgctttgcatgtggtcaataaaattggaaatgttgcacaaaatggctaagtatcaatgcgatcgcctacagggacatctgatttttggggttgggtacacgaggacgagggcttgtttgggaattttctggaatatgaactaataatccttagacatcaaaatatgtcactgacccatctactcctggttcaaagttgccccacttatttttttctaggaaatggttaattgataactatctattcttgcctttcttttatgacacgtacaagttatttgcaaaaatttaaaagttgaaacttcacggttgcaagtgcatttctaattatttatacacaatcagttactagaatcagtagaataagccattgagcatgatcctatattttcttttgtacatctgtaacgataataatataccacctatgatcaatttcaatgcagtcgtgacattcagactcgaactaagattctgacctcgactggaacaggcactgtttcctgtttcattttacttcattccaggtcttttgtgttgctacttacaggaacctaggcgtgtgccacgcgccactacctctca

SEQ ID NO: 5870 - DNA, 626 bp, Zea mays
  Intron number 7 from transcript GRMZM2G394007_T01 (locus G RMZM2G394007) derived from phytozome v7.0 (chr-ID 8; pos 6 7851111 to 67851736)
tggcagagtctcgtactgaccgtgttatcagcaaggtatttatttactttacttagctaatgttttatggtccttttatcactatatggtcattttgataacatcattttaatgtctttagtcggatatcatggacaggaggcacttatgcttgtaacttcttgttgggaaatgtgattccactcaagtttggttatgtaggtgttgtaaatcgcagccaagagttatattttttttgtcgaaccgtaggccttgtaaagtttaattaccagtttgtgttttttcacaatagtagttatttctatatccatccaatgccatcttggttgggataaaaagctttgttgttgttggtcctcacataatgctagattgatgtctgcaatcactaggaactagcagtggagacaattatgatgtattaatgagaaattaaatttctgatattagaagtcttcatttgcttttacattttgttctttttatgatcttgatcttagaagcagggttttggtaccagcttagctaattttctgaagttttatgttcttactttttagtttcctatatgatatactgcattctaaactctgtattcgtggggaaagttgttgagaggcattggt

SEQ ID NO: 5871 - DNA, 973 bp, Zea mays
  Intron number 1 from transcript GRMZM2G004590_T03 (locus G RMZM2G004590) derived from phytozome v7.0 (chr-ID 2; pos 6 484836 to 6485808 reverse strand)
tcctgccctccgttgcgccgcgcaatctgcaggtggtgagcagtccgatcgatcgcctctattgttgttattattagtaagtagttaaacgtaaaaaatcgctggttggttatgggcacaacgccaaaatcagattgtttgatttgactggagtagggtgatcgattagtagtaatttctatttgtcctgtggaacttcgcgggatgaaaggaggtgtgtacccgcaacgtgccaagagctgctgcctgctggtccgccacccgccccaggagtggcgtgacacgattcacgcacgtgacacgtgacggccgggccaagggacagcaaggagcgaaacgctgactgttcacatacggcatgtatggccgggtgcggcttcgcattgccccatggccatgggcctgtgttccttccagtgtcaatcatcatgtacaagaatccaatcaaatggacgcaaacctaatacaaatgcgactaaacccactctcccccgttcttccaaaaatagttgatgtgtttttgacgttttagatgtggtgtcaaaataacgagagagatattaagaaaaaaaccagatattaaaggaaaagagagatgtattagaagtaagaacgacaaacggaaactcaaatactgtaataccaactattttagtacgactaatactttctgtttcgtacaaggaattccaaagtagtgccagttgtcagcgcttgttcctgttcgtgtcattgtcagggctacctttcgtgagagaaaggtgatgttagggagcccctcagtaaaccactctttgggccacattacgtgttgttaccttgtgattactagttaacaagtatataaaaaacattattaacgccagtgttcagtttagataatatcactttgaatttagtttctatcaaacggttgagatatgatacgcatgataatggtttgcaggaacaggaaaggtccactactctgctg

SEQ ID NO: 5872 - DNA, 820 bp, Zea mays
  Intron number 1 from transcript GRMZM2G075956_T02 (locus G RMZM2G075956) derived from phytozome v7.0 (chr-ID 8; pos 1 66080813 to 166081632 reverse strand)
ctcgcccgggagccgcaattccatcctgctgctcggtaagtccacctctggctctgaaatagtttatctacgaccttctcttgcctgtttccgtcacactggattcgaacaagaacatggattcaggcaccagcgagggtaatctgggcgtcgcctattgctcgtcctccctatgatgatttcctctactgttgcctgctttgtctgatctgggctctgcctgataaacgataaaatatctcccttttttttggtggaatagcatcttgaggtatggcgaaaggatggtacatgaggaatttgtgatctctcgatcgggaatctgtgttcttggtgtcgggtgggtttgcttcgtgttcttgaagttcataggggggacaaacaaggggagctgtttactgaatctttatttgattattaggagatttgggatcttcgatttgatcttcttggggtctttgattgaactgagcagttataatcccctcatgatttatcctttcaatcgacctttgggttgcgtgtattgaagtccatccatccttctgtttgcctcagctaggtaccatgctcctttatttactaaatattgctaaggtccgactttttgggatgtacttcccttctggtcacagatcagtccgtgttagaatagattatcttagtgaacaagatctcgagaagttaccaatcagtaaaatagttcgtactatgtttattcgttaaaaaagttcttttaccctgaaaaggcaggagctctgccactggattaaaagactattcggtaaaaaaaatgtctgttttgttgaaatactaggac

SEQ ID NO: 5873 - DNA, 682 bp, Zea mays
  Intron number 3 from transcript GRMZM2G395667_T01 (locus G RMZM2G395667) derived from phytozome v7.0 (chr-ID 8; pos 1 52766992 to 152767673)
aagactgctctagaggactgaaaagtaatgttctacttttgagttctgatatctgggatactattttgctagtctgcgctgacatttctttgtgaagttatttgatggatggaaagtagtgttcacaattaaatactgaatgtactatatccaaagaacccttagtgttgtctttttggaactagcctaaatattcactcaagtcattgggcatcaacagtctccacaagcaactttgactgttcgatgactgtttctttaatgatatatttatagtatcgataaatttgtatttggtggaggtagctttaaaaacaactctacttatagtcaactcccaaagcagcacttcctttgaacaatgcagggagtaaaagattatatatgtgtattatataataatataaattcctcctaggaccaatacacatggaattcattttagtgccaacttcaaaagaaaactgacatacaaagccaaatatcatttagtctaactactagcttactgagtcctgcgatgcaataaattattagttggcaatatgtgttgcagaattcatagtgcttgatgttgtgatccaattaatttcacatttttattctccttttctgttaaaattagcagcttcatgcatcaaagtcttcatagcttatacgtgatgtcttgactcttgacaga

SEQ ID NO: 5874 - DNA, 1040 bp, Zea mays
  Intron number 1 from transcript GRMZM2G110714_T01 (locus G RMZM2G110714) derived from phytozome v7.0 (chr-ID 8; pos 1 73703111 to 173704150)
tacaggacctgcacggcgaggacatcagggagacggtatataaatgctccagttgattcctgcccgtggtgctatttgttcctttcttttcggtactggcaattggtttaggtggtagatagctcggtcatgctcgaaaacatgtttatactgtcatgcatgcatggctcgcgatagcaggagaatcagacgacagcgatctgggccttgtcctttgtgtgttcctatggtgatattcttcccttctgttttggtattgcaccctggtgttggaaactagtgctgcatttaacaaatcgtagtagcactggggctccatccatttggtctacagttgctgatctatactgtactagttcatactttgtgttttctagcctttgaaattggtacattaccagtgacggacccagaaatcttcgagagcctggacaaaaataatactcatactgtaaatatatagctttccttaattttttcctatatttaactatattttactgcttgctgcattgtatagattcattaacactaatagaggagcctgggcgagagcccgggcttgctcccacttaggtccaccactgtacatcaccatgatgctcaaaactggtggggttatcatgatgtgtgaaccacttgcaccataattatggccttttgatgctcttgggttatcatgctctttgaactattgttgttgatgacgcgagctagtttgcatattagagttattgccgtttctattcataattagtatggtaaaatgataaaatgctaccaccttttcaaagcatcgagccatcggcctatcacatgctattttacattatccattttcactcaagtaagttccttcttggccatttttggatatctgttagtcaatctttgagtaacattctgatatgcagcttgatttctgtgctcgtttgttacacagcaattccagtttgttcaccaactcactctacatttgttggacatttatatttttgcaaattctgtaaagtttcccttttttgtgaataggtgcaaga

SEQ ID NO: 5875 - DNA, 706 bp, Zea mays
  Intron number 2 from transcript GRMZM2G388285_T01 (locus G RMZM2G388285) derived from phytozome v7.0 (chr-ID 9; pos 4 3907486 to 43908191)
aaactcaaggaggtaagaaatatgtcgtttgagtaggtagaactggttatttaaaataacttgcaagaattttagaataactaaaactatggtttgtgatactccctttgagtgtccttacctctttgatatatgatatactgtcactacataagcacacatatttattgttttttaatccatggcgaacacttgtatatggatcgtatttattatacaagtataatatccatttaaaggagaataggatcatgtatcttctcttaacattatatcttgccaattcatgcttgtaatatgcacttcagtaggtaacttctgtcaataccactttctaaggagtagagattgatctacctataacacatttcccccttattcatcatcctcccttttttatttcaatggctgcctataatccttttgtctctactctttattatcctttcttatctattgatattgtgaatactcgttaatgtacaacatcttctttgttgataaaaacatatgtgcagtcagttctatatgtagaacatctcttaagtaattgctttcctgcagatttttcatcatcggctcaataggattttacctgaggaacattttgcttcaattggtttgatctgctgtggttgctggtaatttgatatgagcaggaggcaattaatcaacaatgtttagggtgcagggccacaccacacat

SEQ ID NO: 5876 - DNA, 787 bp, Zea mays
  Intron number 2 from transcript GRMZM5G801167_T01 (locus G RMZM5G801167) derived from phytozome v7.0 (chr-ID 8; pos 6 4419766 to 64420552 reverse strand)
atatctctggtaagcattggtgttatggtcgtgtatttgcatttgagcgttatttaagatactaagaatgatcagtggtatcccgattcttaatgacccacaaaagtactacctggcgatctgatactcagatttctattaataggtgttgtactatcacaaaaatattactcagaaatgattccaagttcaaaagttgcccatattatatatatgttaggctgtgtctagcagatcatgcataggttgtacaaaacacctagtagatagcactgtttatagagtgaaatttgaaatgagaggtgaaatagtgaatgagataggagagctgctgcctgctggagatagccttatggatggccaaataggagatgttcacacttattggtcgggagagaattatccttttcagcttttagcaagtcatcttctggagactgacaaccatttatccacttaaagatgtgcatgaccgttatacttacgaatgaaagaagtgaaccctgttccgatggccaagtaaatgaagttcagagctgcctgaaagaaaaggctagctatatcactagcgcatccaataactagccaggaagataacaaacaattcttcttctgtataacttactgcagtatcattacttggatctctctttttttttgtgaaaacaattaccattagtacatattacaaactgaggacaaatttgtcgtctgttttataagcaatcaatggctaatcctctatataacaggacttgcagactatatatagcttgcatagggggca

SEQ ID NO: 5877 - DNA, 728 bp, Zea mays
  Intron number 1 from transcript GRMZM2G126691_T02 (locus G RMZM2G126691) derived from phytozome v7.0 (chr-ID 8; pos 1 52887178 to 152887905)
cggctccttcaggtataaatgaatcttcctttcgcgccgcctctcttctcctctcttctcgcctctcgtatctgtaactgtcagcttctgccttatcctttgtggatatacttgagctcaagtttagtttgttccgttctacattttgatgtacctctgctgactttgccctcttatatgtttgaccatgttttaaggagtcataatcctacattattcagactcatttcaatgaagcatcaagtacaaattcaaaataagtctattaattggttgggatttcagtggtatggtcgcagccctgttgagccaaactgtataaggaatttttcagatattactcccttgtatatgacctcacacgtactgatctcttctctgctgtttgatttttttggttagcagcagactaacgttgtagtaactgtttgtttcttgcaaacaaacaaggttcatagaatatccaatcgtatccaaataacagtatcactgccacatgtttaaatttagcagtgttcattgtacatatttttttccattgtatacttttaagtttgcaggaaggatgctttgactagttcatgagcatctttaatcatttcaagtaagggactttcttctgttgctcggcagatggaatttgtgcctgcatttttcttccctactcctatttctgttatttactatataacaatcctttagctgacatttttttgcttatctaggaa

SEQ ID NO: 5878 - DNA, 578 bp, Zea mays
  Intron number 1 from transcript GRMZM2G077187_T01 (locus G RMZM2G077187) derived from phytozome v7.0 (chr-ID 8; pos 1 52433278 to 152433855)
aacagtcgagcacctgcgagcgtctctgccaccgggtatatagctttgtctcggttgttaggtcgccaataattagtttcctgctgctcctcttgcttgtttgaacggttgcttgatgtgcttacgtctacgcattttggttttgatttattgctctgcttccatcacagattcttaattggttaatgctcctgaacatgcctcttgcctcaggagtatctaatgaattcaataattctgaaggttttgggtgaaatcataagtaatatacttactacatctgacaagaatttagtcatactgcagaactattttccatgacttaaagttgcacaagtttgtagacgataataaagccttagctcttgtctgctagtttctaagaatataaaggcacaattagctcttgtctctagtttattgtagtccttaatacctcttcgatatgaggaaactgaaatccttacagttgtcagtgtacatgtctagttggttcgacaaatcgtgtattgaatttccgattcaataagtagatttcgtaaatttgtccggttaacaatttcaggactcaagaggca

SEQ ID NO: 5879 - DNA, 794 bp, Zea mays
  Intron number 2 from transcript GRMZM5G873635_T04 (locus G RMZM5G873635) derived from phytozome v7.0 (chr-ID 2; pos 2 10866142 to 210866935 reverse strand)
cgctacaagcttctcggtgaactcgccgtgagaaggttatgctcttgaccgtgcatctttactgttgtagtcactctcacagcaggctcggctttttgctgtgccagaccctgtgttctaactctaaggtgacgaaattgatcaccccctccattgcattttatagttagtgggagggacttattactcttccattgctcaagtgttggagggttatgtacttctgaactaggtaaattttggagatagttattttagttgtgttttgtgcatgtcatctataaagcaaataggttaccgtgtaccaactttgtgtcggaagatgactatatcacctgtgccaactggtagtgtacctctgagaagctttggtcataggcttctgagatatttatggttggccacattacttgtctgtttgtttgtttttgtatgttttgagcttgttttattattgattattactgattactgatatgtgaatctttaattgctaaaatattcttgttagtatgcttggcacggcaccttttgtttacctctagtatttaatctttactaaattggtttgtttgattttcagggcatgttatggtgttctcttatttgtcatcgagagtggtactaagggctgcgaggtgtgagttccacaaataaaaaccattccagtttttgtttctatctcgctgcaccatgttatcctgacaatttttgctagtgtgctatttaaactgatggaacaattacagaacactttcctttgtcgaaattcatgagtgaattgttaacctagt

SEQ ID NO: 5880 - DNA, 601 bp, Zea mays
  Intron number 3 from transcript GRMZM2G177165_T01 (locus G RMZM2G177165) derived from phytozome v7.0 (chr-ID 2; pos 2 36356112 to 236356712 reverse strand)
atgtgagtgcagtcttcatacattgttctccatcttttgtatgatgtgagactgtgagtgcagtcttcatacattgttctccatcttttgtaatttgttgtatttgttgtctctagtttcggatcatcaggtttcatcatacctaccctactaaaatactacacactatcttcatatcttgattccactaatagtaagcatctgacgctgctggacttatgcttagggtgttgctgctgctcatcatgttaggtgtggccttgttctgttgttaataaactcatgtagtattattagttgaaaacgttgttcaaagatgggtgaagctctaacccagttgtattccttagtaagagttggtatatgaggataatgttgcatgggttgtttgagttgtcagcatctactgatctagtggctatatgattatgacacttacactcaaatatttctgagggtcgtattcaagttatgaatacaaggaaaaaatattgaaaaataattgttctaatggattaaacattatgttaagtttttatttgttctgacaacaaaaaactaaatcactatgcagaagaaggctaagacggcagtggctgcc

SEQ ID NO: 5881 - DNA, 926 bp, Zea mays; identical to SEQ ID NO: 4353
  Intron number 2 from transcript GRMZM5G899300_T01 (locus G RMZM5G899300) derived from phytozome v7.0 (chr-ID 9; pos 2 0601826 to 20602751 reverse strand)

SEQ ID NO: 5882 - DNA, 554 bp, Zea mays
  Intron number 2 from transcript GRMZM2G050193_T01 (locus G RMZM2G050193) derived from phytozome v7.0 (chr-ID 2; pos 1 96334022 to 196334575 reverse strand)
tcaaggtgtgtacattccttttgctcttctgcctttcttactgtatatgtttatcttggctgctgtataatgaatagttggattgttgacaactgttttttctaatatgtttccgattatttttgagtggcctgtagacaatttgagatcctgaagtaaagacaacacaaacgatatctggccattgttgaatacatttacttttttctgttgtgtatcacattattattacagtctgatcagcatccttgacataagccacaagtattatgttgtttagttgcgatgtatgatacagacctctacatatgcattagagtgatatagacctctacatatcacattattattacagtctgatcagcatctttgcacagtgtttagtttagagtgtttccgttatattttgcagtttgttttgtgtaatgcttgcaaggatttgagtcaagtggttttaatatgctgaatgcaatatgccatctttttttttccaattgcctccataatatatggatttatgggatgattttatttctccctacttttctgtcagg

SEQ ID NO: 5883 - DNA, 884 bp, Zea mays
  Intron number 2 from transcript GRMZM2G439369_T01 (locus G RMZM2G439369) derived from phytozome v7.0 (chr-ID 8; pos 1 6955948 to 16956831)
gcggaggtaatctagctgaggttgtatcttgtcaggttggttatatatcactttgatatgtgtgtgttttgtgttattttatatcgaggtttgttgtgtgtgtcttgactctcgattaaggatccaaacatgggtagagtgaagaatcctttttttttgctggtgacctagtgtgcatcatgaattattcctagattactactgtttttatttttaaaaaatggtttgcaaacacaaactcctatgatgcagcagtattagaggagccgttcatatctctgcatcaagttaaataatctgtacagttctgctactctcagagaatagggaatagccaaatattagaggaggtgtcactgctactttcagataagtttattacttcttactattataggatgcatggtaattaaactggagcataatgatgctactctgccagcagactaccatcaaaaaacaaaaacttgggcctggaaatttagacccccttagttcgaacattatgtatactgagtattaatttcttgcgctctctcatgcttgttctaatctatttgttcgcggttttatcttttgtttgtgtttatgatataaacactgctagataaaatggacgtaaacagcaaagtggcttcatggaagcgtggtgggcccataacccacaggtcccaggatcgactatcagctagcaccaaagtctggttgtctctgcgaattgcttgacagcttatacacgcatgagtcaagtatcagtttttttaacacaacgtcaagtccagtttcttaatcatgaacctcagggacagcaaggaaaaacttgcctgcagtgcccttgattatgaacaggagctggagactgccaggaccagctccagtgttga

SEQ ID NO: 5884 - DNA, 783 bp, Zea mays
  Intron number 1 from transcript AC216056.3_FGT008 (locus A C216056.3_FG008) derived from phytozome v7.0 (chr-ID 2; po s 207632179 to 207632961)
ggccgcgggtaggttgggcttggaatctcgggccatccctttcgagtttcgccttcgttggaaagaaaagcccatgtccgccttagttataaaaaaaataaaattgtggttggatttgtctgaattttatttaaatcatgttgcacaattaaatgacaatatattcacaaataatttgatgcctagaatcacataaactatacttacgcaaataaaaacccgcaatttgagtgcaacgcaaagcaatagaaggttacaaccacacatacaatgatacaagtacatataaaattttatataacacaattcttcgcacaaagtatatatgtatggaccatatattcaatcggagtcatagtattcaggcatgtttgaaccttccgggtatgagataatttcatattcacgaccctatacgaagttataaaataacattatctagatgatatgaatggaaaacaagtagtccataataaagattgctttgatggtgtaaaattataaatttgaactatccatgcatttttcataaacttatatgtccatcacataaatttcacgctaaatacatgtaggttggtatgaaaatagaagcttaaactctaaaaatataatatgaagtccatacatgtccattataaaagtctacacattacacataaatatgtatagatccacataaaatagaaactccaacactcgacaagtccatatcttgtaattatattgttatgttatgtatgaacttggatgtgtctgtttagagtttggattcatattcat

SEQ ID NO: 5885 - DNA, 914 bp, Zea mays
  Intron number 2 from transcript GRMZM5G892035_T01 (locus G RMZM5G892035) derived from phytozome v7.0 (chr-ID 8; pos 3 794235 to 3795148)
ctagcttgaaggactgccatctttttttttggttggtgagctacacatcaaatgttaatcccccgtttccgtactcttatattgtgcttattattattctcttgggaaatttggatccataccattaaaagatcaccactttggatccataccattactatctcacttacatgtgggtccacatgagtcaatgacatgtggggtccatggtatatatctaaagtttggatcttttaatggtatagatccaattgttcctattatcttctgtaatactatagcatttattctgtctgtacataggtgggatcaaattatctgttaaggttccttcgtttatgatcttttacatctataatttgcaactcatctctttgtttgatttgatttgattgccctgcctgttgatggtgaaactagcgtctgtttgatagaacgcatttttgccggccagctccactcgagaatttgaaggaattttaccaacgtggggagctgaattttttttctgctcctcacattttccactctccacccgcgcctgactgcagctggctgcgatccccctatctaccacctgattcatctttgtctccgtcggtgccgccctctccgccagcctgaccccaggtagcttgccaaacggacacctcgattcactttacaatgggaatcaattccccagagaaaggagttaaattctgggatcccatcgtctaggttataagaaaaatttcgaatatatatagttaaccaaaaacaacaattgccttcgtgtagacaatatgtttactttattttctgggagtgggacataccagttttctgttctcttgtggtttacaatcatatgcacgcgatctaaagcttaatgttttttttcatgaaaccaccctcttttttttctcacaggg

SEQ ID NO: 5886 - DNA, 807 bp, Zea mays
  Intron number 4 from transcript GRMZM2G030646_T02 (locus G RMZM2G030646) derived from phytozome v7.0 (chr-ID 2; pos 2 17095181 to 217095987 reverse strand)
gggaaggaactgaccgggattataaatacgaggaggtgattaaatatcttctgccaattatttttcccttgtaaacatggatcattgtgcattagtcattatattagtaaacatgtgactatttggtatccttttggtgggatgtcacaattttttccacagctttacacccttgttgtggttctaaatgttctatgccatttcaaccacattttgcctttccactttatgacttacatgctgttcacacctgtttctttggttgcattcagaatgcatcaatctttattactaatttgattacttgttttcactgcggttctcccatatataactggcttggaggatccaattgactacaccctctgttacttttttttgtgccccgtttgtttcgttggaattgaattccattttaataattataatttagacaaaactaattaagttcgtatatttatatatgtaatatatttgaatattatcctaaatcatatgagagagatagttatatactacatttatgttatatcgaagcaagtagaagagtgtgctataagttgtgcatcggaaaatagtatgtaaatctatataatcaatttccatttgtcaccccatgaatttgagataggctaatatgataactttggaaagtggtggaatgtcacattctaaaaaaaagcctattccattagtaaaattccaattcctcaaaatgaaaggaaacaaacgggaccttagtgaaatttgaccttgagcatttatgttgcagctgttggacagagtgttcaacattcttcgtgagaa

SEQ ID NO: 5887 - DNA, 454 bp, Zea mays
  Intron number 1 from transcript GRMZM2G173718_T01 (locus G RMZM2G173718) derived from phytozome v7.0 (chr-ID 8; pos 1 5243392 to 15243845 reverse strand)
accttccacgatcggatcagcagccgaaaacaaaggtaaactaagagctagtccgggaacctcaatttctcaaaggattttcatttttcaaagaaaaattagtttatttttctataggaaatttgaaatctcttgacaaaattagagttcctaaactagtcctaaataattaattaatacgacaggagcgggggaggataggataggacaggagaagagagcgagcattatttaattggaaaacacatggatggatggatgtattttttaggctttgttcggttattcctattatacatggatcggatgagattggaaaaaatgtagaaattttttgatttgtttagaatttaaaaccatctaatatcacttaatccatatatatggattgattggtaaccgaacaagcccttattattttccattaatccatgcatgcagaagtactgggtag

SEQ ID NO: 5888 - DNA, 511 bp, Zea mays
  Intron number 1 from transcript GRMZM2G163307_T02 (locus G RMZM2G163307) derived from phytozome v7.0 (chr-ID 2; pos 2 04486017 to 204486527)
gaggagaacttcaaggagggcgggcagcgcaactggtaaccaaacactcttttggggaatttgcgatactcagcatattactacctttgttcagagtttgcactttatgctgttgtcagcatgcatacagccgaacagtaattgcagttccaacttaagccaaaatgttatagattctagagaatttccctgcaagctttacatgtttgattgctttgatgaaattacattatgtgttgcttaatctgtttttctttaaattattttcgaattggtacattctttgctcagttcgaggaaaaaaaacagatcagcagctaaaaacatatcgtgaacctcttctttctttcctcgatcatataattgatttgtgatgtggatgtcatcatacttcataaaggatatatcgtagcagctacagttttgtcaaattaatcttgctggtgtatcttactatatcgctttacatcttaaaggatccaagttctagcaaatagcacaattgccactg

SEQ ID NO: 5889 - DNA, 804 bp, Zea mays
  Intron number 1 from transcript GRMZM2G085438_T03 (locus G RMZM2G085438) derived from phytozome v7.0 (chr-ID 8; pos 1 51665076 to 151665879 reverse strand)
ccgtgctccccaccctcgaccactgccttttcaaggttcgatgtgcaagtcgctccgtcctagcttgatttggtttcgtacgctgtagcggaggatcagctgtcaaaattattttttgggaaatggtcgaacgcttccagtactgcggcgcttgccacctcatttaggtgcgagcagatttttgtcaactggcaggatccgctgcttgcccaacaaactgagtactagaaatgagcagctctgttcttcagtgtgcaatttgcagtaccctcgtgcaattctatacagtataatccaagttgtcaactcgacatattactcgcctatctcaatcttaatccggtttagagcaattaatttaggaatatgacacaaaaaggtgatattttttttttgcgagagaacatgacgtattagagaagtgtttggttccggagtatggtaggacggagccgctcggcttctaatttattgttgtttggatgattccatgtagaacatcgtgactctaaaaaatgctcaaatgctaaatcatttgcctttccaaaatctcctgaatggtggcaatggagccgctctatctcaactggctcctgaaccaaacactatctaggagtttggacacaaccccatgctattcagagtaaaacttttcctagggttcccttagaacatgatgaaccatctgcatcagttatcgagttccaaacttccaattgctaatcttgtatccttgtaacattggttcatacgatatcagttgacacatttttctcattttctgtcgtacttttcattttgtag

SEQ ID NO: 5890 - DNA, 686 bp, Zea mays
  Intron number 1 from transcript GRMZM2G142712_T02 (locus G RMZM2G142712) derived from phytozome v7.0 (chr-ID 2; pos 3 6568042 to 36568727 reverse strand)
gatctcgacgccgacgcgcagcgcgccgcagtacgtacgcgctcccgattcctccccgtctcccgctacctcgtcgcgcttgttgcgcggttgcgtgtcgattggatcgtcgtcgcggccgggtggatggaacggacgctggctctcgttagtgttggtgcttggtgccgtgcgcagtttcttgggcagggttcttggggaatttcggttcgcgccggccctagggcccggttgggaggctttgtactgtgttcaggttattggctggtgtggagatgaacgaggacttatttttccctctgtggggttcgggaatgacggtggttgtttaaaactcgcgcattctactagagggtttagggtgtccagttcttgagttctaggtgcgcgtctgattcccgaatttgtgcgtgtaaaataggttcttttctgacttggtcatctgaggaatggacgcatgcaatgaatgcttcggaggtcctgactcctgagatattcccaaaattacaaatttgaattgtttcctcggagggttttattttaatgatcatacttcctttttttatcaaactgctgtattctgaattctccaccagtcgggtaggtagatgtgacaaaggctgcaaatgtgttttctttggaaaatcccaggataagctgaaagcagtgtcagaggaacttggaca

SEQ ID NO: 5891 - DNA, 924 bp, Zea mays
  Intron number 2 from transcript GRMZM5G896953_T01 (locus G RMZM5G896953) derived from phytozome v7.0 (chr-ID 2; pos 3 4530352 to 34531275 reverse strand)
gattggataggtaagaatcactacactaggttttatataatatgtaagtttggagtgtacaagtttgatcagatataaagttagttcaatggctaccacctacctatcatcatttgtacccgcaatgaaaatcttaatcccaacttaaacttccacatgtatatttcactgttaattcaaagtacccattgtgatataagtatgcaatctctcccctgctatatattaactgattacgttcctcttgctgtaggggttatagtagttttatcatcacatatggaaatacaagatgactgcacacactaatcaaacccacaccttaaatcattaatataaacacattttgaaaagatacagtccagatggttatctaaccagaactaggatgaagatggtgtttctaaatctcataaacaatcaccagcaataatagtacacaattatatagattcccagaagagatttactgtagaattatatgaatgccatggatagatccacggataaatgaatcagtggttttctgcaaaagcaatgtcatgaggcagttacctttgtagaagtactattatacaaatgataatcctatagctttagctttaccggtacttggtctttttggttagtaatactgtcacgcattttcaagaaaaagaatcgaagttgtgatcaatccatggcagttgtcaatctgacacaattgcttatctctaggccaagagtgatgttacacgacgttttagatatggtaggaggtcgacagcctattcaagtgtcgtaggaaggcgacgttaagcagcagtggtggctgctagaaagagccccacatggccacatccaattctaagatcgagtcttacttgtagttcaccacagataacgattatcctctgttttaacagtgactattagtttattacc

SEQ ID NO: 5892 - DNA, 855 bp, Zea mays
  Intron number 1 from transcript GRMZM5G856681_T03 (locus G RMZM5G856681) derived from phytozome v7.0 (chr-ID 9; pos 1 11599011 to 111599865)
ctcccctgcgtcttgccgcttctagcatcggggaggtaatacgtcatatccttttattctgttcgtgataagttaataaatgttgaagctattactgaactgattaggagaagccgattgaattgtagaatcagtatcatttctgagaacaaccaaattgattcagactggttatgaaccgattgttgtagtagcacttttctgatgataacatatgcttcatattatttgagtttttgcttcagtttttgtaacaactaatgcttaatcaaacactagtcataaatttcagaaacgcccattcaaagtcggcaaacctggcagttaaagattgaagatccttaataggtaccaaagaagttacaaaaatagcaatatccacgcgaagctagtaaccgaaacaaagttatcatacttccggcattctggccttttcacactcaaaacagacaaccagccatgtgaaaaggattgcccaaacagtgaaattttccatatatctccttaaggctgatgcttctatgtgcagctaaattctcagaaaagctcctcataaataatcctcccaaacagggctttgtcaccttgcttgacctgttcaccagggtggggtttgattgattggttcatttgttcagtcgattcccaacaaaacttgagctgaaatttagtggcaactatagtctgacttgtttttgtcgggacccttagggattacctaaatatattatgtttttcagcttgggattgccagtgaacaaattatttttcatgtgtgtatatattgggttttcgtcctgcatttagtcattctgttaatgccatctttctacagaaaaattatagaggaaggat

SEQ ID NO: 5893 - DNA, 1041 bp, Zea mays
  Intron number 2 from transcript GRMZM2G120353_T02 (locus G RMZM2G120353) derived from phytozome v7.0 (chr-ID 9; pos 7 575466 to 7576506 reverse strand)
attccttgtctgcttcaaaatcaagttatccagttgatctcacccaactcttcaaacaacaaaatatctccttatgtgtgactgaatttttcatgcactctggttttggatccatccattatgttcctcataatgaagtatttcatgcttattcagtagcaaaagacgatattttttcttgaaaatcctcttaattaacacgtgcattttcttgtatgaatcgttacctattccttttaatcatgtatcttggtaattaattgcatttgcatcattaaacctggcttgactcttgtgttgcttgatagttcatttgttttgtctataaactatgtgggcgtcagctctgtataggtccatgtacaattttccaattcttcctatcaagtttacaaaaacaggtggggcctgtccagctgtacctgactatgatttggggtgggtggggtctgaatctttttctttgttcttataatctcatggtgtagaatttctgctggttgggcctgatgacatttggaatctgattacttctttacaccattgtgacattagttgactgtcatttgttgctttttatttgagttgcctggattgaattagtctcaggacagacataggataggacctaagatcgcattagcaaaagctaaaatggtctaggattagaagtgttataccaaatcttccatgaactccagatagcccagagtcttttataatgccacacacaaagctttcatgtgttggaaaaaaatcataggtcaaccgaactaagttatcacaacatttactcaaaccatatcagaaggcacatatgcttacataaatttcattttagttgataccaccggtcctgggtttcatgcttacaactagaaaagggttctattttttcagattatgaacataccatggaaacatgaagcagggttttacttttatatatgctagcaattgttatctgttgtgttgctttacatttctgttacttactcttttgcaggtaaaatatacagactgtggagttagtcctcagga

SEQ ID NO: 5894 - DNA, 670 bp, Zea mays
  Intron number 2 from transcript AC234517.1_FGT001 (locus A C234517.1_FG001) derived from phytozome v7.0 (chr-ID 8; po s 50177916 to 50178585)
gccagagagtatgtgccttctacatatattgttttagtttttttactactaccactccctgtcccaaattataggctgctttggtttttctagttatatatagctttgttgtgaactctatcacgttcattcaaactgtgaatcccagttctgtgcattttgggctgctcgagaactgtattatagagttgcagcttcctaggctcaaaccaatgttttcagattggctgatcgctcctgatcgccagaggggcgatcagctgactaatcacgatttgtcggcgaccagcccgattaaacgggctctgattggtcaatcggacatcctgatcgtctagagctataggaaaagttaggtgtgtatgttgtctggtattgaagttcgagttcagtgagtagttcagggggggtgaattgaactttcccctctcgtatttcttagaatggtaaggtgtcgcctcacctctcattatgaattcctaggcgttgtgggtgtggtaggtctaagcactcagagttttgctgttctactttctttcttagcttcagaagttttgggttaaagagtgctacttttttttcttgtgtactctgcataatgttattcatttcttcttttggtgttgttcctgcaggaggaaccatctgtagttgagtcctactataacaa

SEQ ID NO: 5895 - DNA, 1029 bp, Zea mays
  Intron number 2 from transcript GRMZM5G859176_T01 (locus G RMZM5G859176) derived from phytozome v7.0 (chr-ID 2; pos 5 2546119 to 52547147 reverse strand)
aaggtgcgtccatgaaatgttgtctcgtgaaccataggctagaagtttacttgttggtcgtcagacaagttcgtggaggtagtactgatttgagtggaacacgcgcccttgtgtttgttttgtgacattttgcttctagcagattgttcatggctaaactgggctgttgtcattaatcgtcaatattttggagcaagttgttttgtgacattttgcttctagcagattgttcatggctaaactgggctgttgtcattaatcgtcaatattttggagcaagttgttttgtgacattttgcttctagcagattgttcatggctaaactaggctgttgtcattaatcgtcaatattttggagcaagttggtctctatgttctagtttctactttctaaggagtaaaaggaagatacacaaagttaactgcgaggttacttcagttgactcgtggcagttaaatgctctgcagtttggtctcctcagtgttgaaagtactgtaatgcggactgtattttgctaggtttgtgtcagcgcagtttctgtggtatggaaaaaaatcacgggctaaattggagacacaatccttttcgctgaatttgcttcttctactactaagtttctatcagaacttggaagcatattggtatctagattagtcagatttgcctctttcgtgtatagtcttttgtgctaattaaaatgtgtaaggaactggtacttttacacttttcgtgtgcataaaaggttatctgcagaggttgtgaactagcagcatttctagacctacatattccaaagaaacgtaatgagactcatcaaaataagattcagcatatgtaatgtacttaaccaagatgcaagtttttgttatacgcacacagtttttggataatgatacctggagtattacccttttacactaagctgctaagttttaccaatgactcaacttatgttgtatcagtatcatatttttttatgtttttatttgcagaggctagaggttttgaactagcagcatttctagac

SEQ ID NO: 5896 - DNA, 827 bp, Zea mays
  Intron number 2 from transcript GRMZM2G165567_T02 (locus G RMZM2G165567) derived from phytozome v7.0 (chr-ID 8; pos 1 12713689 to 112714515 reverse strand)
gtgtcaagttcgtcggcggggaccaccgcctccaggtccgtgctgctgccgcccgtttgttgcgtccctgcaaaaatgctctgtttcacgcgccctccttgcttgtcagtgtactccaaattatttttgggggtatgcttgctttgttaccatttctcttttttttaaattaaattgctttcttgtttccatttcactgcagtcctgatcgctggatgctatgcatgaaatgcatttgctgtgcttgcgagattgggcatttactatgagctttgtgacagttaacatcttggtcctgtttggaagctgggattgggaatcaaatccttacatggtttaggagcatccagtttgaacttaaaccattgtagacatctgctgcaataaaaacaattggcttcggtgagaggcactcatcatcagttcaaacttaaaacgagataagccatcggttgattggcctaattaccttgcttcccgtgattgttcgcctcgctgaaaggatatgctcacaacccgtactgttttgacttgttatccacatactatttaagtacgaaaggacatgcgtactactttcatttgttgttcttcgtctagtcttcagactgataatataaggtgaaaaacttcgatgtttcgcgtgctgtcaagtgattgtgaagcaaagtttctgttagtgtcaatgcgtacaggctgcaatggccatctttactcctacttgaagcatatctctgatccacactgatgatgatgagttgtgtgcgccacttttttttctttttctttcagaactactcatccatcataactgtccaccccgagag

SEQ ID NO: 5897 - DNA, 793 bp, Zea mays
  Intron number 1 from transcript GRMZM2G348666_T01 (locus G RMZM2G348666) derived from phytozome v7.0 (chr-ID 9; pos 9 3467646 to 93468438 reverse strand)
ggagaaggacctcgtctataggggtttcaaggtcgcatttctaacctccctcatagctaatttttgagtatgttggttctcaaaattctgagttatacaaagtttaacaaacgtaggattcgatggatttagttggacaagcttagcgttcagtgaattgggaacttaacagtgtctttgactgcatagcgactgcattgcaaattctgctgcctctcaatgcgagaagtacatctccttacacattttactgttattatgcttatatgctgctttatgattagatctataattttgcatatgagcttttagcttgctttaaatattgcttctgtaaggtaagagaatgccatttttattttgttgatctcggctttgtgacagcacacatgtttctttaggcgtgtggtgtggttgtaatcttgggagttatgtgtggcttgtaggataatctgtgcactgtaattgctgctaatgtacagcaagtactatttttgtacaaattgttttgaacccttctcgactgaagagaaaaacaagaaacaaatagagtatctgaggccatctccagcagaccgtgtaaacggccgtacaaagtactgttttacattgtagattatactgtttgtagagtggagtttaaaatagggagtaatataggaagtgggatagggagtctgctggagatagtctgacaatagaaatgaggaaatggatctaagttatatttttgttcattgtattgcagggaatttcttaaaacctcatgaactctttgttcttggtataggtc

SEQ ID NO: 5898 - DNA, 600 bp, Zea mays
  Intron number 3 from transcript GRMZM2G015011_T01 (locus G RMZM2G015011) derived from phytozome v7.0 (chr-ID 7; pos 7 6950343 to 76950942)
cgtgagcggcaggacaggaaaaggaacctgaacaggtagtttctacttttgactttgggtgtcagagtgttgtacctctgttcttttttatttgtcacgttttagttcaaaaatgaactagcgggcgacaaatattcgaaaacggaggtagtatataattagaattatggcaaaagcttctgttttgaatatgttactgaaccacacattccataatacttgataaatgctgatattggttggtatatagtatcactactggcattcaagctgacaacgtaaactcttgggactaaaaaaactcgcctgcaggggatgataccttctaacacactttggcatggaacagacatgaagattttttaacgtatgtctgaaaattcacttccactaggagtggaacccaggcccttaggctaaactaccgggactaaaactggcttccctaatccttacgagtatttgtagaaaaagctacattctgtggcaatggatttattatgaacaaaagggctcatgctgctttacactgacacaattctccaaatggtatgcgtttttatcttattttactattttatacttgcagatatattcctg

SEQ ID NO: 5899 - DNA, 993 bp, Zea mays
  Intron number 1 from transcript GRMZM2G337819_T02 (locus G RMZM2G337819) derived from phytozome v7.0 (chr-ID 8; pos 1 68337645 to 168338637 reverse strand)
gccatctctggtgacgtatcctgttctcttcctcattgttgccgtgcttattctctgatgctgccagttcattggttcttcgcgtgggatgtggtagatctgttgggggtgtccatgtgtgtggtttttgcccccggactgcgtaggaatcgttgggggagggttttggatgagggaatctggcgaatttttgcgatccggatgcttcgaaccctcgattattcgtgttttcgtttttggggagaagaccctcttgaattgaataggtggttaaaggctgagcttagagaggtgagttttctttagtgtggttttggtatacgaatatgttaggaatgaagtagggatttgattatgagtgggaagtggtttcaatgctgaaggtgagcgtacatgaggcaaaacaacatggttgcgtaaagttcctttccttagtttttttttcgaacctgattctgttacttattccatgagaatcgaacagtaactggcaatgtctagaaagtaggctaaacaagggtcttggaatgccattgtttctttctgaaacgtggtgacatactgacaaccattcttgtctgctcgtgctatgtgccttgctggcttatcatcttcataaatttcaacttcatgcaaagttcaagtttcaggttcaaattactagctctaggcttgtagatacaactagaagaccccatctgttgccttatgtgccaaatgcgcatttcctttgttatgctccctctgttcaaattatatgtctgttagtcaaacttgctagttttgaccatgtttatagaaaaatatattaacatctacaatatcgaataaatacttggaataaagctaaaacaacttacaatttggaatggaaaggaagaagtagttgctaatttgttctcatccagttcgaccaagctctgaacctatttcttttcttttttgtcattttcttcagagtctggaaaactcctcacttggggttcagctgat

SEQ ID NO: 5900 - DNA, 303 bp, Zea mays
  Intron number 3 from transcript GRMZM2G537201_T01 (locus G RMZM2G537201) derived from phytozome v7.0 (chr-ID 2; pos 1 74558829 to 174559131)
cctggctatactggtcttgcggatcttgggaataggtaccctggtttgatttttgaaataccctgttgttctgacaattccttatgacaaataatttagctctcatgtttcttcctcttttacagttgatatatggcttcaataatgcaagtcatgtttttaacccaccattccatatcaaggttgcttttagttttcacattcgtttttgatacattgttacatttgtatctttttcttttactttactcgtcttttttcattttagatactttgagaaacagagtttgaaagctgcatttg

SEQ ID NO: 5901 - DNA, 625 bp, Zea mays
  Intron number 2 from transcript GRMZM2G100815_T02 (locus G RMZM2G100815) derived from phytozome v7.0 (chr-ID 2; pos 3 6612955 to 36613579 reverse strand)
cttcaccaaaccaagaacgttttcatcattacaaggtaggaaactaatcatgatagtttaattttgttattgtcattttaagaatgttttcttggcatcaggtttacaccttcgttaggagcaaaatatgtatatatttgacttgcattttcaatttcaaacctagataggagtaatgatactcatctctacacatgattatattttttgtcgagaaagctacacaattttaattcaaatttctctcatagacactaacatttgaactctttctcccatttataactcgagaagtagaaaattccttagcattgaggggtccaatgttttcaagtcggacgacttgctggtcgttctagctgaccaactagggcgattaatcgcgattaatcacgattagtcggacgacttgggcgattaatcgtgattggtccaaaccgacttcgatgattaatcgcgactaatcgcgattaatcggagtatcggacgacttgaaaacattggaggggtcaatgtcaaactgcactgcgtatctttatgcaacaatcataaaaggtggtgccttttcttattccttgactaaattatcgtaggacttttggacattggatctgaaaacaaatca

SEQ ID NO: 5902 - DNA, 532 bp, Zea mays
  Intron number 3 from transcript GRMZM2G402645_T01 (locus G RMZM2G402645) derived from phytozome v7.0 (chr-ID 2; pos 5 2609055 to 52609586)
tcgtcataactggaaggtagcttgtttccatccttcgctcaacctgccttctgaaaattttctaggactcagtatgcaccgtatttcaaatttcatttatttgttgacttgcacagcatattattgatagcatatgaaatcactctagaaaacagaaactgtcgaggttaatggatttagctacttaagaaagaaataaagtttggctgtgttttttcaagttttgcaatttcactggctgcggccattggataggttgtttcatactgttgtttcttatttagcgattagcattgacatcggttttttgttataaaaaaatcctagcacaagagggttacgaaaagcacttgctttgagtttcttctttctggagaccgtgttggcaattagccttcattagtttcagtcttatgatcttattcacccttttctcctatactaattaagtatactgaacgttgaacgctttggctgttccctagctgcacatcatcttataaaccatcaaacataaacctcaggccctgtt

SEQ ID NO: 5903 - DNA, 713 bp, Zea mays
  Intron number 5 from transcript GRMZM2G402645_T01 (locus G RMZM2G402645) derived from phytozome v7.0 (chr-ID 2; pos 5 2609806 to 52610518)
acttggtagcggagacgtcgccctttctagttcaggtgccagttgcaagtcccccctgctctactttgatgactgtaccttttcttgcatctgtgtgtttatgacgattgagtattgacgaaggcggataggttggcatagaattttgctatttttccagatgttgaggtttgatgagatcgtctgggggattgcaaagttcgcgtctttggattctacttttctcatttcagttgcggcgattcagtgctttttttgaggggaaagttttccacttggtttgatatttacttgctttggctgtaacttgggttcttcattctgcatgcgaatgtgttttgggtcacacattaatgaattttccggggaaaaactgtgaaggttgcagatttttagttgatttgcaactgttcaactcctgcatttgactattgtcatctcaattattttagtcgacgtttttttactggtgttcagttgctctgtgtgctattgaccatatacaattgatttgtttttctatgttttgacttttggctaatttcttctgccatatgatcctgattggttttaagcttttgttttcctcgctatgtaaagacaaaaagaaaatgatttttgctcaattttactaccagaaaacctaatgtttcaacatcactgatgtgatacgtattacatggcactcgttttagtcgagagatatttctggc

SEQ ID NO: 5904 - DNA, 503 bp, Zea mays
  Intron number 6 from transcript GRMZM2G402645_T01 (locus G RMZM2G402645) derived from phytozome v7.0 (chr-ID 2; pos 5 2610943 to 52611445)
tactgaagtctcctgtttttctttacaataaagtatgtgatatttccttaagatcccgtttgtttcttttcattttgaggaattgaatcttactaatggaatagactatctcgaattcatgggatgagagatggaaattgattatatagatttacatgttatttttccgatgtacaacttatagcacactcttctacttgcttcgctataacataaatgtagtatgtaactatagaacacggtttcctgcattatacttatgcatgtgaccacaacactaattgttgtctactgtgcaaaatattattatactagaaatatagttctctgattggtgtcttacaagtttggattctgttttgattttatagctgctaattttggaccaacacttacaaattcatctttgttcccgccctttaatatttgccatacggacttagctgaattggttgtgatatatttcaggcacagccttctccaaccactggcacgttgccatt

SEQ ID NO: 5905 - DNA, 667 bp, Zea mays
  Intron number 2 from transcript GRMZM2G141216_T01 (locus G RMZM2G141216) derived from phytozome v7.0 (chr-ID 8; pos 1 6701553 to 16702219)
ccaacgatatcctgtgtaagcagactgctctgaaggttggtgattgttttgttgaacttctggtgtaatttgactgatgtgttaatgcaattaaataattctggtttcactgaatgccagtactttgcatatagttgtttttgcacatctaatgaatggtttcaagtgttctaaacatggaatattttagtcatcaaacatggtgaactttaagctatttggtcacataaccattttatggatttcctgcgcatgaagacattatgattctgcgcatgtgtataagaaatcaccaaggctatgctgtcctttcatttggttacgatgtccaattgtccaaggattaattaggtggacactggacaacctctgccccacagtcaagaattgtcatgtgtgtgtatacataaacaggattaacttttctaatgctgcagtaattgattagttttgatatcaattgggagtcctgtttctatagcgaatttctgataccttaaattataaaatccttcaaactcagttgcttttaataattttatacaattttctctgttactgaaatatagtgtttaccagtgatccttgtaccatattgactaacttgatttttttgtgtcccatgcatgcagagggagagaaaaattccagttcttgtcgggattac

SEQ ID NO: 5906 - DNA, 537 bp, Zea mays
  Intron number 3 from transcript GRMZM2G434252_T03 (locus G RMZM2G434252) derived from phytozome v7.0 (chr-ID 8; pos 3 2602741 to 32603277 reverse strand)
caatccaccaccagaaccgccctaccccaagataggtatgtgcaggttcaactactcatttagatattggtacaacctgtaatagactttggtacaataggatttggttctgctattcactttgtttttagttccaaacaaccaaaaaattgcatgtcctttagaaaaaatatcacaggaatatcagtaatataacactgataataaaaatgcttcgattctatatatttttcatgttataaggttgaaaacattctgtctcacggatcaaaatgggtacaaggggacgtactgcatttacaaatatatttaaccataataaaacatctttggaaaatgaatatcatttaagtccaaaaatgtttttgttgaatgttcattaagctagagtgaagagtaaacttagcatttcttttctatatctctccctcgtgctcatgtagccgtagtctcctccatccaacatttcctacgcatgcagctccatctcagtcgttgtacccattcaatggcgagctggtggcagcgatgtaggag

SEQ ID NO: 5907 - DNA, 754 bp, Zea mays
  Intron number 2 from transcript GRMZM2G434252_T03 (locus G RMZM2G434252) derived from phytozome v7.0 (chr-ID 8; pos 3 2603288 to 32604041 reverse strand)
atctttcttcagttttaggtacttttatgctttaatatagctcatgcaatatgatttattttaacacatatttggaatagaactggattgtgcatattttgtaaagtgtatgttctacattttgtaattcgtattattcattttttcctttagtttttctctttctacaactcctatatctttacaatcaaatttcagatgtgatagatattagtatgaaagataaaactagaatgctatgtctgtcaaaggagctttcttcagtttcaggtactgctctgctttattagccatccagccgatggataatttctatacgtgtatcgccctgcactttcaaacacttatgttcattgtttccaatcacatattttttcttcttctcttagatttactatgtggttgtggtctcagtttggcttgtaggttaatttgtatactcatgtcattttagtttttctgtgtattttatgttgatttagtatgtcttaatttagttactttcaattcttgatgctaataatatggatagattgtgacactactttctggcttgagcagaaatgagtttgttgcatatagcagaatatagtttttgtagctggcaacaatgaccgctctttggatgatctaaaaactattctgtagtcaggtagttaaatatagctgaatatacattattatgttttattaatcttatttgttttttctgtcaaaagaacacacctctccatctttcggtgctaggtggatc

SEQ ID NO: 5908 - DNA, 581 bp, Zea mays
  Intron number 3 from transcript GRMZM2G178916_T03 (locus G RMZM2G178916) derived from phytozome v7.0 (chr-ID 9; pos 1 51308295 to 151308875 reverse strand)
gtgccttttacgactgcagattcctcgggtggcaggtaaatttctttttttttaccctattggttgtatgagtacgttcattattttttgttatttctctttttattagttcattttcacgctaactgtaggtgcctcatcacattgttctatttattcgacgtttgcttcttcgaaaaatgcccttacctgagtttcctgttacaagaaaattggttcttttgggtctacttttgatttgcctcataatgtatcgtctactaatacatcatttaatggcaaaggtacacacgttaattgtgtaaccatttagctgttgctcgggggtttggtcaatcaggtttgttaggctgactttgtcagtgtgtcacttctgtagcttagtagaacactaacattctggagcgtgcttatcgtacagaagaataccatgcctgatgggtgttggtgtcttatgaagttatggtgccaagtcgtattatggagatataaacatagttgccattatttagttctatcgttctgttactttcaggtattctaatttgctatgcaaacgatccaggaaaccttacatttgc

SEQ ID NO: 5909 - DNA, 265 bp, Zea mays
  Intron number 3 from transcript GRMZM2G150946_T01 (locus G RMZM2G150946) derived from phytozome v7.0 (chr-ID 9; pos 9 6968446 to 96968710 reverse strand)
ttcctactatagcttctttttctagagcactgtaggtaaacaagttgtcttttatttcattagttaatttgttttcttgagagcttcatggtgggtgtattaaccaattgaaattttctaaacaagattggaactttgaatttctcaaaaaagaatattgtaacaacacaaggtcaattggttaaagtagtttattctatttatgtgccactaattattaagtttgtcttctgtagagtttgttgtcattcaaaatataatcaac

SEQ ID NO: 5910 - DNA, 521 bp, Zea mays
  Intron number 2 from transcript GRMZM5G831972_T01 (locus G RMZM5G831972) derived from phytozome v7.0 (chr-ID 8; pos 6 8508460 to 68508980 reverse strand)
ttcaggttcgctgttttgtttgctttggcttgtgtcatcagcaattccatttcattaccagttgagatattattttgtttgggaccggttaacttttcttcatgtctagcgtaagctttcacccgacccaattagcaataaaaaattgtttaattcccagtccacactctaccccaccccaccttgcacaaactaaatttatgcatgctaactaaatgcgtagatttatgacatcttatattgtgccttcatccccacacatcatcgtcaagttctgatgaaagaaccctgaacctacctttttaagcttttttgtaaaaaaattagtggtgggaaaggaacacctgaagtttctgaaacgtatagctttaaccaacatttaatacaagaagataagatggaccctttcggataatctgcgctgtttatatgctggatccacagatgcggctcttacttggtcgtgttatttgacttttgccgatttgttttgttatcattgttgcagcctgtaaagagtc

SEQ ID NO: 5911 - DNA, 625 bp, Zea mays
  Intron number 2 from transcript GRMZM5G856943_T01 (locus G RMZM5G856943) derived from phytozome v7.0 (chr-ID 2; pos 1 2262148 to 12262772)
actactactgggcttcagttttacaggttacaatttgtgctgtaatgcacttcaatggttacatctctaggataacttttaaaaatgttgttgaagctgatgattggctaaaatttacaaccccctcccccctcccaaaatataatttgttttggactaaacatacattaattacttaacatatgaatgtagtttacatgtatgtctacattcattatcatttgaatgaatgtagacgaaaaaaagaggtctagaaagaactatattttgggacagagggagtacatgttaaatctaatgttaactgggtatatttatgaggccattcccacactcattttctgtagatttaagtctgtacaatactctgtttttcttgacgaggtttagaagttatgcatattttctagtttgttccacagatatgcaaagaaaggcaaaaacttctttacatgctgtgcaccaactttcaattttgttcatcctgttaaccacccatacttcttttattatgcttttgatattcatgaaggcttgccatttgtgtttatttgactcagttatcatttgtgctgtgaattggattgtaggttgaatacacagaatatttttctggccaattatc

SEQ ID NO: 5912 - DNA, 672 bp, Zea mays
  Intron number 4 from transcript GRMZM2G359566_T01 (locus G RMZM2G359566) derived from phytozome v7.0 (chr-ID 9; pos 1 28458417 to 128459088 reverse strand)
ggacattcttctcctgggatagcacacggtccctggtatgctcttagatatttacttttgtattttataagttcagcttttcgtttaactatgtatttgtatcggacggctgatgttttgaaggtttaccttttttcacttaatggtagcatcaactttgtagagacagaaagctttgccatcttcctaggtttcagtacctttcagctcagcttgttggaaacaattttatgaaaaccgcggacttatttccattgtcttttaccaacttctcctgagttacactagttagatcattgaagtccgtgggtcgatgaaacctcgtcactactcgctagcctaggctcgaaggctggcataaaattttaagaacaaaattagggtcatgctattcaaaagtgaaaataatataaaaggagaacatatatttgtgaacattcaaaagggcaggatatttattctagtaggacattaccgtgattacctggaatatttttgtgtgttggggggtgggggtcagagtgggaagggagtgaattgtttttttcttcatatgtccaatagattctactatttttgggcgtacttttgttttctttgcttgcggtaaagcttttttttgaacgaaatgcttgcggtaaagctgatacgtgtcatccttgaaacaggttc

SEQ ID NO: 5913 - DNA, 781 bp, Zea mays
  Intron number 1 from transcript GRMZM2G065210_T05 (locus G RMZM2G065210) derived from phytozome v7.0 (chr-ID 9; pos 1 41174206 to 141174986 reverse strand)
gccattgagcaacagtgaccgtgagccaagccggggtttgtgaattgtgatttaaagttttggtttcattatttatttggtagtaatcccatgtttaattataggaataagatagacaaatttctcatcaagaatcggaagaaagatgcttctaattctaaaacaattaggacaaatgagagccgtgtagaataaaataggccatatattgagctagatatgaatgatatagtcctgtgcatcacgccttcggcggatgggagattcgtccgccgccggcaataagcatcacgtatgtagcaactttcaaaaggatttctgttcatcccgcaatacacatgtagccgctttttttagtattcactgctggatgttgggaattttagcctccacgacctgacaacataatcaacaagagcctccacgaagtggctaggatgttgctgttttttttctttgtgcggtgagtatatccaatatccaatagtctaatcaggattcttttagcctccttgtgtattttttttgggctacagttgctgtaaataatcgttactgagatagtttggtagtcaacaaatactttggaaccaaacatgtgctagtttcatggaatactttggttttagcgagccgatgaaaaatcatggtagtcatgctataaaattggttgctgagcgttacaatgttgcggcttttgactagtacattgcataatagtctgcgttcttggtacataaaattgtctatttgcttcagaactctgggggtcagtagcccg

SEQ ID NO: 5914 - DNA, 798 bp, Zea mays
  Intron number 1 from transcript GRMZM5G802801_T01 (locus G RMZM5G802801) derived from phytozome v7.0 (chr-ID 8; pos 1 16619652 to 116620449 reverse strand)
aaccccaccaacaccgtatttggtacgtgtcagatgacatcctcttcacttctgtttcctttcatttcactgaacttagaatgcccaattagcagtctagcactaaggttgtttgattccatgctgcgggattttccactaataatcgatgatgcagagttttactttaatcatttgctgcatagtttcacattgatgtcgatgcttcagatgcttgtagatctatcgaaatttgtttcagtgagcgacttctgctctgtttctatggcaacatgagcagcactaaacttggagatctgatttgttcagtgtgagcagtagctgcttgtttatgttctagatttgagtaggatcggataggattaacgattaggtggatgcgagctgatttgtggaattcgtcgaactatgtctccggtgccttcatgtaatccctttttgaacttcctaatagtaactgcagtaagattttttttccctgatcagatttgcagtcagtagtttccattgtcgcccctggtgtagccattatatatctgctttgatggattgcacattttttgaactgaatttctactggaactctgtccttcagaaattgtcactgtcaccttggttagtaatttcacactgcagtattcgaaaatataccttacctgatcattgaaaatataccttagctgatatgccatattgaactgtgttttttcttcaatcgttagactccttgctgacagatgtcgctcttcctggatgcctgcagacgcaaagcggttgattggtaggaggttctcggac

SEQ ID NO: 5915 - DNA, 540 bp, Zea mays
  Intron number 4 from transcript GRMZM2G086971_T07 (locus G RMZM2G086971) derived from phytozome v7.0 (chr-ID 2; pos 4 7112402 to 47112941 reverse strand)
tcgaggtggagggcaagaccgtaaagctgcagattgtaagtggcctcctcaacgcttgtacatgtaccatctgtgacaatgtttgggaccaatggaacacgttgcttgtctgctacaccgtacacggaagtcacagcctacagttttgtattcctagagaggcaaatcaatttggtcgagaacgcacagtgccatggtggtagggacgtaacggctcgcatgatgttagaaaaataaaatgccgaaaatcgttttggtcaacgcaaaaaagatacagtttcttgttcttgtgccagttaacgatgataaaagggtagagatctaactctctgagtctctattgaacaacacgtatatcctggcatgaagtaaaagcttttggctcctgatcttctttctttctttttatttgtttttttaatatattcaaagcagcaacggtaatacgcaattcagtcaaatattattagttgcacctgatggctgatgctgcatgcttcaacagtgggacacagcagggcaggagcggttcaggaccat

SEQ ID NO: 5916 - DNA, 559 bp, Zea mays
  Intron number 1 from transcript GRMZM5G895928_T01 (locus G RMZM5G895928) derived from phytozome v7.0 (chr-ID 8; pos 1 24646574 to 124647132)
accagcgacctgagagcgcggagcgccttccgagcctgcgttgcacgaaaaaattcaaaaaaaaaaaaatttaacgctgcaggtcgcatcggaaaccgaaaagaattgggctgggatgagtgacggctaggtgcgtcacgccgcgcagttcacgaagcacactctagcaataaacaaaaatatcggcggaataataatctattctatagtagtagggattaattaaacaaacgaaacgagtcgactcggcggagaggaacagcagcagcgaccagccatggatcgagggcagtgagtgaggtcaaatctcctgtccaatgcgaacgcagaagaatctgccaagttcatgcccacttacttgttcactcatccgttcgtttcttggaccgacagaaagcaaacgaatggccaaacccactaaaccttcgttcggttgagcagtgcatttttttgtgaaggaaacaaaaatgcactgcggtaatgaatcaccaccaacacaaggaaagaacgaaggcgtttcggctaccaacttaccaagtatcctctgaaggccttctgg

SEQ ID NO: 5917 - DNA, 595 bp, Zea mays
  Intron number 2 from transcript GRMZM2G172917_T01 (locus G RMZM2G172917) derived from phytozome v7.0 (chr-ID 2; pos 1 99145770 to 199146364)
agtgttgaattggctgagcaacaaattttggtacttatccattcccctgaaaaatgaactaggaaatgagtatagatgttgcaattggaattaattgatatcgtatctaagggtgttagtctaaaatatgtctaaaatattttaccttgtattgttttcaagtcggacgacttgctggtcgttctggctgaccgactaagccgattaatcatgattggtccaaaccgacttagacaatcgtgattaatcggacgactttaaaacaagtatggctggtttggttcagatagtgctttgatgtgtttcatctccattataactattcattcaaataagaacaccttggtgcttagtgatacactggcagaatgcattctcttagatgagaaattatcgacttatactccatgcctacattttcagcttctcgcatggcaacaagacaacttttcaagtatttattcaaactagaaaactttgctgcttagtgatactttgtcagaatgaatttgcttagaagagaaagattatgaacttatactgcatcgctacattttcagcttctcgcaaggcaacaagcacaacgagaagagga

SEQ ID NO: 5918 - DNA, 716 bp, Zea mays
  Intron number 2 from transcript GRMZM2G123604_T02 (locus G RMZM2G123604) derived from phytozome v7.0 (chr-ID 9; pos 4 7215839 to 47216554 reverse strand)
accagtaagaagaaaatgttttttcttcttaattattgctagattagattgatatatcttctctcatatatagagaggcttacttggtccctaagcaagtgattgttatctccaattaaccctaacaccattgagctatactgtcagcctaaaccccgtgacatatgtctacaacaacaacaacaacatagccttaggattctaacaacaacaacaaaccccatgacatacgtctctaacatacacttttccatctatactaatgatcttagaagcatgattagttttgatatcagcttgcatctgccatgccacttaaggccatgttcgttttgtgtcaatccatagggattgagggggattaaatcccctacaagtcaaaatcctctccaatcccttccaatccccctcaatccctatggttttgggattaaacgaacatggcctaaagaaaataaaacatctatcgaaagcctgcattacattctaattatactacataattttcacgcgcaagctgttacggattcccttaggattttgcatgcttgcttctgaatttgctgtaaattagtgaggaaacctgttgcaatatatgtcgcgagatgcaacctacaaagctgtattgttcaatctagtagtctaaggatccaagacttcatccgttcccaaatcccaactgattttctaactgtgcacattcttaaatgcttcag

SEQ ID NO: 5919 - DNA, 949 bp, Zea mays
  Intron number 2 from transcript GRMZM2G141725_T01 (locus G RMZM2G141725) derived from phytozome v7.0 (chr-ID 8; pos 1 06045196 to 106046144 reverse strand)
attcttggcccagattttctggaattatttccctggtttgtctcccattctcttgcctttgcaaacggtgcctccattcagacagtctatcttcagaacacaaaatgtgtgaagaaggcatgtttttctgtagcttatgcgaagcagatgtattgttaatgagtccttttcctattccttgtactgcacttatgtactccatatattgctcttggggctattcaatacaaacaagtgctattgatagcacgatatcagtttttttcctgagggttctatctgctagctgttgctgatgctcatgtgttgcacatgaatactcatacctgaacatacttgtcctgtttcttcaagctatactggtctgggttgtttgcttcggattaaagccggctatttggaccgctgtagctgcaatccatagaaacaaaaataatgtagaagcggtataagccgatacaaattaaagccaaacgaactagtaaaacttttacagtgaattttacatcttccagctatttatgctttagcttggcatgtgcttgtgtagatcgcaggtaggtggcatgctcatgtttgtacttcaaattttgctaatattcagtttgctattcagtaatcaatatagctttgacaaactaaccattatgtgatgtattatgagggaaacccatgaaattcaggaattgctgtagcaaactatactgaatccagataagcaaggctagtgatttgaaccaaataaagtcatttagacatttatctaattgtgctctgaattgaactgttatagctgaattgaaagtcagtcttctgatacatttgggatcttgattagtgtcttcattatgacattatatctaacattttatgaagtactagcataattcttcaccttttgatttggatttcatgcacaggttttgaagaacagtaagcattgtagagt

SEQ ID NO: 5920 - DNA, 896 bp, Zea mays
  Intron number 1 from transcript GRMZM2G029027_T01 (locus G RMZM2G029027) derived from phytozome v7.0 (chr-ID 8; pos 1 25593840 to 125594735 reverse strand)
ccgtctcccgctcctcttccgcgccccgcgctccggtgagttcgcttccctctctccttcctcctcgagccctcttctcggaccgcctcagctcgccgcggagaaacagccgagaggattttaggttcggtctcggactctcggtgtgagtgggacgcgcggttttgggggtttaggggttggtagtccgggtggggcattagattctagtttgagagttcaaaaaccggaggggactagaggggctaaaatcgcctgcataagaaggggattttagccaatcccgtttttgactcccaaactagatggtgtctgcgtttccgtggtttccccgtggattttggagggggctcggggttcggatgttgggtaaggctgggtttatagatttgctctgtactggggctcaccctctccaatcccgttcgcatcagcggggattagtgtagcgtcaggactcacgtgcgcttcttctagatgaataaattgctttaaattgttttaaattgttaacaaacattgctttaaattgttaacaactggtgaaggcactagatttggattgcatcagctgattgggatcgtctgtcaggaaccttgaacttgtcatgctttgggttcggttactcatgctcattttattgcttaattaatttggacttggtttttttttgaacggcgtcggttaattgtgccatttgatttcgtaatctgcttcaaatgaacagtgtgggcacatttggattgttagtggattgggataggagtgtcacacttttatgcttccttttcagttcattgaagactcgctgcattggttaattgtttgatttggactgttttctcgttctggctagtcaggtcactgtagacccgcttcttcctccaggcttctg

SEQ ID NO: 5921 - DNA, 743 bp, Zea mays
  Intron number 2 from transcript GRMZM2G104760_T01 (locus G RMZM2G104760) derived from phytozome v7.0 (chr-ID 9; pos 1 6181834 to 16182576 reverse strand)
gttctcaggttcctgctgctccctacatcttcatacttgctgagaattaaaatttcaactctacgccttttgttttcttgcctgtcagttcacccagtcacagttattttttgggacattgacctttgattgcgttattattaaataaccaaacaactggcttctgtttccttttgttttgttttgggacattgatctttgattgcgttattattaggtagtttggatatgttgtcattgggaagtcaacacaaacacacacacacaaacatataagcgtgcgtgcgtgcgtgtgaactggctacaggtttgcatatctccatcttgtgtaaataaaaaagaaaaaaaatgcctgcattagcctgtcatggtggcagctattggacgtggcccctttttagaattatgattgaggtctcatgttcctgcagagtaaccttgtttttaggcattgtggaagaaaaaaacccaatacaatgcttaatagacaaacccatctcttaggtatgatatgttctgtgtctacatatatttcttttttatatgtagctttgtctatactatgcaaattgagtggttgggaatactgtgacaacgtgtcattccatgcgtcattgtccgtatccagctttgtatatattatataaaaactaggttgaactcaatgcagcctattggttgacttcacaaaaaccttcgttcatgcagattgctgtcaagaggttaaataacgcaaagaacgg

SEQ ID NO: 5922 - DNA, 843 bp, Zea mays
  Intron number 1 from transcript GRMZM2G115564_T02 (locus G RMZM2G115564) derived from phytozome v7.0 (chr-ID 9; pos 1 04483292 to 104484134)
ccgcgcactgcattggtgaggctgttgagcgcgaggtgagttgctttgcttgattgctgttattttaggaggtttggagcaatactagaccattttgacgccgaccaggactcctgagctcttgtggacagcaatgcgggacttaaaatttttcacattttctgcaaacaatatctttgtttgatgagtgatgatctgtagtcttagagaacctatctccagacgggttgcaatgtttagtggtagtagacatcattccatccgtttatattacagttttgccaagtgccaagtcaaacaagaaggttaatcaggcttggagagctaatttgaagttgtaggaactgatgagggcattaggcaagatctgcagtttagatttaaactgtgcacggatataatctgaaaactgtgctgtaatgatctttgattctgacctattaatccataaaaaacctgcatacatgccctgtagcctgtaatttgatcactgaacgtacttgacaagacatgtatctgtacaccacaaggcattggtgagttaaaagtttggaactattaaagtgagatttaaaatttgtcttcttatagaatcagttactcaccttctgcactagagtgcagcttccgtacttttttgtgaagttctgaagtttgattatatcaaatttggaagtaacttaatgctatttgcctattttcggttcgttacctttccgttcattgcaattcctcttagtgtgttccccattggaaattgatttggcagtccactgaaagttggtgtttccccttcctttctttacagttcaaagtccagtcattctttcagaaaagtaggaa

SEQ ID NO: 5923 - DNA, 786 bp, Zea mays
  Intron number 1 from transcript GRMZM2G145905_T02 (locus G RMZM2G145905) derived from phytozome v7.0 (chr-ID 8; pos 9 7476301 to 97477086 reverse strand)
caggtcgaccttcaacagcgacgagcatccaccaggtatgcccacctcttctctttgcttcctgctgtgtgaaactgagccccgaaccctaatttaagctatttgttcattagtatttgaactcgatctaattacaagcttatatatgcactccttacaaaaactggagtattattcctactaacttcacttttttgcaaaaattatcggggtgcgtagtgtgtacacccatttactgagtccactcttagggtgtgagtgtgtttgtttctttcctagattatataagttggattatggtagaaggatagaaaaataaaatatcactttaggaccacaaataagctgaaataagttagtattggatagcttattttagcttatctgtgatcccaaagtgatattttactctcttaaccttccaccataatctaacttatataatctaggagggaaacaaatagggccttagtagcgaaggaatttcctcaagatcaaaagtcccttgtcgagaccagttattggacgattaaatagtttttttttctctctccgatatatttcgggaatttagcatgagctattattgagccttggctactctgggctctatatgcacactgttatgatgggaccaaattggagcccagtgatgattagttagttttccttgtcattatttatatttaaatttacacttactaagtcattggttgaaccattttgataacttcagatttctacatgagtgtgatcttcctattgtgaattcagacgcaatcaagt

SEQ ID NO: 5924 - DNA, 957 bp, Zea mays; identical to SEQ ID NO: 4526
  Intron number 1 from transcript GRMZM2G114954_T01 (locus G RMZM2G114954) derived from phytozome v7.0 (chr-ID 8; pos 9 8598114 to 98599070 reverse strand)

SEQ ID NO: 5925 - DNA, 794 bp, Zea mays
  Intron number 1 from transcript AC233901.1_FGT004 (locus A C233901.1_FG004) derived from phytozome v7.0 (chr-ID 9; po s 152808125 to 152808918)
tgtggagcagaggtttggagattttcttgatctgcatgaggtctttttcttaatataatgcctaggggttgtcttacccaagtaggtcgagttttgtttatatgtttctaggataaccatttctctcttctagtcttcaccatagaagtctctagtaggaaattgacaggtatttctctcttacccacgtacgacatattgggatttttttttgttgattgctaggagggttttgtaacatttcattaaggaataaagaaagaagagtgcttattcacaacacctcgaccccaccatgaaactttgtacattttgggataatggagtacataaggtttatgcctctgtttctgtttgtcttttcttttgtgtgtaatgcgcttagtcatgatttacagctggcatactaatgtatttgttaatacaaatggttttgtgacacagaatccattaatatatggaactggatattgttaatccagtaaggtgtctttgtggagtataacagtcgaatcagataacctttttgagaatattcaaatagatgttttgcactccctctgttctaaattgtaagtcgtttagtttttttctagatacatagtttttaaattgtatctagacataatgtatatctagatgcgtatcaaaagctattttactggaaaagcaagaatgacttacagtttgggacggagggaatacttttgttcctttatttatttaagaaatggtatcactcacctactccttttacaggtccagaaaattactaataatattcagtttatctt

SEQ ID NO: 5926 - DNA, 908 bp, Zea mays
  Intron number 1 from transcript AC194341.4_FGT005 (locus A C194341.4_FG005) derived from phytozome v7.0 (chr-ID 8; po s 141427859 to 141428766 reverse strand)
ctggtttcttctcaattgcaggtacttatgttcttcctcctctcctccgatgaaagataaataagaactgaatgaataaataataaataaaatagacaaaatggttggggaaaaacatcggtttcttgcttacagtttattttttcatgtctactactcgagggaattgtccatgcttatgatcttgtggaagtttgccattgatgcttgttgctgcagtacatggacaaacctccaagagtgtagcatcagagtttgtgaagtggagggatgtcgtcgttctctgcagcaagctagtgccatcatcgattaggagctttgaactcatgtacaattagtatagcgtctacagtgtaggtccatcgtttgaactccataaggtttacgttcctggaaacccacaagtacatgggtgtatccttcttaatatcatgacaatggagttttttgcgaatagctcaagtagaggaaatggcttgtgctgacaagttgagattctagccagatgtattacaaatgttcccttgttaatgctaacatgtcaaatcacatttcatctaacttcaaatgtgtgtaatatgtacttacactagaacaacctattctgttagtgattaaacccttgcattttcactagatctgtatctatcaattgcatgtattctttgacttgagaatcttcacattttgagctttgtttaggtaaatgtaacctggttcaaaatccgtgcgattacaggagtttcaactcattgtacttgccgtttaggccttggcttaagctacacacatgttatcaagtagagtttcttagtctatgttgcaatgcaagtgacctatataatgatcaattaacacattttcttgtgagtagtgagcatgtttagttgtgtttgtagattcaaatc

SEQ ID NO: 5927 - DNA, 651 bp, Zea mays
  Intron number 2 from transcript GRMZM2G465994_T01 (locus G RMZM2G465994) derived from phytozome v7.0 (chr-ID 2; pos 1 0960318 to 10960968)
cttttggtgcatttcttgatcctgtggccgacaaggtttctttctctctgctgcccaccattttctagcttgtttacaactaaactaagactatcagttctcggatgagctactaacaggatttaacttaatcgctctaattctttgttgtagcttatgctagcggcaacattagttttgctatgcaccaaacctttggaatcatcactgctcaatgatggggccatggcttctaacagtcccttccattgctatcattggaagagaggtagttactcagccaatctgcatttccacttccaaagtatttagtgaattcatttgttcattgtatttttttgtcttggtgaggaatcataaatctggaaggttcagagtgttgtttcgacttatgttgatacatgtttatgcgtcactgtctgcttagttcacattttgtttatcccttaacattacagttacaggaatcaaggaacctaattagagttttgaggtttgaggtttaaacgtagttttaataacacttttgaggtttaaacgtagttttaataacactagatttatcatagtttattcatgtgaattttcttgttttgacgctgctgcaactgtgcaggcacttcctttgagtgggaaagaagcgattgaact

SEQ ID NO: 5928 - DNA, 971 bp, Zea mays
  Intron number 2 from transcript GRMZM2G093944_T01 (locus G RMZM2G093944) derived from phytozome v7.0 (chr-ID 9; pos 1 55540820 to 155541790 reverse strand)
aagggtgactaccacaggtataccattatcgctagcagatctcacttttttattcttcgtatttgcctgtagagtctagactatgcgatctatttatggagtggcgaaggagggaggagtccataccatgggaattgtgttttggagaagttaaaacctgagatctgtgcgtagatgttttgtatggtagcaggggcatgaggctccctgtaaaaacctcctccaaccgtgtatgcagtgtgcgcagtactcaaaaggttttctataaaaggtccctgtatgtatagggagaagaatcttctctatatagggggagtgatatgctctccacgttaattatgtggttcttattcctaattaactcccgtgatatgataataatgtgtattatggtattataaatattgtttgcttctaattcaaagaaaaaagataaataaatgttaatctgtagtgtatagaggaagctggattgtagtgtataggggaagctggatagggggggaatggttggagacaaaacatagtgggagaataagggagtttagtgtagtaaaatatattaaaaatacagataaggggagatgtataggggaaatggttggagatggcatgagttcttattatcaattgggtctaaatttaacgtgtggtctttttgtttgaactttttgttatttgtggccgaaagttcaaaagataaaaaggggaaaggggttgtgcaggctgtgatgttttttagtgaggttgttgtccttttatttatgttgcacgttgaagttgcttatctctgaatttgccctgtatgatgcacgatgctgtgttgtctcctgtaatgcatggttgaaagatgtgaaattgtgtttcatggttttaccccctaccctacagcacgtatatattgttatctgatttctccacatgatgatttggcaggtaccttgctgagttcaagtctggtgcagagagga

SEQ ID NO: 5929 - DNA, 603 bp, Zea mays
  Intron number 1 from transcript GRMZM2G013044_T01 (locus G RMZM2G013044) derived from phytozome v7.0 (chr-ID 8; pos 5 2162987 to 52163589)
gccaggtatcagctcagctgccacgcttttctcctgcctgctgtcctgggcgtttctgatccgtcattcttgagtaaattgcactgctccattagtggtagtaggacgattagaccccatttcagaagtagatcccaatcattatggattcagaccccgtttcagaaactaaagcaagctctcttacctaggaacaatcacacctgtctcttcaattttgagatttcagtgttttccatttctgaaatctaaagcaagcttcactgtgagatctactttaatgaaaaagtaaagaaacatttaaaatatctgattaatcactgttagtttcctcttcccttgggttatattggaacctgattaattcactatccatttcttttgatatttagtccaatactacacaaatatatttattgtttttgtgatcctgtgtcctaggcttgtggcctgatcattgttaacctttcttctccaatttattacatgatagcttttggcataacttcttcatgaatgatatatgctagcattgcaaggtttctgtgttttatatttttctttttattcatcatgtgttgcatgtaggtcaaaccactgtcg

SEQ ID NO: 5930 - DNA, 446 bp, Zea mays
  Intron number 2 from transcript GRMZM2G013044_T01 (locus G RMZM2G013044) derived from phytozome v7.0 (chr-ID 8; pos 5 2163699 to 52164144)
gtctaaaaagattggtaaataatcaatatttttcttactagtatgaaccatctgaggttaaaatctgaagtccatgagcatgtatttctctgcagacttacagggtcagagtgggatccatcccttggtaactacatgaaggtatgtcttttattctgctacttgccttctatcaaagtgtaaagcatattttactgaaacagaagtaccgaactaatttaatgtgcattttgtttatgttattctgtgctgcatttattcttattttttctaggctattttgagtctctatttgagttggttagatggcttgagtagcacttcttctgagttcaactcatgagtttttgggggatggggtggtgccagaagggtttgattgctttgaactcattgaggttctttgccgtggtgggaaggtggacagagcagtggaagcagtagac

SEQ ID NO: 5931 - DNA, 920 bp, Zea mays
  Intron number 4 from transcript GRMZM2G147534_T09 (locus G RMZM2G147534) derived from phytozome v7.0 (chr-ID 9; pos 1 43156030 to 143156949 reverse strand)
tgttcaggtttgccgttgcctcttgttagattagatttattacacatgtgacactcctgcatggctgcattagtatggattgttttgctaagatgaaacactattgaaccttagttactctacgttgttggcttaaaaatttttattaggattcaaggacatatgtgaattgcatattcaacaaacattgtgttttgtgaaagaaaataggctgatctggtttgtgtgttgaatcagacaggatcatagggtgcgttattgtctcacactcatagcatactgtggtagtgtgtccttctaggataacctgtaagacaaatataatataatgatatataggtccttgttcctgtcaatatttttaaaagttgtttactgtggtatgaaataaatccatgagaggtttgagctgtgtatgttgtctgggttttatagttactcttgcactagttttctgtccatgatatttttcatcatattttctcgatgagatcaatcaagagcagaaaaatgaacagatatctgagtgctacattagttcatggtctttttcagttgtgtcagttgttttatgttggaaaactgactcctatttagaattctatattagtatgtaccttttgttatgccacatgaacctatggcaacagcctaattccatagcccacattaccttcaaggcaaaacctttccacaataatagtcccttgaaaacttttgccacgacaatacttcactgctacttggcccccctttggaatgcaggaattgtataggattcagttgtcacatgaaaaacataggaaagaggaagacatctcgcatttcaatggggggctataagttcaatttttattatatatatccgattaattgaatatttagttcattacaggtccaagaaagtgcttgaacttgga

SEQ ID NO: 5932 - DNA, 500 bp, Zea mays
  Intron number 1 from transcript GRMZM2G539835_T01 (locus G RMZM2G539835) derived from phytozome v7.0 (chr-ID 8; pos 2 6195603 to 26196102)
cgtctcctccccctctgtatacctctccggctcaggtattgcttattccatcaaatgcccaatctgttgttgttttcacttgccatgttttgtatgccatatgcatgttattttctatgtttccttccttgcacacctctaaatcttgtatgtcaaactgatattttaactgtaaaaaaattggtcttacagtttcctttgttgcacagtttcctttgtttgacatttaaaagctcaaaaattatttaaaagtacatgaatagcataatcgatgcctacttatgtgcagatcatagtatcaaaattcatgaatgcagtttcgacttgaaggagcaatgtgagtgtcactttttctcatatttgggtgtggtaaaaaccatctgaatattctaaggcaatacttggactatattttttagtgcttcttcccttaagctggttgattctattagttctgttgtttcttataagcgatgtcttaacagggactggtcccattg

SEQ ID NO: 5933 - DNA, 678 bp, Zea mays
  Intron number 2 from transcript GRMZM2G131597_T02 (locus G RMZM2G131597) derived from phytozome v7.0 (chr-ID 2; pos 1 10161291 to 110161968 reverse strand)
ggagcccatttcgtctactactgctccccaaacaggtatcgtattcggctatccgctagcttcaagttccgattcttgcaacatttcaactataactattgggaaataatttagatgatagaatgccagctaattttcagtacatgattccgttcagttttttgaatcagttactgccagttgtgcaacatatccattgttctagtttgtcagttagatgtgttttacagaattaagccaacagcttgcttagagtttgagtttctttttaattgtcatgaataagttactgtaatgctactcttaccatggacatcgagtggtcacagtcttctactttggaagtgcctttgctgtatatgacacaaaatctcagaatgctaatcgaacacttcctgcaatcatggaccgcaacaacatgtgtatagagtagtgttagataagcagcagtttgctgctgctttcctcttctcttgattgctttcatctagccttgtaaaattcttaaaactgtttggcgctgtgtgatatagtggttcaatgtgtgtgagtgctccatttggtttacttccatttgcaatgtgttctaatgatccctatctgtaatgccatgccttcatttattagagaatgatatagtgcgctgacaatttgtccaaaatctgaacacttttaggc

SEQ ID NO: 5934 - DNA, 1018 bp, Zea mays
  Intron number 1 from transcript GRMZM2G099648_T01 (locus G RMZM2G099648) derived from phytozome v7.0 (chr-ID 9; pos 4 9187898 to 49188915 reverse strand)
gccaggaatctgcaagcttcttccttgcttcagaggtgggcttatttttgtttttctcttttttttaaaaaatactgttgttgtgtgtttggactttggagtgacaagagcttagttcttccttcttttttctttatagttccttctccccagtttcgttagttcatcagataatcacatgcttaggtttgttttccattctctagaaacacggaaacagatgttcctgcctttggttttttttttttcgtcccgtgctccaatcatctccgcctaataataagaattaattacgactgcgcgctttgttagaaaacagaaaggtttcacgtgcctactattttttttcttcttgccaattattcagtcacggcaaggaaattggagtgctcaaaaaaagttttaagaaatattgatagaggaattttatttgcgtgtcaggtactatgatatgtagacaaatatttataaaaaggggattacttcatgatagctttagcatcggtcttactttcatgagaattttattttgagcaaagttcagcggactgttggaatgtgtttgaggtgatccacatgatcattcgacatgttttgggtggaatgaggtgattctttttatgtttgattgaggtgaacattagttctacacatatgaattcaaatggatacgggtgcagacaaacaaggctaggctgctttcaacgcgttcggcttcagcggaaaggcggttgcggctgtactaatattagctacagtgttctgcagttcatctctgcagctatagccgcagctatcacatccgaacagcttttgtcatccttcttgacttctaaattctaattatgcgcagttatttataaattaatcattttgcgctttagcttttctctcgcaataaacattgaataaaatttgaagttaactctatcctttttcatttgtccactgatatcattgtttatcctctggcttcttgacagtttgagaatcttgtggttgcttcttccctctgtga

SEQ ID NO: 5935 - DNA, 956 bp, Zea mays
  Intron number 2 from transcript GRMZM2G092123_T02 (locus G RMZM2G092123) derived from phytozome v7.0 (chr-ID 9; pos 1 38500379 to 138501334)
gagctgttcaggtttcacgcttcaaagttttatgttgatatcttttgcacaatataatctgctatgacatttggccttatatcaacttttgtgtcaactaaatatgcctttgtcgtttgtattatgttcaagtattcaactttataagagtttgatatacctcttgtggacatagaatcaaagaactaaaagatttagatgatacaacatatactgaattattttatgaacccacttagcttgtggagttctggctgcaaaaataaaaagggtagacctagtgccagaagctcccacataagggcttgttcggtttcatcaaaatccatatggattggaggggattaggtaggtttcaatccatagtaagtcaaacttcttcataaatttttccgatccctcccaatccatgaggcatagaaataaccgaacaaggcctaagggcttgttcggtcttaccccaatccatatggattgagggggattgagagggtttcaatccctaataagtcaaaatcccctccaatccgtatcaatcccctccgatccatatggattgaaaataaccgaacaagccctaagtggggtctgggaatgggataagccgaggcgagcctttttcttgaaaatgcggagaggctgatccgaacccatggtccggtgacttagtgagacagctctcgtcactgcactaggcctacccttaatttgcattccatggtaattcaatttctcagtatcacagttgcagaagatgctcatatctatgtagtatgcctttccattttctgtactgtcctcgcactgttgacaatgttcatgtgattttttttatctggataaacataggacggcacttatttcttaatgtggattgttacggttttagtttttccctaataaataataaattaattattgttatcgttttcattttgacataggcactaaggaga

SEQ ID NO: 5936 - DNA, 799 bp, Zea mays
  Intron number 1 from transcript GRMZM2G127591_T01 (locus G RMZM2G127591) derived from phytozome v7.0 (chr-ID 2; pos 2 6290266 to 26291064)
aacaagtggatcttccaggtttacccgcattatattctagcttccccatccatcttccgccgcggatctggatgtcagatgcttctcctgcccggctgctacttttctcctttggaatatctaactaaattcgtccatactgcttaccattatagatcacggactagagacttggattgggtgggaaacagggtcaaatagacttatagcgtgtttggtctgagaaacgaggtagttatcatcttttcactactcactttttttgtttgtttttggaatggaatgaattgatccatcatttcaatccttgtaggccaataattagtaataatacgagaaatgagttcattccactaaatttgtggaatgaacatatgatgcacccacaccacctcatctgtaatagattggctcttcgaaccaaacaccccattagattgttactacgtactttggtttggttggtggttagtcaagcagggttcagcagctgtctagtccaggagagttgagagttgctgctcttatgcattttttatgtatttctgggtgatagcagattgtgtatatgaacgtgtaaaatactgttagactactgtttagagagtataatttgagataggagatgagatgagtaggacttctgtagatagcctaacaataagaggttacctactcatctcccatcatcttatgggtggtgtcaagactcaagagccgtgcccttttgatataataagtaagttgctctctcttctctgcagaaactggatttcaagttccctctcaccgtgtcctg

SEQ ID NO: 5937 - DNA, 1027 bp, Zea mays
  Intron number 1 from transcript GRMZM2G468132_T01 (locus G RMZM2G468132) derived from phytozome v7.0 (chr-ID 8; pos 1 72901965 to 172902991 reverse strand)
ggcgctcgaggacttccgcgcctccaacgccgagggttcgcaccattcgcctccctttattttggctcctgtttttgaacttcggagcggcaaatttggtgcgttcgaacgagtgtagcagtagtgttgatgcgccgctcagtggactttgcgcctggggctagagtttgagcgtatcccttccaattcttgccccatttggtccttgtgcttttctgttctttttttccaactccattagaacagtgtattttttgtcctgtgatcctgtcgtccttagtcctgagtgcatttgcattacaacctgctttgtggtttgctttgatgtttctgttgtgtactgatcacaatagtgctgctgtttctcatccacattgtgcttttatcaacatgtctgttcacacttgcagttacatataatttgcacatcggctctctgatgctaatattgtcacacaaagtttgaacgttttcttaggtttgacatgtgctaagtggtgcattcagtgtttgtaatgtagctttccagtgatatattttggaattggccaatcttaggttatagaatgcaatcgtctttccacaaacttataactgttttccattgggttgcatcttgcaattttagacatgattgttgtgagatagctgtacgcctcctagataatatagtaaaattgccttgcaaaagtctttgcatgttttcatggctgtatattagtgggagtaccagcacattgagcacaagcacagacccaattaattgtttgatataatttattgatggtagaattctagttacgcgcataagggtcagtgtagcagtagatcttcttattttgatggcatttttttttctcgtatattggctggccctacttcagtttaagcctcacccatctatattatgtagtaatgcattgagattattgctctcttcctttggtgctgtgagctgaataaactgatacttagactattttaccttgcagtgtacacatttgaacctgatatatccaaacaagag

SEQ ID NO: 5938 - DNA, 942 bp, Zea mays
  Intron number 1 from transcript GRMZM2G044556_T01 (locus G RMZM2G044556) derived from phytozome v7.0 (chr-ID 2; pos 2 420126 to 2421067)
ctctacctcggcaccggcgtcttcaccctcgggtacacaccacgccttttctcaccatctgagcattgccaaggagctcctctccatccccgatggcaccacttcagattcctgatcagcaggagagtcgttgaggctgagacgacggcacgaatgcggcaaggagcttcagattcactgccattagaaacttgcaggtgaggaaggagagggtccaagttcctgacctctgcatcgactgagagggtccaagttcctgacccctgcattgactaattatctttgagtttcatcattatgttgaaattggtatgcgttcaaaatactcaattgattctcacggctaccgtgcctcctagcgaaacttgcttttcgttggagtatctggcgtagtaatggaaaaaattaccttctccctttgagggttcagtccatttcgttctctataattgtcacctacccttcccgagcctacttttgttgctactataagaataagaatgaaataagcttcatctctatttgtttctgatatgaattgtgtagcttagagttgtctcttaacttacaatcttacattggtgtaaaacagtgaccacactaaaagcacaaatgcaaggttttacagaccagttgtgatgctactaccactaacatgtacaaataggaaaggcaagaaaatggcttagagcaagtatttttaaagaaaaagtgatccatttaagaaacctttttattaagttactcctgataccagctcctcattccgcgagtgtcttcagcttcactttctctatctgttgtacgcgggtgtctcttcgtcttgtgtgtgagttggatgagaactagacaactggtaggaaccactctctgtttcagtttctgtttgtgtttcacttcagttcaggttgtctgcgctcttctcttagggatcgagaatca

SEQ ID NO: 5939 - DNA, 468 bp, Zea mays
  Intron number 2 from transcript GRMZM2G163560_T02 (locus G RMZM2G163560) derived from phytozome v7.0 (chr-ID 8; pos 1 17575374 to 117575841 reverse strand)
gacgccttgaagttgatagccggacagttcatcaggtagacaagtcaaatcagtgctgcataatatacttgcctcttctgaagtaagcaaaatattttagtataagacaggataattatcgatcataaatacatatgcatgcttataatataattttagctgatagtagcgattgtttgcaatagattttatcgaaaaacagaccattcagtagttatagattctctaatatgtcagccaaatgaactaagaattctgtccagatgaaaataaaagattaaagatgttctcaaagacaaataaaatatgttcgttgggtaattcactgaaaagttttctgctcccgaagccagctatggtgtgacaaaaaatatagcaagtaaatagactccactatgcagcgctataaaatcagaagacaagatgatacgacccaacatgtaatcttgtttgttgcaggtctttact

SEQ ID NO: 5940 - DNA, 889 bp, Zea mays
  Intron number 1 from transcript GRMZM5G869299_T01 (locus G RMZM5G869299) derived from phytozome v7.0 (chr-ID 2; pos 1 77873481 to 177874369)
gtggtccctctggtgagcacgctcacctcatgtgtgatttcgtcgacgtgctttctttgaaaattttaattaaacaaaatcgagaagcgatcgtgctagttatatatatcagttcgtatatataatagcttatttatttgaagattcaattctgtacatgctgaggactggaaggaaatcacggatggtacctaaatttcggcagttttcagttattaaattcttgttttggcaataatttcagcttgttaagctgacacaacacagagtataataggataaggagcaattgtctctatcaggcagactggctttcttcgccctttgctttttctgatagataaaagttggtggtggtcatatgcaagaaggcatctggagttattcctcaatgattgccttgtatatgccattgtttgttcagcagtgagctgattgcagtagttctatcgcatttgtgggagtggattggctttactagtcatatatctcattttcatgattggtgctgttgattcatgggtttggtggcttactttgtactatggatttgaattacagttttgttattagtctataaactttgcactgtagtcaatcagttggtacactgagacttagtgtcgtttgcttttggtgtttgagtgatcaaaaagctaacccgataacgttagagctcttcagctgcctgcttaaactgctgtctgtgactaataacattcaatcgtcttcctaataacattcaattgcttagccttccaatcttttaaaagtttcacattgtttgttcttttgtagttttgttcggtgtatttatcacagagcatcaaagtcatctaaacctagcacgagtttctctaatattttctctctttcttttgatttgcag

SEQ ID NO: 5941 - DNA, 680 bp, Zea mays
  Intron number 2 from transcript GRMZM2G177084_T01 (locus G RMZM2G177084) derived from phytozome v7.0 (chr-ID 9; pos 4 5091774 to 45092453 reverse strand)
ccacggccccgagaggaccgtggcgcacacggccggtgagcggtgatcgatcggaccttagaatgttgtttggttcaagaacagtttatcttctttctccttacttttttttagtttgtggatgaaatggaatgagtttatatgttacaactttatttttttaattagttaataaaaacataaaaaatatggtcatctcatcaaatttaagacatgaatttatgatgtgctatcttattttatatgaaataattccttaaatcaaacacccttttaattgccgcgcaaaacattgtttgtactatacactttactatttgcggagtatgttttgaatggtccaatttacttgtgttttgcactgttttgtttttagagtgtgttttacaacgtaaattgtattatatattggttacaatgtggagtttaaagtaaaggttatagtgtggagttcaaaatagtggctaagacataaatgtgatacgaagaatgctggagatagcttagcgtgtgtgttcttacactctacagtttgtagagttttttttttcactctactgttgtacgtaaactgtattgtttggactatggaatttaaaataaagattgcggaatggagttggaatggagtttgaccgtgtactgtttgtattgtagaatttaaaatagagattgcagag

SEQ ID NO: 5942 - DNA, 967 bp, Zea mays
  Intron number 1 from transcript GRMZM2G032706_T01 (locus G RMZM2G032706) derived from phytozome v7.0 (chr-ID 8; pos 1 62133701 to 162134667)
cggcaggcccgccgcgcctactgcgccgagctcaggtgcgttgaggtttgggcctcgctcccttaggaactctgattacttcattgatcgtgatcctattgctaactggtagggaaataacgagcggtatctttgaatgttacaatgtgcggtcgtggttgggtgatcgacgcctctgttcttgcagtgttcgggatcatatacatcacattgttatgcccttttactagcttcagtgatcagtagtatcaaccagtttatgaaatttgcagctacatatatttggtcatttggaatgaatgatcaaataccaccaaagatgcagagtgtggagctactgtctactgagccactctaatgttgccatggaccataaaccccataagtaacgcacatgtttgagattgacaactataaattgtatatttatttctgaggttatcaatgctgtcgattttctatgtatcacctgttatgtactcgtttcacacatttttttagtaaaatcttgtggcagacgataatgtttgatactctatattattcttcagtattcagtgtcgttgacgatttgtcacttcatactctattattcttcagtaatcagtattgttgatggtttttcatttgtgttgtgaagtacagtagcggacccagctactacgcttaggctgtgccagaaaaaatattaaaaaaaaaacagagatcaacaagacttgaaccttgactaccaaactcaaaagatagtacttacaccactatgctaactaaccttatacaattttagggtgtgccgtggaccatatggaccacccactgggtccgcccctgctcccgtaggaggccctaggagtaaaccagatctatatcttcttcctccctctactcctgccactccttatatagagaggtaaccctaacttaatagctaaccaacattatattcttcagattctgcaactcctcc

SEQ ID NO: 5943 - DNA, 968 bp, Zea mays
  Intron number 1 from transcript GRMZM2G074728_T02 (locus G RMZM2G074728) derived from phytozome v7.0 (chr-ID 8; pos 1 45159023 to 145159990 reverse strand)
cttctgcacaggcgagtgcggctaattgttccaaggtactacttaattcctgtctcaacatttatcgtacctcatttgcgtgtgcagatcagctgacttcagtgtaattcaaagccggaacagataaaagtgtgtctttgccgatgatgttaaatagagtaatacctgattattgctgtcaagtggttgtgttagtaattggaatattgttggagtatgtttccctttatctttccattttatcatctgtcagtgctcgtgactttatggtctctaaatttcttagatagttcatgtcgtaccatgaaatgtgtgtctgtaacattggtcaaccatattgttcatgtcttcaactctatttcgaagtcacaaactgatcacttggagttttggacgtgaagcaacgacaggcatcaatgcctacttcatatataaaactgcttgcttgttgcatgctgttacagcacctaagacctaagtacatacttgcttccttttcttatttgtatgctaggtcccatggaccccgttttgttttgggtttccctacacattgtccccggacttacagatgacaaatatgatgtgttctatgagtcacgtcgaaagaaagaaatgtactttagcatttcactgtacataagtccatcgatttcacattatactcttctacctaacaaagcccaaaattgagctacacatctttttgatattagtacgttaatgttagtcaattgttatcaggcagcgatgtctgattatagatctcaaaataagactgtcatttccccttagttcagttagtatagttgcttaaattcagcaagtctgaatacttcaacaaggcacaataagggaggttcagcacgtaagttagtataggaccatgtgtaatctatttaacagagaaaataggcataaaaacgactagcctgcagtcgtgcggatatttgaatataagtgttcag

SEQ ID NO: 5944 - DNA, 878 bp, Zea mays
  Intron number 2 from transcript GRMZM2G366146_T01 (locus G RMZM2G366146) derived from phytozome v7.0 (chr-ID 9; pos 7 4588096 to 74588973 reverse strand)
gatctccggtggccagaagaagcgtgtcaccacaggtaaacagttactgctgcacatgaactgcatgcttccccttcagcgttatgtcatgctcacgacatgctgatgttgagaagaaaaaggtgggacgacatgattgtgtcgggttctttgtggtttaggctttacagaatggtgggctcagatgcccggattgacattggattcggttttatgcgaaaattagggttcctatccttgaggcttgagcttctgtcatgtgcaacggaaacaaactcctgtttgcctgcatgtgacatttctagaagactgaaatttctaacggtacaatccatcactgcagaaaagaaaaaaggcactgtgcttttttgtgctgcgcctccgaggtccacacacaaggcacaccgtgcctttgggctttggttggaacgcagcatttgatagtgtagcatctcgtggttcagggattccagggttgttggtttggttggtcacttgtccaaacagtaaccactccttttctcttcaagagtacaaataagacaaagtacagagggagatgctacaatagttcaggggacaacgtgtgactgataatctctgtacagaactctgattactagaaaatcctgatgatgattagtgcgatagctatgcttgcttcgccagttgaaaagcactgacgagtggtaaatttctacgcaactgaactgcgcagctacactctgaagcaactcaatgttcagttcagggaatgatgtagcgatgcacaagtaccatttcaaagccggttttatatgaagctgcacggttttctgaacattttcaggacgcatgatatttgagataactgttcttatttttggaatgcaggagag

SEQ ID NO: 5945 - DNA, 530 bp, Zea mays
  Intron number 5 from transcript GRMZM2G064773_T01 (locus G RMZM2G064773) derived from phytozome v7.0 (chr-ID 2; pos 4 8736635 to 48737164)
gcagacacacagtattgtttctagttaagcaatgtcagttttttctcattctttaatagttgtattttcttttcaactttccaagtgcagttatagaaactagaacaccttggccggtagatcgtgcatatggttgtgcaaagaattgttctgtactatttacagagtggaaatagaagatgatgataagtaaactgctggagatagccatatagtggatcactgatttgagcacttcatgtttgcttgagttatatgctctcgtttgaactttgaacccattcgggcacatttgtcggtgttactttcttttgtgatgggggggtattgaagggtgataattaacctatcttactagcttgacaatgtcagcaagtgctactttatttcattataaattgtttagtgtaaaagggggaagaaaatgccatcatatttcattcgcaagatatgctctgaatgctcaccctccttatcctgatcttcttgttgcagtccaacaggaagttgccatctcggaagattattac

SEQ ID NO: 5946 - DNA, 1003 bp, Zea mays
  Intron number 3 from transcript GRMZM5G879254_T01 (locus G RMZM5G879254) derived from phytozome v7.0 (chr-ID 9; pos 1 30656106 to 130657108 reverse strand)
taccgtataaaggtatctgctgagccttaggacctataagagctaactttaatactgtacaacaacaaagtctttgtagtcccaaacaagctggggtaggctagagttgaaacccaacagaagccacaagtcaagcttactttaatactgtattgatttttatttgttttatttcagcttgttaaattttgcagcatatgctgaatttgttttttgttgataaaattttggataccatttaaaaataacaggtttcaactttgttctgaatggaatgtttctgttacctcttttacaattttttgtgtcactgataagccaaatttgcaagcaaataatgaatagctttcatttttagaattgtttcacaatttgttgtcttgcctacactgctacatgtgaatacatgctatgtatagttccttgtatcagctgttctcttacatccttctcccatgataggactcattgtgttaagagaaaatcttgccttacatttttactacttaccttttaaaaataaaataaaattaaggttcacttgttgtaaacatatttgtggaatacttttaaaaaataaaaccaaggttcacttgctgtccataagtctttcagtctttcttatagaagtctttggggaataattctagttttcacaccctctgcgtccaacccttgaacttgtgaaagcagtctctttagtcctttgcagctggttttcatcatggtttttgaggtagggaatggcctatctctcaaaattgagggactaaagaagtaaagagtaaagaaatacttgtgccctttattttatttttttgttataataggttttattgtactgctacttttttccgtgtaaaagaacttttgtttcgtgtacttctcttttcatgtaggcatatatcagtatatcaatctatgtttcgtttactctcagttctttcttccttttgaccagcagctcttgtctttgtagtctgagctggaatatctatccttc

SEQ ID NO: 5947 - DNA, 558 bp, Zea mays
  Intron number 1 from transcript AC196408.3_FGT001 (locus A C196408.3_FG001) derived from phytozome v7.0 (chr-ID 9; po s 123312613 to 123313170 reverse strand)
gaccttcttaaacatattgtagttcacaagtaaggtgtactgatactaacctttttaaaatcattccatgctgcatttttgtctttcaaacattcattattcattttcagtttgtaatttgtactaacacctttagtgttgtgaggcgctacatgtatttttagttgatcagaaaattgcttactgcaacgcaggccatacttttgattcacatgctagctaaatttagagcttcgattaaaggctcttctcacttaaggaattgttctttttgaatatatttttaaattattcattgagttatgctcatagttatgtttttgtttgtttgtttgtttgaattcagtcaaataaactgagaaaggtgtggatcttattgcttcattatgtcatgattatcatacctctaaataacgtttgaaagaaatgatggacaagtctcacaaggcaatagacacagacatggaaccctttctcacatgcttgagcacatgcagtccagttaatgcaaaaacaatatccacgttaatgatttagtacttgcattaatcaggaact

SEQ ID NO: 5948 - DNA, 1059 bp, Zea mays
  Intron number 1 from transcript AC203424.3_FGT001 (locus A C203424.3_FG001) derived from phytozome v7.0 (chr-ID 8; po s 110989283 to 110990341 reverse strand)
taccattaacagattctttgcctataatacctcaggtatttgtttcggtcttgatacatacatctcccttgtacaatatttaattgtggacatttttgccatggtcttgtgttgcaaaaaagagaaattgtaaataggtgttacatttgaattctgtttattattgttgatatgattaaaatggcagcatatgttttttaacactcaaggaactatgatgcaagttgcaaatctgacttatggtacttgttttaactacaggaataatttcttaatttttctaactcatattgcttcaagtagaatgcataacatatgtatattgtgttgtttccattctgtaatttaactgggataccataactagcttcaacaaaacattctagtttgcacattctttgtttaccgatctgactttagtaaaattagaaacatgtttttttctggaaacttccttaacttcttgcatttttgcttactacccagatatctagcattagtagcggatggtatgaaaaatgcttatattcataaagtgcagcacatgcgggttttttgggtgaaacttaacttacaatggttatccctaaaagccagaagcacattcttgaagatttggatattgggaggagaaagcaagaaaaagtttgcgatgagatattttgagaggatacattaatagtttgtgtgatgcatagaccatcatcaatgaaatagtttctgagctacgaatacttaaaatacacctaaggaaaccaagtaatgaacccttgctaggtcaagttcagctaatagttattatacatctatgaaaggtataaaacatagttgtcaaggcgtcgcctaggtgatgcttaagcgtcgcataggcggcaaggtgagccggagatgtaaggtgtcctgcactcctcctcgccttgctctgtaggctaaggcccgtgtctctgaacattaccgttctgtttgtttaatctagtttctgctaatgggcgattcacacgtttctcgttgtttcttatttcagtcctttgtgacgcactctcaccaagtggaggccct

SEQ ID NO: 5949 - DNA, 594 bp, Zea mays
  Intron number 1 from transcript GRMZM2G020728_T02 (locus G RMZM2G020728) derived from phytozome v7.0 (chr-ID 8; pos 1 66833735 to 166834328 reverse strand)
ttggagatccgcccggacttggatcgagtcctcctgtctttggtaaggaaaccctagtccgcttcaaagcatgcctttaagctttttttattttttgctgggatggatcatggatgcagcaaatggaccattgaattggcacatcctacgatctgagcctcgaccttgaggctgtgatgttgtttgcgaattagggcttactgctgaagtgctgaggatgcgtacgccatggcgtgcatcgacccctagtgcggactacggtgtcactgttgttggatgtttccttgtcttatatagcatccagcaatcagtaccgtttcctcatgtaaagcccctcagtttaatacttgagagctaattgggtagcatactgccgtcactgcaacgttgttttgactttaatcagcacaggaacaaggaacttctaggctccgtttatgatgtgaatccatactctgctgcttttattaatgcattgcaattacatcagatgtattgaagattatgtttacataaatattatgttggccctttttcttacttcattaaatgttcccaggacattcattggagtgctccattcattgagacagc

SEQ ID NO: 5950 - DNA, 998 bp, Zea mays
  Intron number 1 from transcript GRMZM2G106010_T01 (locus G RMZM2G106010) derived from phytozome v7.0 (chr-ID 2; pos 7 005390 to 7006387)
gtgctcggggagggcggcttcgggtctacaagggctgggtcgacgagcgcacgctcaacccgaccaagagcgtattgtaatatgtatttatatgggtgacaattttgaaatatgaatattttcttgcaggaataaaggtggaaggaattttgcggtctagaagtggaggaggttgacagtagattgcaagaatatgagcaaggttttgttcattacttagtttgtatttaaaattttagaatatgagaaaggttttttgacactcactatttcgattgaagatacttttgactaggtgtccaggatgactgggttcgctatgctaagatgactgaagaaattggagagcaactgcatattgtcggtgatgaccatgtcactaatcccactgttagtaccttgttttctttccttctaaaatagaagttaaaattccagtttggttgttgcaacacccttatgtcagctgcttttaatatagtagagatatgttctggtgtttgctaatcagtagatgtcatgctatgagttctgtcgtgaataactctctaggagcaatgacctggttttgtggtgggcgtttggacaaaatctttaggattaacaagacttcgtaggttgaattagaccttgcaaaattatgattttgtcttagtggtgtcactaagcatttgccagtgaccagaaaattatgactttgtcttattatatcgacaccatgcatattccaatcttctgtcatgcctcgccactttggagtctctatccagtctggtatggcccttctggaacctgtgcttaatgatgtacaaaaaaggttggccaacatgtgggcgtcactactgttattacgtgtctaggtccgctctctctccatataaggttctaccttctaccgctcttgctagatggtccattgtattataatttgatttgtatcagtttagttcatttatgagataatatgacttgttcgcactgcatttttacagtttctc

SEQ ID NO: 5951 - DNA, 966 bp, Zea mays
  Intron number 1 from transcript GRMZM2G035944_T01 (locus G RMZM2G035944) derived from phytozome v7.0 (chr-ID 8; pos 1 22904131 to 122905096)
cttgtaagtggttcttaatggatctaccatcatctacatgcagcagctgcccggattttagtttcttctccagctcttgctcctttttttttaacatttactccacaattttatttcaacacgtactagcgcatacgcgctccacacactcccttgtttttatgtgtgcagtggagtagtgtagttagtgccttctgtcttttggggaaacgtaatcacgttttcttttagtgtcgtatatgtgcttcattctacctgcagaacaaggaaagatacactggaacccagagatgcagctcaatctgatttttcatggcggcttttgattttgttcctcatctatctatatcgtccccgttaattctagctccctctggtttctaattttctccagtatctcttgctaatcttggatatataggacttatatactgtatggtaatttgatactgagtactgacacattgctgtgttgaatccaaatatccaatgcaaagagctcataaattaaacgccactaaagctaatcttttgttaaccaacatcatattaatataattcgtctgtttctttaataaacaccttcagatttacattgactgccgcttgtagagtagtaagcaaaattaaagcatataaagagggctacagtccactgtatccacaccaagttcatgtttcagtgccatatctttccgtgattcttcatgtcttttaccgaataaggctgctctgtgctcgtttaccagtggacaacagtggccatgccagatccatccattcacaattccacatgctgctcaccagcacgcactgtggccaatgcgccatcgatctcatttcatgcatgccgaattatttccccccggcccctgcacgagtctagagtctagacactagactgtcttgttcagttctgacttattatctgatgatgatccgttgttattaggtgtgtgtgtgatc

SEQ ID NO: 5952 - DNA, 878 bp, Zea mays
  Intron number 6 from transcript GRMZM2G030839_T05 (locus G RMZM2G030839) derived from phytozome v7.0 (chr-ID 9; pos 1 42201136 to 142202013)
atttctattcttatagaaagcaggtgaacctttgtaattgtataagcatactcagatgtatatcttagcttcctgcagaactctaactacacccaaaagcccagtccaacttggtaaagaaaagcgagaaaaagagagatttgatgttaacatgacccttgtagctccttttagcttttctattttgaaccatcagttgcaaaaaatgaactacctaatcttggacatatgtttattttctaatatcaacaaaatttactaaaacacttaccagagtttaattaaaacttaaagtgtgaactcttttgtactgtgctttggttctctgttctcttgatgatggtcataactattgtgataaaagtatcagtttagttaattctaaaattagcatagtgcacttcttaatactaagtatgaaatcagatgcagaactcaaagctaatgtgttggcatatatatttgtatgacatatgatatgtgtggatgtaatgcttgatttttttcttataaaatttgcgtagttgaagatcattttcctttatgctctatgcattcatgacagcgttcttatgtaaaacttaaggttcaatgaacttcaaaggggtaaccatctgtaaaattttgaatagatgactagactgccagatggcaatgtaaaacattaaaaaagtcactctccttgcattatttagtaaatttcagcatgtgaatctattgccttttgcatagtaaatatctcttttaaaccatataaaattttcttgtttgacctagttcatgtttacaactagagctcagtgaggaaatactatatcttatttgtttctgttgtttcttcagattgaagcacgtggtctccctcttactccggaggt

SEQ ID NO: 5953 - DNA, 780 bp, Zea mays
  Intron number 1 from transcript GRMZM2G381395_T01 (locus G RMZM2G381395) derived from phytozome v7.0 (chr-ID 7; pos 1 66122548 to 166123327)
ccgcgtgccagattggcgaggcaattgaacacgaggtgtgtgaattgttgcttggagatgcttcttgactcagggaatcagtgcttcttgttgttacttgttagtaatgtgaagtccatgaacaaattaatataatgaattagtagaccgaataactttaaatggggacctaataataatatatctgttcttctctcagttaactatttattgtttcagggaagaattctatggttatgcatcattgcgaagaaaaaataacctgaatgatattattttaatcaaagaatgtttatatctgccatagatgaactttgtcaatcataattgacagacaaacctctcttatgagatataaaatctaacttcttggagtaatttaagggtaggaactattacatttatattggtagggcaataattcaatggtgctttctgtttgagctcaacctgttaagtgttaagtttgaggcaattttattaatttcatgttctttgtttgaactctgttgtctaagtatgagtttctaatcacttccctatgtctttgaaggtgccataaatattatgcgtttctcatatttcttacctcgttacattttatttggttcgaataaaatagttaggtgtcaagtctttattaagttgcctttaatgcataacctattttgatgacaacatgttgtgtcatggtgtcagatgctaacaagccatggtatattattgttttttcatctttctctaggttcgaattaacagatttctggagaagacaaggaa

SEQ ID NO: 5954 - DNA, 683 bp, Zea mays
  Intron number 2 from transcript GRMZM5G892758_T01 (locus G RMZM5G892758) derived from phytozome v7.0 (chr-ID 2; pos 5 842851 to 5843533 reverse strand)
gcaataagaggttgctaggagctgatcacatccaggtgaaagaagctaaattatatcctttattttccaaagtgtcgtatgattgtagccattgaattatctttgcaaactaaagaacttctaaggtgtaaaggtgtaagtttgggcattccatgcttacggatttccatgaacccgtcaaaaggttttcacgtaaaatagtggccagggtttctcatggaaacggtcaatgtgtatcaaaatccaatcttgactcaaacaactatttgatatatatactaatgtgtctaaaatacattactcgaaggaatctatcacatcaatatttccctttctccagaactgcataatagtgctggaatgcatgtcttatataacaatacataataaagacacctctggtatattgagatatcctataatcctattgatctggttgctatttcttttaatgaagtaatgtattgtaattgttgtataagtttttttgcaagttattaatgttaataatgtatgattcagtgaaatatactataagcatatgattcttgtcgtagagcatgtacacacctgatttataattcattgaataatatgatgaataattgggtcctgtgatttaattacttactatgaactaacaagcaattttttttcaatcaatcagactgctgcaagctacc

SEQ ID NO: 5955 - DNA, 648 bp, Zea mays
  Intron number 2 from transcript GRMZM2G005146_T01 (locus G RMZM2G005146) derived from phytozome v7.0 (chr-ID 2; pos 1 83753093 to 183753740)
cccggcacgccgaggagccccaccgtgtacgactggtgcgtagcactatcctctggcccgctaatttataaaattcattcacacgcacgtattgtacatgtattatatttatgattatgatgatgatctactatctgctactactaccttggtttatcgcactgtaatcgcgtggtaccacatatatttctgaacgtaccgtacgtgctgctaggatcggagtacccgaaaatttcaacccgcaacccgctattttgatagcaatatttaatataaacaattatacaattatgtttatgtatttaatctgaattcttcatctattggccatgtttaatttacaagtaaacctgagtagctatgtttcatattttcgtttactggaattgctacagttttaatgttataattacatatggtatttatctaagttatatctttaatttattcgaaaataaaatatttaatatatttaaatatgttggaagcatgttacttggttctctaaaattacaaaaaaatgactagtagggacacgcaaggatcttgcttggatttgatctgacatcatctgatgtgcgtgtccccttcttctccctcccaacggctgcagggtggtgatcagttcgctggacctctgaagcccaa

SEQ ID NO: 5956 - DNA, 565 bp, Zea mays
  Intron number 1 from transcript GRMZM2G100152_T02 (locus G RMZM2G100152) derived from phytozome v7.0 (chr-ID 8; pos 1 06282180 to 106282744 reverse strand)
ctttgggcccttcgccggggacaagcacccaccgggtacgcctatcccttttcttcccctaacatctatttgtcgaatctgatgtagttacaagtgtagtgtacatgtagtattatccctgctaactcttttttttgggcaaaaattatcgtgtgtacatgtgtatacccatgccctttactgggttccccctgatagctagtaattatcagtagtaaaatctttgttcctgcatgttcgcggatgcagtttcactgttttaaaatattttatgatgcaataccacaatttatagggtgtatttagagtagaaaccagaggtttgaatcgggcttgtgaattctagttaaaaaagcacattcaacgaacaaactggccaacataagctgctcctgaccttaaaaaacaggctgctctcacgtgatatgtgtcttttatgcaattgcaaagatgtaacaaatttcgttgttccttggaaacattccgatttctataaacaagcctttgagtctgaatattgataagtgtttgcagagaaaatcaataaatacatcggcctgaaaga

SEQ ID NO: 5957 - DNA, 759 bp, Zea mays
  Intron number 4 from transcript GRMZM2G033219_T02 (locus G RMZM2G033219) derived from phytozome v7.0 (chr-ID 2; pos 4 837822 to 4838580 reverse strand)
tcgagcgatactctgttaaagaagaaaatataacagtatgcatcttctctcttctgattggctgatgttcgcaagtaatgttgatccttattgctttatcacaactttgaaaaactggcagtcctattgagtatacttgtatacttatgctccatcctgatgttttttttattaaggacccatgagccatacaaagaactatctttggatggataatgtacttgattgggttaacttttaaaacttctaaagccttgtcctttgtttatttaattgtgtgtaataaatattctagaatatttggaattgtagtttgtcaggaccaataaatatatttagttatttccttgctaccagcctcaatgattattgccactatagatagtctctgagttattcttatgttagtttgatggattccgtgtatcattgtatatttaattttagatgatcactagtattaaatgtcttgaattattaaacaaagttgtcttagaatccatggcataatatgcactggaataggaaagctgctagcctgctacaatataaattctatgttacaaaaagcagactgaaaattgcaccatatagaatttactattcatctgcaaacatgacttcaaacaacgttagtgatgagctacacagttgtatacacttctgaaatgtttcggaaacttttggaaaacacaattttactcagattcaaattcttctttaggttgttagtgttcccggaagctttgaggttcctat

SEQ ID NO: 5958 - DNA, 860 bp, Zea mays
  Intron number 1 from transcript GRMZM2G033219_T02 (locus G RMZM2G033219) derived from phytozome v7.0 (chr-ID 2; pos 4 839575 to 4840434 reverse strand)
cgctgggcccgtcgccggcgacgagcacccaccaggtacgcccatccattctcgtccctaggtgctgtacgaaaccgagcacccaaaccctaacttaaatctatttggctatttgtattcggatctgattccaatcaaagcgctaagaatggtcgatggcttatgtatatcacaacacaacatacctaatgtagacacttaatctgaagcgagctcttctctctttctctctgcgtgcatccagggcaaatggtgctcttacctttggttggtgattctcgcgtttgtgctgtgttcattttgatttggagttttggaccatgcgtctactgcttgggtcttggcttattgcataagttccttgaaaacttaaaccaaagcaagcattttgttttgcaatttatcatcttcctcgaaatgactaatgtgtagaattatattttcttaaactgagtctatatgaaatggcttcataaagctacacctatgattgatcaccggagcaattaaattgcaagaaggtgaaaattgtataagaatatgggttgaaatttcagtgccataaatccaaaaacaacaccgaatgcacaatgtatccgaaactctcgaccacaaaataaattcctattaggaatgcaggagcttttataggaaataatttcatacaatataacaaactaaatcagttttccaaatgaattcttaagttttgaagtttttttttggtattttggtcaattagtagtttagtacctcgtgtgcaacctgacaagctgccacacaccgtgagatgtgactcctgctggctatcttgtttttcctcaggttcggaaacattgctgacgttcacctgtaccaca

SEQ ID NO: 5959 - DNA, 1003 bp, Zea mays
  Intron number 5 from transcript GRMZM2G056088_T02 (locus G RMZM2G056088) derived from phytozome v7.0 (chr-ID 2; pos 2 23796163 to 223797165 reverse strand)
ctcaacttttacgctccaggtgagggctacaattcgaacacatgctaatgataatactcactagatattattatgcgctcttgtcacaacaattgagaacatgaacctgggggcatggcgtggaggggcacccacggtagctgatttgtttctctacgtccagttcttggaaaaggctacctgcactaattcagcattgggaagtgtcatgtgatgacaccttagatccaacagtacctcttataaactatcagaccttcccaataaaagatggttgagtttcatggtaaacttatttatatactacactaaacaagctaactggctaagcttagcagaaaatgttcactacgatctgccaaaaccacttataatttgtgccagatggaggagaaactaatcttttaaactgaagcatatgcatagctgaaactaaattcttatttgaagcataattttagttaagaaaactaactttttgtgtgttcgcgctctgaatccgcacaaacagtttcctgtttctctatgaaccctaacccccccaatctcggcggagatcaagtgcaccccctcgcccctcccctggttggtggatgttggatatagaggcgttgcagaaggtattgtgcaggaaaacatagcttctgctattcgttggtttcccctgttcacgtgtcattctctgtttctcttttctcttaaaaaatggaaaacatattgtcccttcagttcaccacttgctcggtggcaattgcagttacttatcttgcagttacttcaaacatggtggccacatcttttgatctgtgtgtgcttataattgtagatttgaaagatgcaacccattgcgataatgattgttttatgtgatatgattagcaaaaatattagattaggcatatttgagcatccctgagaactgccggtgagttgggtctgtgatagatttcttcatctccgagaaatggaattttactcattcaatttatttccaggaacccaa

SEQ ID NO: 5960 - DNA, 543 bp, Zea mays
  Intron number 4 from transcript GRMZM2G015645_T01 (locus G RMZM2G015645) derived from phytozome v7.0 (chr-ID 9; pos 3 3549821 to 33550363 reverse strand)
aaggtgaacctagagtggtcatccgaggaaagaaggtacagtgggaacatattttctaatagaagaaatgctttgatgcctttttcatttgcttatgttaatgttacccaaaaccaaactcaattcatatttgtagtactatattcttgttacgatatctaatatgcatcaagcttgtgtatagaaaaattaagtaggagtactgtatcaaagatgcctagatacatggtcatgataactttgtgttaattaatatgtctgctaaactctgttagtttattgcatttgcaagcttcgcgtcctaggattcctgtggtggttggtgaccacaggaacaacatgtccatgtcgagattaatgccttgcaccctcaccaggttcattgtagcactgttggggctgaactgcactgtagataaggctcagctgcaatgttgttcagctgcaaccgatcagcagctgcagtggttgtttagtgcaaccgaacacggtctcgctttcttagcagaaagcgcctttggtggacttgcgagggcttgctct

SEQ ID NO: 5961 - DNA, 939 bp, Zea mays
  Intron number 1 from transcript GRMZM2G006745_T03 (locus G RMZM2G006745) derived from phytozome v7.0 (chr-ID 8; pos 9 5020202 to 95021140)
cagcccccggccctgcagcccggaaggtgagatcagccttccagatacttctttcgatttacttgtatgctagaggattagccgactagggtttgaggatgttgggattttaactctcgagccactcaatttgactgcccatgttcgtctggcggggaacgggtatctgtggaatttttttttggggctcataggttggtaaattttcgaggggtactggtcggttcacttgtcgagatttttaattagggttctgggaaattatatccgtaagatgccccttggtgagggttgtgggatttccttgtcggattgtgccattgtgccctagcaattccggaattagggtttctggtggtggtccgtgtaatttgggcccataggatggtggttgaggtatttttcgttggtgtggaattggggtaaagggctttaaatggggatcgttgtcctgtttgtcattctaatttgactgcagtggatgattgctagttcctgtatggttgagcatagtatggcgcccttaaaatagggggaagctcatgctgttgcttgtttgtcatgttgaaagctggaatcgtatgtttaatctactagaaactttattctgggtatcaactgctgtaagatgtggttttagaagcctatcttgggtatttatagcggtgtagatataggcttaagcttcagagctgtgagtattgttcatattatttgatcttcaggttatgagtattgtttgcatcgtactgagtggcagtacagtgtgcatcatctccacagaaacgtgtatacttggaagcttgtagagcgtgcctaacttgctgctaactttgtttctgtatgttgtcaaattctattgttgttagttttccttaatccactatctgatacgtactatgtctatttgtcttgtcttatcggtaatctatagagcat

SEQ ID NO: 5962 - DNA, 494 bp, Zea mays
  Intron number 3 from transcript GRMZM2G043501_T01 (locus G RMZM2G043501) derived from phytozome v7.0 (chr-ID 2; pos 1 78724570 to 178725063 reverse strand)
ctttgggtacttccatccagcaataccaggtaggattgagatcccatttggcatagatgcaaacagctcgggctctttgatactttacatggaagagctagaagccggtgaagccaaaaatgtctgtttactggtcgtggctttctgaacttctagagtattgctggctactgttactagtcatgctacaagctaatctagttttgtaagtaactctgcaaatgtgcctaatctaatgcagatatctagtttataggttcaccttatcctaatatgtatcaattttcccatcatctaaaaaataataattttctattagggcgaaattagtgtatgactgcatgtttgcatctatactgtttgtggttaagatgttgagtgcagcaatcggctgttgcaatattacttgtgctgcagttggctttttttagtgctctcactatcttcttttaacattaggggaaccactgattttcattgaagttgctttactc

SEQ ID NO: 5963 - DNA, 782 bp, Zea mays
  Intron number 6 from transcript GRMZM2G089350_T04 (locus G RMZM2G089350) derived from phytozome v7.0 (chr-ID 9; pos 4 1678104 to 41678885)
caggaaagtctaaggcccttactaagtacttccaagtaagtagagcaatcaccatcacacggatttattcaagatttttttgtgttaagccaattgttcgttttcatgtaattgttgtccactaatattttattgaataatttgtgtgtcgtcccaacgcacggtcattgtactagtagtattgaatgctccatttgtagttcctgtgatattacagtagtgcagtctaaaatactgaaacattgtacactgtaataccctgaaaggctgggccaatcaattttgactcttctttacttggtcatgtatttattaaaaaaattcttggtagctgcggtctgatttggactctatattcatgatttgacttacaaatcttcgtgcacataagtgtgaattggtttctccacacatatagtgacacaaaggtgtggagcaagaaagagggttattgccccattttaggtgaccaatatgtttccctaatcaaaatgcgatcagtatatggctgatgcttacatgatatcagttgcatggccgtacaagaaagtaatagtctatatcttatcttgtttatgtttagatttatatgagccgtcaacttaatgatgattaaccttgattgcaccagctgaagttggtgcataaggctgcaacaccgcctagtggaagtagataaggcatcaaaactgtatttttatttgcaaatgtagcaacaatatactaatttgatgtacttttttctagggtgttctggacaaagaaatcttgtacattaaaac

SEQ ID NO: 5964 - DNA, 949 bp, Zea mays
  Intron number 1 from transcript GRMZM2G026050_T01 (locus G RMZM2G026050) derived from phytozome v7.0 (chr-ID 2; pos 2 0531288 to 20532236 reverse strand)
gttcggcctcggtattttccactctggaatcgaaggtacctatgtttctactaccttttgtcctgttgaagttgtacacattctcgtgctcgtgcaatacctgtttggaggggataaggtttcagctgtaactagtagttacccaaaaccgtagtctagtgattgaagaggggaacaacgatagtttacagttgaagagaagggggcggaatattgcgatagggtttttttgaattccctggatgttacgatcttctgctgctgtccgtaagcaagaaaaggaattcgaataatctgggcacggaagaaaactgctaaatcggggttcaattttttacattctctgtttctgacaggctgatggttacgcagctattttcctgttgaaggctgtagtaagggtggcataggggatggaccctaaatatgccagttgaacggtgggtcggtggcgtagggatggacacttgacaagttttgagtagtaaggatgaacattgtctttacgagctggtttgaccagagaattgaaggagatccaatagagaggaaatccactgctattcaaattatatagcaggagatttcctccttcatggattttctccaattcacttgtcgccaaactagtcctacatgttatgcaattgtcaattgcttgattagttcgcaatgttggtagacgtgtgttttaaggcttatttgctgttcgagacgaacactgaagaatctgtacttcacttttcagtggtacacttgtttgtaatctttacagtatttattcataaggtgtaccattgcttctcggtaaaaaatagttgtacaactcgtagttgtcaatttgtcattacttcttgacttgcatttggtagcttgcattctgctagataaatgattttatgagcataaactcaaacactggtgtatggtttactcaaataaacagttc

SEQ ID NO: 5965 - DNA, 827 bp, Zea mays
  Intron number 2 from transcript GRMZM2G044416_T01 (locus G RMZM2G044416) derived from phytozome v7.0 (chr-ID 8; pos 1 41930918 to 141931744 reverse strand)
actcattcattctgtcatacagcccttgtttttctgtcaaagaaagcataaattcacagttagggttaatgagggctaactgtgatggacacagatgaccctggaaccgaggataccgatgaagaatttaaagcacattattcaactagactaacaaataagaaacacaaaactgaatgaggaacatagtatgcaggcatagtcttcggtctacagtagcgagataaatatttttttgctgccacgagatgaaaagaaaactcagcactgttgtagcagcacaatttgtgcctaacagctattactttgaatgtgctaattatagccaaagtttccaaactgttacagcaacgtgaaagctgggcgaacagacatataacaagctacacagaattactcgtatactgacttcaaccatttcaattgtaacaactacacataaatgagttatctgcctagaggtctgtacacacctttttccctgttaactaatgattctgtgattgtgctgacctcagttgacctggaattgtttgcatgcatctctgtcagggtcactccaccagaaggttcttcattcgtaccctggactgagcaaaatctaggttccaatccatgttgatcagcatctgcatatgtgcttgttatactttttcttaatggagaacctgtttctggttgtgtttcattggaagcttcatccaattcagtatccttagctgcattggaatgtgaaccatcttgtttctgttcagtgctcactactaagtttgatatgctcttttcagaattttctcctggctggtcatgatttgcccctatggtgg

SEQ ID NO: 5966 - DNA, 592 bp, Zea mays
  Intron number 1 from transcript GRMZM2G046721_T01 (locus G RMZM2G046721) derived from phytozome v7.0 (chr-ID 9; pos 1 46075754 to 146076345)
gccgctcttcgaggaactgctcaaggtcaaagaaggtgcctccatttcccgatctttatattttcgcttcaagataaggggtctccttcgaggagcgctttgatgatgtgatgtgtcctgcagacgcagaggaagaaccagaagctgctcttcgaggagctgctcaaggtcaaagaaggtgcctccatttccaaatctttattttttcgcttcaagataactaaatcatagataatgatataatatagataaaaaaggatggcaaaaaatataaggtaaaatcagttttacgaggataaaacttgtatgtcctaagtcttgactatcaagaacaccgggcactggttgtccttcgtacaattgaaccaaaatgaaagagcagttggctatttaaaaatgttgacagcaacaagacgtaacttttttcaggtatgcaataatcctaacacaccctcagtcttcctttccttttctctatgattccagataagatacatatgtttatggcacaaaccttacctctttgtctctgtgtgatgcagagttgatgcttctgaggttcatcttcctactgctgacagtgtttcagggg

SEQ ID NO: 5967 - DNA, 343 bp, Zea mays
  Intron number 3 from transcript GRMZM2G305080_T02 (locus G RMZM2G305080) derived from phytozome v7.0 (chr-ID 8; pos 6 849489 to 6849831)
acctaaccaacaaaccggtgagtttgattgtggagcatctccgcgcccttctttttctactagctgttcatggtagcaggatatggttttcgcgtggttttctactagctgtgtaggtacactatgttgctgctactcagctagtttcgttatcacgtataagctcgtgaactgtataggaggattaaaacattgggggattaccaaaagtctaaaaccttgtattttcgtccctgctataatgagattaggaaaagcatccatgattccatgatcatgttttcagattagtccagttttcttcatgaaactaagtttttttggtgtttcagttgcttgccgg

SEQ ID NO: 5968 - DNA, 585 bp, Zea mays
  Intron number 1 from transcript AC177917.1_FGT005 (locus A C177917.1_FG005) derived from phytozome v7.0 (chr-ID 2; po s 99291487 to 99292071 reverse strand)
gtgaaggtatcaggttcaccatgccacagggaagataatgggcgcaaagcagctggctgaagctgttggttttgttgaacaattggtgtaccctttggggtccactatttttgggggtgggcaagatgattatttgtactgctgccctggcaacatggagacagaggtatgccgctatatggtagactatgttggctttccgaagctagaagcgatgctatcaactttgtctgatgaagatttttctgattgtctagcttataatcatctcaaggtaatttttattcgtctttgttttttagcttcaggttgctttgatgaaatgacttttcctttgtatcttcgcagggcctattcctaggaaaagccttgaagaataagagaaatgttgagaacgaagttggtcggaaagaaattatgaagcttagatccgaagtgtctggactttggtttgattgtgaagaaaaggaaaaatctttcaagatattagaaaacgtttttattgatagctgaaccgaagtccagactatgcgcgaggagaaagctaggctcgaaacttcgaatgctgaacagaagaaacacatt

SEQ ID NO: 5969 - DNA, 887 bp, Zea mays
  Intron number 2 from transcript GRMZM2G388006_T01 (locus G RMZM2G388006) derived from phytozome v7.0 (chr-ID 8; pos 1 11225167 to 111226053)
aaggtgcgtccatgaaatgttgtctcgcgaaccataggctagaagttcacttgttggtcgtcagacaagttcgtggaggtagtactgatttgagtggaacacgcgcccttgtgtttgttttgtgacattttgcttctagcagattgttcatggctaaactgggctgttgtcattaatcgtcaatattttggagcaagttggtctctatgttctagtttctactttctaaggagtaaaaggaagatacacaaagttaactacgaggttacttcagttgactcgtggcagttaaatgctctgcagtttggtctcctcagtgttgaaagtactgtaatgcggactatattttgctaggtttgtgtcagcgcagtttctgtggtatggaaaaaaaatcacgggctaaattggagacacaatccttttcgctgaatttgcttcttctactactaagtttctatcagaacttggaagcatattggtatctagattagtcagatttgcctctttcgtgtatagtcttttgtgctaattaaaatgtgtaaggaactactacttttacacttttcgtgtgcataaaaggttatttgcagaggttgtgaactagcagcatttctaaacctacatattccgaagaaacgtaatgagactcatcaaaataagattcagcatatctaatgtacttaaccaagatgcaagcatgttgctttgtttgtattaacttcttgatatacgcacacagtttttggataatgatacctggagtattacccttttacactaagctgctaagttttaccaatgactcaacttatgctatatcagtatcatctttttttatgtttttatttgcagaggctagaggttttgaactagcagcatttctagac

SEQ ID NO: 5970 - DNA, 997 bp, Zea mays
  Intron number 1 from transcript GRMZM2G097089_T02 (locus G RMZM2G097089) derived from phytozome v7.0 (chr-ID 2; pos 1 99501900 to 199502896 reverse strand)
tccacgtgttcctcgtcatcatcctcgcgctcaaggtgactttggctcctctgttccttctctatttgatgtaatttcgtgggtggcaccattggtgctggtgtgagtttcaatgaaggagattaggcacgacgcacgattgccgattggttagctcattgagctgggtttcatgttctgtgttactagctgtatctatcacttctgttgcggctcgtaatctgttgctttgatgggtcaattttgactggagatttatttgacttggcctaatttggaactgaggagctggttacccaaattgaggtggttttagtgggcaacaagcaacatgtcgattgaattggcaaactccggattttctctttgaagggaatgttggaatgagctagctgatgtagatagtatggcacaatgagtgtagatattgcacatctagctatgatttcttggcttatgcagttctatttgactgtaaaacataaaatttctagagtgtatcgatgaggaatgagtgtccttgtaatgcgatgcatatctccttggtttggatgttatttcctcttggcagttgatagcttcatgatcttttaatttgattgctgcggtggtagccattgactactactattgtgatatttgggagagtgctagtcacgatgtcatgtttatcaccaatgctgattagtaaagaaatctcaggggcaatagaagcgtttcggtatcaaagtcttgtctgtagtgagtgcattgttggatgcagttgcagcatacttttatgcttttatggatggagttaaacatgggagatgagcatttgaacatcttattgttgttttactagtgtaaacacctctacagataaatttgaattctgcaatttacctatatatcaagcatatttctgcctttccattgtttatggtgcagcagtgttaatgctgtttccttttgccatgcagactctattttttgttcagctaacttctatagagac

SEQ ID NO: 5971 - DNA, 901 bp, Zea mays
  Intron number 1 from transcript GRMZM5G842094_T01 (locus G RMZM5G842094) derived from phytozome v7.0 (chr-ID 7; pos 1 52442980 to 152443880 reverse strand)
taaatcgccgtccacgatctggggtacacctgatggaaacaaacaatcgcagaggtggaagaattagtcgagacctcgtgtaaaattcactataccaccgttctcgaatatttatcgattgccaatttatttttgaactaaaacgtgacagataaaaaacaacagaaggagtacattttaggacagtataagggtagaactatttaagactgatttggtgactagagatcacgtggggattggagggggaaattagttcatttctccctccaatcccctctaatctctctgtgatcctcttgtcaccaaatcaacccttatgggttttatttgatgctgcaggatgaaacaataccagttgtgtcaggagaagaagaaaaaaaaaaaggagaaatgcaggtgtgtgtcattttaggagcacttgcaaaagcaaagtcactcggttagtgcttcaacatggtagtggatttatttcctggagaacaagtcgccacggcagtgagatgctggtgatagccacttcaaatctgtaggcaagtgaaagcagagtccatagcttccgagtacgacgctacgatgcctttcctgacgcaaccgatcacccccatcgtttctaaaaagaccttatcctagcctgcagcatggcggctgaatgggcatttttggatgtgcgagctgtgccatgctactgcctactggtgtgtactgtatgcgccacgcctctagagtctagagtgagtgcgccactgacttgtaatggaaatactctgacggagtcataagccggctcaagaaaaagaatatcacaatcattttcagcttgcaattgcatagcgccgcgtcagaagatagcacaagcatcatacctgaacagtgtaccgcgaaacgccgtccctcaggt

SEQ ID NO: 5972 - DNA, 452 bp, Zea mays
  Intron number 1 from transcript GRMZM2G165354_T02 (locus G RMZM2G165354) derived from phytozome v7.0 (chr-ID 8; pos 1 6632583 to 16633034)
cgtgggtgcagggccaggccgaggtgaaagaggtaatgtagaactttcaaaaaataaagcttgagatatgcattgatgtttgcatgtcttgtgcagcttctttgattctgtattctgattgagtgttttaatctatcttatagttggttctggttgcagtggtaccagaaaatgcatcataagctatttctaggtattatatccttagtttcgtgtgctctgtttatagattcgacgattgagaagaaatcaaagaataaaaatgtggaactcggattttcagatgaagagtgtgactaagaacttcctgattttccatcatttattccattcttacctcctctggtatgtatgtgtgcctttctgcactcagatactaagatgcttgattgttactaaggcataaacttctaccttatgtgaacagagtgcagctaatctaaaggtctact

SEQ ID NO: 5973 - DNA, 549 bp, Zea mays
  Intron number 3 from transcript GRMZM2G165354_T02 (locus G RMZM2G165354) derived from phytozome v7.0 (chr-ID 8; pos 1 6633173 to 16633721)
ctctcttgttgacaactctcataagagtcgataaggtatgtattttttccttcatacaagaaagaaaaggatatttgtaaatctggccttagtataacatccatttggagactaggatgaggtaaataattgggtttcaaaaagcttttttattagaaatatattcttttgtgaatataccaatccagaatattaaagcagtccatcttgaccaaacaattcaacccaagatgggccaaatcaatttgattagtcatggtaatatcgtgttttttaccattatattcatgttctgtatcgagaacattaacattagattgtcagattgaaaacggtattttttagccctgtaagctacaatttttggactgacaatatggttaccaaaaatgatttgattaggtacactacacatctaaatatctagcaacattttcaccctcaaaatttacgcatcgtatgtggttctgtcttgtcttctgatttgtctagaccatggacaatactatcaagactattattattttatcatttcaatgataggttggt

SEQ ID NO: 5974 - DNA, 959 bp, Zea mays
  Intron number 1 from transcript GRMZM2G000581_T01 (locus G RMZM2G000581) derived from phytozome v7.0 (chr-ID 8; pos 1 60340352 to 160341310)
ggtccagcagggccaccagacagagaggatctcaggtgagaccgtgagagagagagagagagagagagagagagagaaagagatgatgggcctcttttccttgcgtttgttcccgtcttgtttctcatcttgataggcacatccttgtcagtttgtagaactcaagctgcttggtctgtctagttgggtgtcatttgctttttgctagtagtattaattgtgtaaagctagagttttggcatcggttaatgtggcagtgcacctgtcgggacctctgaatcctaaattcatagaactttaatcctgatttcgtatgctaataagttacagagaaactggatgcaggtttatcctgtggtgttctgttcgtagcagtttgatccggttctcgtgaaatttagcagaaaccacttttttacatgctgctccatgaatctgttgtgaaaaatgtagaatgcaatatggtacttgttccctatgttctatcaccaacgcctacaatttatgtacctctttcacggtgtgttttgttgctagttcttcaagcttggacaagtagaatcctatgtgccgtttggttcacgaaagtaatgattcacactctgattgccagtgataacaagtttgaataagacaatgtcagtttctagtgtactatctgactacggttagacttaaccaaacatggtttaacgttatcggttatcattcacgttacaaacatgtgaactaaaaagtaccctactgtcagttcaacataggtgcaaaaatcactttacacctataaggcttctacctggcacactttcattctatcattgtacttttatgatcttgtgatccctagcatggttctaaggcccaagtatattcttttccctacctttgtgcaaagcctgtaatgatgtggccgataaaattcaggaagtgctggtgacgtgttggaagataaccctgtt

SEQ ID NO: 5975 - DNA, 444 bp, Zea mays
  Intron number 1 from transcript GRMZM2G146267_T02 (locus G RMZM2G146267) derived from phytozome v7.0 (chr-ID 2; pos 1 53523881 to 153524324 reverse strand)
cgagttcctctccttccccctactcaactttccccttttcggctcgattcactacaatctcatgggaattttgccgcaccgccctctcccttcctctccaatgttgttaataatattggacccgtgcgtgcgtgcgtgtatccccgtaggccgtagcagagcacaatccggtggtatttaggactgatatagatttctgccgatagatttaaagttggatggttgatttgttagaatcgggcaaggttcgatgccatctgtgactttcaatctctcatgtaacagtttttatcctgcctgtgctgttgcctcaaggatttattgattgataccttacctgttttgagtctaggtcgtcttcttattgttctgcatgcataatacttgggacttgggtggttgtttctcctcacgctagctgacttgcaatctaccaggacgacc

SEQ ID NO: 5976 - DNA, 899 bp, Zea mays
  Intron number 2 from transcript GRMZM2G558324_T01 (locus G RMZM2G558324) derived from phytozome v7.0 (chr-ID 9; pos 6 6347205 to 66348103 reverse strand)
attggcagaattacttcaccaaattgtgcataaaggtgaacattggcacgtagctttgtgaattttagggtactttagcattcgagtttagttagttctgttcagagtggtgatcatataattaaagacataatcaatttttttgtgtaaatcaattgagtgaaaatgcacttcatacgtaaaatgatcaacattggttgaagcatatcttttgcaaacaaagtccgtaaattcgtaatctctgaaggccaaatcacacaattatcagcattgatgatgttgctacatattttgttagcctgcctagtagcctgccttgttttgaaactttcaaatatgtgcaaattgttcattagaatattaacaataacattgcaaattgttctcactttgttagcatataggtgtttaagggtatgtttggtttggcttttggttgtgtcatttgcccccaaaagccaaaagtcaaagcaaaggactaatctagccaacattttttttttcaaaagtcgactttctcatggtgtaaatttgaaagcacctttggacctactattagcggcttttggatgcaagaactttacaatatatatggaagaacttttagtggcttccaccaaacgacttttagcttttttacagctcacaacacacaacaactattttcacagctcacagcccaaccaaacatatcgtaaataatccctatcttcatttaaagtgaaaaaagcagagggaacgtatttggtactgttggtacaggatttggtttcttgaattttcatgtattatctattaaacatttctctaagcaactttgtccagataacacttgccatctggaatgtgaatcttattttttagatcacataccactttttccattggaagaaagggac

SEQ ID NO: 5977 - DNA, 510 bp, Zea mays
  Intron number 1 from transcript GRMZM2G167725_T02 (locus G RMZM2G167725) derived from phytozome v7.0 (chr-ID 8; pos 1 74341426 to 174341935)
cgatccaccaccagaaccgcccaaccccaagataggtatgtgcaggttcaactactcatttagatattggtacaacctgtaatagactttggtacaataggatttggttctgctattcactttgtttttagttccaaacaatcaaaaaattgcatgtcctttaggaaaaatatcacaggaatattagtaacataacactgataataaaaaatgctttgattctatatatttttcatgttataaggttgaaaacattccgtctcacggatcaaaatgggtacaaggggacgtactgcatttacaaatatatttaaccataataaaacatctttggaaaatgaatatcattttaagtccaaaaatgtttttgttgaatgttcattaagctatagtgaagagtaaacttagcatttcttttctatatctctccctcgtgctcatgtcgctgcagtctcctccatccaacctttcctacgtaggcagctccatctcagtcgttgtacccgttca

SEQ ID NO: 5978 - DNA, 720 bp, Zea mays
  Intron number 1 from transcript GRMZM2G004619_T01 (locus G RMZM2G004619) derived from phytozome v7.0 (chr-ID 2; pos 1 98723571 to 198724290 reverse strand)
tccggaggtgctcgccgtcgaggacccggaggaaggtacaacgcccgttcttgcagtctctctctctctccggccttggctctagtagtagttgcccctgttggtgcttgtgtctcagctgtcagatgcatggatacactgacgttttttttccttctgaacataacaggtgctcataaacagaaaaaaaataaagaaaataactttgcgggcagatggggagtttatttttttgtttcctgcttcgggttctattaataactttgtactcttgctgagaatacatatacatgcaaaggatcagagattgggtccagttattccttttgtactaatctgttagctcttatagttactcaaagggttgaaggcttcagaaaagcatggtttgttttattctataagtccattattacgatcatttgacttgtactcgtgcaataaacagaaggccctttcttcctttcacctctttgttgttatgctacttttccctgatacagtgaacacgaaattgaatcttatttgaagttatatgtgtgcaatcctttttgttctgccttattttttgtgctgtctgcgttgaactaagtactcatgcatgcatgtatgaattgaggatttatgtttatttggcctgaagttcttggctgggcgcctctgagattttttttctctcccctggttacagctgcagcaaccgcagcactccaggaagaa

SEQ ID NO: 5979 - DNA, 952 bp, Zea mays
  Intron number 2 from transcript GRMZM2G065967_T01 (locus G RMZM2G065967) derived from phytozome v7.0 (chr-ID 2; pos 1 18488356 to 118489307)
acactgtcctcatctttggcccaattgaaatactggtatggtataagttattactccatttttcatttaatttccagagaagacacctctatttttaatttctcatcctaaggtattattatttgttgaaaggaaaaaaaataatatcccagttcaaagccatgttctattctttgctcaaaagtttgcttgtcatctgatcatgtcaaaactagtgttgtggagacataagtcttcattttcatctttttgtttcatggccactagctagtgtaatagttgtcaatttgaagaaaatacacacagaccggttcgaatcgaatccatgaacatgctcatgcacaaaaccaaagtgtattgggataatatgatgtttttacctttaagtgaactgacatataatcagtctgacatcatgtatagtcatgaaccaggctacgtgcaaatacatcataagtctatttctcgattttggtgagacgacttgattacccgtactagtactactgtttattagattatgagatagtgatgtatgaacttatatttcatttctaacccaaggaaaaaaaataaaacagcggtagattgggatggaccaactccttccaaaccaaacactctattattgggttgatcgatgccagtcaaaccatttcagttgattaatggacagacaaggactgttcgacaggcgtcccctaaagcgcttcctaaatatttagtggtactaaagtcgtagtggttctcttccaccactaaatttacggtgttctccgattttccctaaaatattttatactctaaattataaattaaatatatcattaatatgtatgtactactttagacccgacaaatatataaatgaaaattttaatttaaaacatattaataatatagtgtattgtgtataggggataaacttgaaggaaccgctgcatttgggaga

SEQ ID NO: 5980 - DNA, 1023 bp, Zea mays
  Intron number 1 from transcript GRMZM2G506015_T01 (locus G RMZM2G506015) derived from phytozome v7.0 (chr-ID 2; pos 1 44875589 to 144876611 reverse strand)
gaatataacccaaaggtttgggaattttttaaactatggaagacatggattctatccatagcccattaggtatggaacaaatccatgagatattgcacaagtttacattagaatccatggatcaaaagaataactagctttgaaagtcacatggatttgttgatggatttaatcccaccatgagattgggtgtgagatatggattcacccaatccatactcggattaaatccatgatgggattatatcccatgtaaccgaacaaggcctcaatttgaatggaatgattcctcaaaccaaacaccccataagagttttggtgtgctccatttcggacaacagaaaggaaaagtaaggatgctcgtcaccggaaaatacctagcaaccgggtcccgccgctcgcctagtcgtcgctgccgggaaagaataagggcacgagggagaagaaggccgtgggagtttttttcctcattcgtttagtcggtgactggggaaaagaagagcaaaattaattccaactggaacgggcccaagtttgtgggccgtcgaaactttacacaaaatatggcatgctcaactaccaacggaggagttatttgctattataaaagttcgagaagtctcacataaatcaagtttgttggaaaaaaaaaacacaaaaacgtgtctctaacagttcccctaaaacactcacaacttattcatagccattaaaactttctcaattttagctacaaacgacgaggggtcgagtgttgacgccagtatccgttcattttcttcgagtgttgacgccactatccgtcctcctgttctcgcgcccctctcgccggccccccagttcccccgtgccgcctcgtccgtccgcttctgttttcccaccggatcaatgttgctttgtccgtgaattgaaagaatatcgaactgagcggaaaaatattaactgatttaatttcattaaatttttgtttatcattttcgtttctcaggtagcagtgtcggttccagagacgaagcagcccca

SEQ ID NO: 5981 - DNA, 884 bp, Zea mays
  Intron number 1 from transcript GRMZM2G170286_T01 (locus G RMZM2G170286) derived from phytozome v7.0 (chr-ID 8; pos 1 04792911 to 104793794 reverse strand)
gtcgccgtgcacccctccgccagtgatcgtgtcgggtaaatctagctcctcttccgcaccttcttcttgctaggatttcttttttctgttcttgctgcttcttggacagtgacgaacccgggctagaagcatggtaggatctgacgcgaccgcttttactctctcgtgggtgctggcctttttccatatccactaggtgcagatctagatcagttcattataccctgtgtagatctagaatgcttgaatgttggggcgtggggatgagtctgctttcctttcgccagtctttgcaaccttgattggctgccatcatgtcatcctcaccttcgatgcagcagttgatgtcgacctaggaactgcacagagtttattcgacaatatgctcatgaggtatatcttacgcatcccaaaccaattttgccaatgctaaaaagtctgatgacccctctgtgtccatctatgccgtccagatcgctctctctgtgtaccaaaaggaacagttgcttccacaaagttgccatcgttctgatgataacacctcacgaattagcttctgtgtttctgctcttgtgtttgatttatttaagctaattcttatctaatattttatagttaaaattacacgttattgcttgcacgtcatgttcaccacctctctgtcttgttgtaagtagaagctgagctcgagcttacgatgtctttggttgtactgaagattatcgctcagtttattttaaagttaaaattacatgctaaatgcagtgatcacttgctagtttagcctactacattgtttgattactgcattgaccctactatgctcactgcattaaatttactacatcaaatttaatgccaaatcttcaaaatctgagttcaga

SEQ ID NO: 5982 - DNA, 953 bp, Zea mays
  Intron number 3 from transcript GRMZM2G171254_T03 (locus G RMZM2G171254) derived from phytozome v7.0 (chr-ID 2; pos 4 4198412 to 44199364 reverse strand)
gaactctaaagacttgctggacactgagcctgaaggtattaatttgcagtcttgcaaatgtttctgttgcttatttaaggatataatgttgtgtttgcaaagcattaagcaaattatagcttagttttccaatctctaccatatagcgcatatgaaaacatacattgactagtaacaataaggactatcagggcaattttattggttgagtggagacatcattctgcttattactgacaattattgatggcttcaggttgctggatttttccccctgtatattgtgtgctaatttgttattttatactttgtctgggtgcctgggttgttccctctttgcaaaaacctttcctaccaacttaattatccgaagtatggagcaactcgatatcaggcattcgctgtacctattcttttaagagtttctcagcaggaaaatatgccttataaaatattagtttcagcactctggttgtaacttagcatgtcctctcttataggaatatgtgaactaataagcagttgcaaagtcgggaacgctacaaaatcaaagttaagaaaagtggcagaatggatcatacacactaaatgtgctcttggggaaagtcatcatcaggtaaaagctaccagaataatccaaatcagtttaactggagtatggacctgcacttgccttttccacttacacttaggggctcaaccgccgagttttctccatctacactggcattgccagtgctttatatttggcttccgtgctttgcatcatctcaccttggattacaatgattatgagtgaagaaaaaaaacacaactccaggcattgatgattcttagtagtcgttcacaattgagtaggaaataagttgagtattacagtcaatttgccttctctgtgccatatagcattgagatactctatgtactaaaactcgtaaagtactatgctgcag

SEQ ID NO: 5983 - DNA, 666 bp, Zea mays
  Intron number 1 from transcript GRMZM2G401288_T01 (locus G RMZM2G401288) derived from phytozome v7.0 (chr-ID 2; pos 1 47713264 to 147713929)
gcattggcattctacaggtatcaagctggaccaaatatagttttgatgaaaaacaggatagtttttttgtagtgacacaaccgaaaaataatgttggtcaatggaagagggatatctggtccgatatcctaaaattttttcaattacgtagggaaggggtagcaggcccagcccaccagccagtccatatatcctacttacgtacacaaacaaaaataattcaggcaactgtggttttggcaggacaagtttgtggtcgacgggggaaaagtgaatcaatccactttagggtttcacagtcgagtaatctagtcacggttcttaaagcggtaaggcgagacaaggcgttagatcaccgcctggaccaaggttttaaagtcggctagtcgactctagttgcctaagcaccgataaggtgactaatcgcgattagtcgtcgattagctcgattagtcgagcctagtcgtcctatagtcgtccatctataacaggaccatatatataacagtatactagattgcaaaaggacagaagactagaggagggattaccagaagtgctcatctctgtttgagcctttgaggtctgaacagagcaggagggagtggaggatggtctgaactctgaacagagcagaaggaagcctggagcagagattgccgcacc

SEQ ID NO: 5984 - DNA, 849 bp, Zea mays
  Intron number 1 from transcript GRMZM2G300955_T01 (locus G RMZM2G300955) derived from phytozome v7.0 (chr-ID 2; pos 1 76724626 to 176725474)
gtggtccaggtgatggaatgttagatccatcaccctatatatataatttaaaaaaagaataggtcaactttgacataatgaaaagtaacgacacacacaaaatcaaataggtcttctctatatgaaaaatagctcaaataagactcaaacataccagaaacatttatggctggtttggtggtaagagagggggcggagaccgacctatggccagtggactaaatagcctctaaagatccatataccagccagtatggttagctgtgactgctgtcaaaagagctagcttttagtgtctaaaaacctatacattatttttaatgttatattcggttttatactgatagcctggtcctggcttcgccactagtaagtgatccatagccagaaaccggaggacgcccccgagcccggaaaaccgaactgaagcgtccagtctccaagggcgcgaagccgcgcgcgtgcctgcctggcgctggcggacaccctcccgttcaccacttcccattccactccaacctcctcctcgggagagatccgctccctgcctcccctgcggcctcctctttctccgcgcaaactcgccgtggcagagtaatctcgcgccggcccctcgctcatatcggggggaaagaaaggtgagcccatcgcgcgcccctcctcctcctcctcctttggttgcgctatcaggtaaagagaagaaaaatgtttgcctgatgccgtgatgcggactcagtgatgggggtgggatgggggttctagggtttgattgcggttatttacgggtgccccatcgattcgattgagatccgtcctctaatttcgatcttgattttgcaggttcttggg

SEQ ID NO: 5985 - DNA, 741 bp, Zea mays
  Intron number 3 from transcript GRMZM2G140754_T02 (locus G RMZM2G140754) derived from phytozome v7.0 (chr-ID 8; pos 1 0082346 to 10083086 reverse strand)
ttgccgacatttcaatcatcaacagcctaaaggtgattgtttttttttgccaagctagttttctcacagctggatttcccaggcctgtcaagtttcatacagaactatccactggtcttaaaaactaaggccctgactgtttaccctctagattatataatctagcttaattaagttgagatgtaattatgtaaacaaacaatatatattattaagttatataatataaatatctagattatgataatccataagtaggtcaatatgtgcttatataatctatgagctggattatataatcctgaaagaaaacaaataggggcatggcctttccatcccgaaatctggaagtagattggcttttgtgaatcctaaacaatgatactcgttgcaaatgatattttgagtggagggcaccgtagttggacatttgggtgtttctagtaagtcaatgcacatcgtgtcctgctagtgcattcatgatctccgtttcctatgatttgcatcgtttttttttcttttctcatttccgactagatggcactcatgccacctaatttggcctacacagaaactgtcaggacagataaacggatataaaagagtcaataacttgacatatgctgtgcatatcttttttttttctattctgtacctttggagctaggacttggagaagctgacctcatttccgatgtttcgtcaggtgacaaacataagagtcaagaaaggcctcactaa

SEQ ID NO: 5986 - DNA, 695 bp, Zea mays
  Intron number 1 from transcript GRMZM5G864412_T01 (locus G RMZM5G864412) derived from phytozome v7.0 (chr-ID 8; pos 7 6505883 to 76506577 reverse strand)
gctcagctatcaagaagctccaggtgagctccacattttttttatttatgatgatacaatgatgtgttgttgaccctcaaccagtcgctaatcgtttctttttccctacattttagactggagtcaataagcttgttactgctacttcctaactggtgcatagataatttaacgccgcttgtgcggcaatctccatctatatgtgacctgcaaaagataaatccttaaatagtaggtcaattgcgaagctttgttagtgatgatccgatgatcaagaaccgaagcaccttcaaggtacagtttcctttatttgctaaactgtgttaattgttttgttttagaaaaatagtgtagtcatggcatatgtatgcatgcggtgtattaggaaaccatgactacaaaacagttatggttaagtccatataacttttctatgtgctagttatctgatattataatagtgatcttctaatctttttgtcgaactctactgtagagaaaatagaactttgatgtaagttacaaacaggtgaactagacaaaccattctgttgtagttgacaatcatgatatttgaaaaacgagctcacaactatatttcacacaattgatgctccaaattatttttctgtaattgaaacctaatgtaggaatgtgtaggatatttgatttgcctattagagaaagatttgata

SEQ ID NO: 5987 - DNA, 824 bp, Zea mays
  Intron number 4 from transcript GRMZM2G437487_T01 (locus G RMZM2G437487) derived from phytozome v7.0 (chr-ID 9; pos 4 9274320 to 49275143)
gacatccagtgagtagtacagtagaccaaaataataattctacaatggcgagagaaaaggtcgaccttagaagccatctgcgtccagacgatctcttgaaaactgatggaaagtcagaaaataatcagaaggttgtgatttcatcagcttcttctgcagcacaagcttccaaagaaataaatagtaacaaggtgtttctgcccatcaaacttcctgatcctcttaggtcacagaaagcaacatcatctaatacctctactgaagcacagctgatgatctcaagatactctataaggcctatgctacagaagtactttcagatggaattgtggatgataagaaggtgatttaatttctagtttactgatggtgcttgttttgtgtggggacaaattaacataacctgcttctagttatttttttaggagaaatacagtaggggaggcccctactgttcattttatttaaaaaagaatgaatagaaaaggagttacagaaaatgaaatcaaacatgtataggtgaccggtagaaaaggcagcatgcaacaggcaaccaagagagaagtgcacacaagctagtcaattgagcttagccgtaaataaattgaatatctcacaatttggaataggccccatcagaaaattttagcttgactgcaacattaattccatagtgctgctatctactgtgttaaataaggggttttgctcagtgacaatatgttatacaagacatctatacactaatctctgtgctgtcatgctgatattgctgcattgttattttagactgctatattgtcaaaactataccttgactgcag

SEQ ID NO: 5988 - DNA, 817 bp, Zea mays
  Intron number 2 from transcript GRMZM2G470470_T01 (locus G RMZM2G470470) derived from phytozome v7.0 (chr-ID 9; pos 3 6411200 to 36412016)
gacttcaatatcttcttctgagctaagctgtcttggtacatattccctactaatttatatcgttatttttaattttaatgatatacattgcttacagatactatttacatatctaatgtcttttttggaacatcttagccactaggatcaagaagatcctaacctcacaatgatgtgttgttgttctaaaaaatgcatccaaaacagtttcttctttatagtttgtagacattaggtggctatacactttctgtcttgattatacaatgaagcctttagccaatcttatggaaaatattgacctatgtttcattttttatgccacacaatgatttattttttcccaagaccatgccttatcacacatgctactgctgggttgtgaaaaataatttcattttgtcaatgtgcctcaagtcaatcttttgaattttattatcagtctaaaatacttatttgttgtttgtttacaatggctagaaatattcattattactgacctaacccataagacctagctgattgctcaagacagttacacaattaagggtttcattctaaatattcattaacttgggattcctatgttgcagggcaaagcaccaaaaaatcattctaactttatgcttgataaattgataactagcatattagttgttacagtcaagcatcatgattatgaatctagattttattaatgagtcaagcatcaagtacttatgttaaatactcttgcttgcatggacttcttgagcaaaaacattatgtgacgctgttggcaggagatagatactttgctacagattctcaaggagac

SEQ ID NO: 5989 - DNA, 834 bp, Zea mays
  Intron number 1 from transcript GRMZM2G389065_T01 (locus G RMZM2G389065) derived from phytozome v7.0 (chr-ID 2; pos 2 06414901 to 206415734)
cgtgcagctcctcgactacatcgtcaacaacgtcggtccgacccggaacagaaagtatctctctctcccctcttctctcctcttctgcccctcccacccgactggatcgatctgtgttccatttggttgcgctcttgtgggtttggtttatggttcaggcctaccaggctaccaggcatacgaaattgggtctaatctgtttgattatgtgcttgtttgttcgatctagtagttgcgtgagagttgcattccgttcaattggccgttggcttcggatttaccagcgtatgtattcatgcattccgttaatgtttggttcagtggatctgttcgcgccatcatttcaatccgtccccgtgaacggtgttgctgattgaattgagtgtgtacttgcctcttaatttttttgtcagaaatatactaaaccataataaaagttatgttcataaccaaattgaaactcgccagccatgaacggatcagaattttcatcttcgtggtgaaaacatagcatgtctgtggtttggtatctagctgtgcagccgatcagtttatacttgcctcttagtaatatagttttacagaatatgataatttgggataatggatatgttcctaagtaaattggtgttcactagccatgaatctgttagaaatttcctcttcatgataaaatagtgctcactagccaggaatcgattagaaattccttcttcacaataaaaagctggtttgtctatgctttggtatatgaccttgcgactaatggtcggtgtccactaaaaatcttctgtgacagcatttcaagatcgtggacaggagatacttggttgc

SEQ ID NO: 5990 - DNA, 709 bp, Zea mays
  Intron number 1 from transcript GRMZM2G132154_T01 (locus G RMZM2G132154) derived from phytozome v7.0 (chr-ID 2; pos 1 27444816 to 127445524 reverse strand)
gaggttggtcggttgcttttgtttttaccctgcctgaagcgacgattttgacgggtccaaatgcggctcttttttctttctctctctgtccgccgttctcttgaacgtttgcatctgaattccttccctcttgatgaaattcagaattgaaaatcgtttggtttcactgttgttgaattcgattcgattttttttacagcgccttactttatatttgtacagatccattgcattattacagttcgactctggggccgttttcttatctgtcctgtggtttggtttggtatctgctagtggaacctgtactgttccattcattggacacttggacacgttgtttttgagaattcatagtttattagcgtattaattattagagtactgtagccaggactagggataaaaactaatcatcaaatatgcagttttaaaatataatagtatacctttaagagaaaaaaaaactatatttctattcgctatccggcatatgtttccttgttccggtatgtggagattatgatgacaggtagtatttcctggactcgaaacaaaggactagttgttatctgaaggaattgctgttacctgctagacaccttaagtactatattagggtatctttctcttttgatgtcaacatgtgaaaccttgcccgtatattctatcaggtccaggctgttcttctattggaggcggtgctttc

SEQ ID NO: 5991 - DNA, 940 bp, Zea mays
  Intron number 1 from transcript GRMZM2G125527_T01 (locus G RMZM2G125527) derived from phytozome v7.0 (chr-ID 2; pos 2 03629602 to 203630541)
agggttttcagattggtgcgtgggagtagatgactgttttcacttccatttctggatgtgatggctctctcgggtttaacttggtcggtggctgttatttatgtagatacttgtgattcttcgtccgttattttttcttgtgtgtggtagttggatttgtagcgttgcccctatatgttgttagatctgtggagcatgctgcatcacaaggaaatatgcgattcctagtgggacccatcctcggtgcttgtatttctttgtttttagattcagtctagaggatttatgttaaacttgaggtgtgcagcgcataactttgtttgttgaactgatgtgatgctgcaatggctgcttatactttctataagttctcttggatgcactgtcacaattgtacctgaactttggtgtgattcctggttatcttttgttcaaatgcgtaatgcttttgttgggtcttatgatggcatgaatctttgagacctgattattctcatgatgacaaactatacacaatcttctgaggacctatacgttctgatttgagtttcaatttcatttcccaacttatattgaacttgtctacgcatctgtttacgatttgatcttcagctactaagagcaaacaccaagagactacattcttcctaattaatatgaatagaaaaaataccctccaacagcttatctaaatggttatccaaatataaccatcttttattcctggtttctcgctagtcgaagatagaaaacgtgaactgctctctagagtgcaaacaagatatacaaagtgtttttattcaattgaccctcatagaaagtgttttttattcaattgactgctctctagagatggatatgaaatgttgttttaacatgtgcagtttgtttcacatgttatacaggtgaacgttcctaagaccaagaagacgtactgcaa

SEQ ID NO: 5992 - DNA, 937 bp, Zea mays
  Intron number 2 from transcript GRMZM2G112210_T02 (locus G RMZM2G112210) derived from phytozome v7.0 (chr-ID 2; pos 9 0378927 to 90379863)
ggtactgtcaaacgcactgaagttgtgtacaaagacaataccaggatctcagaactcaaaatacatgcctatttcgctccagtgaattaagcctactacaactagtgtaagtaaaatactagattaattattcacacgagcaactataaaggctagtttggaaacccattttcacaaataatttttattttcttagaaaaatagaaatctattagaaaaatggagtttccaaactaaccgtaagaatatctttgcattctccctagtagatacaaatagagatttttctgggaaaaaacagaatcctttacctatgtacttttttattttgatctctaagctaggggatgtttagtttgaggaataactacatcaaagataaaatggtgcatcatgagtctaatccttaaatttgatgggattatccaattcctcgtgttagtactaactaactatagagaataagttgatgatagattaaactcattcaattacacaaaccaaacaaaaaagtgaagagtaagaagatgatggactaacttattgcttaaaccaaacaccctataaatagggtcactcacatatttcgggtttcttgcttgctaaagatgtaaagccaggtcgagagtgcacacaatatacatagacagatgttattcgacggtggaaagatatagagcatgacttttattctaatggcttttcaaatatatagtgagagacagttttatatgcatacatttattccgctggtttcaactcgagatatacaggcatactgcctggatttacactgtaagcaaaatatattgtgacacatacactaatatataggcagcgttatttacagttgattaattatgtatacaatatatataacttttacatatttcattgattaattatgtatacaatatatataaccttgtgtaggttt

SEQ ID NO: 5993 - DNA, 857 bp, Zea mays
  Intron number 1 from transcript GRMZM2G476810_T01 (locus G RMZM2G476810) derived from phytozome v7.0 (chr-ID 2; pos 1 66075780 to 166076636)
cttctcctggtattcttctgtagccgtcctttgcccacatttttttgcttcggtgctctgcgtgatcgctcgctgtggagtgccgttctgcgacatgcgttgctccgttggtttcgtggagtgtctccacgtttggttgttgctacagcttgtaattatggatggtttatgtttcgtgatttgctccatgctcttgcttgcttcagacagtggccctgatgtgaaccatggtgaacccacaggatagcagtttggccatggttagggcttttggggaactgaagttgtacccttttacttggagtagttgattttccatgtttgtagcttgggcatgacgctaaatctgttatgttgacctttaattaagttaggtatgcagcctgcaggcaaccagtaggtgtctggtctcttggtcaaggtcgatttttgttgtaagcataagtcacaaatgtttttgtgctcgcccgtgcatgtgcatgttgtaagggttattacctcttttttctcttaatacaaatatgcacaactcttttctgtgttcgagaaagccagtgtctacactagatcagaatttgggatgcacatcacattttcagggcgatagtcacccgtgcttagttgtttgattctgtatctgtaaatgttttatttagtagcaatgtacttcaagtatgtagaatcatctggtcagttgaatcattttacttatgcatggatgtatagggagcgcaagttttttccccacaaattagaaactgttctagtaccatgcttctgtcctacttatggagacggggagttcccatttcacaatgttaagagggtaatgcctttgttttctttgtttacaggtc

SEQ ID NO: 5994 - DNA, 536 bp, Zea mays
  Intron number 1 from transcript GRMZM2G305551_T01 (locus G RMZM2G305551) derived from phytozome v7.0 (chr-ID 2; pos 2 14158912 to 214159447)
gagtggggtaatttcatttaactgtcattccaatggataactcttgttactattaactctgctttgcttcatggaaaagacttgattctggcaatagcattacctacttcttggatgtaggttttttatgtttaactagaatttagcacaaatggtttgatttgcattggtagtgtattcatcacaatagtgttcttgtactcagtgattttatttaggtagtgtttggttctagagccaattgggatggagtggctccatgccaaggagcagcttcgtccgggagattttagggggtgccggatggttcatcatttgagtataatttttcttttttagagccactttgccctagatggaaccaatccaaacagcaacaaattgagagcgaagtggctccgtcccatactccagaaccaaacaataccttattgttctgctcttctacttgtacttggtcgcatgactcatgaagcaaaagcatatgattcaatcattcctacttatacatgttgcagttggctgtgaaattgaca

SEQ ID NO: 5995 - DNA, 912 bp, Zea mays
  Intron number 1 from transcript GRMZM2G075588_T01 (locus G RMZM2G075588) derived from phytozome v7.0 (chr-ID 9; pos 1 53412673 to 153413584)
gattcagtaatgcaccttgttcttgcttcgctctctctctcccacacgcttataagtcaacaaatgtgatcctattgcctatgcaagttttacttgatgacacaagtaattaaaacctggcatcttacaatcttttacttgataatgataatgaagaaagcaagtccaaagttgcattgtagccccgcagggggttgtttttaattatatcaacaagcgtggctttaattgtagtgtcaaactttgcccaaggtgtttgaattgatcaatgtcgttagcatgataatatcctattatttttctacgaacgaggttaaatgtcatggtatggttgacatgtgtaggtcgtgaggcaagttttagatattttttttaaaaaaatgatgaagaagcttacggttttcataacaataatgttcaggttcctttggcggtcttttgtaatagattcaaacgtttacagtattgtgggtaaagataactctgacacaagtagttaacattgttttttttacaatattcttttatgtcaagttttgtagaacatacgaggaatgtcacaaagttcatatctcataccgatctagaatgtagtcatgcacgcaaaaaattatatttgagtttggatcataagtttatccttttatatgggcacaagctgtgcatgtcttacgatgagtgttcctggccagcagcttgatcgttggattaagaaggaacactcacgatttaaagtgctcacatgagcacggacgtcgcgtgagcacgagatacgttcccttcagtagtaacaagatatagcagcatcactctaccgaataacaaattgtagaagcgttgtgcatgtttttcatgtgacgatgcctttgatctgcagcgtactgcgttgttgctaccgagtcagctggtcgc

SEQ ID NO: 5996 - DNA, 656 bp, Zea mays
  Intron number 1 from transcript GRMZM2G700036_T01 (locus G RMZM2G700036) derived from phytozome v7.0 (chr-ID 9; pos 1 40167040 to 140167695 reverse strand)
tggatcctaagcaggaaaataacaagttagtaaaagtatggcagtagtatataatagccttttctcagttattttgtaattgccacgtcgtcacatatattcaaattttgaatgccaattgccaacgtattgaaggattttgtcacttcggttcgatatttcaatttataagaaagttgaggatcgagttactcatcgtgtagttttagcactaccagtttaaccggtacacactattttttaccgtttgatttatttctgtaatctccatgtatctatatagggtcacaactcactataagcgaaagaattcagccagcaacagtcacagattcatgattatgcaatttaatttcttgaatataacaatagaacagttgattctcttgtgtttcctgaagctccaccaactccggacaggctgaatgactttagagtcttgaaagttcttatcacctctcagaagtaaaattttgaaacattttgtgtttcatgattgatttccttaactttcatgatttaccccaacgagcactcatggaaatagtttatctggtttgccagacagggacttgcacaaataactatgcaatcgtattatgatattttcttaatttttaggaaagtatcttctatactgtagaaacacttggtgt

SEQ ID NO: 5997 - DNA, 431 bp, Zea mays
  Intron number 5 from transcript GRMZM2G374901_T01 (locus G RMZM2G374901) derived from phytozome v7.0 (chr-ID 9; pos 3 9353238 to 39353668 reverse strand)
caggtaatgtgaaaatatagagtaatgtaccaaagtagatcgtaagtacctttattagttcctaattcatatctacttagtgttgggttgactggtttttgtttcctgattctgtgtatcaaactaaatttttttccttgcattgttccaaagtgcagatgctggcgctgcaacagcccaagcggacaaaaagaaatctttaacagcaagaactaaacatacggtggttgttccaaagtctagatcttagtttccttaatcaaagaaatgagcatgtttttgttgtgtttagttggaatagtatgggatgttatcaagcatattctcttttgtaggttgcaatgagcagaaggcttggtattgaagagcctcggctaattaaaatagtcagaacaacaatccatacacatactgaattgcttaggctctag

SEQ ID NO: 5998 - DNA, 374 bp, Zea mays
  Intron number 1 from transcript GRMZM2G135314_T01 (locus G RMZM2G135314) derived from phytozome v7.0 (chr-ID 2; pos 2 25854144 to 225854517)
attacaaaagaaagaagctttttcaggtgaagcattgatgctacttgcattagtagagtgacatgtttcatattagaacacccccttggcttttgaaggcaccatgcatctttagctagaatataattttagattatgtgaagtaatagtaatcaaatacaattattttgtttatcgatttgtttttataagccatctgatttcaccttagtgcttgacactattcactgacttttatcttcttcttttaggaatataccactaatccattttaagcatttcttttatcatactagtattattcatttttcagctttaaaaatatactgtattcatttttttccgcaattaacatcatcagggcagtagctaat

SEQ ID NO: 5999 - DNA, 823 bp, Zea mays
  Intron number 1 from transcript GRMZM5G830250_T01 (locus G RMZM5G830250) derived from phytozome v7.0 (chr-ID 9; pos 1 21049168 to 121049990 reverse strand)
tctgttcaaacagaaagacgtcaagccaccgagaggtacaatgatagattttgtgcaatgagcacgccattgcgcttccagcgatctgacacgttggaaattcttgttttttagcttgcaaggccaaaatttgtcgcttttccgtgtaattctagtgcctatctgcatccattagggcattttagctgctccatgctcttgatctcgtccttgtaatccccgatctgtttgcttgattgaatccattgttttttattcaaaatttgttggtaaaatacgattattactacaagttgtgtttttcgccttttcgggttgcacagaagagagtgctacatgtgtacttgcctacttgggtggtgtttggttcattgcagggagtggttaacgtaatgtaaacggatcccactgctattggttacggtgcaacagaaagcgagatatgtttggttagttaacgttatgtattaacactagctggggagtggtaacgaaaagatatgtctccgtatctgttcacggtgtaaatcgttacagactgatccaaccaaacagaaagataatagataccactgtagatggatcacggataaaaacgtcaaaccaaacagcctcttggctactgccgtccttgttgtagtagtgctaattggaacaagtgagtcactggtagtgcagtatgtgcttttcatgtgtgtttggtttgtaccatcagatgaaattataagcacgctttacacattactatagatatactgtgaggtgcatactagatggttttgatttgttctacagtcaccaactttttcttccttgctcacag

SEQ ID NO: 6000 - DNA, 993 bp, Zea mays
  Intron number 1 from transcript GRMZM2G026065_T01 (locus G RMZM2G026065) derived from phytozome v7.0 (chr-ID 2; pos 1 88871742 to 188872734)
tgagtcttctacaggtacaggatgcgccatttctcacctctcattgcccgcagttagcaccggcagagccatggccgctcctcggtcctactagccctccagtcctcccccgctcgccggctgatcgtttcgggtgtcattttccccaggcggcgatgaccattcctgatctgttgcttgctttaatgcctgcccccatcacgttgtagatccaaacccatctctacccccccccccccccccccccccccggtgcgtcttgataattctcggagttagtgcctccatgtcctgacgcggatgcgggcggagcacaccacatgcggatgtgctgtgctgttgcctcatatgattccggtatgctcattcatacctgcctctcctttttttccccgtgggggagaaaagcgggggcagcgagttgtgcgccctgtgagcttgcagctgttccaggttgcaatgcctgtgctgctcgtgctttagtttagtctgcccccatttttcttctcgttcgctttgcgggcatctaaaaatgttttgctaatctttctggcgctggcccacttcgccccctcctaccctatttttgcgggggatgccggggtgggggcttgtgatttttgagccctcgttctggtgcttggcctttttgggagtgttgatgcggcgttatgggggcgctggatctgttgtcaaacctgagctcgtagcgctagcactagcttgtcaggtagcctgcgaggtgatttcttgggccttggatcctgacaaggctcctcttcttttttctttctttctttttatctcataggtatccgccgccgtttgtttgctatgctcgttctgcattaatgtttccttgttcacttttgtttttgttggattgctcattctgcagcctggttttcttgcagagccttttgtagttctgttgctaacatggtgaattgattttcagactaggacttggggattgtgctgctactcagctga

SEQ ID NO: 6001 - DNA, 485 bp, Zea mays
  Intron number 2 from transcript GRMZM2G026065_T01 (locus G RMZM2G026065) derived from phytozome v7.0 (chr-ID 2; pos 1 88873660 to 188874144)
caacctggaaaatatttctcagagcaagcagcaaagtatgtacttctgctaatgacaagttcaatatattgcataattagctggttagcttttttatcaggagttatgcgatgcttatctgcaggtcgacatgtttgccatgcaattttgtttgatcatttttgtgtggaatattttgtttgtactcacatggtcaggtgcatatgcattttcatgtactgacataaacctgtttattgctgttgtctgaggccgagggatactgttctatgcccattcaaaagtttcttgctgtatgtatttgttgatacaattctacaataatttagataccattcaatgacatgtaacttgaaaagcttttggtgctaatgttgaaatttctgacctatttataaactagatttgtgctattatctgtcttcattaaaacgactttaaattatttggcattgattatctaataccttgatgtttcaggttct

SEQ ID NO: 6002 - DNA, 847 bp, Zea mays
  Intron number 1 from transcript GRMZM2G433854_T01 (locus G RMZM2G433854) derived from phytozome v7.0 (chr-ID 2; pos 1 96134186 to 196135032)
ggcccaatcatcagtgtagctgggcgcgcgcgaaggtctgaccgggcaggcccacagaccaggcggagtcacacgtacacgcgcggtgggaagacaacgactaggacgccgcggagtatggcacgtgggacccgtggatcagtggtaccgacgcggaagcgggtgcgataggtactggcgggtaggcccgacccgtcagtgaggcggaacccaggcgcacgagatgaactgggccgagttcagggagattaggcccaggcgcagtttttttctatttctcttttgtttttattttttttccctttttgattcattttcttttcatttgaatcactaattttaattagagtcttgttatgaaattcaactttgaatcaaatttataaactcagatctgtataagaataatatatttttatgcttatttttatttcacataatattcgtttgcttccctttcctaaatgctagggtctccttttattttccaaagtctattttaggaatttaatatatttctttttttccaattattttatgttgtcacaaaatgcacacaaaacaaaatccaacatgatgcatgatttttttatccttcgttttagttcatctctaaattttatgtatgctctttttatgatgcaaatgaggcacatataataaggaaatcactatataatccctttatacaattttgagtattacaccagaatccttgattcgttctatactatcgtgtctatatatagttatattttattgatatcgtcttagtcttgttagacctgactgttgttgtataatacatggttggttttatgctataatggtcaggttgtatcttcta

SEQ ID NO: 6003 - DNA, 928 bp, Zea mays
  Intron number 1 from transcript GRMZM5G838403_T01 (locus G RMZM5G838403) derived from phytozome v7.0 (chr-ID 9; pos 1 47611080 to 147612007)
gcccgacgacgaccctccccgctgccttctccccggtgaggatctgctctcttccttccctctcctatcctctgctctcgcggcggcgagccccagcagggccggcgtgggccggccgacgtcgagggtgttcggcgtcggtagccgccactccgaggaggacctgcgggacctcgtgcggttccacgcaggcgcggcgccgtccgcgtcggcctctgttggaagtgttggaagggtgacgtcgcctgctgccaagaggaggcgcgggaccaggccgctgcagaggatcgacgaggatgcggccgtcgtgctgcacccgaccagctaacaagctaacctctgtcttggcagcaacttggttcaaaagattcctaggtttgctcgtgtgtatactttgatttggtcctctctctttttcccctgcggaacgagagagtagcaagcagtttctagagtcatcgagcgctctggcatattacattatttgctgcaatttgacatgctgttgaattaggcgaccagacgaacaattttcgctctgtgtaaatttgctgttttctagcttgtccgcttcaaaaatgcagatagatttatttctgttctatggactacgggtcaagtaatattttcctttggctcgtttttcaccgacggcattggaccgtggagtgcggactgatggcgagatcattgtttattccgaaaatgcatgtcaccttgagttccacgctattgcttactgctagctagtatcattgctcagcctctcaagttcttgttcagaaacctgcacttctctgcttgtatatatcaagtcgcggcgaatgtttttgaactggttgctagctagtatcataagctaatataatcccatgtctgttgctgccgaacagggcatttgctggagctggaaggcggaagcgttccc

SEQ ID NO: 6004 - DNA, 889 bp, Zea mays
  Intron number 1 from transcript GRMZM2G310155_T01 (locus G RMZM2G310155) derived from phytozome v7.0 (chr-ID 9; pos 1 51560267 to 151561155)
cgcctcgagggcccacatcgctctctcagttactaccctgtggattccagcgcccgcgcagccagctactgcgcctaaccagcatccgaccccacctgtgcaattattaccagacacacataccttaatgtttataaataaacaataattatataaaaaatagcgcagagggagcaaccaaacccacatccttactccaaaaatttggaactaagcactagaccacatgtgacttagtgtttagatataaataataattatatttaataaatatcttaatatttatttatatgatatataaaattgtagtaaaatacagacaactaactagtactctatgaaattaaatatagaacagataatatcggtccgtatctgctgaaacaaactctggaacagctgaccgttgctcgctacgacggcattaccttcatgctcgaaagctggcacgaaacggaacagtgactgcgatgtaaagacatgcggggaaaatataacaagaccaaactccccattgtactgacaggtgggtcacacggccttctactccaaccaaaaaaccaccacccacatgacccaggagaaccccaccaatcgggtccggccagtcggccacggcccacacgcacccggtcccactccaccaaacgcgcccgctgccggccgatcccccataataacgcagagatatttatctcttcccactaacatgtggggttaaatgtaatccggacccacatgtcataacttggcggccccacatgatcagaacggcccgacgcaaaccgaaaggcctcaggaaaaaaaccaaacgcacgcaaagccacacgcaccccgacccgacccgtttccaggccatcacaccaccgcctcccccgtccccgcctcg

SEQ ID NO: 6005 - DNA, 581 bp, Zea mays
  Intron number 2 from transcript GRMZM2G118865_T01 (locus G RMZM2G118865) derived from phytozome v7.0 (chr-ID 9; pos 6 1783739 to 61784319 reverse strand)
aggtaagaattcagtactttgatgcattgcacctagcacatatatatatcttaatcacgtacttcaatgcaggaaacagggacactgtttagtttctttgtgcttttttcccagctatcgagtaacctttaatagtagaaattaatggaaattcaattcatattcataggtttgtagtgctctctcatggtacaacaaaactttttcttggaaaactagtacatgacaaaacagaatactagtattgagattgatgttcatgcaccatgagatttcaggttacatggaggttttatgtaaaggttttatgttcatgcaccaaggcttagggcttgtttgtcacctcatcttagggcttgtttacttgcaccaaggttttatgtttagattgcaccaaggttttatgttcagattgatgttcttgcatccactatacttagggcttgtttgtcacctcatccaaaagcaaacatttatatcttctatcatgttattcagtgtgcaatttttacgagtttgatcccttgttttccatccactgaataggcattcttcggatacatcggatcaaatcctgctgg

SEQ ID NO: 6006 - DNA, 512 bp, Zea mays
  Intron number 2 from transcript GRMZM2G025014_T04 (locus G RMZM2G025014) derived from phytozome v7.0 (chr-ID 2; pos 2 32642628 to 232643139)
ctgtttaaatttaggtgatttttgggaattaacttgcagatttattaattattatataggtaaaaagtgtagtatcagttactaggagcaagaacttgccctgatgacacagttattttggtttttctcctaatatttaaccttttgagtaagtgtgcagattaggtcttaaaaagggattgcgattaagattttattgccagagcctgagctgtagaattttccatttacacacgtgactgtacagggggtaaacttgcaggaatattacttggtgttcctataagatacacatgctgtgaaccctgatttgttttagctgcttttgttcgtttttgtctacttagccttgcacactgaggacctttattgaggtattccttgatccccatggttctagataacaaaccatgagtttacatcattatcccctctatctcaccttatattgaacatggtttttgatactattcttctttgtgcttgaaggttgccggtctgcgagttgaatc

SEQ ID NO: 6007 - DNA, 745 bp, Zea mays
  Intron number 1 from transcript AC199060.2_FGT001 (locus A C199060.2_FG001) derived from phytozome v7.0 (chr-ID 8; po s 68860315 to 68861059)
agggattactcgagagggtcaggaagagaggcgaggtagctctacaccatcaccaggccctgggagcggtggagcaccaaggaatatgcccgcttcgtcgaggctctgctcatgtgagttgtgagaagcaggcacaactaggagccttctggttcagaactttctctcgaaacaagtgtgaaatgttttgctgtttagtgatgaacaggagatgaatggacttgatggccatgaattatgtgtttgttttcttaggtttggacgcgtctagaagaaattggggagcatgtcggcaccaggacaacagtccaggtttcttagtttcatgacaatatcataattggtgttgataatgaagtatccacatagctctattgattatattgtcaccctatctgtgtgaggactgatgagaaaatgcaattggaacagtcaaagtaatatctaattatctatcaattatcctatttgcatagcagcacaacttttgtatcacttttgtacgaaaaaaacaatatgtgactggctcgaattggaacatgtcccttctaaattgacatttttggtatttactgggctaaaaaaaactggggctctagcatttcttctgtcatgtgttgcttaccggtgagattgtgttgttcaggaaacaaacttaatcatcattttcctgactacaattacggatatttgtttaccttttggattgtagttgaagataatccttcccacatgcagggttaat

SEQ ID NO: 6008 - DNA, 614 bp, Zea mays
  Intron number 2 from transcript GRMZM2G148985_T01 (locus G RMZM2G148985) derived from phytozome v7.0 (chr-ID 8; pos 1 74277863 to 174278476)
ctggtacttcaggtcggccacgcacctttaagaaggtctgtactattctttcaattaatttgttgcgcatgatgagtgctacttctattcctcgtgatcttttttcactcctacgagtgaaaatggatttcttcatcacttgatttggataatatcaaatacaattttctccaactcatatttcttctccatggatggtcactttctagaatgggtacagtgattcgataattttatggagtaattatgtttggtgtggactgtggaaaatttgtgttatgtcccttattgcaatttaaattcaatttttagtttggcaatcaaattgttccaaaagtgttagccaccctttgttgttgaggtaatgagggggttccacaagtttgctattatttttgctcgatctaatgcatgcatatacaataaaaatccatgatcaaatttggtgccattaatcaatgtcatcataaaagttttcatcagctagacatgccactaaataaaacaactcacctatttggtcattacctagctgcaaatttgattgtggtttctatgtccttgctataatgattgatttgttttgaaaattaaatagaaggaggaagaggaag

SEQ ID NO: 6009 - DNA, 377 bp, Zea mays
  Intron number 2 from transcript GRMZM2G010428_T01 (locus G RMZM2G010428) derived from phytozome v7.0 (chr-ID 2; pos 2 16560850 to 216561226 reverse strand)
agaagataattcaatatattattggctctggagtaatatattctctcttttttatctattttttcttgtctatttaatatgccaagtcttgacatgtacattcattcttctgaagtgtttattttgggttgtttggagtttggttattggtgaatttcttttgatattaactcactatgttgccatttttttgagcaattattgttctaaaattttgaacaattattctatttcagttgggtcattggttgtttctcttttgttcactttgttttttaatctattctactgattataactatgtaggactaatatatacttcctttactgcatccttttcaggattataggaccaagaataatccttatcttggttt

SEQ ID NO: 6010 - DNA, 554 bp, Zea mays
  Intron number 1 from transcript AC213612.3_FGT002 (locus A C213612.3_FG002) derived from phytozome v7.0 (chr-ID 9; po s 43480107 to 43480660)
tggcatcatctctggctccgccactctggtgcactctatggcattagaggcgaggagctcgcagtccgccaggcctggccaaccctctcactgttaccctctctcagggcttgttcggttattttcaatccatatggattggaggtgattgatacagattgggagatattttgacttactagggattgaaaccccctcaatccatatggattggggaagaaccgaacaagccctcattggtttcttctcccaccaggccaccacaacctagatcccagtcctcggacatgttgtgggggttgctttttcgatttatttgcaagagcttggtggtgtctatgatgttggttggatatagttagtagaagtgcataatcatagccttcagattttataaattattccttaatttgctgaaagaaagatgatgataagcctttattacatagaccagaattggtcagttctttgctgatagtagttcgtctgttgattcaagtgtatttttcttatttgtatatattatgtttgattgtatctcacaggtttgaggg

SEQ ID NO: 6011 - DNA, 797 bp, Zea mays
  Intron number 2 from transcript AC213612.3_FGT002 (locus A C213612.3_FG002) derived from phytozome v7.0 (chr-ID 9; po s 43480769 to 43481565)
acggtaagatttgcaactccctgtctgtctgggtctgtgagctaacggacttgtgccaaattgttagtttatatgttcaaagtagatagaagtactactttcctatgagttagtttcagcaacaaggatgtggaagtaaaccaactgctgctctaacggttacatgcagaattgcagaccatgagttcaaccccatcttttcacatggcactcatcagactctttatggaatagttaacattagtgttattaagaacaaaagttagattcataattaagtgagtctataattttgatgtccatataaaggagcactcatgtactagcgttgaatagatatttagctgaaatgcatatttatgtaataaatgtcagcaatggcaatgactatctaccaatggacatcgtggagctatcttccgatcatttgatagaggtacgacttattatcctactcttaaatatggttgatggtcatcctgttttttgacatcctaaccattattgttttgctcacccgaatgggtcttgaccttgtttctggcagaataaacctttgctgctaaaggatgtcaagttctaaaacgtacacgggtatatacatttcacagtatatatgtttttgttaccccatttatgtttcttaccattgtttttatttaatggtcttttgttattatttcatcctgactatattcattgtggacaaccaaagtttcttctacccaatatgtatagggaatttcagtgaattttgatacagattcttctgtcttgttataggcttaccagtgctt

SEQ ID NO: 6012 - DNA, 1015 bp, Zea mays
  Intron number 1 from transcript GRMZM2G103728_T01 (locus G RMZM2G103728) derived from phytozome v7.0 (chr-ID 2; pos 1 85493732 to 185494746 reverse strand)
gctaagtttattgagcgttcaaaggaacaccagcggtaagcaaatatggctataccttgttctagtttttgttgcaagacatcatgtgaatgttcatgacattgaatctgtgcaagttgctataaggttacaatagtttgggtttgatgtgagtctatgaatgaatcactaatttgtgctacaatctgacatgacatattttgcttctttgcattaatgcttctaaaaggaagtgtctttaatattgaactgtgttgtactccctccgttttaaattctaagttgttttgttctaggtactttattgcccatgtatatagacataacatatatctaggtgcatagcaagatcgatgtatctagagaagccatgacgacatataatttggaatggagggagtaattcttcaatggaagtggctctaattatattaaagaaagatgttgtaagttcctaatcatctcccaccaaatttctcatgtggataggctggatatttaaacttgaactgaatttatgacattgcattaagggattagttgtgcttgactggtcttcaaagtgatatgtggcccctctttcactatgcctgatttcaccaatacctgaaaatataagaaaaatacaatgtctacaggtctggcctttgagtatattttgaccaccagtaggcatgtttaggctcaggatctgaaccagatcatgtgataaattaacaggtctggagttcagactattttagtttggattttgcaaacaccacaggactcccccctctttacagataagctgtagtatgctttgagaaacaaagccactcgctcgctgcaatgccagaagtagccaaccttgtgcgcttttaggtgtgagctacaatagcctttctggaatttaactatgtggtgcatataatattttggtaagctatacagatgatcaggactgttagcctgacgacattaatcttcccatctcacaggcgtgtgcaggaacagagcaaacttgggcgcttat

SEQ ID NO: 6013 - DNA, 707 bp, Zea mays
  Intron number 2 from transcript GRMZM5G830874_T05 (locus G RMZM5G830874) derived from phytozome v7.0 (chr-ID 9; pos 1 50442953 to 150443659 reverse strand)
aatcagctggaggtctgtcctcagtgtcctcatttgtcaactatgctacatgtctaaagttgttttgtcccatgtggccatgtttctcgtttctccactatgctgtttgtatcaaattgttcttaccaaaagctgcaccaactgaaactgtcatgctgctgacgactcaactatctatgtgaaagatcagcttaaagagatgctactgtgcacctaatgtatctgtatcactaaccagttctatcttggatgattggttctgaaattcataacatttcttaaattatgtttgttttttgttttaaatttccaagaatactgtaaaatgtcttattttagtgcaggatcgatcgtacatacactcgtattgctggatctatgttcaggcatagtgtactagtagctcaaatataggaaaatgcttatcctctagaaggcgctgaactaccccccctcctccttgtgtccaggtcaatctattcgctgtgactccgtgtactccggttttattctacttttgaacaagaacgagcgataatgaaacgattaattattcctttgatcttccttctactaacaaaattacatgtgccgtgtttgcacacgattttattctagttcgagcatgcttcacagaaatggctattgtacttgtttactgcatggatcttctacatacatttatgcctaataacagagtaaagtcg

SEQ ID NO: 6014 - DNA, 591 bp, Zea mays; identical to SEQ ID NO: 4328
  Intron number 2 from transcript GRMZM2G151434_T02 (locus G RMZM2G151434) derived from phytozome v7.0 (chr-ID 2; pos 3 8977774 to 38978364)

SEQ ID NO: 6015 - DNA, 770 bp, Zea mays
  Intron number 3 from transcript GRMZM2G703442_T01 (locus G RMZM2G703442) derived from phytozome v7.0 (chr-ID 2; pos 2 33258374 to 233259143 reverse strand)
gaagaaacaatcaatagccagagaaggtagctgcattctatgatttcagtgaatttagatctttagtacgtgcttcttggtataaaattatttatagattcattcatttgatctaaacaggatgcagctatctaatatctatgtcattctagcagatatttgagcatatttacaaattattgttgtagaatcgccttacctgacctttgtcatagctatcaaggagctttaaattaggctttagcggaataacaacaaatttaaaacacctttcctgtaccaaacctcctccccaacactaggtcaactgatgatgattctcaatcacaacaatagaataacaatatatgagttgcttcacccaaaaaatgtgagcacaagtatgtctatactagctactacatatatggccagtgtgtaaatcgaaccatgtcaggccacactacaaaacatcattaagcgtagcaacacgacatggtgctaggtcacaaggaattctcatggttctgtgcctgctgctacactgttattttgctactctccaccttgtactgggccttcggctccaaatcgatgaactgactccaaaatttgctagctccaaacaattaataacatagaccggtgcaaaactaaaaccttaatgtggcggtacattgttctccagatcacttgctagctacaaaataaattatctggcagtgaaaggcattctgttagggtggaagattattttgatcattaattatgtgtttgttttagtaggtgtc

SEQ ID NO: 6016 - DNA, 1008 bp, Zea mays
  Intron number 3 from transcript GRMZM2G152306_T01 (locus G RMZM2G152306) derived from phytozome v7.0 (chr-ID 8; pos 1 68044670 to 168045677)
tgttgatcgaattgcacggttgctgtaccctaaaggtgcatttggcttcgaatgctccttggagagagcaatacaagagctaaagaactaacgccccgtttggatcattggaattgaattccattctaataccagtaatttaggcatatatcaattaagctaattcggttttatgcaaaatatatttgtatactattattagcaagatgttggagatatttatgtgctacatttttactataggggagtgagacgaagagtgtcatgtaagttatagattagaaaccaattctagtaatgcataaaatcatttcccaccctccaccccatgaatttgagataggcttatatctgaactttagaaagtggtggaatgtcaaattccaaactaaataagttactttattaagtgaattccaattcctctaaaatgaagggatccaaacgccccgtaaagtgatttcaatatccaccaagtattgttctttcttgacttctatacttctaccttataagctgttgcatacttgcattgtctggtgtctttgtgactgaactatattttaggtctttccatttgcagtgtctggtgaaaactaaaacatttccctgcgttttaatattttgctctggtttaaaataattaaatgtaggaccgagtagcatgttcatgttgtattaatggtttgcattgggcaaataatagttttgattttgagaaacacactattgtctgaaagttagggtctgtttggtagagctatgaaagtgattctgattgaataaacttcttggaggaagtgaatcaggagcagtttttttaagctcctaacattttagttcatttcagggaatcactcctacgacaccactctgggggctgctctaggaactttgccaaacatgccaatcttgtttttaactctatagattgtgtatttactttttctttaacttacagctattattgtcatatggtgatgtgggcacaaagggcgctctaaaggg

SEQ ID NO: 6017 - DNA, 513 bp, Zea mays
  Intron number 1 from transcript GRMZM2G431468_T01 (locus G RMZM2G431468) derived from phytozome v7.0 (chr-ID 2; pos 1 75407644 to 175408156 reverse strand)
tggagacaacccacgctggaagattgttccctggtgtaagttctctagaatttgatatgcacatatctatagtttcttactgcagcattatttcatccatattttacgcaccaactgtctttattggaaattccagaagattaatcactttcagtagtaattgtctttttttactacttgtaagtttgatgtattgcatataaacaattgtcatgaattgttgagtagtttgatttgttcttgaaaagcttgttaacagctgtcttgatagtatttctatttacactatcaaaatgaaatgctccttatgtcaaaagaagacatgaaaagaataagttgtataagatcttagatgttgcaaaatatcatcatcaatgttatatatacagcagtaaactacatgaactaatctgaccttttgaattcggtaataccatcatactctgctataggatggtagatgggtcttgtcaactaattacagttccttctctgttggtaggaacaggaaaa

SEQ ID NO: 6018 - DNA, 1028 bp, Zea mays
  Intron number 1 from transcript GRMZM5G854185_T02 (locus G RMZM5G854185) derived from phytozome v7.0 (chr-ID 2; pos 2 00088172 to 200089199)
ccaacttcaaaaactaccaggacgtagctctctcggtgcgtccctcacccctcccgccaccctcccactgtcccacacacaccattgtattgccccgtcaacttgtacttgttctatcgtctcgttacactttgcaagccgatagagtgtaattagtgattaagttgctgatagagttactactagcaatttgtaattatcaagatgggaacccttaactggcattggagaaacaactacagtcacgctcgggttgtctctgttttgggctactgacatagaaaatgataatctgtagaaattcacgcaatgacggtagttaagcttgagtcatgtttgtcttgccctgcaaaacatagataatgatgctctgcagcctgcgaaaccagatcctctgggtccatgatcaaacagaactaagtggactcagttgcctaccataagtccataactaatagtggccctcccagaggggattgttgtgccttgatagatcactcaaggaaatgaatgaacttcacttatattcactatgcttatatgatgggggatcagagtttatgcctcatgtatatctgcttcttcttaggtcatgtatcggttagttgatgatattattaggcaccattaatatctggctgtttgtgtatttggttttttgatcacctgttaaaaggaacatattgacaaacttatgttccatgtgataactttgtaaagttcagtagtatttaactttgatttgctttgctgcactttctcaaactaaacaaatgtgtgtagtgtgctctcattgtctcattttatgtgttcagtatataatcttatgtaatctcgatagaaaattgtcacgttcgatgccatggtacacatatgcttttgatgcagaaaaagatatcaaagcttgatcttcagtggatctttcgactttagctgcttcgccttctcaaactctattatgagttttgacatattttccttgactggtttcagattttggagagaagtgactacaccactatcagtgg

SEQ ID NO: 6019 - DNA, 781 bp, Zea mays
  Intron number 1 from transcript GRMZM2G404775_T01 (locus G RMZM2G404775) derived from phytozome v7.0 (chr-ID 9; pos 1 56573457 to 156574237 reverse strand)
ctggagaaggggcggcggctactgtacagtagggcaacacagagtttctactccctctgtcccaaaataaaattcgttttccttttttagtgaattcataaaatacttgtatgtattctatatatgtgtctacattcatcatcatcctgatgaatatagacataaaaatcaagatctaaaacgaatactagtttggaacggagggagtactttttaatgtagagatggtgggccggccaccggcccatagaacaaaggacatattacaggcccaaaccaggcataaactagtcggtcataacacctaaccgggcgactaatcgcgattagtcagtgactaggacaattaatcggttcctagtcgccctaatcgagtcgaagctcctaatcgtgcttactccagcgataaggccgactaatcgtgactaatcgcaactagtcggacgactttaaaaccttgcttggttatattcgtgtcctccatgtccccatgacatctcacttcgctgacatcttcaccaaagagctgccttcgtcagtctttacggagttccagtctagtctaaacgtttgttgtactgacacttcgactgcgggggcgtattagatagccaaatatggctagcgtgtgtgggtcatgcaccaggcgttaaccgtcggccgaccctgtgtatatttggttagagagatttgattggtggatctcctcatgtctatgatacaggtgattgaggggcctatctatcatgttgagttgaaaaggagcggaaaagaggcagac

SEQ ID NO: 6020 - DNA, 967 bp, Zea mays
  Intron number 1 from transcript GRMZM2G388207_T01 (locus G RMZM2G388207) derived from phytozome v7.0 (chr-ID 9; pos 4 5532856 to 45533822)
ctcaggttcgtgccccttctttccccttcttcttccgcgaaaggtccatgttttcaccgatctaggaggttttgatcgggctttatggctctgttcgtcgagatcttgggagttcatggctggcgcatttctccgtagcccgaagccaaaaattcccccaccccaaggccgcatcctcctgcagcctgctcgaaaccctccttcctcctcctgaattcgtcaaccggtctcccaaatcggagcgacaatcggattgttgggtctcgagactgagctgtgctccagtctgtgagctattcgttgattttccagcgtgaaggcgccggtctttaggataactttctcttgccccgttggacgtggactcgtagagtatcagaaagaggtagataaatttcaaaattggctgtaattaggttttaagattaatatatttgggttttagcgtgtgattgccccctgttgatacaaaggggattttccattgttatgctgaatgtcactgaattgagtcatttaggttttttctgaaggtttcggtataaagcattttgtgatttattaggtaaatggtgttattttgctccccactaggcaaataacggacaaatgtaacgttttatgcctgcatatggccaggaatgattcatccattcggtgggatttaacaaggcttactgtatttttggtctagccatatgatgataattttaagtggtttctccatcatatgctttttttcagggtggacattctttgtttttttattgtggcctacaactttgcatgcatgggaaaagctatgttttttactgcatttggcttggaaagtttggatgcaacagtgcagcaccatttggcatcatatttttggggcttattgtatagaatgattgttgtctaattttatgatttgactgttgcgttggcagctattagggaaagactccactgacattgacattgc

SEQ ID NO: 6021 - DNA, 988 bp, Zea mays
  Intron number 1 from transcript GRMZM2G017982_T02 (locus G RMZM2G017982) derived from phytozome v7.0 (chr-ID 9; pos 8 2093462 to 82094449 reverse strand)
cgccgggcgccgccgacgcccccgaagacagcgtcggtccccttcctctcccctaggagatctctgtttcccatctgcacttccgagttccaggctcgcaatccatcctgatctgattatttccgcagccaaattgctatgctaattatatacgatagagtaggcttccaaccgctgaggaatttcgttagtagttgtttccgtttgcagcgattatgctacttggaatagaaactctctggttctgtttgctgaaacaaaagttgctagcttttaccaccgatctgatgaccctactatagattttacacctaccctcaactagtgatgctaaatgttgaggtatccatgctttgggttactggtaaatcattgctgcgcttatacggtgaaatggcaatgtcaaagtcacattttagatggtgcacgaatacagcacatcttcaatctttcagagggctcctgctatttgttagaagtatgatactgttttacgacatggttgtggtcaggatattttgtgaaaatgttaaactgaacaacatagatgcccatgagcatgcatcctattagaaatgaaagcagactacttagatgacagttcactaagggtactacataaactggatgtatcttcactgtcctgaacagaagtcttgaatatttagtcaaaataaaaagaatctcaacactatgagtacctgtaatatgtgtgatgattttggttaatctgagtatgagttaccctgaaatgcctttagcggagctttctgacaaatatcgatctcacatattttttttctgatcaggtgatgtccatggccagtactctgatctcctgaggctatttgattatggtggctatccgcctcaggccaactaccttttcttgggtgattatatggatcgtggaaagcaaagcctagaaacaatgtcttcttttggcttacaaggtcaagtacccggagaacttctttcttctaagggg

SEQ ID NO: 6022 - DNA, 930 bp, Zea mays
  Intron number 3 from transcript GRMZM2G153648_T03 (locus G RMZM2G153648) derived from phytozome v7.0 (chr-ID 8; pos 1 74176377 to 174177306 reverse strand)
ggacccaaaaggtgaacactttttatagatcccaccaataatgactgttgatggctagattccatcactatttcacgcgtcggaatgatttgtggaaagaagagcccactatcttcatcttatggaacttgccttaaagtcatctattgactattgtgcacttgcacattagcatgtacaatatggaacaaaagaagtctgcattttcatgagccatacattgtattgagccacatatttttattgttccttttggaactgcaaaatgcacctagcgctgctgtgccacgatcgttgtgccgtgtctaagattcccattgtcactttgagcgatcttttattgaagttctggaccttttggcaatatgagagatttctttcctgggtcgacttttgcctatggtttgctgaagtcgaactattgatgggtttacaaatagcgtttataaatttgaatacaacgtcatcattaattacaaatttgaggaaaaaaagagactgattcttttgtattggtccagctggtaatgatgacgtgtgacggtctctagatgggaattagcagattattatcccgtcacctcagatcttcaggtccgttccgattttaaggaacatccatgacatgatacgtttattacaattttctagcaaatttctgttttcttacaaaatgtcctctgtggtagctgattctgataggcatagcgtgcaataatgatgtttatttctccaataagggctagttggggaactccaattttttgagggattttcgttttcccaagggaaaatgaactaatttcccttgaaaaaaatgaaaatcccttgggaaaatgttgttcccaaactagctctaaatattatgttacctcagttgtatttgttttcttgactttattgcatctctataggcctgtgattagtgcg

SEQ ID NO: 6023 - DNA, 1008 bp, Zea mays
  Intron number 1 from transcript GRMZM2G450108_T01 (locus G RMZM2G450108) derived from phytozome v7.0 (chr-ID 9; pos 8 6360277 to 86361284 reverse strand)
aatcttgcatctgcaggtaaattgtggaacaaataaataccacaagtaaatctgcgcacctcaggcatgttgactattgacgacgcaattgaggacggtggggaagctactattgccgaccgcaccttgatcgtgggcatctcgatcccaaccctacaccaatcaaatgtgcacgcgctgagattgaaagaaaatagttgtgtttctattttctctttcaaactctatgtgttacattcagatcgagttcatgtaactttctagaaaaatggaaagatgagtgctaccagacatggtgtaaattatgaagaaccatacctgcacaatgaacttgaggttcttctcccttcctactgaaaccatacaagcatataattagtcaaaatagcaataggttgattacatccatctattgagtagaataatttaaaagaaaataaccaaagatgataatagctagcatgaacataacaaaaaaaatagacattggcgtatgggaaagggaaacatataacggtaattctaactccacatattacattcagatgattgtaatggcatttttaactaaataatgggattgtctagaaattgtaatggagctactcaatatatagttgttgcttcccgttacatgcttggggtatcaagcaataatgggaaaattaccagtctcaactccagcattgatagtgacaaaagtaatggaggaagcaccatatctgaaccaaataaaaaatctgttgccccaaaagttagacaagaggcaaaacctcaggtatgtatgctaaagctcataggtctaattcagaagtccgggttttcaagttcctaacaaacattgatattttagttgataaaacctatataaaatatgatttgtaagaaataacagggatatgatttgtgagctcttatgaattttatacatacaacggtttgaaccaaaaaaactatccatatcttctgaaaaggttaaaaaacaatgcttgatgattactttcagga

SEQ ID NO: 6024 - DNA, 992 bp, Zea mays
  Intron number 1 from transcript GRMZM2G362398_T01 (locus G RMZM2G362398) derived from phytozome v7.0 (chr-ID 8; pos 1 42192786 to 142193777 reverse strand)
agaggccaggtacattgtagagatcttgtttcagcaatgccgcatttaataatgtgcccattttcatgatctgagtgttcaattgttcatccatttatcacccgtttcttgcttttttgttctttctataagctatcatggcatagtagtttatgcagctgtagatcactagcttggcagcgacaaagttccttgtgagacctcagagaacctgttcccgagtatctccatcatattgttgttcctgccatgagtttaggtgtcccttggtccattctgcatcattttattatatgatcataagtagtataaacatagggaaaagtgtaggaactaaagaaatgtctcttagattcttggtgccaaagctgaggacatgttgatattggggactgctttccactgacattgttttgattgttgaatgatttaattttgatctcagttttacttggcatctaaaatgtttgtgcaacaggttgtcgagaaaacctagtgtacgataggcggcatagaagaattctacgtgcatgggtgcattgatgttttcgtgcatgtatattgtcgttttttgagcgatacaacattaattaattaaagactattttggagcgatacaacattaattaatgactattttggcctgctataatttttgcttgtgctactgaaattatttgagcaggagatgtatttattgaatctattgtgtttcttccttctatatagttctttatttgaattgcgtgcaattttgttccttgttacatcatacacacatacatggtatatactttttgaggctagaagctaacagatgctcaagggatcctttcaattaagattaaggtttctcttagacaacccatcagttagcgctaaattcactttcctagcacctagctcactgcaccagggggaaaatatatcttgatctagattttatttttagtttgcaaaattcacctcattcctttgtttttctcttgcag

SEQ ID NO: 6025 - DNA, 716 bp, Zea mays
  Intron number 1 from transcript GRMZM2G443903_T04 (locus G RMZM2G443903) derived from phytozome v7.0 (chr-ID 2; pos 5 028945 to 5029660)
gctggctgctcgaagagcagaaattttggctactgcgcgactaatccaaaggcgtataaagacacatcttatgcgaaaggaattcatcaaattaagaaaagcctcagttcaatctcagaagttctggagaggtatttcttcacaagtttgagcaccttgtgccctaaattttagttgtcagcaaaactggccttaactgaaactgacatacaatttaaccaaatcctgcagcacgactagctaaaaagatttttgagtatatgaggagagacgttgcttcaattaggatacaaaagcacgtgcgtgcgcattctgccagaaaagcgtacctgcaagtatatgaatcagctacagcaatacaaacaggattacgagcaatggcagctcgcaacgaacatagattccgaagagagaccagggcatccataattatccaattatccaggtttgcactattatgcctatcattatttgcaaatggtttttctaggaaaaacataatgaacagttccttgaatcacagactcggtggcgccaacacagagcttatgctgcttacaaacagcaacagaaagcttctttgattctccaatgcttgtggagggcacgcattgcaagaaaggaacttcggaaactgagaatggtctgtagtacaattatgcatcttcaacacaagcacaccattcattgttaatgctcataaagtaagcataacc

SEQ ID NO: 6026 - DNA, 924 bp, Zea mays
  Intron number 1 from transcript GRMZM2G129268_T01 (locus G RMZM2G129268) derived from phytozome v7.0 (chr-ID 2; pos 2 20618323 to 220619246)
gctcaggagggccgccgactccggcgtccgcgcgggtgagtgagggctctgttcgccgcgtccgtcggtggatgcccgctctggtgtttggatctccttccaggtcggccggtgtgtgccgtttgcgctggattggctggttggttcgcacgacggcgagacgggtcgagttgttgggctgtgtgccagccatgtggttgcttagctggctactgggaatccggttgaagctttgaaattgatttcttaatttttgggtccccttttgcgacgcggtttctggttggtgagagggatctgcagcagtagaaaaaaatgtggtgggctgttcttcctgatgttaaactggaagtcgtcgagaaattactttcatggtggaaatttgaggattctgatcatagttttatttcctgattttgtttgtcagacgagctaagttgatttcggagaaaatatttatttccttggccgtggtagatttggtcacggcagaaattgaccaccatgagagcaatgttcactttgattggtggagaaaaaggttgcaatcattgacggcgaggcatgtcgagttgtcaacttggtgtctatgctgatgcaaaaaggtttgcttgcataaagtccaatggagccaagggtgcttgtttcttgtttgtgcccttcagttgcaacctgcaaaggaggctcgctcaactagtaaaaaacaaaaacgtttgtttgtcacttttgttttacatttgcaatggcttttttgaaacaagctgagtgaatctttgtttttgttaacagtctatgcatcatgactgattcttcgtctggcgaatatactgatattattcatttgtatttcataaatttgcccttttgctttcctcaagtttagtgctaagcataattagatgttttatgtacataaaccaggat

SEQ ID NO: 6027 - DNA, 605 bp, Zea mays
  Intron number 3 from transcript GRMZM2G098721_T03 (locus G RMZM2G098721) derived from phytozome v7.0 (chr-ID 9; pos 1 9008145 to 19008749)
aatctgtcaggaaaacttcagcacaactgttagtatgccaaacctatgtataaaactgtaccggttgctcctaatttcacttctatgaactgtactaatttgcatcacaaagggtttggtctcaaacaactcatgaactcattttcttattattgggctgatggacaaggcaacatgaaatttttcatggtacctgtgaacagagcatagcctacaaactgcagaaccattcccatttcatcttgtagtcttgtcttgctaataatggactttgtgggctgtctgttccctgtgtaattcatttgaccatgatagttcttgatcatgtgatatcatagaatgtgtcaaaaactgcatcacatcaaattaaaactggatagaacactatacataggtaatagtataattaaatgttaagaagtatttctttatgtttattttaattactaattgtcttatgtgatctcttttcttgccgcactcactgaacctattgatatgtaagtcaatcctgtcaatccttgcaaattagtgaaaaatctgtgatgtttatcctcaactggaactgagctggaatccttttcttttcctcacagatatagtga

SEQ ID NO: 6028 - DNA, 965 bp, Zea mays
  Intron number 1 from transcript GRMZM2G445163_T02 (locus G RMZM2G445163) derived from phytozome v7.0 (chr-ID 2; pos 2 28870012 to 228870976)
ctgtcggggaattgggcgcctacaggtcctgcaaggtcaaaacccatctctcccgcatgcctctttcatagattcgagcctcccttcctcttgtccactgatttgcgaccctgattggcgtctactgcccccctttggtcctccctcatctctgttgattgattcacggtttcttccctttctcttcatacagtcacagggcaggcacataagcatctcttcctctccttttggcttccctcctcttgggtttgcactgcccctgctcttgacttggatgtgcactgcctctactcgacttggatatgctctgcagttcgcatctcctctgcagctctgtttccctcctcttctgctgtttctttccctgtctttcctctgcttgtgctttgttatattgatgctgaccggaagtgctcgagttctttgtttttacagctgatagcacaatggtatattatactccactcggaattccaatatgttggtgcagtggttagacgggggttcccaggtcaaaatctggttggtagtattgcaaattctgctttctgttaggacgttggaatgtctacatctatttggaagttgtgctgctaggtaactgcagatgcagacttggatgggattttaggttgaacttggatgattcaggttatgccaagaaacatgttaaccaactgaggaatacagtttactgtttgggttacaaaagctacacctttttcctgtcaagtcaactcatgaaatgtgaaatcttttgcgcaatacaaattaaatagtgtctttgccagatgtaataagtacggaagaattcggtattttgtgttcattttgctgcctgccctatctggagtttgcttctaaaattgactgttgatttctttgcaagaccagtaaactaatcatgttttgatgcttaacaaacaggagggttttgcattttcccattgtaccacctgcaa

SEQ ID NO: 6029 - DNA, 557 bp, Zea mays
  Intron number 2 from transcript GRMZM2G098153_T01 (locus G RMZM2G098153) derived from phytozome v7.0 (chr-ID 8; pos 1 35063077 to 135063633)
cagaaggtgaaccccaaggaagtcatcgtcgggtgagcaacccaccccatcgcctcacgattccacaccctcgttttatttattttttctggctccatcggtatatcaacacatatgtgaatgccagtgctcctaatgattatataattgggcaccgtttatatgcaacaactgaatcccccaatgcatagtgtgtttttttgggctgaattactttgagtggatgcacccatttttcttatcaaatgcacattatgcactgtacatctcgttgttaggatactgctttgacattacaaggcagatagcagccgaggacagaataactctagagtaattagttccatctttgtgattaacaaccatcgatgtgctcagagctatattcagtgtcagttgctttgatatcatcgaaagcacattcagacactagaaaaatcggcttggaaagcctgtgaattggtttgccaagtatccttactgaacttttcaaacctgtatgttacctatctacttgtgtaggttctcgactggatttggtgtttctgggggaagta

SEQ ID NO: 6030 - DNA, 573 bp, Zea mays
  Intron number 1 from transcript AC213780.3_FGT003 (locus A C213780.3_FG003) derived from phytozome v7.0 (chr-ID 8; po s 106377883 to 106378455 reverse strand)
agcgtgaacgtgtaagggtcctgcctgtttgccaggtttggtgggcctccttcttaagaataaagtcaaagggatgtttctccccttgatcaagttttttttccatacttggtatggtagtcgctgtttgaacccaagcaccttttaaaagatatactttgttacagtactccagagtccaggttggggtctgcctttggtttttatttggttaacaatgtgtctactgactagagattcacagactaaggcctcgtaccatgtgtggctgggtacgataaaggttgctataggaccagaaaccactatgtagtcctcatgtcattgcttaatatggagagtacatgtttttcaatcgtagagactagatcactagaggctgggcccttcatcatctagaataattgttttgaggaagactggaaagcaattggctatccacgagcagatatttgactctacatgattgtatctctttccttgtcaaacttgaagaagcaaaatgattttgaattttgaaaggatagtttagatgatttagcacatattattgtcgttatgcaggaaaggtag

SEQ ID NO: 6031 - DNA, 451 bp, Zea mays
  Intron number 4 from transcript GRMZM2G335237_T01 (locus G RMZM2G335237) derived from phytozome v7.0 (chr-ID 9; pos 9 61823 to 962273 reverse strand)
aattcgagcagcaaaagccgacggaagaaaggtggagaatagagagggaagaagcttagagaagaatcatcaaagctcaacctgtactgaaagagtgagtaacacatgcatccatttctcgtaagaattcatccttgtcaccttaaaagatatgtggcatgttgtaggaattagttcctttggtaccttgtgtagatcagatcgactccttgtttgactgatttatacacttgtctattttttctaaactttgtatgcttttgaagcttgtgtttatgtactacacaaggtaattgattcatttacatagtaagtagttttgctactatgtgttaatatgtgtatgttatgtttgttcattgacactaattatttagatgggtgtcctaacttatgaattttgctactgtattcaggtccaagttcgttattgaagttaacttttcaaagg

SEQ ID NO: 6032 - DNA, 607 bp, Zea mays
  Intron number 5 from transcript GRMZM2G096123_T03 (locus G RMZM2G096123) derived from phytozome v7.0 (chr-ID 2; pos 2 10956747 to 210957353 reverse strand)
tggccggttcttcgaggtctgtgtctacctcagttgaatggaagctgcatcaatgaaacctttgtgtatcaggctgccattcagccatatgacttgatctaaacaaccaccactgccatgatttcaatcgcaaaagctcatgccttaattttgatttataaaagcctgaataatatatccacggaccatggcataactcatgcttctggtttagattagaaataataatatcgcttatgcctgattggtgtaaattgatgagtgtttctaccatgcttccatttgttgtgaatggcactttccgcaactgtaggtcaatggaagagttattgcagcaagcttctttgacgtgaaaggagtacttttatttgtaaaatttggttgatcatgagcataaacttataagttagactttagaaattcagcatatttctatgaaatgattggccttgtcttcctcgtctgcttttatattttacgttttcccaaccaattttctgtatgtggaccttctttgtgggaaatcattctattaaattgcttgacttatgagttttggctggttcatggaacttctgaaactgacactcaaatattcacaggggag

SEQ ID NO: 6033 - DNA, 615 bp, Zea mays
  Intron number 2 from transcript GRMZM2G086418_T04 (locus G RMZM2G086418) derived from phytozome v7.0 (chr-ID 2; pos 1 61960823 to 161961437 reverse strand)
tcaagctcttccagttcggaatcgacggctccaaggtgaagaaaactctactttttgtagcactacccattctctttttgattaactgctctcttttttcgactagtatacatgcttggatcctcgcatatcttggattagttctattgttatttattacctggaaataagtccttaacaaaaaaaaaaaaccacacttctttgttgttcggtcttcgggaaaagaaacagaatgacaaagttacattcgtatactcactccaaattgtaggttacactttgactttatcctatgtcaaatgtaagggaaaaaatctaaatctaaccatattttgaaagaacatagtaacttaaatttcaaataaattcactattaaagcatatagagaactaatttgatattgtagatgagctaaaaaatgttcaacttatgacaaagctaaaatagccaaaaatgtactttgaatttaaatagaaggagtattaaattattactgctagttcttcattgttgcaattgcaattgattgattacgttaaaattgtttcttattattttaattcattcttttcactgcacggattccttgtgacttgagtagttgtcgacacaga

SEQ ID NO: 6034 - DNA, 773 bp, Zea mays
  Intron number 2 from transcript GRMZM2G085833_T01 (locus G RMZM2G085833) derived from phytozome v7.0 (chr-ID 2; pos 6 8745854 to 68746626 reverse strand)
cgtcgtcgcctgctacggcctcgccttcagcggtatgttatgattattggttattgcgcggcggatggaggagcttgcttgtcgcctagatagtaggtactcctgggctgagatctcctccaaattttggttgagccgtacagatctccatgctgcccagagttacgaagtttgatgttcagtattggtagagtagtgctactttactcgttatttggatcggagtacagtttagggctgttatttttcatcgggcgtttaattgctgctaataatttacggctggagtctggctaatagtttacggctgaagtctagcttaattggatttcatgtaggcctttgacccatgatgttcttttggtcttcttgagttcagttcagtttataccggtggagattcagttgttcaaacgtttgtttcagatggtatataagaaatgttgttagttagtagcggtttcaggatttcatttgtcattcaatgagcaataaaattcgacaaggatttagttttgtttcacaattgttgtttcgaactagtttttttaaggtgatgctgtgattaccttatatatggttgatattatactcttgttggggaaattttgctgcattaatatcacattgctgtttcatgcagagcgttggtcacaacaaatactctcctccttttgcttggtcacaataaacactttcctccttttgcttcgaaaagtatatttttattattagtgactaatcttgtggttgcaggggggtttggaagctat

SEQ ID NO: 6035 - DNA, 1008 bp, Zea mays
  Intron number 2 from transcript GRMZM2G064984_T01 (locus G RMZM2G064984) derived from phytozome v7.0 (chr-ID 2; pos 1 48508700 to 148509707 reverse strand)
aggatctctagagacaactaactaaattctcctaagtaagaacaagcttcccagttcctctgttctgtatttgtattcattctgccacatgcaagatgtaaactcagaacctcttccccgtcaccatatagaccattctttttaccagtggttgtctcaagtatcaagatgttccttgtacaatctgtggaagtgctcactgccatagccattcttttatatagataaagattctcccattgtatcttgtgatgatttgaggtctgtttgaaccatcctattttcttatttttcttgataatttggcatcattttgtgttctgtcatacaattaccttatcagtagatcttgttgcatattgttctctcaaatgcatcatcagtatttttgcgaggacaatgagaataatagatgccagctgtagtcttctgaaatacgcacttgctgaattgccatcctattgttgtgtctctagcagtagtagatctatctttctcagttcctaagtatgcatgtctttcaaatcacttgcaatcaatagcacaacgtacacaaccatccatgaactaagttgcaaaagtaactccattgcatttgtgtacagatgtacaaatttgcttgtttgagctgctatacacattacattacacacttgctgcttcacttcactataggactatgtctcgcctcttcttgatgttcattggctcggcaccagccgtccctttcctcatcatcgccacaaactctgaataatctatccttccatcctgcatgtgcaaaagtgaatttaagtctttggtttaacaataagaaactaagaacacaaatgttcagttacgaggaacaactaatcatgacaagttagtcattttggtgtactgggttctatttctgtagcaccgccacctcaaaatttgatatgatgatgtggtttctatagtttagtttgtcggctgaaatttaaataatgcttgttccttacattgtcagagtcggcatcggag

SEQ ID NO: 6036 - DNA, 661 bp, Zea mays
  Intron number 2 from transcript GRMZM2G089501_T01 (locus G RMZM2G089501) derived from phytozome v7.0 (chr-ID 7; pos 1 30237957 to 130238617)
gctacacgactccaaggcgccgcctccttctcaaggtccgcacgcacacactgcagccttcattctcccttcctctcacgccaattctactccctctcgttggacctccgcgcaagcaatataacatctgcctgttgcaattccttgtttcctgcctggatcaaaccggggaagaaaaccttgcaagccagcttgtagtaaatgactaattaattaaccaatcaaattagcatgttcctcgcactgacgcgtgatgattggggttcatttaactagtagtatgtaataaagtacagcaccctataaatttcgtgcaatttaagctggacggcgataagaagcgacaaccaaaagcaacggcggatcacgtgtgcgtcggacgcaaggagccgtcgacgggcggccttccgtcccatctgtccgggcccacccaccccgccccgacccgacccacgggctggctggctttattcatgcttaagccgcatggaaatgtttttatacgaacaatcgcgtgttgattttcattcgttcttcttacggctattttttgttttgtaagggaaagtttcttatcactggctaccgccgataataaaagttactgcgtatgtatatatatacaggtaatttcctcttgaagacgcacgacttcctgcag

SEQ ID NO: 6037 - DNA, 770 bp, Zea mays
  Intron number 1 from transcript GRMZM2G078116_T02 (locus G RMZM2G078116) derived from phytozome v7.0 (chr-ID 2; pos 7 9369976 to 79370745)
aggtcagtgagcccgcccacactctactttcttgctccttgttctacgagcttcggctgcgctgaggcggtcatggtcgctgttcatgtggaattagatgtgagagaaggagcgtgcagcgccgccgcagctgtggactcccatcataaaattcgaacatggagaaacttgaaccttttctaatgcaacattcatgtgttggtattctattttggtatattatagattttgcaggacaagttaagatggagttggaagttgaggcatatattaggcaacattatgaaggggaaatttctgacatagaaataattgagaaagaggatttagatctagtttttcacttgctctgcatactaaatctaatattctgtttgacgtccataatgaaatgatgtcatggcgataagtttggctctgtttaattgtttatgtctaagatttttctacaggaattttgatcttcttaggtttgtgtcgttgtacttgtttatccattgatggccatccttgtgttatagccatagtgatgttcatatatctctagaatttagctgaagttgaatgctttatatgttcagacttcaattttgatattaaacatgtagattatcgttatttaaatatgagtaagggagatgccaatgtgctaattgtttgtttcttttttctgccattttgatgtgcctgtgccaggtgtagaatataacttttaacatcccactcttgttgcagaaaattcatctttctggctcgaacagaaaatacct

SEQ ID NO: 6038 - DNA, 737 bp, Zea mays
  Intron number 2 from transcript GRMZM2G169615_T02 (locus G RMZM2G169615) derived from phytozome v7.0 (chr-ID 2; pos 2 03268052 to 203268788)
tccactacaacgccttcgcgcctgtggcccagcaggtgattcttctctctatctcccctacctaaaagccgtgacattgggaattttagagtgacccttgtacgattggtttggctaatttggttttgatattctcgcggctgtaggtgctatactgtttatttattatgttttctgttagggtaccctttctgttatagcattgtatattagatcatctagtctagtttattctcataggagctaaggggcgccatgtcttgcatggttatatgctatttcaaccaacgtgttaggttttaggcccagaaacatgcatacgactatgattgtaagctgtaggcacagatgccagttttttttctgttgttaacttttaatgcttatctctgccatgcataatgagcaagcatctcttcatgaactgataataagtcattctttaggtgagcacattgacttattttcaatgaacttataccaaggtttcgtaaggcaggtgctatagtttccatgttattcttgttgctagttcatatatactatttgattttgcaaatttggaagttgaatgtacgattacataatatataagtccgttttgatgtattttagttgatctactttgcttgttctctaatggaatcctaattcttttgttaaattatttattgttggactaatactctcaagtaactgtagattgcctctgtgaaaattatacggaacaagcagac

SEQ ID NO: 6039 - DNA, 888 bp, Zea mays
  Intron number 3 from transcript GRMZM2G028183_T03 (locus G RMZM2G028183) derived from phytozome v7.0 (chr-ID 2; pos 1 43265025 to 143265912)
cgggaggcgtctgttgccatcttcttctcctttgagtaagctcagttttcgtttctttaattttgcctaaatgcctttttttatgtgcatggaaattcctgagatgtatctatgctttctgttttcactttatcactgtatcaatatgacacgctacaatattcgatcctctttcgcaacaatattagagtaggtgtagagatcgattaaaatgagtgaactctttcaaatggcatttcccaatatgatggacaacaaattgcaaaactaagtactatatgttaggtctatatatcaagcgagtgtctttttgtagttgcactgtaccatgcctgcaaggctaccacaaagatcttaattcttcagtaacacgacctctttccattttgtgtatcgtcctttgcagtttgcactgccctataccatatgaataatgccagatttgcagttattgttctttttttgtttgcttgatgtgtatatgctaagccatgaatatatcttaatttcactacctcaatattctcaatcttgctaatcagttcatctatatgttgttgttgctatattatgaaatgttaggctatgagcttgtgcagttgtctgtttaggtttgagcaatacattaagtgttgcaaagtattaggcccattagcatgaaacattagctacactatcattttttttcttgttccttccaaggcaaggcgtatggcttgcaggttgggtatagttcttattctactctggcactgggtctgccttttcttatttcaagattcaaaatactcaataatagctaacaagtataaatcatgtttcagatatacgatactagcaacatccactttatcaacatttgtgaagtacatattctatgtcagtgac

SEQ ID NO: 6040 - DNA, 894 bp, Zea mays
  Intron number 1 from transcript GRMZM2G110822_T01 (locus G RMZM2G110822) derived from phytozome v7.0 (chr-ID 9; pos 1 10717827 to 110718720 reverse strand)
cccacctcgcctccgtcctccagtccctctccctggtacgcgcctccgtccctgtggctttctccttattggatctgggactcactaacaatcccgtgggtttattacgcgaaaccgagatggattgcttcgagctctggaatagcttaccgcgcgtagtctcttcgcacgtatatttcagatggatctggatctcacatccatgtctagtcaagtctgatttcatctgcctgggtttcaccttggatacgacatgagtacaattgtagcgtactagcgtacaagtagtacgaaattcacgagtgagtcatttagtttgattagtttatgttcagatttcgttgcccaaatctgctaccagttgaaagtttatctcgaaatgttttgggcctccgggttttgtgaaactaagctacactctgacatagttgcattagatgtcatgcggactaatttggatattgtcattttatgtacttacaaacttgagcgtattgtaagagttaaaattaggagcaattcagacattcagattcgaaggcaatctgcatagaacttttctttgcttgccaaaaaaaaggcaaagagccatggagttctagtaatgcttacatactgaggtgataaaaattccagtacaacaatatgcaaggaaaataaaatcttggccttcagttgtgtcattgtgtgaccgtgagagaaccattcttgtacaccaaactaatctctcgggggtttgcagtctatccctctgcccaagctcactctatcttgatatactgtattctgttccagctacatttttgctaaggcgacaactaacaaagtattcatggttatataatatatttccatccaggctgagggctcatccgcagaatcaatagctgcact

SEQ ID NO: 6041 - DNA, 1039 bp, Zea mays
  Intron number 1 from transcript GRMZM2G174444_T03 (locus G RMZM2G174444) derived from phytozome v7.0 (chr-ID 9; pos 1 10248329 to 110249367 reverse strand)
gggagaggtaaaacgagggagatggtggagggactgatcgtaggttcaccttggttgccctgtggagcatggagttaatgaccattgcacccagtgaagaacacatggagcttggccgagtcttcgctggctcaccatcaagaagtgatacagcctgcaaattgcaggtggtgggttgtagcactctcgcagactagagggcggggatcgatacatgcacgtctctggtacatccgctagggcaacagcaaggaaggcatactgggactgggcagtatccgaaatcagggtgtcatgtatcggaagtcattttttattttttatttttcatatggtgttgatagctaaaggggctctagcctagtggctaagggcttccgagtagcaccttcaattcatgggttctatccccctcatgggcgaattttcaggcttggttaaaaaaatcccctcgttgtgcctcatccgctctcgggttacgatgtcctgtgcgccaccttccggttgggccattagagagtggacggttgacgctggcccgttagtgatgggggtcagggttcagggattttctcagccgggaccattgttccggtctcttcttaatataataccgggaggacggtcttccctcctcggccgagttttcatatggcgtggatttgtgtccaccgcataaccaaagtgtatatgtatcggatcatatgggatacggcctcccccttaaatatacttagttgttatgtagatgacaattgtttattaggttttggactagaaccatgtctatagtggttgttttcacatcaaaatgaatatttttttaatacaatgtaaactgaagttccattggtttccaggagaccaggacagaactcatgcattataataaaacaaacaacatatttgaaactgtcaatttattcttactttgatcttgcttgttgtgctatttatattgttgataatgtttttttatttattgtattcgctttgcattgcaggaaggactgggaaacaaactccgtgatctaaacat

SEQ ID NO: 6042 - DNA, 785 bp, Zea mays
  Intron number 2 from transcript AC207266.3_FGT002 (locus A C207266.3_FG002) derived from phytozome v7.0 (chr-ID 9; po s 136063336 to 136064120 reverse strand)
gtgcccgcagtgcaagaccaacaagcgccaccaaggtatgccagccgccgccatttccatctatttccatgtacttcatgttaattaaagtgcatcatgctaggcttcaacagcaactgaagtctgccaggtggttgtgttttagtcgcttggagcatgtagtaatttagtgtttggcaaatttattcagattctcaccataatcttgctctcttagtgaattgtactccaattgtagtgttgagttacattgcccgcaagagccacgagagtgaaatttgttggcttcaatgattcacaaaggacaataatcaaagatgttgttcgcattgctaggctggaattagggtcttattaaagagtggtatttgaaaggacaataatcaaagagtggtatttgaaagtgatgtctctataaatgaagtaaggcagggcaatgcttatgttactgttgtcagttattagcttttcaaaacatgcatttgtcaatgtgtcctgtttcaatagggtattattataggacgtgatgccactgaattaggatgtttgttcttttgctacctttgttaaaaacatcagatcattcgtattgtatccttcctcggattgcttcttttgttctactacaaatatgctcaacatggcagggagaggtatgctcctaaatttcttattttgtgcattgtgaaatgattattctaacaacatcaattttgtgttcttcatataatctatctcagattgctctgtgttttgcaggtctcgaggtcaagcctagatttggc

SEQ ID NO: 6043 - DNA, 1058 bp, Zea mays
  Intron number 1 from transcript GRMZM2G352129_T01 (locus G RMZM2G352129) derived from phytozome v7.0 (chr-ID 2; pos 3 0909847 to 30910904 reverse strand)
atacgcctacgtcaacttcaacaaccccttgggtatagttgcgatctcctcgtggggcttcctttctatcttgttgattaagggtgggggattcgtcggcgtgtgggcattgttgaactggggcctgggggtctgatcagattggactagacctgggtttcatatgatacgataattctaatggcatttgtaaactgcatgttgaaagtgcttcctcaattggtactttggtaatgttgattgttgaatggttcattctagcataagtcgatgtgttgcttggtgcaacgtccctgggatttattataattttgggtatcggcaaggatgattctccctagattcatttgttttgagataacaaggggggaggtggggatatggctagcaaatagttttttacatattttagagccttgtgatggtatactatttagactctgggattgaagacagacttgcttaaagttcacttccagttttgttttctgcattttaggtaattacgaacctgggtgtgttgtatgctgggaaaaattatgcctttctaatctgatggacttcattgatctatacagctggccttcagggattttcttaactgattgttagattacatagacataataataatgtaatgtaacagccataatcaaacacctaggggcatgtttggttattggttgagttctggcctcactttcgccttctaggaatcctgcagaagcacacatttggttccaggcaagctgtcctcaggttctgtgctgatggaacttttttcttgacatcgtggggttgtgattttggcttgcctgggttggcaaggcaaggttagctagtaaggtgcagcttagtggaaaatgggcctaagggaagacgatgggttaactttgctagtatatggtttacagagttacttttagtttcagtgtcttatctacttttgaaatttgcttatagtacctaacattttactgtcaaaaaggcttgtgagggctgattcactattccatgttacagctgcaagggcattggaagtgctgaactttgctcct

SEQ ID NO: 6044 - DNA, 700 bp, Zea mays
  Intron number 3 from transcript GRMZM2G512340_T01 (locus G RMZM2G512340) derived from phytozome v7.0 (chr-ID 8; pos 1 46630561 to 146631260)
tggaaggaaaataaaaataagacatttgcctactggtgcggtagacagaatagtgtctgcaactcttgttgatcttcctcttttctaattctatacatggagaatttattatatcctttttgttcatattaattagtttgaattttatttttatggtcctatttgtgcaggtaaatatatttaagttgttatcattcttgttttctgaaagaattatccttatttagtgggatgattgttctttttctatcgattcatttgccatctaagtcatttgttacaagttctttgtctcattgttgtttgatttacatggtctcttgtattgactacatttagttgtagatctttatcttccaatatttgttctttgactcactttctctgattattctagaggggttatttcaaattggattcatacttggatccttcacttctgtcaataattaaagatccgaatctatagtgcaaggagatgggaaaattttgctcaaactcaaaagggatttaattatgctaggttacttggatatggtgatctaggttgtcattcattatctgcagcataggaatactcaattcatctacgatacctcacaaaagcaaattctcttaatcttttagagattgctgaaattatgttatgatcttatacttcttgtttatgcttaattatgtttatgtgaaggtatattaa

SEQ ID NO: 6045 - DNA, 666 bp, Zea mays
  Intron number 3 from transcript GRMZM2G061745_T04 (locus G RMZM2G061745) derived from phytozome v7.0 (chr-ID 2; pos 3 608125 to 3608790 reverse strand)
cattattcaacaggtattgtgaagctatgtcctcttgtgattgttcttttgaactcgtgtgacaattttttaggtactgtcctaagttacgagtgtgtaacttttcagccaacttaggatgattgtttgaactttttgaagtgttgttatatatagattagcttccacaagttatttgactatgtttcgcctatgttagtgatacatggttgcaggcatatttatgttttcctctgtgctcaaaactgcatagccaatccattttctcatgaattttgctttgaaattctatgtttactgtcctagcacttgtaatgtagattgctggcaaaagaaatggtacggagagaacagtcaagtgttactatttccacccgagtcaatttcttccccacatacttctgtaaaggaataatcttgttgagtcaaactaaatcacgagctttgagagccatcaataatttataaatatttgggaacttcaaatgttttctccactacatttaattttctttgtcctctagggatgttgatatggtgatcacagaattatatttctatatataaagttaattatgctagcttcgtcactgggtgctcctgctgtattgcctgtggcgcttctcacagctgtttattccaattctcgctctccaaattgcagtt

SEQ ID NO: 6046 - DNA, 684 bp, Zea mays
  Intron number 3 from transcript GRMZM2G082580_T01 (locus G RMZM2G082580) derived from phytozome v7.0 (chr-ID 2; pos 1 70772681 to 170773364)
cagatctgccactgtatgtgctgtgctcatccacacttgtgttgacttattattagtagttcttacctgctttgattactttcctttggatgctgagtgccgacagtgcgctacagtctgcatgcttattgctgaagttagctgatgccagctacttgcactactagatatctaatgagctacaagagtgcgatgcccacttttatcaaactgctaacctccatctagacacacataaaagtgatatccaatttcattaggcaataaagggttatggtagttaattacagtatatataaaaatctgcaggtttgtttgtagctttgttattacttgctacattgctagatgtcccacaactatatgagttcgagagaatctagaattcgaactcaactgtttattcaatgctgaatttgcagactagataatacttcaccgatatggaatcttttgtatggtgtatttgttgcttcctttcatcttaatgtttttcatcatggttgttgcatgtatatacatagaaaaaatggtgtagataattttgcattgcattttaaggtcatatctttatcttctaagtcatctgcaatgtagtatttggtaacaaaaactttgctatttctttccatacagtattaccactatgcggttctaaaatgttctgtaaatttcttgtgcaga

SEQ ID NO: 6047 - DNA, 1004 bp, Zea mays
  Intron number 1 from transcript GRMZM2G077664_T01 (locus G RMZM2G077664) derived from phytozome v7.0 (chr-ID 9; pos 7 4002057 to 74003060 reverse strand)
gcgccgctcgtaggctccttgcagcgtattctctggtatgattcgcttcccaagcttcacaaaaagtcgtttggcttatttgcgctggttcgtttggaggttgggggcacctggctgcgaagtggacttgctctggcgatggtgccgccgtgggtcgtgtgggcgccgacgcgcctaggttagtcgaagaggagacgagaaaaggggttgcgctcgacgaccgttggatcttcaacggatggatgggattagaaccgggtaacgtttcgagttaatcgatctagcaggttgatccgaaagtaaacagtctagagccaactaggtgattttaaatcttaaccaccgatcattgatccgatggaatgtgttgcttacttgtgtagagttatgagcgaattaatctggggcgttggtggaccatctaatggccgaaatcgtatgataccccttcaccgcggaatatattcataagagaccctaagctattgtataatgaacctgccgtccacctcaagccaaaagtaattacaagtaggtcctggaatttatagttttaaccccgagctctctggtaattatgtccgtggttcagaaccattaggaaaattcagaattaaatcagaaaatgatttctagtataaaaataattccagaaacttgtttaattcataagtaattcattttagctcctttttgatccattccagatgcattaatcttgtattaatattgtttatcatctagtaaccttgtattaccatgaaacctgtggttaaaatcttgtaccttatttgttttatagtagacacttaaaccttcgtaaaatcataactttatgaccataactctgaatttagtgattctcgaacctaggatctagttacgacgtgtagaacattattatgcagtttgttcttatgtttggtgtgatgttaatttctcctacaccatgtttgtttgtattaccagagtagcagcgaggttaacgagtcacttgaagacca

SEQ ID NO: 6048 - DNA, 551 bp, Zea mays
  Intron number 2 from transcript GRMZM2G365286_T02 (locus G RMZM2G365286) derived from phytozome v7.0 (chr-ID 2; pos 2 04001345 to 204001895)
gtggaacttctccaagctcgccttctggacgagtatgttctattttttgtgactataatatttttgatttacatgttgaaaagaccatgctattttttgctataatttctttccatgctcatggaatatataatctgctgctccgacctgagaaattagtataggggtgatcgatgtattagcgaaagagctactatgctctcagatataataaaaaggaactactgttgagaaatttaagtttatgtatttgactactatcagctatagtgcaatgtgcaagtaataatataagctattctgcagtaataaatttttctttccatctaacttaaactgcagacagatatgaaatgaggttgagatattacaagagcagctttttccatgagacctcgtccaactccctgcctccctccagcggtgaacccgcgcatggtgctccgcgcgacctcacctagctccctgcctccctccgacgacagtcaatgaagataatgccgctgccatgctacggtatctaaatgctgattcataaggatcaatctcat

SEQ ID NO: 6049 - DNA, 1036 bp, Zea mays
  Intron number 1 from transcript GRMZM2G151536_T01 (locus G RMZM2G151536) derived from phytozome v7.0 (chr-ID 8; pos 9 6930434 to 96931469)
gactccgcctcgttgcccgctcctgcaggtactcgtactcctcgattctcttgctcttttttagctccgatctgggtgtggagcaagtaagatcgaattggggttactgggaatggtggcaaggagaaggggtactgtttagtcgttgattccccgtaacggtttagccatagcagtatagcacccaaccgagcgtcactttctgcaagtagaaacttgtggtaccttggggaaagttattaccgaaaagcaggcttgagatctggcgcacaaaattgggttggctgctctcaaatgattacacatcctaactcctaatcctaagtcctaagcatagaagatcaaagcagaagtcgtaggagtgcatcttcaaacctgtatcattacaattcgtggcttctgctgcaggtttctccaaaaaagaaagtttaattgatggtgttgattgtcaataatttgattatgcgatgccttactcgatatatattatattataaagaaaagttgagtcatcgagcaaaccactgagagcagggaatcaaataagggagctattgaagattaggctgtgttttgtctttggatggatctaccagaaaaggagtctttaaatggccccaaatttacgtgtagcatggattgttggcaatatttaatgcaattccaattaaaacaaggatactatcgactagttgagttgaacttctgtgattctcctagttctaaaattctaacaaaattcccaagcaacatgtaaacatggcatatgtctatcgtttttctgtattctgctaggagcttttgcgtttcctgatcacccccttgacatgcagattttaggtgtcaggacagggattgttatttgttgattgctaaaatggggttacatttagttgcctgtaggctgtagtgcatccttttgttatttgattttcccatttggtatccttatagctgctaatattgtgatgaaatcattacactaacttgtggtgctaaatttcatcagatcactgaggactttatttttggaaga

SEQ ID NO: 6050 - DNA, 759 bp, Zea mays
  Intron number 1 from transcript GRMZM5G817275_T01 (locus G RMZM5G817275) derived from phytozome v7.0 (chr-ID 2; pos 4 837822 to 4838580)
ataggaacctcaaagcttccgggaacactaacaacctaaagaagaatttgaatctgagtaaaattgtgttttccaaaagtttccgaaacatttcagaagtgtatacaactgtgtagctcatcactaacgttgtttgaagtcatgtttgcagatgaatagtaaattctatatggtgcaattttcagtctgctttttgtaacatagaatttatattgtagcaggctagcagctttcctattccagtgcatattatgccatggattctaagacaactttgtttaataattcaagacatttaatactagtgatcatctaaaattaaatatacaatgatacacggaatccatcaaactaacataagaataactcagagactatctatagtggcaataatcattgaggctggtagcaaggaaataactaaatatatttattggtcctgacaaactacaattccaaatattctagaatatttattacacacaattaaataaacaaaggacaaggctttagaagttttaaaagttaacccaatcaagtacattatccatccaaagatagttctttgtatggctcatgggtccttaataaaaaaaacatcaggatggagcataagtatacaagtatactcaataggactgccagtttttcaaagttgtgataaagcaataaggatcaacattacttgcgaacatcagccaatcagaagagagaagatgcatactgttatattttcttctttaacagagtatcgctcga

SEQ ID NO: 6051 - DNA, 334 bp, Zea mays
  Intron number 3 from transcript GRMZM2G070831_T01 (locus G RMZM2G070831) derived from phytozome v7.0 (chr-ID 2; pos 2 25767561 to 225767894)
tgtctaggtataagctgaagttcagccctgagaaggtgagtcttgtatcggtgccactgtcaatcttattattcatgttgttatatgctctatttctggcttttattgtgtcatcatttgtgcttggcattatgtaccggtttccatattgtactcatgcacttttattctttgattgcctcttggtgcatctatattatcttttgcagcattcaaaatacgtaacatcttatgagtttttgactatttaagattcttctagatctttgctattaaagaattattttgacatgttaagtgattttttattgtttgtgttacacaggttgataca

SEQ ID NO: 6052 - DNA, 263 bp, Zea mays
  Intron number 1 from transcript GRMZM2G142214_T01 (locus G RMZM2G142214) derived from phytozome v7.0 (chr-ID 2; pos 2 28517869 to 228518131 reverse strand)
tgcaactgagcgtagccaactcgatcgtacaactggtgagctacgcatattcttttcgattttgtatcgtccaatccgattccgatcttgccgcaacttttgatcttccttctcgaactgaaccacctacgtaacaaactgtttattttcttcttctttcttttcccaaggattctaattatacgtagacctttgatccgacgatgcttcatgtctttgtttccctagctggtcaaatctggacgtaaacccggcggcagtgc

SEQ ID NO: 6053 - DNA, 708 bp, Zea mays
  Intron number 1 from transcript GRMZM2G015502_T01 (locus G RMZM2G015502) derived from phytozome v7.0 (chr-ID 9; pos 7 4313786 to 74314493)
tgcccgcctcaacctccacctcgccctcctcgctggtgcgagctgcttctctcttacccactccgttattttttatttgtcgtgttttagttcaaaaataaactagccgggaacaaataatcgacaacagagtactatatagtagtgcatcttttggtaagtttggtggctcttgctactacgtactgcaaaaaaatttgttgatgtgcttactcaaagcgagagacggctaatccgggtagtttacttggattggattaaattataattttttgagggattcacgaaaaattcttgaaagaccataacaaattgtaaagttatattactgttaaagcatttcaaggatcttgaatcagggtatagcatatgttcttgtatttcaggaatcttgaaccagaatttaaggtttatgactgtagttttgttccctgtccaagaaggccgaggaactttgcttcattggtttctctataatctatattcataacacaatcttggggtaaactgaagcacagatatcctaggtaaactatctggatatttgagtcaatgtttttggggtgatccactcttctgagtgaatatgatgacctggggaatgcaaaatactttaacttctgagtaataccttgatttggcctcagtttatttgtttgttttcttggagcaggggagagaggagggtgcataatagttgattcaaca

SEQ ID NO: 6054 - DNA, 617 bp, Zea mays
  Intron number 2 from transcript GRMZM2G029079_T01 (locus G RMZM2G029079) derived from phytozome v7.0 (chr-ID 2; pos 1 38316790 to 138317406 reverse strand)
tcacgtcgcttgtgcaggtatctgaccataatttgctcgatttggttgtgcaacgagatcatgcattgtgatcatgattggatttttttttcttttttgtgcttgtttgatttctggtctccttttgttttgtttcttaaattaataactgtagtgatcgcaaagcaagcaggaaactgtataaaaaggatacatgtgttgcaggaattgcattgatctgcttaatcttagcaaaatataagaggaaatcgttcttgatgatttgatttagaggttgaagagtggtggaggaacttggaagcaactcatgagccatgtatgagccatggttgttctggttggctagactgattgatggtgatgaatttcaatgaaaattccagatcttgttagcatctctgaaccttgctgcctcctgatgcgaagaaatcacctagggcatagatttagttgagaaccggtcctgtcacctttactattctgttttagctgcacttcaacttctctgaaaactgctacaaaaactggtgaatgcacatattttttttcaggtttttttgtctttcttattcttcatttcctttctaatttgcagataattaagtttgttcagcttc

SEQ ID NO: 6055 - DNA, 811 bp, Zea mays
  Intron number 4 from transcript GRMZM2G355993_T01 (locus G RMZM2G355993) derived from phytozome v7.0 (chr-ID 2; pos 3 5875022 to 35875832 reverse strand)
tctacacagggtccttttcagacagggataacacggtatgttatcttttatattcaagtccaggctttagttttagttatttcaatgggtgcattttttttgttagctaccggtctacctctatttttttatcttggaattgaatgtaatttggttgtctcagtatgtagcaagttgaaccttatgttcatacatgaatatatactgttgctggtagtctaagaccgtttttcttgctaaaagatgtggtgtttgccaggattatattgcttggaacaatgttactattctttctcacctgctattgctagagcaagaagttcctcacctcactgtgcattacatatcaatatggagcatgagcaaggcaacacttggccattggctaccaaactgacttgatcatggcatatgcatgtatcacttttgaacattgttgtttaattgaagaaatgttgcaaccatccatttttgttcaacttcagtattcactgtgtaatggtcaaaggataaaactcgatgaatgaagaatgtacaaagagcaaattatggctaattgaccttgctggaagtgaacaggtagcaaagacagatacacattaactttttcccttgtcgaagttgagaaaatatttgacttaggatataatttccttaaaattatgtttttaaataagaattttgcttgatgatgggactgcacctagataccttcttctattatcctttttgtaataatgattttgtagtccatgtaattttgtgttcattaataggataagctgtgcaggggagctcttagcacatatta

SEQ ID NO: 6056 - DNA, 676 bp, Zea mays
  Intron number 1 from transcript AC190872.2_FGT001 (locus A C190872.2_FG001) derived from phytozome v7.0 (chr-ID 2; po s 234814439 to 234815114)
gctggtggatctggcacctcacgcgtaagaagcaggtcaggatttcgcacgtctctttcgtggttataatctctcgctgcttgttctattttgttaataatcttgctcgcctctcgattcatgttttgtatcagtttgatctctattttaatttgatctctgttttagtttgatctttgtttagtttgatttttaagtgttctctgtttactggatggagatgcatgattaatgaagcgcacactgcacaacgagtataatatctgataaatattataatcgttcgttgctttatgtttaagcctgatgatgaagtgatggtagatcagtcatgcatgcctggttgtggtgcttccagaattcagaaccacacacttaactgagatgtcacatcttgcaatgtttcattgttgttcatataaaggtatctcttcgatcattctagcacgtactacctattagggtagacgcagtatactcacggattagtttgctttttctttgccttttttgaattgaaataaattggacacagaaggatttacggtttttttgtctatgacaacagagaataattgatattttctactgttgtttagtggttctattgtttctcaatctggttcattttggatggttaggagttcgagcatagtggagaccccaagggtcattt

SEQ ID NO: 6057 - DNA, 927 bp, Zea mays
  Intron number 1 from transcript GRMZM2G161913_T01 (locus G RMZM2G161913) derived from phytozome v7.0 (chr-ID 2; pos 1 6450842 to 16451768)
aacaggcccctcttcacctctggctcatcatcgccgtacgtttcccttccccgtctatcttagttttatatcacaaccccaaggaatcaccaatgtttcttgcgattgttcggatttgtgcgttttttttttgctgtgggtatgcggtatcgtgtggtcgtctatccttgcttaagagagacctaaaccctaaaccagcagtctaggagtctaggaagggataaactgatgcaagtctcccgcaaatgagtatgtctcgaacccgtgacctggtgaccagtgagacagctctcgctggaccaagcctgcccttcccatccttgctccttgccacgaatttaactgaagcttctagggtagggtcttgtttaagttgtgcttctgtgttggtttggaaggattaggtcgatcttgatgattgctattgaattgttaatatatgtttcttttcaaaagcgtaggagagctatgcatcatatatatatatatatatatatattaagaataagatatggtctaaaatagaccataaaaaagtctgtggccaaccaactcatggaggccgaaaaaacaataaataagaacattcaacatcaaagctaatgcagcagactacagttggaggccaggaatggagcagtaaggagggagagatccctagctccagccaaactccacatctccaactgataattgcatgtaatgatgtatactctgtagcaacatcgttgtggtttctcttggtgttattttcatatatcctgcctctgataattgcatggctggtcatgagctgaatcttgtacctacagttgtgccttctttcaaatgtcaagaaatcaaaaaatttcagttgcaatttttctttcttgtttatcttacttgcgcacagagagaatacttcaagcaaggaaagatagagcagtt

SEQ ID NO: 6058 - DNA, 733 bp, Zea mays
  Intron number 1 from transcript GRMZM2G061718_T01 (locus G RMZM2G061718) derived from phytozome v7.0 (chr-ID 8; pos 1 12624950 to 112625682)
tcccttcacaaaggggggctgcagttacctcacaggtgaaacactagttacctactttctgtttctttgagatgcacctataacctgattaatgtgctttcactactagtgaatacaccataaatgttggtgttggacctggctttggctatactccctccatacgaaattaaaatttattttagatttttaataaattcatatattatctaatatatatgttttgtatatatgcataggatgctaattattcatttgaatatagacatagaaactagaagataaagcgaatgctacattttgggacgaagggagagtagtagctagtagcctatgtctaccgttgtaatcactgtcggtagacaatttctttgacattttttttcctccaaccaacaggaaaattctcataattatattctgtcagcactgtacacaccaacaagaaattttgaaaactcgcagaaaatactaattgttctagtagtgaatagccatcatatcattgttgggttctcggcagcgatacacaatggctaccaccggtagcatgtagcaacaactgacagtgattcctacatagcatcactgctagggttgtatattggctgctgcattgcaactgcaaccctcctatggagtttaaaatggccactaaccttttttctcttgaacatgtttgctaacaccaaaatgtgatgctgacttttaattatttgtttcagtttgggaa

SEQ ID NO: 6059 - DNA, 580 bp, Zea mays
  Intron number 1 from transcript GRMZM2G452896_T01 (locus G RMZM2G452896) derived from phytozome v7.0 (chr-ID 9; pos 1 02934708 to 102935287 reverse strand)
cgcccaagttcggtgcccttctcgtctttatcgaggtataaatacatgatacatccatcgcacatgggcgcccaagtttggttaaatcttaaaattacgaacaataacttctgattatgggatttggaaacaaacaagtaatatgcgaatgtctctacttgaaaatactcgtagaaaaactcataaacatgtacttcgtccctttcaatttataatccgtttgattttttctaccacaaatttaattagcttgtcttattaaaaaaatcattattattattaaattttagtgtgatatcgtttagataaaatatattttacatgtggttttaaattttttatttttctaaatttttaaataagacgagccaataaatttaataaaaaaaagttaaacgaattataaattagaatgaacgaagtaggatttaaagaacaaagggactaacagatgaagacttacatcgaagactggacagacagtgcacacgcattttaacccgagaaaataatcaaggtcgaaacaaacatttctccatgaccagcatcggttctacggcgagtcactgccgtttgggga

SEQ ID NO: 6060 - DNA, 762 bp, Zea mays
  Intron number 2 from transcript GRMZM2G096647_T02 (locus G RMZM2G096647) derived from phytozome v7.0 (chr-ID 8; pos 2 3804769 to 23805530 reverse strand)
atctttcttcagttttaggtacttttctgctttaatatagctcatgcaatatgatttattttaacacatatttgaaatagaactggattgtgcatattttgtaaagtgtttgttctacattttgtaattcgtattattcatttttcctttagtttttctctttctacaactcctatctctttacaatcaaatttcagatgtgatagatattggtataaaagataaaaactagaatgctatgtctgtcaaaggagctttcttcagttcaggtactgctctgctttattagccatccagccgatggatattttctatatgtgtaccgcccctgcactttcaaacacttatgttcaatgtttacaatcacattttttcttctcatagatttactatgtggttgtggtcttagtttggcttgtaggttaatttgtatactcatgtcattttagtttttctatgttgattcagtatgtcttaatttagttaatttcaattcttgatgctaataatatggatagattgtgacactactttctggcttgagcagaaatgggtttgttgcatatagcagaatatagttgtcgtaactggcaacaatgacccctctatggatgatctgaaaactattccgtggtcatgtagttaaatatagctgaatatacattactatgttttattaatcttatttggtttttctctcaaaagaacacacctctccatctttcagtgcttggtggatcaccgtctaaacgatccaccacc

SEQ ID NO: 6061 - DNA, 566 bp, Zea mays
  Intron number 1 from transcript GRMZM2G092346_T01 (locus G RMZM2G092346) derived from phytozome v7.0 (chr-ID 9; pos 1 50963421 to 150963986 reverse strand)
actacctatacagttgcttcacccacatcggggaggtaggccacgtccttcaacctgtgctctcaagaccgcgtgttgcgcgtcgattaggcagatgtttctccctagggaatgtagtaaagtgttgcactgttctggcttgtttgaagcagcattggcaggatgctattgtgaactaacattactcataatatgatagtttctaaaaattaagaaaattatttatttaagtatatggtacttcagtacataaaaagttgtgtgaaaatattccttggcggctgtttgagtttatacaacaaccgttttgtatgtacatgtctgatatatgtttcgattgccttattgtcttttttcggaggcactgaacaatgtttttttagaatataacattttcaactttatctgaacatcaaaactactatactaaacctagcttgtgttgtagaattctcttcttgttgagtgttgagcattgtagaatacattttgaactcgttgtggtaaggcctttatttccttaaagtgcaggtacatactattaaaataatacgcaacaaagtaac

SEQ ID NO: 6062 - DNA, 315 bp, Zea mays
  Intron number 1 from transcript GRMZM2G096279_T01 (locus G RMZM2G096279) derived from phytozome v7.0 (chr-ID 9; pos 3 1088678 to 31088992)
gcaatcaataaatttgatctgagcttattcagtcggtcagtaaatttgacctgggataaagtcacgtaaaataatttgagccagtgtatggtaagctttatcagcttgccttgtgtttatctgaaagtgctggatagtgctgaaagaagacagacatacattgtttcaatctgaaacagaaaaaagaaagcatttgtgagaataaaaagaaaacaaatgtgtttaagtagcagaggataaatgagcgattgacctttcgagctctttagtttcctctgagaaatacaatttaatgagtttagcgaggataacagt

SEQ ID NO: 6063 - DNA, 536 bp, Zea mays; identical to SEQ ID NO: 5994
  Intron number 1 from transcript GRMZM2G377520_T01 (locus G RMZM2G377520) derived from phytozome v7.0 (chr-ID 8; pos 1 0910474 to 10911009)

SEQ ID NO: 6064 - DNA, 979 bp, Zea mays
  Intron number 1 from transcript GRMZM2G118979_T01 (locus G RMZM2G118979) derived from phytozome v7.0 (chr-ID 9; pos 1 38234425 to 138235403 reverse strand)
caccgtcgccgcagtcgcattcgtctcgctcctaggtaaccgctgatctcgcgtccgccgctcttgtccgcgtcagcgccgctacgccccgcgctcgcgtgacgcgtctctgcttctagctgagcctgcaactgtggttcgtggcgtcacgcaacatgctgtatgggttttgtctcgtatttgttcttttacggggatggatctaactgactgtggagaatcgggaataaactcgtgtttcagtttctgttgcgggttttattttgaattttggattgtaacttctctctgtgagcagatatctagtctgtagtacgtttcactgtccagttggtgggaaaacgtggcattcgcaaccatacattttcagaccctggggtcatgcctagtttactcgctcaacgttgcgttgacaagaagaacccacaactacactactgtttcatgcgtattctgggtttgtgtttgatccgctgaatcattgcaatggttaaggataccactagtcaattgttttaccttttgagttccttgtcacggaatgggacaaggggaactgtttcatcctatttcattcacatatgtacagatggtttgtctagtgtgtctagtttaagtaattgatttccatggagagcactgtttatttctcattttagtccgatttactctgtcactgatttattgtgtacattttgtgatcagtttggttcattgtgggccaaagcttcttgcttgagaactgcaacatgttaatttatatatgtttcgaataatttatgaatttaatgtgacatcttccatgatatcataatgttataaatttatggccatccagttataatagcacaatgcaaaatatattcattagtgccgaaatgttcacacctgatacagtttgtccgtgtagagatcagtgcaccactttaattgcttaatgagaatgttctccatgcagttttaggttttgggagtggca

SEQ ID NO: 6065 - DNA, 975 bp, Zea mays
  Intron number 6 from transcript GRMZM2G013450_T02 (locus G RMZM2G013450) derived from phytozome v7.0 (chr-ID 8; pos 1 29135631 to 129136605 reverse strand)
caggtaaattaaactaggttattttttcttcaagaagataaccagtagagttcattaaagaagagaatctacatacaaggtgttgagttcttctgtctgaaaaattgctgccactgacccagtcagggaaagcctatattagtgatactgttgtatcccactccattgtactcatacaatgttgtgattttgttgcttctgatatcccttgtgatgagcctatctattgtttagatatgaaattgtatgagcgtccaggcaaaagatcttacattccattgtcttaaaatcttcgtatattggaaacttgtatgggtgaggaaaaatcagggaactgaaatggtcttctctattaggcagccataggaatattagtaaagctttttatgctgtacatttattactgagccttgataaggtgaccttacaatattgttaacatgttaatatactttagttcatttttctatgaggctccaatccttaaactgcagtgcttatgtgttatgactaaatggttatttgttttgttcttcccaaagcattttcacacctcctagttcctatgttttttaaagtttattattgacttgagtacttgactatgaaatagtctagcctaccccaacttgcttgggactaaaaggctttgttgttgttgttgttgattgacttgactatgaactataactaatacattcgctatgacttgggtccaattttcctgcagccacaatatgcaaatgttgatttaaagtcattttgtttgtatattagctgaactccaagtggcctgcttttacccatcctactgactatagagtggctaaatttgactgcaataatgcaatatgcttcaatactactcataataaaagtgcagcaaattagtaattatcaatgaccatctttcagacacatactcaagcgaaaagaaaaatattggagtctaagagggagcttttactgaaagaa

SEQ ID NO: 6066 - DNA, 1016 bp, Zea mays
  Intron number 3 from transcript AC234109.1_FGT003 (locus A C234109.1_FG003) derived from phytozome v7.0 (chr-ID 2; po s 133891598 to 133892613)
aagacaacaggtgcaggatcaacctacacacgattgcttaatctttgcatggcttatttgctctgagatgctatgcagaataaactgctttcaatgtaaatgctgagaaaaatgcatctgttgatgctatgaattaactgcatgcgagttcctacatttgtcttctagctgcacatagctatgcattctgttaggttgttagtgcttcatgttagaaatcttttctacatatgaaaaaacataatcttctgctgggttcaagcaacggaataaaacaaataagtgctagcagagtattatgatgagaggtaacaagttcgatgttagcgagaacaatctagcctttactctggttctttgacccttaccacgaaccagtccatactaatacgaacgatttcatcgactagttgcatgcgctttgtgatcctaaattttagctgtataatttttttctgcttactgccatctattgaagctgtagtttcacttttatgaactatggtccatacctttagtgcgaaagggcctctatctgagttggttaggtggtatgaatagcactcctcatgtcttggttcgacttcccattggagcgaattttaggttgtggtttaaaaatctcctcatctgtcccatgccaaagcacaggtctaagggcctgctctggtcgtggtcattctcacataggctacagtgccgctatgtatgagtggggattgtctttttcttaatataatgccgtgggggtggttttacccccgttggtcgaatttttaattgggtccatacctttagtttaatcaaaaaaagttcccagtggacatgtggtctagttcttcttggatgtgtattttgcagttctttacttcttttactgtatcctattacactattgcagtcctattatttactttgttccttagtcaatggttctgtatttttactacattgtccactcccagttatcgtttccatctttctcaaatctagggtttttcagttggaatttggga

SEQ ID NO: 6067 - DNA, 759 bp, Zea mays
  Intron number 1 from transcript GRMZM2G018800_T03 (locus G RMZM2G018800) derived from phytozome v7.0 (chr-ID 2; pos 2 33418376 to 233419134)
gaggtgagctcctttcgtcggcgctctcagtggcctgtcgtctctcctgggaaatgcatgtagctggggaggtagattaagttgcgagttcgaactaagagatcgagcaggagcagattggggatttgaggcttgtttttttaggtaggtcgggtggggcacggtacattgcatagttgtgctgaagtgaggaatccaaaggtctattcggctgaccattatagattgacatgcattacatttaaatggatcaatggtctaacatttttgtaggaatcgtgtgctcttgggctcgactgtctcgctaagttgaacttctagtggcatatcttattcttctgtgattttggttctagcaaactaagataaatttgggattcaagtaaagatttggctgcttccctgtatgcattctgatatagataattcttttatcgtttttaccctttagcattagaactaggatctctttgggagccgtgatttttcataaaacgtatcagtgcttcaatctttggctgtctgcaatgaaaatgacctttaaattctgatccctttttttactagtcaatgttttatcgcagtatattaagatagtattcataaatcatgttacatatgtactttatcctttaactatcgaaacattcaagtcaatcatgtttggtgtgttccagagtttaggactgttatcttgcaatatttttgattgtccaaccctcaggtttcttcaccaacaatcatagttgaaagagctgg

SEQ ID NO: 6068 - DNA, 588 bp, Zea mays
  Intron number 1 from transcript GRMZM2G095670_T02 (locus G RMZM2G095670) derived from phytozome v7.0 (chr-ID 8; pos 1 66915375 to 166915962)
ttggagatccgcccggacttggatcgagtcctcctgtctttggtaaggaaaccctagtccgcttcaaagcatgcctttaagccttttttattttttgctgggatggatcatggatgcagcaaatggaccattgaattggcacatcctacgatctgagcctcgaccttgaggctgtgatgttgtttgcgaattagggcttactgctgaagtgctgagcatgcgtacgccatggcgtgcatcgacccctagtgcggactgcggtgtcactgtcgttggatgtttccttgtcttatatagcatccagcaatcagtaccgtttcctcatgtaaagcccctcagtttaatactttgagagctaattgggtagcatactgccgtcactgcaatgttgttttgactttaatccgcacaggaactcctaggctccgtttatgatgtgaatccatactctgctgcttttattaatgcattgcaattacatcatatgtattgaagattatgtctacattaatattatgttggccctttttcttacttcattacatgttcccaggacattcattggagtgctccattcattgaggcagc

SEQ ID NO: 6069 - DNA, 505 bp, Zea mays
  Intron number 1 from transcript GRMZM5G878542_T01 (locus G RMZM5G878542) derived from phytozome v7.0 (chr-ID 9; pos 1 165080 to 1165584)
gcaagcggtatgagaaaaggtcttaggtctactttatatctgttattgttttcagcctttttcattcttccttataactatacatgttaacaagtgagtagcaattgtactaaatgagacattaccttcatctggtactctaattaaaaatattttgtctgtttgttatcttggttagcttttgttacacatcataaataattcaggttaacgataaaatacactatacgtggtcacaagaaatgcgaagaaatacacaattaattcatacttaataactctctttgaaaagaaatgatatgggggagtgtcccatgtaaattgaagttcagtgtccttttaaattttgttctgattgctaatatttattttgtgaattgaagttcagtatcgttgtaaattgaagttcagtatcctgttatttttttattttgtgatggtggtattctacttatgtaaatgaatctggatcatgtggttgctgaaattttgatatcataggaaa

SEQ ID NO: 6070 - DNA, 534 bp, Zea mays
  Intron number 3 from transcript GRMZM5G875502_T01 (locus G RMZM5G875502) derived from phytozome v7.0 (chr-ID 9; pos 1 35257072 to 135257605)
atccctccgtacaccacttggatcttcctggacaagtatggtgctgttgcctaacttcttcctcctttcatcctttgattacgtccactggataaccgataatgcttgcgcttatacgatgttccagactaacattggagtattatagtcatatgataaaatataaaactttttaaaagaacagcaaatttccatacccactttagctgttaaagctctatcagcatctgtcgtattcgttttatatctttatcgttgcacaagttattggtattcttgtgaccttgtgttcatatgttttccaatgggatgaccaagggcactactttgtgatattcatggtcattgtaaggagattggactgtatgcgtgatgggtcatgcaagtacacttgagtttatttgcttgattaattctgtgagtactcatgtgatgcaacattgtagatataacttcttagaataactattgcatccttttttttctttttgatattttactatcttttaaataacacagcgcagaaaccaaaga

SEQ ID NO: 6071 - DNA, 802 bp, Zea mays
  Intron number 1 from transcript GRMZM5G834553_T01 (locus G RMZM5G834553) derived from phytozome v7.0 (chr-ID 2; pos 8 057977 to 8058778 reverse strand)
aggctgagggcagtcatactgccaccgcggggacggtacgcagtttcctggcccaatccttatatttgcgacgctttttattcgtgatcatgaaacatatatcaagcgagaactgctatgtgccagtattagccacctgcaggctgctgcttattgctcgtatgctgctgtctttctggctcctgcaatcctccgctcgtcagcttacagtttttctagagttttgcaacccgtgtcttgccatttcagcagttcttgacttcttaatcctataatgtaagaacggtaaaaccctggcctactagggaaccggaagtctttttttttccgttactgagtgttcaatttattagttagcaattaattggatgattgtttttaaagcacaataaacttctgaagattatcaataacaataaaaaatggaaccaaaagaaacaaacaaatgcaagaacaatgtcaaaactagtataggtatctgttgcaaacttgcagttgataaaatttgatataaaataattagacagacattaattttaaatataatcacaaagtcccctaggacgtgtcggtgtacactatctgtaagagatttttatatagtggtaacgaaaatgactccgtatactcgtattggagacgacgttctcgggtcgaaggtcgtctgtttcttgtgactatgatttcaaatagtgttttgttatctatgctatcaatttttgccataccttattttttttctgtcatccgccactatttatgctatctttttctttttcattctaggacggcgttccaattg

SEQ ID NO: 6072 - DNA, 854 bp, Zea mays
  Intron number 1 from transcript GRMZM2G322844_T01 (locus G RMZM2G322844) derived from phytozome v7.0 (chr-ID 2; pos 2 23721128 to 223721981)
aacaggtgcaaccccgactgtaaagtctatccacatagcgcacatgttgcgtcatggggctatatcctagctgccagatgatccgccatttagcagaggattataagcgcatatgtgtacatctacatcatattgcaacaagaaatccatgatgagatgaaaagactaattaaggtactctcaagatctctaatagatgaagctcctcacgcatctaaaatccataggtgttcattgagaacctctgccacctttattttcttgatatttcttttggcgaccatggagtgtaaattatctatgatacattgcccatgcagccagctaccttcccaaaaagtgtgtgtgtcccatccccctcacttcaatcataatagccatcgcaaagaacactctaacttaggtcatgttttaatgcactagagctaatagttagctgctaaaaatagttgaagacatccaaacactttatctaatagttcaactattagctacttttagcaaattggctaatagttagatagctatttgctagccagctaattccaccagcaattttttagccaactaactattatctttagtgcattcaaacaagcccttagctagtatatctaaaggaaattgaagacatattcctttgtttttattaatatttgtgtttgatttggttgtatatttggaacagtgcaaactgatttgcaggctggatcaagtcacaaatttgaggtagagctcccaactatactttaatttgtgattttttatttcactaatgggaagatcttatgacttttcattcctacataatttccttctataagaatattaactaaacatttttttcagttact

SEQ ID NO: 6073 - DNA, 962 bp, Zea mays
  Intron number 2 from transcript GRMZM2G132468_T01 (locus G RMZM2G132468) derived from phytozome v7.0 (chr-ID 2; pos 2 35483071 to 235484032 reverse strand)
gtctcacagaataaaagacgataccaggtactgattctacattggaatctaaagatgaaaatttgacattttcaaatactcttgtcgttcagttcttatagggtaacataatcaggatacaatcacatcagtgtttattcatcaccttcagcgatggtaaacttgctccattatgtgccggtgtgcattattgctaatgaatgtcagcttggatctacacaataatttatttgctcatatctaatttgcagcaagtttgttcacattactcaggtttatctaattctcgatttttttgtgttcgtacacatgctctcaatatctataggtcctaggcacatgtagggtgatgcttagatgttaggtgaccttgttgaacattattttctctatcagggagatcttgctttgtgcctgatgataataacaaatcatcacttctatgtactttgatagaaacactaagggcaattggcgaatggaaaatttacttacaggggcaataatatgttgaagtgtataagtggattgcctaacttcttccaatgcttaaatttttgggttcatcttatcaaagctagaggtatcaagttcaagtcctgacagaggcttgatttgtgcccccgcccctttattttcacatttgcgctttcctctctggctgcatgtgagtgggggtgttgaagtgtataagtggattgcctaccttctttccacgacttaagtttttgggttgatctggttaatgcgtctactctaacagaatcatcaatatgatcctgctgattaaccttttatagatcatgtggggttgattgttgtcatcgacacttggaggaattatacgtcagatcatattagtgatgatcctttagttgattaagttttttaggtttaatatgatggaaaagtgtaatgacctgattctgctgcttactcaggaaggaggatttgatttagac

SEQ ID NO: 6074 - DNA, 864 bp, Zea mays
  Intron number 1 from transcript GRMZM2G177617_T03 (locus G RMZM2G177617) derived from phytozome v7.0 (chr-ID 8; pos 6 4393544 to 64394407)
gccttcgcaaacttcgttaacctcgtctccatctggtgcgttccctcattcccactctcctggatctaaatctaacgcgcggggggcgatacttggtcgttggttccgacgcgattgctcctgtgtccctgtcggttcgatttctaggcggggtggtgatgcttacgatcgggtttggggtttggttcggggaaattagtttctctttctctctctccgtctccaggcttggattgagggtttccgcccgtgtgatgtgttgtcgaagcaaggaacgaactttgctttcacgaagcttagtttcgagctggattttacatttgtttctaggttgcggaggagactttcccatctgtgtatactttcacgaagcataatttcgagctggagatgaacttttacatttgtttctaggttgtggaggagactatcccgtatgtatagcacgtcggtaacctcatgggttgtggcagtgacacagtttgttacaaattaccctcgtcattatgtgcttttctaaaatccgagtaagaagcgtgacactctggcaaggctgactaacaggttgcactgagtgtggtacttcctgcttctgcccacacacacagcatgggttttgattgcaacttctgccttgaaattccgattgtactgtttctacatgcgaaattgcaaactgaccccctagatatgtttttaacactgactacaactgaatgagactgtggcattgacgcaaggctaattggatatagctggatgttcagagctattgagtttttaacctagagagtttgtagtgccgttccagtaatccataatttgttcttcctagacgttgcaggttaaaagagaagaggtggg

SEQ ID NO: 6075 - DNA, 946 bp, Zea mays
  Intron number 2 from transcript GRMZM5G848945_T01 (locus G RMZM5G848945) derived from phytozome v7.0 (chr-ID 2; pos 6 5036732 to 65037677)
gtctagctgctattgcgagtcactgcaagtgagttttccaaatgctagtaccttattagagttttctatggcttttttgttaagtgcatcattttgcctttcctgatctgcatcgtaacctttttaaggacgtactgatgccactatttagtccttaagcagcttttgcaagtcattgcaaatgactttgccaagaatatcgaagttcactctttttttctaataaaattaatcaaaaattatttccttggcaacgttgtatgcaattaccttttgatatgtcattatttagtccttaagcagctattgcaaatgatcacgccttgaaaattttgtttctttaagagcgtcacagtttacttccttaacaatgttgtacgcagttacttcttcgtatagggaactagaacagtacacttttgtgctttcttttattttctctaatgcttatcagttaggtgccattgcttgttagttttctataagcttatcttctgattgtgttttcattccattttacaactgttcaagtcatgcattgtcctgctcatgctcccttaatgagctgaactgtgatgaaccattttattcaagtggtatttgatctgttcttgcatttgctctttagatattttaccattttttgctgtatgacttctataatttaattcagtttgatgaattaatacagttttagccatattgcatatagttaagtggttgtgttgtggctgtactgcatatgacttttctaggactggatgcaaattcgcatgcagttattcaacaaattattatcattagtaatatcagtagtagttgaatgcttttagctgaatccgtcaagtttttgttgttacatggtatttcatggttaacgtgttgactctgctttttttcttctatctgttatctaggctcctgagggagttagatttgcaggaaa

SEQ ID NO: 6076 - DNA, 600 bp, Zea mays
  Intron number 6 from transcript GRMZM2G421655_T01 (locus G RMZM2G421655) derived from phytozome v7.0 (chr-ID 2; pos 2 01793172 to 201793771)
tcagggaaattcctgatcaccttcttgaggtgcaggtgagcaagagcaatacatttggatctagttttactaaatctaatccttgcctaaaaacatgcttgaaccttcatttgtggcttctgtttggtttcaactctagactactccaacttgctcgtgattcaaaggctttgtcgttattgtaccttgcctaaaaactcagccagtgtgagaaagaccgtccccacgatattgtttggaagaagaaacttcagttgaaccactctgtgtactgaaaactattttaccgatggtacgggaggaatccaagtgggttataaaacccactccactcaacttccacctaattggtagcacatttggatgtatgatatgatacataggcaaaagaactaggatgagtcaatgggttggcttggcctttgcgtccctagctgtaggacttttctgagatcaaattgtctctattccctaccattaaaatttcccaataagagcctattttctttcatcagcagacatactcttatataatatcttgtgtgtacataattcttcacatttttgggtaacttatagggcgaagagcctctgagaaaa

SEQ ID NO: 6077 - DNA, 1001 bp, Zea mays
  Intron number 1 from transcript GRMZM2G046528_T01 (locus G RMZM2G046528) derived from phytozome v7.0 (chr-ID 9; pos 2 5389606 to 25390606)
tcagggaccgcagttatttaactctgattttattataacttgcttctagcgaacggtcatgcaattgaccgaacatgtaaaccataagcaaatgtgatgtaggagatttttatataaatagacttttgcagccactttgatgttttgttttatgtttcctttttgtgaaaaaatattatggtgctattcgagtgtttttttcttattacaatttcaaatacttatgtgaatagcatagcgcccgatagggcgctgtcttattctagtgttcatgcaaaccggacccttcaggatgcaatcaacttgcacaaaatgtggtggttctgggaagactgtgaaggtagggtttccctcttaatgacatatatcagctgcaacaaccaaaaaaaagattatgtagcacagttgtagtatcaggcctcctatgccatgagtcattatagtacacccttggcacaggtatttcactgaggttgatgatcttgaagtctgaattacttttcctcaccatattttattctactagtcatgaatgatttatttcctgattgcatgtaaagtcagctctatcatgttaactaattgagttaccctgtaatggacttcctctatagagcagcttatgaattttgattaatcagcacaacactggttatgtttctatgttattcctttaggaattctgcaagacacgcagaggaaataaagttgtgcctggaacgaaatcagttcgtcttgacatagtgcctggtgagtggtgagtttcatgttgtcatggttcactggaatcacgcccgcccgcccgtataggctaggctatatctttatgcctgcatctctatactcccctagtcccctgaaagttattgatcaggctgccatgcacagtgttctcttagcatttttacaatattttatatgtggcaacaaaagtttcatcatcacaatgtttttaaatacaaatacaaatcaatggtttgtccatcaggcttcagcaagca

SEQ ID NO: 6078 - DNA, 839 bp, Zea mays
  Intron number 2 from transcript AC150739.3_FGT001 (locus A C150739.3_FG001) derived from phytozome v7.0 (chr-ID 9; po s 155181419 to 155182257)
tgggagaggtatggtttgctttgcttgctcccccatggacatcttcttcatctctcctgggcagtgcagccatccttcctttcaatagctagctgctaggtcagggggttcttgtctatggatttgggcattgtggaatgctaactggattgttcagtctcagcttcctgagcttgtattcattttacctgtcaaaactaggaattatgagtgatggcgctacaatttcttaatagcactacccaggtgtctattgctgtcaaatcaacgaattgtcttgtttgccacaactgcctcagtggtacaagaccatgttcatgttcaatttctgtgttgcagcaagtcttgcttttacttgtgctcgtgcatctagcaatgtcattgtcttctaagttgcagctcagctacattctggaaacaaacttgcataacttgaggaacatatgatagtgtcagtcacctttctacttaacctggcagggttttaagccatcagattattagtttacggtcataaggccatatagggcatagaactataacgtggatggttggactagtagagccatgacactgcccagaaaggtgtagctttgtttatgttgtcggcattgcatatcaatctttttttgctgtgtacttgatcatgccaactatgcatctgcccttactgatcctgttgccttttgtatgtactttatgatctacatgtccaattccacagctaatcaccaaatagttgctatagttgtttttctatcaaattgacctatggaatttgattatctgaaaatgattttgcaggatatcgtatcaaagattgtgcaggtctcgaaaat

SEQ ID NO: 6079 - DNA, 1015 bp, Zea mays
  Intron number 1 from transcript GRMZM5G878497_T01 (locus G RMZM5G878497) derived from phytozome v7.0 (chr-ID 2; pos 1 01253629 to 101254643 reverse strand)
gtgtacgacaagaccatctcagaactggtgcgtggcagagggggcgagggagcgcggtggcgcacaccgagggggcgagggcggcgcgccaaggaggcactggcgcgcggcggcgcgtggctgagaggaggcacgggagcacgacggcgcgtggtggcgaggaagcatgggcgcgcgaccgaggggcgagggcgcgtggcagcacgcaccgagggggcgagggcagcgcgccgaggaggcaccggcgcgcggtggcgcgtggccgaggaggacgggcgcgcgacggcgcgtggccgaggaggcaagggcggggcggcgcgaggtggcgaggggtcacggcggcgctaggacgcggcggcgcgaggtggcgagggagccggcggacgaggcaaaggagagcggcggcggacgaggcaaggagatgaggcaaggagagtggcagctgggcaggtagctggtttagggtaaattgaataagagtataggtatagtaaaaaacccacacttttaatttaatagtgtcggtttttatgggatcccaacactcttaaattaagagtgtcggtacagtaaaacccacatttttacccgtattaagagtgtcggggtcgacactcttaaacttaccgacacttcttcaacattttcttgtagtgggtatcgataatgttgttttttatacagatattctgtaactccaaagtaacatccatgatcacattatcgagctggcatatatgctgcggaggccgcctaggaaagttggagatctgagtatgttatttcagtgagaccctaaaaaagaaacaaggaactttcattttttttgcagaactgttcaagatttagcaataaatctgtaagatattgttggtgtaaatagctcaatgtaagaggacctactagcaatatggagtaatatatgtggtggtgctggggccagtaaagacaacacacaagtaaaatcaaacatgagctagggtttgtgtcacctaccgtcggcgccgtcgccgcc

SEQ ID NO: 6080 - DNA, 530 bp, Zea mays
  Intron number 1 from transcript AC200314.4_FGT002 (locus A C200314.4_FG002) derived from phytozome v7.0 (chr-ID 2; po s 112940763 to 112941292 reverse strand)
ggaagcggcggcagcaggtaaggcggctggagatttttctccaagtacgagcggcacagaccaggggataagggcgatgggggataaggatgagaccggacgcggggaagaccacagggagccgacgtatggaaactaggaggccagcaacgtttgtcctagaagctagcgatagcagggaatttctagaaattgaacgtgatgcttgagaaaggaggtggcgtggagttagaagatagagatggctagggaattctccaggagatgacgtgggaggataatagagatagggatggtggagaggataagtacatgagtgtagatttttgatcactacggctgagcagataaggaacgacagctgtatgggctgatgacgtgtgatggggaggattttctagagataatcgtattttggataagatacaaacagaatgaactcaaacgagatcgagactaatattttaaactatatttaatttgacttaaaatcagataacttcatctaccaatcgaacacttgatcgctc

SEQ ID NO: 6081 - DNA, 1069 bp, Zea mays
  Intron number 2 from transcript GRMZM2G134308_T02 (locus G RMZM2G134308) derived from phytozome v7.0 (chr-ID 8; pos 1 60386193 to 160387261)
gctttgtactacaactacaagagatcggttgtttggtaggtgaagcggagcttctacactagcagtagcgttttccgtcatccctacatttgcatcatgcttgctcattaagtagtagttggttgtagtaggagcataatgcgtcgataaagaaaggagggggatgttatggttttattttttgttgttcaataagctgtcatataaatgtttttataatgcagcaacggttttaaagggagaagagacaaattctacagggacaaaactcccttgacatgattaccagttctgcataaattataaaattaaatgtctataaacccataaaaacaaaactctctattgagagtgggtgttttttctaattcatgtttcgttttattctacacgatataatggtcttcaaaacaaaaacctccaccaagactagtgcaagaatagcgtatcattaaaaaaagtagaggccacttgaaagggatcagtattctattgattgaagtttcaaattttttgtggttggtgaactgccgaaagcaacaactccaccaagatttgtactcagcggtactcatgtctttttatgccctaccagtactggaataggttactgtaatcgcattccaccttttgtttatccattttgaatctgaactccagtttgaagcagtactgaaactggttctgcagagataccatctttctgcgcatttcagcacattgcaccgatttaactgctatatgccttggtccgaagaagaatacaattctaacgtagaacctggacatgccattttgattttgatcgttttttttccaaaataaatataaatgtttatacataacaaaaaagtaacattaagtccatcatcagatatattttgatagtatatactacctccgttcttaaatattgtgatgtgaatgaacaagcaaacgaacaaaactgcccagattgaatttgatttctcctaatgtgttgtgaatgtgaaacttcgaatgaacaagcgaacggatgaacaatggtctggcagggaacgcggtgggcgtgctggacgacgaccccgtg

SEQ ID NO: 6082 - DNA, 913 bp, Zea mays
  Intron number 1 from transcript GRMZM2G037923_T02 (locus G RMZM2G037923) derived from phytozome v7.0 (chr-ID 2; pos 2 33738254 to 233739166 reverse strand)
ctcctccgcacccatccccgccgccggtcgccgatgtaagctcccgcaccccctccctgcgcagacgatgtctacatcgtcgtcctgccgcatctttttcttaagattttttttcggtcgccgggtggtgctctggggcacgttttccgcgcgatcggccggccattcgtggggaacatcgatccgatgaggcgcgcgtgccccgatgcatccgccgtttgcgggctgggttcgtcaaggctcggtcgcggggggcgcgcaggcggtggatttgggtgagggttgctgttttcgctgggtttggtgtcgggatttggggtcagttgcgggtttgtttcgatctattttccgaccggcggtaatctggtgggcaaagccgagatttttttcccttaggccttgttcgtttccgtcggattacacccggaatcgttccagctaatcaaagtttgtataaattagagaaacaatccggccaggaatcattccgacccaccaatccggtagaaacgaacaaggccttaggttgggaatcggcgtggtgcatccggtgatggggatgggatgctcccctccctttcccttttcagtgctgattggcgcattcgattcctcggcaaagggtgtggtggtagggaagttggccgtcacttgatggcgatgaggatccacctctgttgattctctctaccttttactctattggtcggcgcccttggccgtgcccactgcccagtcttagttcgattgttcttttggggatgatggtagatacctagatggagaggttgctggagtggttttgatgtgtattctttgcagtatttgacgttgttctttatactgattaatgattgtaactgtgtctgcatgtggagattggaaggagctcggaaggctgggacgctgaccc

SEQ ID NO: 6083 - DNA, 948 bp, Zea mays
  Intron number 2 from transcript GRMZM2G035417_T02 (locus G RMZM2G035417) derived from phytozome v7.0 (chr-ID 9; pos 1 06399316 to 106400263)
ttgtccaaggtatttggtgctctctgtcttatcccatcagtgatgtgttcaataatctggttcttaactggaaactgtgattggtttgcctgcaagtcgtgccatattttgagtgttttgggttggttgcattaatttcactttcatatcttactttacttcagctgttattgttacatgtatggattgctagtaaaatattagtagtttgccttatgaattatgatgctcataagttatctacagtagatagttgtcttgttacttctgctagtgctctggatggtgcagtcatttgcctgagaattggcattgtgactgatttctttgatgatttccatgtaaattgtaaattatttctttgaatatcttgcaaattgttatttgatttcctcaactctgtatgaccaagtgattagtcttccagaatggaagtctcagattcaacataacacagatttggatttgaattatttcatctcttttcttttccagtttcttcgtatttactctccatttttactgctcttttgtgaaatacaatggctacattgtcaactgcttagtgcattttaaataaaactcaacctttacttgcttggtcgatgaattgattgctttcaaggtgataatgacaacataagatattgaatgcttcgtattgggttttgtggggttttcccctctttgtgactgacctaaatttaattacttcacaaaaacgaaaatacaacgttcagagttatgtcgatttcgtgtgaagatgtcttttaacagcttccatgacccgttatatattttccaatttttaacttcagctacagttgacactgatttatttggttaagctgctattagcttctaatctttatgttctatctaatctgacatgcatgacatgattttttgctaggctaaggcatcatcgagtggagcttctaccgctac

SEQ ID NO: 6084 - DNA, 993 bp, Zea mays
  Intron number 1 from transcript GRMZM2G061472_T01 (locus G RMZM2G061472) derived from phytozome v7.0 (chr-ID 9; pos 1 1921004 to 11921996)
cgcagttttacaagctctgggacgagctccgcaaggtgcgtgggctgctctggctttattgctgctgcttacacaatgtgggataccggtggttgtatatattggcgtggaatggttgtgctcatgggcacaagtgaatgcatttctctgttttgtgctactccaagtctccaagacaatctttacccctgaggccctgactgaatgattcattcacatgtcaacaatctttactccaagtctccaagagattatttgtgatgatgctgcacttagaattttagagtgatttttagttctactacatgtaacctagattattatttgattggatgtcctactatggttaccaaaaaactaaaatatgcagaacttgtttttttttttctctgtgcaacatccaaacttaattaaatgggaacaactttgtctctatcaatatatatgattattactccacatctatcgtgaactgacaactctattaataatggtttgtacattctggagatgttgggagtggagtgggcagtggggagaagacctttacctgtgtttgccaaaaaataacgcaaaatgagggaatccaaatcagaatgaagatgtagtgaggacactggactatatctgtaagaaagttgtggcaattgacaaggtctttggaatggagttttacttgtgctgaaatccttacaaaaacaaacacaactgatatgtttcaggatcacagtttcaatcactaaattgatcttaactaagtttgtatttggtaacatgtaagattgaggtagtgaatctgtaatttactttgactgtacttgagtaagctttgttgtgtctttgtaccttgtatgcgaccaagtacatctagttctatcatttgtagttttctttgtttcagttttgtgctcttgaatgcaatttcggttttgctcatgtggtgccatatttttaataatgatccttctgttgtttatgataaatctgccagga

SEQ ID NO: 6085 - DNA, 646 bp, Zea mays
  Intron number 4 from transcript GRMZM2G323903_T01 (locus G RMZM2G323903) derived from phytozome v7.0 (chr-ID 9; pos 3 2146361 to 32147006 reverse strand)
cttgaagctgatactaggcttgtggagctcataaagtatgtttatagctagctagcatcacgtgagactcacataattattggttgttctatcgagtaaactttggctcaatgaccttgccttctacaggtcattctctgaactaggaactctggtggagaacagttattttgagctcgcagatgatagatgagtaatgccaacacacataatttttctttatttaaatcctgggtatgagatacatgcgcgacctattaatatttataccgatgttgacatgctcaccaatctaaagaatagttaagcctacaaaagctttcatggtagcaatttggttttattccttgttattcatatatcttctctgatttaattgatttacacctacaattatatgatgcagttgtttttagttttgtgatacaaacaattaaaatgtgtaattacaacttatcatatataacactaataaaataattgaattttccaacacataacgtgaaggatcagtaggatcagttccttttggatgacatattgacatgaacacatgtaggatcagggatgctagaaacatgcattccatcatccttgatggcccctgtttggtattggtattcgattgtgttgtggtcgtaggaag

SEQ ID NO: 6086 - DNA, 713 bp, Zea mays
  Intron number 1 from transcript GRMZM2G007514_T01 (locus G RMZM2G007514) derived from phytozome v7.0 (chr-ID 9; pos 1 36915538 to 136916250)
gtcggcgtcctccgccagctcggcgacctcgccgagtacgtgcgccgcaccattcccgttctccagccttgctcttctctcctttgtccgcccagccatgaataaggattttgctgtcctcgtctgaattccgtgggtgcattcgagcgtctccatttttcctggaccagctgttgatgccacgcatttcgaatcgctgcgtgcgtcatggttcctggaccgatcgcgtttaatttggatttcggtcgtagtggatcacctaatgcttttttttttgctatatgctatgttttggaacccttcctccctttttttttagaaaaggtaggcgattgatgcattagacatttgactttccaggtcgttaactctgtgacggccttgtgctaggactcctagctcagcagcggggagataaatgtgccgtcataatatttttccgatcataataagtgcgtaattgtgaatcgaaatagctgctgccctttctagggggagagaagaaaaaaaaagaccaaattccaaaagcctttcttatcttcatctatgtaagaacgctccgattaattagtttctgatacccggagattggagcaaagaaaactggagtaggaaacggaacagaaatcgcaacaggaagacaactgaaaactcacctcattgttgcacggcttgcaggtttgctgcacaggtgttccacggcctgtacgacg

SEQ ID NO: 6087 - DNA, 764 bp, Zea mays
  Intron number 1 from transcript GRMZM2G149012_T01 (locus G RMZM2G149012) derived from phytozome v7.0 (chr-ID 2; pos 8 952181 to 8952944)
gtctagtctctagcaagaggtgctttgtgttttgggcgcaaggtcaagcattgcgaggagaaaaggctgtgagttctgaagccaagggtaggctgagagatgatgctgggtgttgttgctgaaccttatgcccaacctgatcacagggcttgttcggttagctttcaatccatgtggattgagtgcaattagataagtttgaatcctaaataagtcaaacttttttttttaattttttttcaatctcattcaattcatgtgtattgggaataaccgaacaagcccttataagatatgagcgctggaaatagatggtgcgggattgtatgtatgcgctgcatttttttctgtgtagttttgcagtggtgcggaacactctaggtttggtgggctgagtttgcttctcgatttcttgtagtctgggcttatgaagaggtaaagcactgttacgcattcagtcatgcgtttcttgatgtgtggatgtggaaatacttttcatttgatgtttggaaaaaaaatgtattgtgttattagtatcttgaattgttgatgttaccaatagattcaacctaaacatataaccccagaccatcagagattctgagtaatgttacactgcaaaaagtatgtggacgatgaattttaagccaagtatgtaatcattctcactagtctgatctatacgatagtttcagtacgatggatggattgacatacttgtgtgtgcatgtacaggcaggcgtgagacgtggttcgcctaatcc

SEQ ID NO: 6088 - DNA, 520 bp, Zea mays
  Intron number 2 from transcript GRMZM2G020843_T01 (locus G RMZM2G020843) derived from phytozome v7.0 (chr-ID 2; pos 2 104063 to 2104582)
cgcgaggtggccatactgaaggaaggacttgtgaggtacattaattcctcattttgcttcctgaattgcttttgcctgtactctactgtgctttttctgttctgttctgctgctcatatggaacttggtttgcgaatttcctgttgctcatatggaacttggtttgctttcttttcgcacctttaatgtgttccaaggttgtggaccatcaattacaaagcctaaagaaatgattatgcaacggggcctttacttagtaggttttcagtaaaatcgaactttctctattgtgcttgtctcgctattcacgttactgtggaacggcacttggttactccatgagtacttcctaatagctacgctctagtgctttatgaccatgttttttggcatcaccaatccggccacaaaactctagcgtattagctgttgacaagtgctgccatctgtttgacaaatttgatctgagaaactattcgtttcctttccgattctaactcctccatcggcattggcagat

SEQ ID NO: 6089 - DNA, 680 bp, Zea mays
  Intron number 3 from transcript GRMZM2G020843_T01 (locus G RMZM2G020843) derived from phytozome v7.0 (chr-ID 2; pos 2 104668 to 2105347)
ctggtggtctacagttaagtcacttctttcagatgttttgatatttcttcctcgtgcttgtttgattccaatgttcattccggccttactgtgcactctgcttgtgaacggattcttagttttgccccaaaaaaaagaagatgtgcaacttctaaaaactcttctggcctcccctctttcccttctctttgctattttgagggctgcattagcttttcatttgtttatttgctaatctgacatcaacatcatataatgtacctaaaatctgtcttgcaaggggggaacttggatattgcttttgaagttaatgcacttatactaggtgaccagttaccaggtgtagataagagtatgacatgtactgatggctttcctggctagaagtttatgctatgcttatgtcagttgcaatctgtatataaacatgatgatggtctgtttggatggaggcctcacacgcatcacctagccagagaaccctaggcatccaaaatcggacacctgggagttctgtctaggggacttcttttggaggatactgcatgcttttgttctgacattgttttcccaacatgtttcttttattacctgcattagtataaggcgcagaagtaggcaactatggtctactgacttgttttgactatagcagggtaaagagagaaggaagaaacctg

SEQ ID NO: 6090 - DNA, 543 bp, Zea mays
  Intron number 4 from transcript GRMZM2G128953_T01 (locus G RMZM2G128953) derived from phytozome v7.0 (chr-ID 9; pos 1 37838120 to 137838662)
tcgagttctcgctgtacaaagttcgcctcaggaaggtaactatgcactgactttaactagcgcgccgacatattgattgatggagtagccttgtagattcttgtagttctttatcctaaaaagaagacgaaaaaaatagtcttgggagatccctcaccctcagtgctaacgctgagcacacactttgttttgtttctggcagcaagagctactcgaccagtagctgctcgagatccgccaaagggtacgcaacattccaacctccgatccgtcgcttggtagcctgtacacatctctctttcaaaaggcccgagttgttgtgacacacaagagttatgttgtatttgatgcagatcaaggagcggataagccttcttccgagaactctttgatgtaatagtaagatataaacatcactgtaatagtaatttatttggtaatttatccaatgctcaatgtttatatgtgggggctggtttggaatcgcgttcatggggttttgatgcagatcaaggagcggataagccttcttccgctgtggcc

SEQ ID NO: 6091 - DNA, 1022 bp, Zea mays
  Intron number 6 from transcript GRMZM2G342607_T01 (locus G RMZM2G342607) derived from phytozome v7.0 (chr-ID 2; pos 4 198906 to 4199927)
aagcttccattttgtgagtgattttaagcaagaaggtaaatatttcatacggaacctgattatatatgcctaaagcttcacctgctgcctattgcccaacagtgctgtcatctttgttaagacagttttatgccaatttcacttcttctcaccagcacgtacaagatgtctgtcgtgactggtcgtctaacaagcagaatccataacatgcttctttggtagagagagacagtaaattgatactgtcacttacgtgaatgtttattattaaatgaaaatacatttgattatgatcggacacttataaaaacttgacttgcggggctaagacaacctccgacattgtgtgatagagaagacctctcatacatgccaaaataaccttgcccgcgtgagcgaccgcgacctgatcctggtcatagtcacaaagttcgtggatcgatagggtcgaggaacatcatacgctacctgtgagagatttttacatggtgggaacaaaaatgaccttgcgtacccgggtcgagggtcgctaccactgtacccatttcttgtgactatggtttgggtcttcgacccgtgctttggtgtggtggcaggcgaggggattttttaaccccagtctgaaataatgtgttttgtttttatgtaatctttgtgctctaatatactgctccaattgatatgttggcctgctaaagctattattttcagtttgcttgcatggaactcattatttttactggctctgttttatttaaacttatagtagcacatgtgtccattattgatattgattaatctagctcctgtcattatgttcactatattgaattagttttgacaaaaaccctggtaagctggaatcacattgttttgtagatgtttttcttcactataaatgcttaaacttaacctgataaattcatctacaggctcttccaaatggcaagcccactattgttgagttttatgcaaactggtgtgaagtctgcagggaactagctccatatatctacaaagtt

SEQ ID NO: 6092 - DNA, 474 bp, Zea mays
  Intron number 2 from transcript GRMZM2G474726_T02 (locus G RMZM2G474726) derived from phytozome v7.0 (chr-ID 8; pos 1 32195837 to 132196310)
gacggggctgagaaggcatcggagtattttgctgggtgtgttctatgcatatccctttgtatttagcattgacgctgttttacgaaataagtttgactcccttttgcattaggacttccaggatcacatatcaagaacatcacatttgagaagcacacagcactgagcactgcgtgttacctttaacttgtgtttgttttctgaatggatcctctgttgtttcgtgcaagttagtttatttacatcgcatattcatctagtcatacatcttgctatctatctattccatcttcctataatcacttccatttaaatgctattagtttgtatacttaaagatgggtttgattttatgttttttatataacatgattaatcataacagcactttccttgaactctatacataacaatgtaatcctgtcctgttatgtaacaggtatttattggaacagagtttgtcggtggacaatc

SEQ ID NO: 6093 - DNA, 903 bp, Zea mays
  Intron number 2 from transcript GRMZM2G136975_T02 (locus G RMZM2G136975) derived from phytozome v7.0 (chr-ID 2; pos 2 9622585 to 29623487)
tcgacgccgccggcagcggtagccgcagcatctctgtaagctttctcttttacctggagctattaatttcctgaatcccacaccgcatactgttctattatatcgcagacttttatccttcctgtgggggaacagaaatctgcccgtgggatgacttaacaccatgttagctgagcatgctttacattctttcagcaagtaccagagtaggtgttccccactagcacttccattaaacaagaggaagagcagagggggaaatgggaccagagcgttttaactaggcactagcattctcctgattgccacggttgttttctgctaaaaggttttgtggttggtcggcgttttgcctttgaagttttgcagattgcaatcagtgctgtgatagaccatcttctcaacattccaaacatttttgttgggtaaccaaatgatttgcctgcttgaacatgttcaacttgttgatgaacccatgtactttgtcactcctattataagttatatataacttcagaatggttatgccagctgcagttttaacattgcactacagatcatggagatagcttaaaaactaatcacagtatctgaggctgagctgctaggctgtttattttgatgatagtaatgatttgcctcaatggcacacatatttacaggccttcatttctctcgctgtaccagtacctcagaaatgtacaacttgatacctgaaatacaacctctaaatgtttgcttggacaaattaaaatcatataacctaagtgtgcaagcatgattctgtagcgaaatcagtgaagccttacttcattaatatcaaaaggttttattcaatttgctattagtcaataactcttattttcctgcaggtaaaagttattcaggattctagacctatac

SEQ ID NO: 6094 - DNA, 831 bp, Zea mays
  Intron number 2 from transcript GRMZM2G137550_T02 (locus G RMZM2G137550) derived from phytozome v7.0 (chr-ID 2; pos 1 69146018 to 169146848 reverse strand)
caagctcacgccggcgcaggtcgccgcgttgcagggtgagctctattattatatatatatctgcaatttctcagtgctgtttatttttttaatcgtgcaacagaatcttcatcccatggttgcatttatttgattctgattttttttctcttgttcgtcacgatcccttccggatgatcaatcgtgtcaatccatggtttatatatatatatatatatataataactaagtaaaaggtgagagaattgaaggtttaaataaagtccagttgacggatccatttttcttagtcacaagtgggcggagagggaatcctcttggcaattccgaggtcaatgcgacgcgtggtaccttcttcagtagggtctcagttttgctgagcatatatatctacgcttgtttgacttgacatcatcgatcggccggcgttgcttttaatttatctgcggttccgtagcttaaaacttcgaacagtgtgtcagtgtcaacttttaacatactagtaaaatgaaaattaatcttccctcgactctttctgtcttcttcctttgcgcctctcgtatgtcacacaaagaagacacaagctttttacttttctgttaacaactccgcaagtctctcatcaaaagtgtaaaggtaatgtaaaatttcaggcaggtttctgttaacaactcctgcagaactgaaaccgctgtacgatcgatcgatgtccgcatgtaaaatttggcaggtttcgaaacacaacaggcgcctggtcaaggaaataactcccgtgttttgtttgtttcttggccagaacatcctgacgtgctgcaggcgctgcctgacgtc

SEQ ID NO: 6095 - DNA, 889 bp, Zea mays
  Intron number 2 from transcript GRMZM2G148231_T01 (locus G RMZM2G148231) derived from phytozome v7.0 (chr-ID 2; pos 3 8095877 to 38096765 reverse strand)
tgctttgagccgaccactacgccttgtggacacaggtaatttattgtttccttttttaaaaaatgtggttgctcgaattctgcatgcaaaaataagagataaaaaaattccttggttgattctgtttgcgcccgtgtgcaaccgtaggattccagttgctttctgtgagtggcacaattcattttgtatgctgattggctatcgaaagtgatttcttgcgttgtcgaaagtgcagtttaacgagtgttcctggaatttggtaaaattttgttggttagtgcctgttaattacccacggggaaatggaccacaaaagcttctttgcattgtacatgcccactccttgtacatctgcaattcctttattttcctgattttgtttatatacaagactgggactgccatgatcttcgttgctactttgactgctctgagtaaaaaaggttactgaaagcatgtgtctggcagggaacacagcaagaattactgtatagttcattttagttcctgtaaccatacaatgcagttgctttctcaacgtattttgttcaactatttgaagtgtacattcttgcttcaaagttcaaacaaggattaggctgtcagttacacggcaaaatttgggccactgaaaccttgtttactgtgtagacggtcagttcacaaatctttgttttttattatatatatagaactatgggaacactattctcattgttaggttggagtggaaagaaattactatggacacagccttgtatggttacactggtgttacctgaagtttttttttgaattggtcattctttgaggcagttatgttattgacaattttaaatcaaacatttctgaaactcacattactgctactctgtttaacagcttctgc

SEQ ID NO: 6096 - DNA, 838 bp, Zea mays
  Intron number 1 from transcript GRMZM2G101494_T01 (locus G RMZM2G101494) derived from phytozome v7.0 (chr-ID 2; pos 2 22839871 to 222840708 reverse strand)
aggttcccaaatccagaacgaatttccaaggtatctgactgccaacaacagcacattttctcacgcaacagaaccatgttgatgccatgtgtaacaacagttaaagtagctttgatttcatcaaatatcaatgtcatgctttgtaagatgataggctgtttaatatgttggtgtgaagccatgccattgcaattctttgtatcgaagtcatttttccactttttctggtcctgccttgtttcttggttgctcattgtttacatttgggatttcactttcatgagcttcctagttattattggccttacataactgtaaatatagcatactaaatattttttccctattgacccggaccaatgcataatccaatacattagtctaaaactgagttggttctctttgtatactgtgtgtgttactgaatactcttgaattgctcacaactgaaccctgtaggcaatgtaatccacaagttcatgtatcaaaagacagcggttcataacaactaacattagtatcttccctgcatatacataaacagttgagaactaaatttggctgtggagcatcataatcattaaaaacaaaatatcagaagcatgtgcaaggtgacctcaacatgcaaaataatcattaacattttaagaatgtaccaagaagaaatgcccctccccccatctatgtgaacaaacagtgttcttgttgatgcgctctgcatttctcatcactgtgcgtcagtcatatgtttctccccatgacatttatttttctataactgacgcttaacatttttttcttttttttttggtttgcataattttaggtaaagaaatca

SEQ ID NO: 6097 - DNA, 771 bp, Zea mays
  Intron number 2 from transcript GRMZM2G127141_T01 (locus G RMZM2G127141) derived from phytozome v7.0 (chr-ID 9; pos 1 25125976 to 125126746)
agaacgtacgcacgtgtgatgctttttttttaccggtgcctctggccatttctggaattctggttctgtgatacttggatttggggcttgctcttgtttgtttctccacaatctcctagttatcggcattatggttgtgtgtgctttaagttgtcaacttgtcataggaagcttacagttgtggtagttctttcaactgtaaagatctatgctgccaattcgctaaaaatagctgcaacacgcagtgccttttgagtatcaaagaagcacagctttactgcaacaccggtcgttatgcaatgtattgaaatttctgttctctgcttatgtagaatttctataaataggatggaggacagtactcccatcttcacgctttctatagttgacatattaaagtgaagtggggacatggggttggattagggattgcatatggttttgttttcaaatttaatttatttcggaggaaaaactttagcctatctgtactttgttaaataaggaatatccaaaaaggccatggggtcagctccacatggttggctggcacatacactgacatttatttggcaggcttgtactattgattctcgccacattcattaacatggcttaaagtagtactgagggtttgatttcttcacagaatttgtatgcatgtgttagaaccatcaaccatgttgtacttctactcagcaatgaagttcctatgatctaatttgtctaataatgattttaacttgtggtcacagatccttgccttaaagg

SEQ ID NO: 6098 - DNA, 845 bp, Zea mays
  Intron number 1 from transcript GRMZM2G471931_T01 (locus G RMZM2G471931) derived from phytozome v7.0 (chr-ID 2; pos 2 8005321 to 28006165 reverse strand)
ctgccgtcgagctcggcgaggagctggtgtgtcttctagctttctcctcgtcgtaatctcggtagacagggttgcgcgcatcagctttcagcatatttatgcctgttactgctcaaatggttgtttattttgctgatcaacggtaataacacatgtgcatggttaatttcttattagtctagcagcctgcatgcgcgaagtttttcttcagctcgagtgcatgcatcatgaccacgacgtgcccataaacgtttatcttgttttctttcgaccttaattgcaacttttcactcactactgcactgaaactactaatgtttcacttcttttcagaaatggcgattttgattttgaatttgattttttggatgttaaaatatatatggactcacgcatagtacaacacatgtatttttttcatatacgtatatgtgaagcactgcaccaaccaccatgtaactttgacatatagggacccatgcatgcatatatgctcccgtagtcccgttggcatcatctcctcactcattataatattgacgctccacgcctccacccccactactagtgattattcccatgcatctactgaattaattttcaacaattctacgttcctggcacatcctcagtttcagttaatatcttcttccacttcatgcatggcaatgtatggatgcagataaaaaaagatatgtaaggtcacacaactagctacctactatatgtagataattaattaatggactagtagacatacccatcacgttaactagttccattacatttgtttaattatcacttgaattgacatttgtaggtctcaaggaacatcgatctggtct

SEQ ID NO: 6099 - DNA, 736 bp, Zea mays
  Intron number 1 from transcript GRMZM5G844882_T02 (locus G RMZM5G844882) derived from phytozome v7.0 (chr-ID 8; pos 1 52534842 to 152535577 reverse strand)
cctgccttattttatccggattctttgagaaagaggtaagctcaatgtttgtttcaatctaattttttagtatgttttaatttcttcgcatctgctggagactttaaatttgaactaagtctcaggagaagcatttgaattgttacagatacttttggtctcacctaactgtgtggtatttatagtttgctcatttgtatacaatcatcggctttacaaccttgtttgctcaacccaaaaaaaaggtgggcagaaactgtctgtttcatcactcaccaagcacacccaacgtacatttaaggagaacagcacaagaagacaagaagcacctaaacggaagtgaataattaattaaccatgtaaaaccatgtcctcacacgtttaagttgtttacatttcctcataaatgaatttgtaccaattcaaacaagcttgttagcaagtacgagtagcatttgtgttagaaaaatacaagaaaaaagatctcttaagttctcaacttttgcttgatcttgtgtgttagactgttagtgttcatatggcgcatcccaaatattcctgtcctgtaattgaacacagacagcccaaatactccttctgtaattgaacacaagaatatgtttagttgatggtctggtcatggagctcaaatttggttcaacatgaattatgatactgactgtgtactctagatatttatgtttattttttgcaaatttgtttgttcatttcagac

SEQ ID NO: 6100 - DNA, 717 bp, Zea mays
  Intron number 3 from transcript GRMZM2G047104_T02 (locus G RMZM2G047104) derived from phytozome v7.0 (chr-ID 9; pos 4 8739591 to 48740307)
gctcttggtatggagactcttgcgcctggtcttcttattttgctttttgattgcaacatattacatacaagtttttcaattttcagaaaagtgataggggacgtggttttatatacacacgttattgctctcatctaaattctggacagattcttacataaactttttgagtccttatatcttactcagtccattttttttatttgtcgcgaatgaactagcgggcgataaatattcgagaacggagataatacaatttaaatatgcacttactaacaaagtccgttaaaaaaataaataacaaattgttactcgagatagtgtttttttatattgtattcatgtgccaagctagagagattgtccctatattagcttatcgcgtcgctgttttgacacatgagtcaaaataaaatccaaatggcagcgtctaggtccagcagatttttccagtggtttggaggaaactatatcataagaaaaagatgttaaattaatgtaagagagaagagatcggataacactatgaagtgcttgcctgaaaaacttgatcatttatttaaattgcttttctacccttattagtcgttaattgaaacctgccgtttgtatggatataaagtttttctatgcattttgaagttttattcttcatattcacactgttaattatatattgcaggtaccttgtcgaagaattcttgactgaaaagtttt

SEQ ID NO: 6101 - DNA, 640 bp, Zea mays
  Intron number 3 from transcript GRMZM2G422938_T01 (locus G RMZM2G422938) derived from phytozome v7.0 (chr-ID 2; pos 6 0768592 to 60769231 reverse strand)
gaagggaaatcctatttcaggtgagaatttgtccatgcttacctcttgctatcatgctaaggatcaaatttgatgaatagaaacattatcaaagctctattcatgtgaatggatctaattcagttgcttaagcacaaaaagaccattttaatagaaagattgatactattatttttttcagtttgtgatagatgattctaaaatttgtgacctgttgtttatgtgtcaccataatctatgtttacctcgatatgggccactactaggattctagttcaatgtaggtttgagtgtttcttgcatgctacagcacctgtttatgcttgttgagttgttttaacagctaagacataggcttcgtttggtttccccaagataatagaatctgcagcgggtggggtatccgagaaaatacggcgagctcttgattgtgagattttgtttcttcgtgcacagaatccaaagcacagaataagctacatttggaagtctaatgtgttctcagtattagatttccattatcccccgtaaaccaaacacagcctatagatgagctaacaagctttagttctcttgcgtattttcctgatatcgatatgtgttaggcttttaactgggaatccaataagcacaactggtg

SEQ ID NO: 6102 - DNA, 517 bp, Zea mays
  Intron number 2 from transcript GRMZM2G175362_T01 (locus G RMZM2G175362) derived from phytozome v7.0 (chr-ID 2; pos 1 1538872 to 11539388 reverse strand)
taaaggttacaggggtatgtataatcccaaacgaatttgtttgatctgttctttttacttgaatcagttcacctgtggtgcctttatttatcctatatgtttattttattgcactgttggtaaataatactgccctgacacgtgattattaaagttttcatttgactcaaaatgagcaacggtttctgcaccagtcttaaaatcttttcatgttttctctgccacattgttaccttttgttctgttcgcgagcacataatttagcaatataacacaagactgttgcattttgatttattattttcgagtcaaatgaacatggtatatgaaaagctttttataaccacagttcaacaacataattctttctaatttagaagaagacattgacccataaagataccctcaaagcatgcttaatttccaaacaacaatatttctccaataatttagaatgcaataactggtgtttgaattgacaggttgttacttgtggaaatttccccctcgaatcctc

SEQ ID NO: 6103 - DNA, 928 bp, Zea mays
  Intron number 1 from transcript GRMZM2G379758_T01 (locus G RMZM2G379758) derived from phytozome v7.0 (chr-ID 2; pos 7 095794 to 7096721 reverse strand)
gctaccgtggctggacttctccagcgaggtgagggaaaagatagaccctttgttttgtcaagtcaatggtatagtgcggtttggataattagaccttggaatccaggtctacaactataacatgttgttgcttggggacaagcaacatttcgacggggcgataatgtaacatctggcccacttgtaaagtggtgacaccgcagcccagtccatggcccaagtcgagatgctgatacaaaaggacattcagaacacgagaggggcatcaaagagaatatccagaacagttttccagtcgtcttcctcgtggagaagcggccaggcgagtttgtcggagtctcacgtcccgttcctcgtcgacggtggccacgggacgtgacacactgccccgccggggaatggatccgtggccacccctaatgcatatttagtactattggacgttcttttgtactgatgacaaggttaggtttaactgatgctttctggaaaaacttgagctgtatatcctagttcctatcatgaatcaccaacattatacatttttttgtcatttgtgaacaatccatattgaggtgaaccctgcatttggatctgatctaattacaagtgtatacatgtattatactaacttcgactgttttgcacacaaaaaaaatatattgggtgtgcatgtgtacccccatgtcgtccgcccctgctagctgaacttcatcttgtgtttcatagtcactcgtttagtagagtgatttttaagaattgattcatcatgatactctcttcaaatttgtactcaaattattttactcttgtgtcagtgctgcctccagtttaatgcagtttccgctcctgtttttattgttaattattgctcattctaggtgtactctttgcagagcaagactgaagttaaggaagcagcagaacc

SEQ ID NO: 6104 - DNA, 904 bp, Zea mays
  Intron number 1 from transcript GRMZM2G052200_T02 (locus G RMZM2G052200) derived from phytozome v7.0 (chr-ID 8; pos 1 25011340 to 125012243 reverse strand)
ccgcctccgcggcgctctcctcctccggccgcgaggtacgtccccgctcccgccccctgacatccccccacccactcaattgatagtttttcccctcttgccctccttttattcaattgctcttcggttagtttactatttatgttcttttcgacgttttaaactcagctacatcttgttgactgatgcttgtgaacggcatgaaccgactagcagtttatgtagtaggaaatgcttcaatgtcccattcgggtctcgtgggcaaatgatattagtactggatggtgcataactccgatgtagtagcttatttgatctactaaaactttattttagtttctatatttgtcaatttatatactaaaatggaacaaaatgaagggactaaatattagtcccttcattttgttcaattttagtacttaaattgttaaatatagaaattaaaacgctattttagtttccgtatttggcaatttaggaaccaaaatggataaaatgaagggactaaagattagtccctagaaacctaacaccctctaaaaaatagaaagctgagaagactgtgactcacttgtttttctgcggtggcacaaccctatattaccagttgaataaaatgacatttaaaatatttatttgcttttgaatttcgatggaatctctaaactgcctagagcgcttagcacactgagctgcaatttggaaattggaatgaaaattacttgacaacatctgatatactttttttcgtcctactcttgcagttttgcttctcctatttgatacttgccttcctgaaaccgagaaaccatgttctgggttcaagctagaacagctcatgttgatttttttttcttgaaatgcaggctttccataaggtcgtccgcagttgggcttcaaa

SEQ ID NO: 6105 - DNA, 843 bp, Zea mays
  Intron number 2 from transcript GRMZM2G173358_T01 (locus G RMZM2G173358) derived from phytozome v7.0 (chr-ID 9; pos 9 2483938 to 92484780)
ggttcggttcggatcgaggaaactatcgtggacaggtaagtaaaggggtgtttggtttacagggactaaacattagtccctgcactttattccattttagttcataagttgttaaatagagaaactaaaatagagttttagtttctatatttagtaatttagggactaaaatggaataaaattgagggactaaaaattagtacctagaaaccaaacaccccctaaatatgtgttgtgcggcttcgtagtgtgatcatcatttatttgatcttctcagtctcaggtgtatgcgattgcgatctcggagctatcaaatttacaaaaccgcttgcagtagtttccagcatcactttactcactatttcttccttggtcccagattaatttttctattgacttctctggatacaaagtttttattatttatataaaatataccgtgttataattttgaatggagagattaatagatgttaaagatagaatgttacatatagtagaaaaatgtcgcgcatctaatcttagcggtgcctttacctaccatgtaaaggcttattatggctgtgctccctaatctaggcagagctattactggccaagtgaaggtttgggattgggactgagttccctaatctagccagtattgctacctaccatatatataaatcatcctcttgtacatctatatatatgcacacgagtatagtctcaagagggcatgtcttgcgccaatctaacatgatatgggagcccaaaaaaaaatattccccaccatgtatctttttgtatacgttactgtactgattccaaactgttattttactcaatgttcagaaacacttg

SEQ ID NO: 6106 - DNA, 647 bp, Zea mays
  Intron number 1 from transcript GRMZM2G436790_T01 (locus G RMZM2G436790) derived from phytozome v7.0 (chr-ID 9; pos 1 26311745 to 126312391 reverse strand)
tgtttgccgtgagctgtgggtcctggcggtttctggtgcgtgcaagtcgtcaatcactcctagcagcgtgttgtattacaaatttgttgatgatgtttgtctctctcactctctccgtctctttatcacaatagttataatttctgtcaatgattttttatgctttattatcctataaaaagtgtcaaatcactcagtcttcaacatatttgaggatgaacaaaatgttaatcaaagtttggttgttaatttacttgaggtcaatattttaaaaaagatagttgaaccaaagtctgccagactacacaactcgattgaaggactaaaaaatcctcctacattttccatttgaagtatgttcaaaaatatagattagatgctctatatgcaataaacagtttcatagtgcatgttttttggccaggcagtagtatgtgatatggaatgtgattattaacatttcaatttgcttgtcttttcacaacctttatactctgcagggtgtggtcatttttttgtttaattcgtttcgtacttttcaaacctaaaaacgcgaatgcaaactacaaatagcttacaaatcaaaattaccatgttctttttacaaaattttaggttggccctaccctgctctttttaaggctgaa

SEQ ID NO: 6107 - DNA, 914 bp, Zea mays
  Intron number 2 from transcript GRMZM2G035065_T01 (locus G RMZM2G035065) derived from phytozome v7.0 (chr-ID 2; pos 7 3689226 to 73690139)
tgcgtgattgggattgcaggcttctgtggaagcaggtaaattgctcacctgtaattatgctaatcgcatgcttcacctgcatttggttttctttacggattgcaatgttgttttgcggttgcataattgattctttattttgttgcgctagacatggtagctgtttgagcatattgttcttttcaaagtagcattgtttgctctggagccactctggtgctaatttagccgtatgatatttgtaaccaacccaattgtaaacatctcatattctttgaatagcaaagcactatgttcgcttgtttaacactataaatgggcttaaactggatagagcttatcttttgatgtctatatggccaaaatcaagaccttcacattactggaaaattctaaagctattaaccagagaatatgcattgtaatccccccaccccacacattttctgtctgaaggaaacagccaattgcttgtaatccatatttctttaccaacaagttgaaattgccatagctcatgctggtctaaaatgagtttcaatcagttacagtgctatctggaagaaaaatgtattaacatctgcagcacaaaataaatgcactatcaaaacatcccatgatggagttaatgaaactaatttgatgctgtagatgtttgtgcattttcccccagaaacttgttcaaagttagagaaattttacttaggacaacttatattttttggaactgaggagtgaggaatatgtttccgttcacagttatcattgtagcttcttttgtagttgcaaaatttcaatgtataaactataaaccaatttgagtgttgcagcccaagactaagagtctgacttttcttttgtcttcctttggaaatatagaaacaagtctgactggtggtaatcagataggtaat

SEQ ID NO: 6108 - DNA, 1011 bp, Zea mays
  Intron number 1 from transcript AC194032.3_FGT010 (locus A C194032.3_FG010) derived from phytozome v7.0 (chr-ID 9; po s 151698290 to 151699300 reverse strand)
gcccctcagggtggttgcatctgtcccggtgactcataaggatggtggcaccgccgccgaatggtgagtttgtcaacttcactgtgaagtgtgactggatgctcgtcggcatcaaaggttaaattatttttggtatatatttaggggaactgttggagattaaaagaaaatccattcccaataatttttaggctgctcccaaaaaccatgttttggggtgattttttggaagtcttttggagatagtcttagatccaccaaatataagtccatcacaactttgtgacatcttttatcttcattcttccattccatgtctacacttgcttaaaggcaccctaatcaattcagtgaatgtgttatctaccattctaccttaacttagcaacaattggtggcagttgggtcattgtattccttaccttaatcttgtgccagtgtccaaagggactatcagagggagtagtatattatcagcaatttggttgagggggtgcccaagatttattgtctaagtttaatacatgtttttattgagttatgtcaactaaagaaactctatatatgtacttctctctgtctaaagtaatcaagtaaataatattatctgttttgcaacgatgctcgataccttttattttgtctctgcatcacctatactttcattgaaccatatgacaatgccttaatttttttcctttgatgtatgattgtgcagtaaggccgtattttggatattgacttgaaaatacctccaagacctcctggatatgcattcgttgaggtgaggctattttgttattgtctaattctgttagaatgatacattcttttatggggcctgcttttaaacacatgcaactgctccattaatgtgttcagttttaaaacatatttttgatcatgctttaacctttcaaatcaaaatgactggtataattaatttcttttgatgtcaccaaacatttggtgctaacaaaaaaatgatgcttttatagtttgaggatccac

SEQ ID NO: 6109 - DNA, 701 bp, Zea mays
  Intron number 2 from transcript GRMZM2G003023_T02 (locus G RMZM2G003023) derived from phytozome v7.0 (chr-ID 9; pos 5 346432 to 5347132 reverse strand)
tgttgttgtgcggcctccccaatctaaaaacagtggtaatattcttttgtcctcgaaattgttcgtgttaatttcctagtctgtttgatgttttccctgttctaagctcgagatgcttgaaatttcttgtgctactgtaattgaaagtttgaccatcaccatctagatacaatccgttaaatgcttctgctgagctatgtttgcaatctcaccccaaaatagaaagaatgtggaatgcttatttaggtgtatttatgcaggtcatcattgttaatttctaggccgtactccactttaggttggtttgttagtcaaatattttgggcccttaattctttgtgcaacttgtgacttaggcattggattgaatttagttcttctatccttagtgctgttctgtatagcttcttttgtattttctgcttttgttgatcactgactagaataagttgctggtcaaaaacatgcctagtcaaaaccatagaaaatctgatcaggtatggagctgggttgacatggaaggcataacagaagttatatttttcagttgattgatttgtttgcccattatatgaaggcgtgttagctagctagcttgcaatatctgctgatcggtcttgtatctatattggtgtgtccttaaaatgttgtacctccccttttcagagaagcaacagtcaaactctccgaagccaaacaga

SEQ ID NO: 6110 - DNA, 898 bp, Zea mays
  Intron number 1 from transcript GRMZM2G021276_T04 (locus G RMZM2G021276) derived from phytozome v7.0 (chr-ID 8; pos 9 5880 to 96777)
gaggaatctcagtaacaaaccgctcttctgaaaaggtcagccatccccggtccggtccggtgatgtcgtcgctgtcgctctgctagcttgctgccgatccccccccccccccccccccttcttctctctacccctccctccacctcataaatacttagtttaataaccttgcactgccgcagtagcccttaactgctgctatctatctcttttctgaaggaaaaaaaaggtttgatactcctctacctagctagtcctgcatgccgctaatgtgcgtcttgcctgtttatttgttcttaataagggctgcctatctattatattttgcacctgttttgctgtgttcttggtaactagcttaattccttcgcctacaatcgtcaaatcccccccatcatcagtcagatgaacttttgatcgaattgaagttgttcttctaattcggccccagcagcgcccatgcatctggttttatttgctttctgttgggtataatatgcaagaccttttgttgctagggcaaggctgcaaccacatgcgtgtactgaactcatgatgtaactcatcctttttgtttgctcacagaatcactactctactgcacttccttttcatccgatccgcaatcttttttttcttttacatgctttagttttctctctttcttgattacaaacatgattactggaactttcttaggctgccttccccttccttggatctgctttagttttcttttttgggctaccgcgcgcggcttatttgagtttatcacttgctgcatatacataatatatatatacatgcatgcgatggcgttcatgttactcaactacagatctgtttctgttcgtgtgtttcagttcagcgcgcagttaagcatagcaggacgaccacg

SEQ ID NO: 6111 - DNA, 1021 bp, Zea mays
  Intron number 1 from transcript GRMZM2G025095_T04 (locus G RMZM2G025095) derived from phytozome v7.0 (chr-ID 2; pos 1 90685417 to 190686437 reverse strand)
tccgtccgggctcggatcgatttcttcgttcgctggtgagtagcctaggcaagctgggcggggttgtttaggagctcgctttggtctaggaaaccacctattttctgagtgagaacaattacatccaaatgaactctctccattcagccgggagccatttgcttgcttggcaccctattctagtgactctagtccatccacgcgtggttcagttaggttcttcagcgcgcaagatcgacctacactagctgcgggtgctagccatttcccaacaaaattgctatgcccatattaactcctaccttttgcatagggttctttgaggtcttgcggacacctctgttgtctctagattttatctcggttttcgcaatgaataaatttgcctttatatatgttattattcaagaaatcgaggtaggatcaagccattgagctacatttctggtgctgagatctgtttgtgtgtcacatcgacaattgagatgcgctagtgcagttgattaatggggaatatgcagcttgtcttgtgtgcattatgctatgtaatcaatctcttgttcagcgaagcataaaataagccatcacaactgcatttaaagcaaggcttcccactgagccgaaggtcctgagttcgacacagtctctcttcaaaaaatacaggggtaaggcttgcctcggttatttcttcctctgaccactcatgtgggagccgccagcactgggtgtccttttacaactacacttaggtttgaatcatgggtgcttcttgtcatacaacagcttctaactttgtacaaaagattgttaactaagtaggttggtttgcttatgcaggtcggtactcaggttatcattcatcacactattatatatcatgcaatatttgaaccttcatgagtattggatgtgatacataatgtacacatattccacatggaactattcttctgtttgcagcaggaaattctaacatttaccaactgcaggtacccaggctctaataatttgtacaaaaccg

SEQ ID NO: 6112 - DNA, 1024 bp, Zea mays
  Intron number 1 from transcript GRMZM2G414496_T01 (locus G RMZM2G414496) derived from phytozome v7.0 (chr-ID 2; pos 2 33107111 to 233108134 reverse strand)
caaaaataaggtaaaattgtacataactgaggtttgaaatttggttgttgactctacaaccacaccaaccttaccaacataacacacatatttttatgttttattaaaagaaagtctatctatatgatatatagaagccataacaatgcacatgcacgtgtatttgactagtgccaagtaatatgtgacattcttaccatgcctcgaatatacccaaaatacaatttttttggagaagtcctgggatttgggcaaataatctgggaaaatttgttacagatgggagcagagaaaggaaattttggggtgcagtgtattttcacagcgtacactagcttctgattcagaataatagaaccaaaggactcttctttgacccataacccatattaacagctggcttgagtggtgatacaacctactcctggatcaatctgtacttgcagatggctatcttgggagaaattgggagtagtttctaaccatacatagccatctcaatgtttgtacaacactatatttgggaacatttgacatttatgttgcttgtgctttgtattggttcttggctgcttactagtaagcattcaatactctgcatctctggactagcatcggctcttattgtgttctatgtgcaaacccaagtcccaacatacaaaccccaaatatgtaaatcaatcagtctaaaatctttgttctaacaactccatcttgcactactactgatatgcagaggagcatacattatcatgtgtcaacacattacttatattattaatataaacaaaccgatagattatcatgtgtcaacacattacttatattattaatataaacaaaccgataccttcgttgttattgttgtctcttatgatttttattttcttttggaagcaatttctgtcatagtaactattagccttctatgaacttttgatattagttttacactaatttgttacttataattttgcaagttctcaattgccatggtttcttgtatcagtgttctgaaggattc

SEQ ID NO: 6113 - DNA, 830 bp, Zea mays
  Intron number 2 from transcript GRMZM2G039564_T01 (locus G RMZM2G039564) derived from phytozome v7.0 (chr-ID 2; pos 1 17033177 to 117034006)
taaaggaagcaattgtaagtgaatgctcccttttcaactgcagttttatttattgattttagataatgtttttgtagtgttattaatcgatttcaaataaccatataaaatcatgcttgctcctttttctgtataacattgtatatgtatggaagcctcactcttggaccatgcatactgttctaggtaatgttctattctgaattaaggaattgttctgtgccaaatcaaatatttgttctgctttgttctgttatgggtacatcttattaaggaacttttatgttctattctgatcaaacatctattatcttcatctatccatgtgtgttgctttgttcatctgaatcaaacatctatccatgtgtactactctgaatcagtttagtgttctgaatcaaagtttaagtaactatgttggctcagaaatgacaatgcttttttatatgctacttgtataatcgagatgatatgctacttgtataatagagaacaacagaacaacatagatgacaatgctacttgtgcattttgataggtgaggaacaatgctacttgtataatagagatgacttgtataatagagaacacttccctgtattgctacttgtataatagagaacactagagtaattctacatgtaggaacatgacttgtataatagagataacatatactgggtagaaaacaattctacttgtataaaagatatgatgtgctacttgtataatagagatgacttatatattttatatgctatttcttgttttggtttcattttatccatacctcttgtcttatttttaaaccttcccattcacaggacaca

SEQ ID NO: 6114 - DNA, 696 bp, Zea mays
  Intron number 2 from transcript GRMZM5G871572_T01 (locus G RMZM5G871572) derived from phytozome v7.0 (chr-ID 2; pos 2 14238469 to 214239164)
aaggatttaggtcagtttgtgatgggctagggtttggttagtctgtttgtggttaattaataatgcattcagcatttgcgaagtttcattgtttgactccagctatttcttagtggtacttttttattccatatatctgttgagacgagcttagattagtactcctggttcttaggttatcaccagggtgttgtcatatggttttgttccctggtagaactgtaccatgtttacactgagctgacttaactatgattttatgatctacatacatggttgcaaagaatttgactgttcactttgatatttgctcgatttttctccagtcatttcactctacatttaggcatatatgttggttttagtgtggtggtctctaagatctcctaatgggtcgatactaatctatgtttgcgctgaaagtgcaaacatgataagattcttaactcgggttcatatttagcaattaaaggttttgcagattttctcagtatctgatcaacataaagaactgtaaccttgttgtgttttcagtgcttaagaatataaaagaacttcagtttaggtgtgttttttgtacagaatttatcggtcattttgattgtttgagtatatggatgatattatttattttttgacatacctacactgtcttcaacagctgctatcttggacactgcaagtaaagtcctacca

SEQ ID NO: 6115 - DNA, 521 bp, Zea mays
  Intron number 3 from transcript GRMZM2G096647_T03 (locus G RMZM2G096647) derived from phytozome v7.0 (chr-ID 8; pos 2 3804769 to 23805289 reverse strand)
tctgtcaaaggagctttcttcagttcaggtactgctctgctttattagccatccagccgatggatattttctatatgtgtaccgcccctgcactttcaaacacttatgttcaatgtttacaatcacattttttcttctcatagatttactatgtggttgtggtcttagtttggcttgtaggttaatttgtatactcatgtcattttagtttttctatgttgattcagtatgtcttaatttagttaatttcaattcttgatgctaataatatggatagattgtgacactactttctggcttgagcagaaatgggtttgttgcatatagcagaatatagttgtcgtaactggcaacaatgacccctctatggatgatctgaaaactattccgtggtcatgtagttaaatatagctgaatatacattactatgttttattaatcttatttggtttttctctcaaaagaacacacctctccatctttcagtgcttggtggatcaccgtctaaacgatccaccacc

SEQ ID NO: 6116 - DNA, 881 bp, Zea mays
  Intron number 1 from transcript AC215678.3_FGT008 (locus A C215678.3_FG008) derived from phytozome v7.0 (chr-ID 2; po s 10749694 to 10750574)
cacacgctgcacggcgccaacaagcaaggtactcctaccgccctacgtcgcatgcacgcacactgacacacacttccaccgttccaaattcaaattacaagctgttccaattttaaattttattagagagcaaaatcattttaagtttgatccaaattataaaacatataaacatttatgacaccaaagaggtatatcataaaaatataattaataaaaagttaatgatattaatttgtcattgtaaatattattattttattataagaatttagttaaattttaagatattttaaagttaaatgacttttaatttagaccagaggaagtatataagatttttcccaacacaggcaacacgtctcacaaaaattatccttttatttccacgctatataaagcaagtaggtcagggtcgtgttcaaaaccttcgctggagccatgggctggaagctctcgcagcaaaaaaaaaattatgtaaatccaaacaccttcttttactgtccttcacatttagtcccacaaaaacagattaaaatttgcaagttaaccatttagtaatttgtttttcttctatttacgaaccaccaggtggtgaatgtgaggagctgcaaaaaagattatttgcatctcggatgtaaagattttttttcctctggcagtggttcttgttcttcgccggcggcgagggctgcaacttcccatcgttcccaatctttggccttactgcgacccggcgtaggtgcgtcaaggtttatggattgcatactgacgagtcgtaaatcgtaatcttgatgcgacattagttttaggttctacttcgacttctcgatgaccaacatcggcgtcaggctattcagcctgtgcaccacaccatctcc

SEQ ID NO: 6117 - DNA, 644 bp, Zea mays
  Intron number 1 from transcript GRMZM2G051355_T01 (locus G RMZM2G051355) derived from phytozome v7.0 (chr-ID 2; pos 4 4855045 to 44855688)
aaccggcaccaggtcaaaaaacgacgactgggcaggtttctccatgatcccatttgataggttgtactaccttttagtctgatgcagaattctagctacgctaggtgcacaactgaggagacctgctgttgtattcctaccaatatatgcgccgggacgagcctgtttctggttgttcttgtttctttgaacataatgtgctttactgaagcacacgaactggctgtcgaaccaatagagctcaccttgtcgataatttccacccgtggttattcatatgtagcttggtgggtagatttagagtccataatagatctaggaaaataaaaaaaacatttgaaggcataaaatgtcatttaaaatgttgttcaattattgaaccattgtgatgtttccttctattttctgtgttgtgattttgtcaccaaatttgctagctttgatccacatcacgattcatacacgttttgtgctatccttggtccatcttctataaccagggtactttgattctgttggatttatgtaaagtttggtttttaatgaggctgtttcatgtaggcaccgtatgcatatcctgaatttcagcaccgcatacactttctacagggcccttgccacaccagacaagcacagacaaacac

SEQ ID NO: 6118 - DNA, 638 bp, Zea mays
  Intron number 4 from transcript GRMZM2G398736_T02 (locus G RMZM2G398736) derived from phytozome v7.0 (chr-ID 9; pos 1 5585395 to 15586032 reverse strand)
atacggtcagtagatatcttcgagatatatgtttccttcgtaaattaactgtgaaggttataaaatatgggttttctttagcttagagatctgataatctgatagctggttgtgtaagtacacgagcaatcccatcatgctggtgttactggtaagttacttgcatcggaaatatttggcactagtatttagcatgtcaaccaggcaaacttctagtaaatatcatgagaatatggtagtgatgaaatgctgaatcatgaagtgacagctttcagatttatcaccttgacatcttatcaacatgttctattggaaattgtgatcgtaatcacagtattggatgtatgctttgcactagaaaataaaattaattatgcaggagtggtgatttagtgatcaaaggggcaattgagttttagggtacgcaagaatttgctatatatctagaattctagatgcataacagaatggatgtagcgaaaaagtcaaagcggcttagaatttggaacgagagggagtactattttttttcttgagatgttgatgcattgatgctgtgttggtgtaaatgccaacacttggtgctcttgcaatctgtaacaggctgctgggagttctcagggtattagtggcggggc

SEQ ID NO: 6119 - DNA, 688 bp, Zea mays
  Intron number 3 from transcript GRMZM5G812228_T02 (locus G RMZM5G812228) derived from phytozome v7.0 (chr-ID 9; pos 1 8312580 to 18313267 reverse strand)
gacaagtccgggatcaaacaggtacgtactgcacgcaatagtcacaggcattgcttctcatcttcgatgatgatctgcaccagctggcgcgtaataaacacacacacacacacaagatgaacgtactacaacatatggaagcatccatcatgcatgcggattcacgtcagcttgtctggctcaccactcacataatcacatgcatcattaatgtgtggttgctcttttggttggatgcatgcatcatgcatgcatatggctggctgctggggcctgggggagacctgatcgacacctgccactgggagcggtaatggtctctaaattttaacctattaaatttaaggaaaacaagcaactaataagcaagtataggaaacaagcatgaagcatgtatagaaaacaagcaagttgtcgtgactcgtgatctttgtctcatcccaatcccaatctgttccatcagacagatatatatagtaattgcagttaactaattgcaattaatgggatgtcgtctagcaaaagtgtcgtcccatccatgaccctttcgccaggttatttaattatactacgtactactagctagaggatcgattgaccaagtcaaacatacacctgatgatgggctggtttatcaaaactcaatccgccagggtgaaagctgcggcatatacggcgcgaactgccc

SEQ ID NO: 6120 - DNA, 876 bp, Zea mays
  Intron number 3 from transcript GRMZM2G479567_T01 (locus G RMZM2G479567) derived from phytozome v7.0 (chr-ID 2; pos 1 72537538 to 172538413 reverse strand)
gatcagcaaaaaagggtactattattgtctgggaggtaaccagttggcttcaactatttttaaactgtcataaagtacatctaatcttattgttgattgcgaacttataaatttataactcatgaaattctttgttgtattattattgctcgacaatcgacataacgagaatatgattgtcatccaaactaaacttgtatcacaatatgtgctttctgtttttgtataagactaccaaacattttgatttaaagatagtgctttctgtttttgtataaaatgccaaacattttgatttaaagatagatcgacttcacccaggattgcgccctaaaaattcttcaaaatgctcatctcagaaaaatgataaaactgaagttaattgatttaataaatggtactccctccgttctttttatttgttgccgtttagttcaaaaatgaactagcgggcggcaaatattcgagaacggaggtagtataacgctttgattttaatctcagtatcttagttgttttgaagatacttctcctagcagatttgaattcgtggagcttgaatttgtttcatatgcaaacccatatacagacccagttgtcctcccaaatatctacaacacattgactgtcataactttcgtttgcaattctttttgtctccacattagcctaaataaatgacagcatgttgtttatttttgggtcaacaatcaaatatgcctttaggaaacacattcatgttccttagatcttgatctttgcaaaaagtggtgatgtaggactaaattgtgacctacctacacacttttagtgctatcttttgacttctgcttatttgatgctttataaagtgtcccaccctttgctcaatcatag

SEQ ID NO: 6121 - DNA, 817 bp, Zea mays
  Intron number 6 from transcript GRMZM2G088261_T02 (locus G RMZM2G088261) derived from phytozome v7.0 (chr-ID 2; pos 1 61862165 to 161862981)
cattgaccatccttcgtgcatataatacttctgaggtgagaaaccacaatcatcttttctctttggtctgcaaattgttgttggcttgcagaaaattctgtttcctgttgtactttgttcattgatttttccacgtcatggtatagcagttccacttgagaaaaacatatcgattagtactattattttgtgttagcccggtacatctgttttctgatgtagttcaagtatgattggaactctttgctttgaatgactggcacaagtgttttcttttcttgttatgatgtggaggtcttttcaccttttcgtatcatatttgtagttctgtgctctttatttttttctcgaacaatgttctgtactcttcaatgttttcaagtcggacgatttgctagtagttttggctgaccgactagggcgattaatcgcgattaatcacgattagtcggacgacttggacgattaatcgcgactggtccaaaccgactttgacaattaatcgcgactaatcgcgattaatcggacgacttgaaaacaatgctctttctcgaaacaaagaatcccaggatgaaagtagaattgtactatttagttgcgagaagtctctggcaatgaaatacattcctatttatttttgctgaatcattgtcatgcagaacctgataattgaaaggtatcttattcaaattaatgattaaaatgtactgatggttttacataaagactccttcacgaaattcttacacctacaatctactctttaatttgtttttttaacattcctgaaattacaatttcaggctgtgacaggttt

SEQ ID NO: 6122 - DNA, 259 bp, Zea mays
  Intron number 2 from transcript GRMZM2G108258_T01 (locus G RMZM2G108258) derived from phytozome v7.0 (chr-ID 2; pos 1 59203589 to 159203847 reverse strand)
tcgaggtggagggcaagaccgtaaagctgcagattgtaagtggcctcctcaacgcttgtacaagtaatattattagttttccatcaacacttgtaagtggctatgtttggctcctgatcttctttttatttgtttttttatatattcaaagcatcaactgtaatatgaaatccggtcagatattattagttgcacctgatggctgatgctgcatgcttcaacagtgggacatagcagggcaggagcggttcaggaccat

SEQ ID NO: 6123 - DNA, 850 bp, Zea mays
  Intron number 1 from transcript GRMZM2G075690_T05 (locus G RMZM2G075690) derived from phytozome v7.0 (chr-ID 8; pos 4 1374066 to 41374915 reverse strand)
cttccgttgacctccacaaccattattcttatcaggtaatgctggcagactggatctcacaatatgtttctgcttatttgatggtgcagatctctggttatatcacagcaatcagtccctcagcacttgatcttatttgattcataactattctttttattgttcaaatgtggaaaaactcactgaattgtagctattgtgtagatgttctctaatactaatacatgtccttaatgcattttcatagttctcgattgaatgatccatggagtagctcaatgagattgggtccatctactattttttcaataaaataagctcaatgactggtcactgtagatttaattttgttccatcctcttatggaatactaatccatacccaaagtttagatttggtaaagtgttttctagtaattaaactttggtattcgcttcttatgtgtgtgcaatagttagtgtgtccttccccatctactattcttcaatagatcgagctcaatgactggtcacagtaggtttatctatgcctaatcctcttttggaatactaatccatacccaaaaaaaatattttggtatctgcttctcatgtgtgcaacagttaatgtgctcttccccatttactattcttcaatagaatgacctcgatgactggtcacagtaggtttaacaatgatggattatcttctggaatactaatccatacccaaagattagattttggcgccacacatacactaagaaaagttcatcctgctaatttgcttactattcactggtctatcaattgaaaatacttaatgttttaatctggttatgtggtttgccttttctttttgctgataggtc

SEQ ID NO: 6124 - DNA, 929 bp, Zea mays
  Intron number 1 from transcript GRMZM2G151418_T02 (locus G RMZM2G151418) derived from phytozome v7.0 (chr-ID 2; pos 3 8987678 to 38988606)
ctcacttcatacgacacagcaaatcctcgaaagtaaaaaaaaagatcttaaccttattcatgtttctcatgcactttaaaaaaaaaaaacaaaaaattgcttgtgtaccttcttacactatgtaattttcaaccatgttcgaaatgtgtcatgacttgtttaatacttttgcttaaggaacacagtatatgtacagtgtttttatggtacatggaaacttggaatttcatggagttacagctttgctggctgaagtaacttttccagaccacacctttctttttaagtcttgcttttcttcaaacatgtccatgcttgctttggtcatgcgccatgcattatttactaaacatgttgttttgtccagttatatcaggttgttttgtccggttatatgtgacgatagtttgctcacacctcccccttctaaagaacgagtaattgtgtcttgttcagtgctgcatttgtcaaaatacacaaaagctcatgactatagagctccctgccttgcatttactatttttctttcattccatagacacagacaacgatccttcctggtattatgaagcatgctttccacatcagtaacaaaatttgctctcacatcattttgaaaataaaagaaaaaataatcattggttgattcacaatataagataagggacaggtgtgcacttctggagtattttgatgcttttggctagttctagttctaacggatcaccaaactatagtggttcttggttataacaaagctgtgtcatcccagttattagtgaaatattcttgaaacatatcgcttgattggtgtggttatttaaaaattgtttagtctttgagctctagtttatgtttgtattaaccacctctttttttgtgtgtgctgcttagagatacgaaaattatcagaacttggcaaagaactt

SEQ ID NO: 6125 - DNA, 738 bp, Zea mays
  Intron number 5 from transcript GRMZM2G321767_T03 (locus G RMZM2G321767) derived from phytozome v7.0 (chr-ID 2; pos 1 66493857 to 166494594 reverse strand)
gcttgactcgtgctccatttgctgttatcgtggtaagttgctgtattagacagttgtagcctgtagtgcatgagaatctcctattgactataagttgtttgaagtaacaagtttcaatctcgaaaagagaaattcaaacccagttgatttttattttttatgctttgttatgatgctttcacttcattcattgttttgttttaaagtagagttgtgcagtcagtcttgtcagaatacagcaattcaaacattgtacccagtagcaccatttttaccttcaagaaaacaagaagtgtaatccttcctatgtatggaattattcttagtattgttgacccaccttttttctcaatcatgttgacacacttattttttctgaaacatgtctttttttataagatcaggcatggtgacacacttgtttgtttctcggccatgttggtacacttattatagcacatgctaccatattagatgactatgcaattctgaatgaacctttttcagattaaaatgtatttttagctgttgctgacaaaagctctttttatgcagggcatatttaccttactttcattggtggcatgcatacctttgggcgaacttctctttttccacataatattgataagaaaggtctgcatgcaattccgtgggcactgttacacatggaaatttcggtctggtttgctcagctatgctcccttttctatgttgtatttcaggggattacaactt

SEQ ID NO: 6126 - DNA, 967 bp, Zea mays
  Intron number 3 from transcript GRMZM2G396516_T02 (locus G RMZM2G396516) derived from phytozome v7.0 (chr-ID 9; pos 1 217167 to 1218133)
atttaagagtggccctctcttcatatcatcgaaaggtaaaactattagtggcacacgttggttttttcctttgtttccaacatgtaacattatattaggggtatgtgcagtttagggtaagtaatatactcctttgtgctcagtaagtaattgatagaaggtagaagaaggtagaaacatatgtgcagtttagagtttacctctttatgatttctgggtagccacaatattttcacattgcaattcaagtccttagtaccctggtaatcaaactaacatgtcagagcatcaggcaaattcattgtgcacctgcctattgtatgctaaagaaatcagtttttttgcatgtgttagttgtctcctaacctgctgcattttcaatttttgtgttctgtgttttgtaatttgggagcaccttcaccattgtgttattagagctaggcaccttcaccattgtgttattgatgatctttcttggtctgaatggagtttttgcacctattcacatgccagagagtttatgcattgtcctccttttttggatacactttctgttaaaaaatgctacacagttgcattctacttaccttgtgattttgatggagctctgttgttgtgcttctttgacatttgtcggtcctttgagcattaggtctgcatcatgcattatgttgttatctattgatctatatatcccatattgtggagatcactaaaatcttagtaatttaagttctgttcaaactttcaattccatcgtccgtgaaaaattgataagtatgaatgtgttgacttgactccattttatcttctccttatttgagcttgtattcttattttttaatacattgctgccctgcactgagatttctattgtaaataaacaaagtgctatttaaattttgatttattccttacgaatgtctgttggtttcaggaaagtgctgagagaggtggcatctagagg

SEQ ID NO: 6127 - DNA, 968 bp, Zea mays
  Intron number 2 from transcript GRMZM5G869628_T01 (locus G RMZM5G869628) derived from phytozome v7.0 (chr-ID 9; pos 1 25118813 to 125119780 reverse strand)
agtcctatttagaagacttcgtcggaagaatcggtgtaagtaaatagtcttccttcctacaacatgtcttggttcctctttcattgtgtttgtggtacatatattgtttgcgctggtttgtgtgccctatttctgtaaattgtctaaacagcgtctagttgtgttgtagagcacatcgattggtatgcttcagtccacaaagtgagttgaatctgaacactaaataaattatgtggtactaaatgcaggagggggtattctgaaatctgctatatgttggactctagatgttggagataattgaggagtttgttgctagagcatgctagaggaaattggagttagtataatctctcaactatacaataatcacactgcatagctgaatgcaagtattttaggactcaaacaaatgcaagtgttgctacatgtgaacaaattattaaactacatgaacgaaagcatgtgccaactagtgctgttgcttccatttttgcgctgcaaagctatagaccctgcattgtagaacatgccttctctgtgctcgtgcaggattgttggacctctattttggtgatgcactgtagatcatgcctcttgttttcaacaaggctgcagctcttagttaagttagcatatagatagcaggtgcacttgatctcatacattgctttactgatattactaaaaggtataatagcctcttatatgactaatgttgagtattgtcgttcacttcttgatgagaccattctatcagattctattctattattaaagaactaagaaatttggctacaagaactgcatatgtttcctctgttccaaatggcacattaccttcattggacactgaattactctattctaatatgcttgctctttactagggtcaatttgccgtcgacaccaaaaacaaagatgtcagatttgcatgtgctgatgtgatgaggtgtgtgtagcgacaa

SEQ ID NO: 6128 - DNA, 544 bp, Zea mays
  Intron number 4 from transcript GRMZM2G389674_T01 (locus G RMZM2G389674) derived from phytozome v7.0 (chr-ID 8; pos 1 00628177 to 100628720)
aacaaaaacgtaatcaggtatcttgtcttctcttgtttatctgatattttgatgtatgttattcttatttgttgttcagtgcttgtttatttgactgctagaactagcaaaaatattgaatgtttcctaccactcatcttttgcattagtgcattgaacggctaaagattcaccgcagtaacatcgtcaattatacaaagaagcattagtgcattgaacggctaaagaatcatcgcagtaatttcctaccactcatcttttgctctgtttccttttagattcagtttcagctacactttcttaactaggacatgcttaatccaggggaaaatagtgcagctgttggttacctgatcgttgatacaaacggtggcctaaaccagatgagaatgggagtaagaatatgattgtgctaacgccatggcaatgtaaaacgatgtatagtacatctattcgtactattattagatattcaaaaaaatgaatgcatattagcattagaccctttgaaccaattttattttgctatttagatctgttagaa

SEQ ID NO: 6129 - DNA, 402 bp, Zea mays
  Intron number 5 from transcript GRMZM2G389674_T01 (locus G RMZM2G389674) derived from phytozome v7.0 (chr-ID 8; pos 1 00628845 to 100629246)
tcaggtatgatacagactacatacacctatcagtagccaatcatcatgtgttcatcaattctcgctgcaattcttagttttttatgcttgtgttcttgtggcaggaatctcaagaagcttgcggcccagagccaaacggatgatgaagatgtttggtgggagtaggctgaggagcattttccatggtatttcagatggattcaaaacagaggggtgacatgcttttggaccaatggatatgacattgtgtttgctttggattcaaacaactacacaatcatctattttgattcaaacagaggggtgacatgctttatccagtggactatgtctgtaaatccattatattaaagccactatgattgattgtttgatcatttctcgtgcaggtggttgaggtta

SEQ ID NO: 6130 - DNA, 258 bp, Zea mays
  Intron number 4 from transcript GRMZM2G373738_T01 (locus G RMZM2G373738) derived from phytozome v7.0 (chr-ID 2; pos 5 7286102 to 57286359)
tcgaggtggagggcaagaccgtaaagctgcagattgtaagtggcctcctcaacgcttgtacaagtaatattattagttttccatcaacacttgtaagtggctatgtttggctcctgatcttctttttatttgttttttatatattcaaagcatcaattgtaatatgcaatccggtcagatattattaggtgcacctgatggctgatgctgcatgcttcaacagtgggacacaacagggcaggagcggttcaggaccat

SEQ ID NO: 6131 - DNA, 982 bp, Zea mays
  Intron number 1 from transcript GRMZM2G325749_T02 (locus G RMZM2G325749) derived from phytozome v7.0 (chr-ID 2; pos 1 07189699 to 107190680 reverse strand)
tcgcagccccgtggtctgctagcggctagccacaggttgggcgcctcctcctcttcttggtgcgtttcttattagatacgctggttcatgagtttattattcaaatccttgaatcgaatcgaatgcattgatggatgatcttgctggtttggtttgaagatgagataccccctctatgatttcggtcctagtctgtcatgctttgcggaatggtggtggtgtctgccatgaatcaagtgcttgaacacatgtggatgagaagccgctaagccttcaagtgctggaacacattgttcttgtactctgtactcagtaccttcaaaatactctgtttcatggaatgatattttttcatcttgctaaaacttaagaaaaacaagtaacatgcatgaatcgaatactctaaggttcagctccctccatgtgttggataccattaaatctgctctctttgtaccctacatatctggcaccatttttagggtgagtgatgatctttagtgtgcattttgttgctgtggctggcgccgttctgctgagtccaaggccgattaagttttagatcatgtgatttattttcctacatggctgattcatcagataagcttccctgtgcctcctaaattgattaccaggtcactgccctggcaatttgtccaaataattgcataacagaaaatgttgttgcatataacagataaaagatattgttttctttcatagatggttttatctatccggttgaagtggaatagtcagctagctattttaagcaggagactttcctagttctacctcagatcaaatatccatttgtgccttagttggatgctataattgtttcttttttgtcctataaagcttataactttctcatgcattttcaccctgtcagcagggttgaaaaacaaataactccacaccttttgtgttggtcctacacactgacatactgtttggatccttgtttttagaatccgtg

SEQ ID NO: 6132 - DNA, 538 bp, Zea mays
  Intron number 1 from transcript AC199343.3_FGT017 (locus A C199343.3_FG017) derived from phytozome v7.0 (chr-ID 2; po s 6178667 to 6179204 reverse strand)
agagtagagagaaggtaacgagccctagattttacactataaagtttaagaatcaaatcgaattaggtttgtgttctaatattatttatttttaaactaaaattaaataaggactttaacttattgtagatagatatttagatcgtgattcaatgacaccttctacacgtgagtgtataaaaagacaggaaggaggtccgcttggaccctgcattggcccacacgatattatgggccggagacacgtcaccattcttttttgaacgtgatgggccgaactccctgaaagaaaacaaaacaaaacatgggccccagcttaagacggtttataccttcctctgaaaaaaaagtaattgaacacggctaaccttccatgcgttagagctccgcgctccagcaatgggcctccatgaagacatctgcttcataattgaacacgggcacacggctaaccttcatattatattagtacaaaccgtacaaccaaacaattttatatatccaactaaaatctaattgtatctgatattttaggtga

SEQ ID NO: 6133 - DNA, 941 bp, Zea mays
  Intron number 2 from transcript GRMZM2G105167_T01 (locus G RMZM2G105167) derived from phytozome v7.0 (chr-ID 9; pos 9 4247490 to 94248430 reverse strand)
gggttacacgatcgccggccgcgtcaagatcggtaagtgatccagctcccactgcctaggtttgcatcgtttagggattgtataagtgtcactcagttctaaattagttgctcctgatgttgctctggggtatatcttttgcaagtttcgatttagtgctctttttggttgctggatatgcctgtattttgtgtggatttcaaacaattcattcatgtaactaaagctgcctattgaagcagttttgattgctaggaaattagaggtatgcaagcatttactgaatgttgaactgacgcaaattgatgagagcccggctgcttgttggttttaggatcatccatggtaaatgattttgtgaagttttaactaaacttatagcttgcaaacttaagtacagccctgaattgtgcaagtgtgtgtgtgcttttcctgttctctggtgtttaatgcaaactaaaatgaatcagcagctgtgttctgtccgaaaaaaggggagtatacagatgtagaaattctgttgttgatattttgatttctgctaatgtcagtgtagtaacctaatgaatttgcaagaagatctttcttttatgatagaatgatgccatgccagcatggtttgtgataaggtgcgtgcaattggaggggctctgatatgtttttgtctggcttctgtctctccacaccactaaactagttttcttgatttgtggatatccgcgttgctacgatgttctgatcaatgcttctgaaatggtttgtatgtgtgttgttccctgagagtactcttagcttatggatatagttatgggatttacagtgaatgatttgttaatttaggtttattgcaccttgaagcatgcttgaaacctaaatttcaagctgaaagctactatcacatgctgtccatctgatgttatatatgtgctatggctataggc

SEQ ID NO: 6134 - DNA, 919 bp, Zea mays
  Intron number 4 from transcript GRMZM2G125679_T02 (locus G RMZM2G125679) derived from phytozome v7.0 (chr-ID 2; pos 1 2345237 to 12346155)
cactacttagagagattgtcaatattgaaacaagggtacacacctaattctttgtattcctcttgcaatcatccactttcctctgaatttgcttgggactcatgttgggtacttgggtttcaactatagcctaccgcaacttgcttgagactaaattgctttgttgttgctgttgaatcctctgctactccaagcttctttgatgtcgagtgtaatgttgtaactggctatcgtttgttggccgaacatttggctagcgtggatgatatatattgcaatgtgaatccaataagcaggagagtgatcaatgtatgtaatcattgtacactaacatttgtcgaatattttgtatatcgttttaaggcacctaaatattttctgaagaattgtataagtttgtagttttttgtgatagtcttaacatttaaatgatgcaattgacatgacactattaaaatcatatatagaagtctgtatagtactgtgtagtgttgaaatagttagattaaaataacaatttatatatgtctggatcataaatagattacgaaacgttttctcacaacagtataacacacatttgtacataagttattgtgatattatatgttttcgctgcaacgcacgggcatttacctagttattatataaaaatctatttagcatatagtgtcactactaaatatactattagtttatgtttcttgagattagtatacaaaattaacctatttctatattatattagtaatatatttattttactaatataaaatttattacttaaattatttttgagattttatattatattttatggaacgagtttatatttgtggttagactcgttaactcaacgaaccggcatcgagtcaattttccaggctcggcgagcgagtcgtttccacccctagccaag

SEQ ID NO: 6135 - DNA, 877 bp, Zea mays
  Intron number 3 from transcript GRMZM2G138195_T01 (locus G RMZM2G138195) derived from phytozome v7.0 (chr-ID 2; pos 1 94813935 to 194814811)
ctgttcaggtttgagtacagatccttttctattatgaaatatgtatttgcccacagagatctattggacgttgcattatatcatcatttgatttgtaaaaaattgcaagatacttcagagttttcttcagtcctgtgcatgttcagatagtatttctaaaaagatgtgaagatgtagtcagttattagtagtcagatattgcaagatactcaaaattgaagtattaggctgtttttttggcatactgcttggataattgggatttgggataatttggtgatgcaatcatgtatgtagaaataaccttggaaagatttttatatcccttagcaacttcagttcccaaaattgaagtattaggctgtttttttggcatactgcttggataattgggatttggataatttggtcatgcaatcatgtatgtagaaataaccttggaaagatttttatatccctctacttattggatgtgccaacctgtttgcttttgatttatctaatctctaatgattcatttaggtcctcttgaattatgttcacggttcggttatcatattcatggtgatttattcatgtaattggattagcgcagtctatctctagcagccttactcatcttccatttaagttcatttagtattattttggctggctgaattgtatatatctatgttatttttactaattgccatcaagactcaaaactggatattctgtcattttggcatactgcttggataattgggatttggataatttggtcatgcaatcatgtatgtagaaataaccttggaaagatttttatatccctctacttattggacgtggaaactgttttcttttgatcttatttaggtcctcttgaattctgttc

SEQ ID NO: 6136 - DNA, 867 bp, Zea mays
  Intron number 1 from transcript GRMZM2G152815_T01 (locus G RMZM2G152815) derived from phytozome v7.0 (chr-ID 9; pos 1 49366471 to 149367337 reverse strand)
gcaagacggtctgcccatcggtcttcgtcactaaggttagtacctccagggtttgatctctccggacgggtagttcgttaattgttgtctgttgcgtggatgcgcttgttggatcttggtgggtttcggttgtattggcatattaatttttgcgagtagaattagatgtgaagggtctcgttgcgactggtatcatgaatgttttaggtaatagtgtgaatatacgatgcttttgatgtcttgtagcctgacagcataggttgtctcatgacttagttgcctggatagtaggggctttgaggtcgtctctatcataatcattttaggtttgtaattttggtttttcagatgattgttaggcttgtcaattggattcttcgagatttctgtgtaggtgtttggttctgagagtgttaatacaaattataatactttttatgagtaatacttgttcagataatgaatgcacataatatcttttgtggtatatttttttgtgcttctagtttgatcccataggaatatcagtgaattcttcgatgccttccctagttttatcttctgtaaattctaaatagaatcattgctggctatggacatcaaatttgacactgctcaagtttttttggtgcgaaactaatcttgtagtgccttgtaatctttggacatcaaatttgacaaacaagaaatttgtgtgagcttctatgtgtatatctggccttctgcacaccgaatcattatatgttgccaaaacacacttagaaatctcaacataccgttctgaactgttttttaaatataataagattgcgtatgaatagtatccatggaaatataattatacattgtattcccatttcacaggcc

SEQ ID NO: 6137 - DNA, 1013 bp, Zea mays
  Intron number 1 from transcript GRMZM2G093065_T01 (locus G RMZM2G093065) derived from phytozome v7.0 (chr-ID 9; pos 9 4797831 to 94798843)
ggtaagcgcccgccgcccgcgacccccctctcgcatctctactacccaaccccgtcgaggtgcaccgtccggctcgtcttgatccatgcaccgctatgatctcggaggcagatgcgtgccccgccagctacgttgctacctgctggggagaccggcgatcccacctcaagggctagatttgatgctggttcagtccgttctggggacgtagatgtgttttagtgtattgggggttgtcgatcgtgggcaggcgttttcgacctggattttgctgcagctgagtagcgcgtgctagtattgggtccaggtatcaaatgtgtgcgttaggatctgcagtaaaattcgccaaagtagagcgacccgttgtgcatggttgctgattcagtaacttagagctttccttcgattagggtgttagatttctcctgtttaactggcaaacagtagaatagggacttgacacgttagtttacacagtgggattggatgagtcgattccatttttcttgttcactttactaggattttgtattatgtttctcttgcaaggagttgattatgagtttcatggtgtacttctgctgagtggtcttgaaaaaaatcagatgtacccagcttcaaaatattgattgccttgttaataagtaggtgtcttgtgtcttctcttctgtggagtcttgagtgtagctttgcttacctggaatataggtgccagttgtaatttagctgcttgatgttttgatccttttcgtgttatcattttaatttcttccaatgctgtcccaatggtcactacttctgcctgaaataattctgcatgcctattgggcaaaattcactgatgcatgcatatgtggcagaatttccatgaaaagctgcccgtgttctaacaagaaacatttcatctactcactgtagtatttgtttccacacaactctgaaactatccattggtcaatacatctcacaggctcattgcttattgactgcatacaggagggaaggaacaccat

SEQ ID NO: 6138 - DNA, 831 bp, Zea mays
  Intron number 2 from transcript GRMZM2G179941_T01 (locus G RMZM2G179941) derived from phytozome v7.0 (chr-ID 9; pos 9 8884931 to 98885761)
gactatcgtttcgcagccggttgagcgggtccaaggttcgttctcatctgttgctttggatcgacagctgaagtgaattgtcagattaggaatcatgatgccgatttccttagttttggattgagacattgagtgcgataaggactaaagaggtgcttagtgccttacttccatggctaccttttctttgcttgcatgccaatcgtgtgtgatggatgcaacgggcatatcgtcagttcagaacaataaatgcacatattcggattggaatatctgtcctcggcagtacaacattaagtggtagaaccgtgccttttcttatcataaaacaaattaaggttctccccatctctggaatctacagaaggagcaatcacatttgtttttgaatatctggtagcctaatcgttcaatgaacatcaaaattcgaacttagtgagaggtcttgtgcagtagtaccaagtatcatatcattgtaacaagcatcaatttgccaggatagttttcatatctcatcagtatcttgatggtgcagctcaaccattcttgttgtattgatagtgttatttagtttctagggctgtcatatgttcgttccaaattccgatgcacttactcctgtattttttagaaagattagaaggagtgtttttgctaaaaaattaaggaaacaacaaggttacattgtgctccagaatataatctgatctcatgtccatgtcatctttgtgtccttttaagggccctgtagaatgtggacatccttttgctaaatcaattctttgataattttcaggtcaagcctagccatatattgcacgccgctggacc

SEQ ID NO: 6139 - DNA, 837 bp, Zea mays
  Intron number 1 from transcript GRMZM2G162409_T05 (locus G RMZM2G162409) derived from phytozome v7.0 (chr-ID 7; pos 3 9504085 to 39504921)
atcgccgatcccgccacgcgctgcccgcagcggaggtgaggtcagccctctcccggcctcggttggttctgctgattcgacctctctctttcgcctctgcgctcggttaggatcatgatccgattctgtttcgcttcggttccttgtggttcgattagtcagttggcgcgccttaatgacctaatgattgcctttaggttcagattggtggatggactcgtacgaagtgcgaaattatcctagatatgtcagctaggctcgtgggcgagtggaattcgggtcgttctcggttaggtggtgctttgcctagcgatttattcgttgatttcttatatatatctaatgttttgaagattgtttgtctatgtagaatttacacggagtgcgtttaatcctgatagtagagacacttacagactagttttaatgccatgaacagagaatcaaaattgtataatagcttatttcacaatgtaaaaagtatggctttgttgccagcttcttcctgctaccgaggaaggaccttaaactgctgtctttctgctgctgagatcgattcagactgtgtgatatgttctcattttaattcgatgggcctgttgcccaaatggccctgcagtccaattaaaatcggctatgtagtctgactcatttgttgagcaaaggctgacttctggtttagcatgtactttttatgacgtagttggattaatgatctgtttcatggcaagtgtatcattcaatttatgttgtcaaaggttccttgttgtcacaaacgtgaatgccttttctctaattgcagacacaataatcttaggtgaggagcatagttcaaaa

SEQ ID NO: 6140 - DNA, 1000 bp, Zea mays
  Intron number 1 from transcript GRMZM2G313020_T01 (locus G RMZM2G313020) derived from phytozome v7.0 (chr-ID 2; pos 1 2450154 to 12451153 reverse strand)
aggagatcacgaacgacgacctctacaagacgaaggtgatcgatcgatccttcggttggcgcgctcttggtttcgattataatttgaagggtggttgccaactttagcgattttgtttttatgtgtgtttctctctctttcgggtagttattgcgtcatttgtgtgaggaggtcgattcgtggagtcatggttagatgtttcctttggttttgatgtgtatcctgctgtttattggcacggcttgtggctgcgtggtagaagctggccattcggatgtaggagacggcgcctagagtcactggcgtttcctcaactccatgtgagaacaatctgaccatagtttgttaggacccctagcccctagatgatgcacgctggtcatacactgggcattggtggtgtcacagccacagggagggcggcgcgtggctgggggaggcgcacgtaggggctggtgaggttcgtgaacatagccacccacatagggtaccactattgaaggtaagggtacagctgtcattttaagtgatagaaacaagaaaaaaataaaactaatcaaataatggtgaaattctattttagagaaatttctcacgtgtaagtagcattatagagaaacctaatctgttaatactcgtggagaagtcgcttcatatgaatactataatagcaaaaaaatcattagttctcatttgtcccacctaacctcatgagttttccccccgagaatgcacatgcgtgaaattacttcacatgcccagttaagttcttaccggcctcacaggcccaaaattaaaacattaaggtactatactaggtaacagaaccaccatggtatattgctatgactcgccatcatatgatcccaaaatttctttgcaagttttctaagtaatgagcaaatatactgtgtccactgctttatgtccacctttgttttttcaccaactgtttgtctattcaggtggagaggatccctttcagctttggttctcttga

SEQ ID NO: 6141 - DNA, 440 bp, Zea mays
  Intron number 4 from transcript GRMZM2G082097_T01 (locus G RMZM2G082097) derived from phytozome v7.0 (chr-ID 2; pos 5 083332 to 5083771)
acagaaaacactactgcttcccatcgtaccaggaggtatgaacttttctgtgctgttaatccacgaatgatgattaagccctttttggattgtacactttcgttggtgatcttcctttgatatgtcctgttcatgttttggtgaccaattcttaaaacattggagtccactaatcttcatgatatactacctcatttttgaactaaaacacgacaaataaaaaagaacggagggagtactttgcctaaagttgcaccttgtcttgtactcttcacaaagacatgctttttgctactcgaaattctaaactgtcatctccataatggatgaaccaaatttgtatccatattgtattttcttgtctcgtaattgataacaatgaaactgatcaataacgagctattaatggtattttcaggcgtcgaaagtattgcagatag

SEQ ID NO: 6142 - DNA, 354 bp, Zea mays
  Intron number 1 from transcript AC206528.3_FGT002 (locus A C206528.3_FG002) derived from phytozome v7.0 (chr-ID 8; po s 90008899 to 90009252)
tcctcacggttgactccatcgaacttgccaagaaggttagtataaacctcatgcttatgctgattaaaaaccttgtatgtctggagaaagttggatttaggactctaagctatgtgtgttgcatgatgctacttgcgtgtaaaggaatttgtgaagcaaaatatactttcttttgctttagttgctcttcctcgttttggtttctcatattcctttcttggcttgtcacttggcattgcatcggtgaggagagcaagtaacaaatcaaaatcaaaagaataaatcacttagtattgggtgtgctctgtgctgctacttttgccttgtttgtagttggtggtcctgaattactaa

SEQ ID NO: 6143 - DNA, 976 bp, Zea mays; identical to SEQ ID NO: 5686
  Intron number 2 from transcript GRMZM2G152438_T03 (locus G RMZM2G152438) derived from phytozome v7.0 (chr-ID 2; pos 1 58371797 to 158372772)

SEQ ID NO: 6144 - DNA, 946 bp, Zea mays
  Intron number 1 from transcript GRMZM2G026958_T01 (locus G RMZM2G026958) derived from phytozome v7.0 (chr-ID 2; pos 5 3938585 to 53939530)
ccgtggttctccctgcactgcgaccctcgttgtcggtaagtgcattcctcagatctgcaagcatctagtgtccacgtagcaccatctaggtcagagttcatgggctggggcgggtaaaacgcgaggtccgaccatggcgccgccgtggaatgttacccgccgccgtgttcagtcaccgggttggggaggaaggttgtgcgtcgtcgatcatgtggacgatgaccccgattagaagatgggtatcccagattacttcccttgatgaggatgttgtgcccccaaatggtattcctcaccccatgcatggccatacagtgagtgggaactagaacatcccccatcattaggtgcactagaataagaaggcgccctatcgggcgctctaccagatcagtgagtaaattgttgatgagtaaccacgctaataactatgttatagatccacagaatagtcattagtgagttgatgtgaaaaatgatggcaaaggaaaaataccataccctaaaaaaagtcacaacatgtatttacaaaaaaaacttattagttccgggacaaaaacataatccacgctgctgcaacagctagtcaccaattgacttaaatttcagaaaatattattgtatatcaagattgcctaaaatctcgatgataggagattggacatgctcgttcctccatgccaacattttatccaatcaatttctatatcaaatattgtcttataagtctagtattccacagcatgtaccaatattcttgattttccacctgtacacatcgaacctctatatccgtagcagtcaaatgtgtgatcagcgcactcgaattttacagcagtcagggaactataaccatttcaacaacccaatgtggcaatgtgaatatgagtgaaattctctgaaaatggcaggctcccaggttaaattacctccccaccaatcaaaa

SEQ ID NO: 6145 - DNA, 767 bp, Zea mays
  Intron number 1 from transcript GRMZM2G080423_T01 (locus G RMZM2G080423) derived from phytozome v7.0 (chr-ID 9; pos 1 30249119 to 130249885)
ctccaagtgggcggacgacgagcaggagaagcccagtgagtgatctgttgtctcccttatattttgataatgcacatcctttgatttagtaaatatgccaagaatttataaatctttctattttgatagaagagacaagttaaatggcaacatcctttgatatgattgtcaaaagaaattcgtatggtttctatcgtaatatatatgtaggttgctgaaacaatgatcaagaatagtaagctactatcaaaatgtttggtggttcagtcagatgttcagaccatgaatgaaaaaaggagacttaaggtaattgcttctaaacactttaatgaaccttatgtgaactgtgaacatggtttaagtctcgtcctttgctcctgccagtttagagaacttgagtttgaagtgacttccgaaagtgccaatatcggtgctgcagtagcggcaatttttaggtaacattcagactaacacaaaattttagatgctctgaccttggcatatgatttatatataaagtttaggccgtcaattgcctactgtagttttgctaaaaattgttccacataaacatatgaataacaaaaaaaggcgtcgacggaggggtcctgttgtacagacaccatccaccataactctactagaatcattaaagcattttgtgcaataaaatctcctcaaaactgcctttttccacctgtgtacttctaattaaattgttgttttctgaaataaaaaactcgtttgatctattttttagttttgga

SEQ ID NO: 6146 - DNA, 560 bp, Zea mays
  Intron number 1 from transcript GRMZM2G078468_T02 (locus G RMZM2G078468) derived from phytozome v7.0 (chr-ID 8; pos 1 06998091 to 106998650 reverse strand)
gggccaagaacgggtgcggggtggcggcctcttccaagatctgtgtgtggggggcgagggcatggcctcgtgggggcggtagcgaggatcatggggcgtcaatggcgcccttttatcgacagagagcagagggggcggtgggtgggcatggaaggaaggaggaagaggatggaaaggagcgaggggggcgggcgggatgcgaggagcgtgcgcggtcaagcggcggctttagggaggagggtgggggaccgcgaccgagacgggattggcaaaaccgtgcagcactctgcactgtggacgcctacgatacacacttaagtagtatacacacacacaccacatgttggcatctccacgcccggatactaagggcatctacaatcctattgattagggggtttctagaatgtattttttggatatcaaagttcatttctctgcctaactaattttaaagaagccatggtgggtgttacctagtcttgtgggtcttgtgatgttttctaccattttctatttatatagacattattgcagttagactggagtggacaactgtt

SEQ ID NO: 6147 - DNA, 647 bp, Zea mays
  Intron number 2 from transcript GRMZM2G062050_T01 (locus G RMZM2G062050) derived from phytozome v7.0 (chr-ID 2; pos 9 1855364 to 91856010 reverse strand)
gcaggaagttcccatttcaggtctataaagaaactgtgcaagttctattcttcactgtttttttgctatatttactgaaatatgacctttgttcatatgatctactagtaattcttcgacctttcaatttcacaaaacttgcaactatttttatgctctgcatcctaccaaaagtatacattgtctttctactacttagacctaggtatgagcaagtctgttgcatttctattctttctactacttatacattcactgcattatgtatttaacttttaagaagatcaagcaagtgcttggtaatcaaagcacttgtttttgatagagacatgcattctttttccttaaattgattttaaagtaccgaataactaagggttgcttaagtaggagcaagtgaactagtaaaaatatgaaattatttatgctgaactactaactctatattgtgatgacttgcaggctccttgatgccgtaagagaatattactgaaatgccttctacttcttcattcaattcacatatattggttcttgctatgtccccctatcgttgtttttttgtcaagattcatggtaaattatctaattgaaacaatgttccaatcttagggtgcacccataaggagagggcatctatcacaaaa

SEQ ID NO: 6148 - DNA, 718 bp, Zea mays
  Intron number 2 from transcript GRMZM5G884914_T01 (locus G RMZM5G884914) derived from phytozome v7.0 (chr-ID 8; pos 2 9905887 to 29906604 reverse strand)
tgctcgccgtcgacgacgacccgacctgcctcaaggtcctcgagaacctcttgttccgctgccagtaccatggtacttccctgtatgcttggtttcctactcttctcatcggattgtatatacatcctgccgttctttttcacctttattgtccccgattcggctcttcggtttggttttatttagtttccgttgttcgcgtaccaactatcaagaagtctatggagatatttgggttgctgtttttgcatttttttcatcacataaatagcaaccccgactttatgcgccacccccacttcatcctcctcctgttgttttcaccatgaaatattttttgccatgtaatgtcatgtcaggctcagtttcatcttctttcttctgcaaataataatcgggtttgactctgccgatccgattttatttgtaccatgcgctggcacacggctatatttagaacaatcttatcttccaaagcttttccaaccgccagctgcgcgatttatgtacacttgtgtgtcctgcaatttctggctgtccatttccgatctccaccgtggtctggttttgttcaacgtaaggaaaaaaatcgttctcgctaactttcctcggagtcgagtgattccacatgtataatgtgttcctccggggggctttgacttgtatacagctatacatgcgctgaactgtccggatttgtgatgtcgcagtgacaaca

SEQ ID NO: 6149 - DNA, 797 bp, Zea mays
  Intron number 1 from transcript AC217553.3_FGT001 (locus A C217553.3_FG001) derived from phytozome v7.0 (chr-ID 2; po s 107451964 to 107452760 reverse strand)
aggagtccccaggttggtgcgaggtacgcgaaattcatgggattccgttgccgcaagcttcggtccagagttgacgacagaaacgaagatagtgctggccaacgggacccactcggcagaggaacacgggagcggccagcgagaaacctgcaggagggaggcgtgggccgcgagcgccattcggcccaggaagcgcaggtttgaccttttcttattttcattttattttctatttccttttcccaaatccaaatgttcaagctaaattcaaatgttttgaattccagatttccaatatccaacataatcctaatgtgattataaatactactatttgcaataatttttatttattttccttcctattattcatttgtgggaggaataatttacttatttttaaatcttctttttctttttctaaattcttgaatttctcttagatcctaaattccactttggagtttaatatatttcttttcacattatatttatattatcacaaacacacgcacaataaaatcccaatatgatgcatattccattttttgtatcttttgtttttaattaatcgttctcaattataggcatgctcttgttatgatgaatatatggcctcattcttcttgacttcaggttttccttttttggggggggctggggaagaaaagactggtttttgttcatcaaatactagtaacgttccattttcatttcccctgcccaatttatggttatggactgcctctattttgtttctagttgtgcaagtttgcattgctgttgcctacaccctt

SEQ ID NO: 6150 - DNA, 562 bp, Zea mays
  Intron number 2 from transcript GRMZM2G006790_T02 (locus G RMZM2G006790) derived from phytozome v7.0 (chr-ID 9; pos 1 02786590 to 102787151 reverse strand)
caagactatcttcgaacagtttggtgagttctgcccttctgccagtgctttgaatagtttgaactgatggccactctgcaaatttcctttcatgcttttagtgaaatgcgaatgtgtcttttggcatggcaatttgttgatgaagcttttcttttcaatcatgttttttcgagattcaggaactggacctgatggtttaactaactcatttactgctgttttgttttacatatagttctagttatttgccataaattgtcaaattttcatactttatgccaatgcttgtttattcgttttccctttggttcctgtacttctgttgtttacacctccctctgcttctatttcttcatttatgatcaacatgattttaagtagcgacatcttatcttttttattcactaaaaagaaagcatgtgtgactgtgggaagtaatcaaagtgggaagactgctatgctttgtggaatattcgttgacttgcgctaatggagacaattatttttgacactgtcagttttcatgttctcgttgatgtgtcaagaagtggtgcttttgcag

SEQ ID NO: 6151 - DNA, 705 bp, Zea mays
  Intron number 2 from transcript GRMZM2G038851_T01 (locus G RMZM2G038851) derived from phytozome v7.0 (chr-ID 2; pos 1 5245552 to 15246256)
tgctctggaattgcgtcgtccccggcaagcaaggcgtaagcaaaaactcacactagttcgtaacattctctgcatttgtcccgcatcgctgtgcatgccggcaacctctgcaccttgcgttgcgtcctcagtaaattctgtacctcctcgagcgttctgctcattgtcccatagactgttcgaacatgtcccacatggaaataaagtggaaactacactagagggcagccggtagcgaataattgattctactcagatacgtaagggtgtgtttggaagcaaggagattgacaggatttaggggatttaaacctctttctatttaattttgaataataaggggttttaacctctttaatcaatccctttgctctcaatccagccataacctactctattgactgtcatgcgaaaaagaaccgcagagcgcgtcacagaatattggaaatcgcaatcttctgtttggttcattttcaatcccaatatcaaatcgcaatcttctgtttgattccatttccatttacattatcgtaggatgaatcaaacaccttgttaattagtgttgacatgtaacatacgaaatgcttgcaagctacttttacaatttatccaccatagatttgttggccttctcctatctcatagaacaaaatttcatctgtatatgcagactgattgggagggtggtcatttcccattgacctt

SEQ ID NO: 6152 - DNA, 1009 bp, Zea mays
  Intron number 1 from transcript GRMZM2G144662_T02 (locus G RMZM2G144662) derived from phytozome v7.0 (chr-ID 2; pos 1 42628831 to 142629839 reverse strand)
ttcacgggacctctacccatcgccggagccgacgcgtagagcagctgcggccacgaacctgaagcattcatccaatagtgttgtgagtgatttcgtgtcctctcctccctaccttctcctccctcccaaactgtttctctccccgcggcgcgacgactctactagtattcctccccgcatcgccccaagaacgtgttcttcctcgtacctattacttcatgcctctgtgtcctcctctcccgcttccctagccctcggccgacttcggccaccaccccctccacctatgcacccgatggtgcctccgcgtccgcgacctatgaaggaggaggaggattgtttctggcctacagcagccatcagggcgatgggcagggcgggatcttcgagtcggattgggcgacgctgatgtagatcaggtgcataggggcagtagcggtggcacacggctgcgtgattcatagctcaacagctgtcagcgtcggcactagtgctgatggggaggcatcgctggtatacaggtcctaaaaggggaacaatgtgagtgcaatgcccctcttctccctcttcctttctgcgcttttcttcctcctcaatttccttggttgacagtgtggcatggatttgtgcctcattgatgtcgcaactcaaactaaactagcactaggtcagctcatgtcgtagctagatgttggcaatgtcttccagctaactctcattgattgcttcacaattattcttacagataagtaaaatggttgtagtggcaaatcatgaacgcgtagctggtgatctctactcaaagactcgaaagcttaggtctatgaatcacccctgcactttgaatcgcttatgtcattattagcaatctcataatatttttcttttgttttagatataatgatatattaataatgatatactaattcatagattggtacctctaataagctttggtacaataggatttggttcagcttctcactttgttttttaaataaaaagaaac

SEQ ID NO: 6153 - DNA, 852 bp, Zea mays
  Intron number 4 from transcript GRMZM2G109677_T04 (locus G RMZM2G109677) derived from phytozome v7.0 (chr-ID 2; pos 5 1927788 to 51928639)
tcccaggaagcgctcctcccgtcaccgcggcaagggtacgctcgcatctcttactccctctttgttcgcttgccttgtcccgatacgtgtcatctgaaatgttctacccttcaacctttagaacttgaagtattatttatgttccttctatttaaacaacctgtactccgctagtggtgtttttaagtaataattttcatagggttgtcttccgtcagtgaaggattgtctattgcatataagtgcaatccaacattatgtataatctgaaaacgtgctgtacaattgaattatgttgctgtgaacattaacctgtttagtatggtatgcacattcctttggcaggtttacttaatgtccaaaatctgatagtagttttcctgtttttgcagtgaagtcattccctagggatgaccccaagaagccttgccatctcactgccttccttggctacaaggctggcatgactcacattgtccgtgaggttgagaagccaggatccagtatgtccacccccttcgtttttgttaatcaattaagctgatgacatagtccagtttgtttatatctgaaaaatgaattgtaacataagcatgatttgatttctgaccagcagttttagtttttttatgaatttgagggcacttaattttagatgataagccacacaactatctcttcacaggcccatagacttactcaaaacaatagatttttctgtttgaatatccacaactgcttgcacccatgaatctcgagtatatggataccatttcactccattatcgtaactgctctgcctacttgatttctacagaactccataagaaggaaacttgtgaggctgttacc

SEQ ID NO: 6154 - DNA, 715 bp, Zea mays
  Intron number 1 from transcript GRMZM2G006450_T01 (locus G RMZM2G006450) derived from phytozome v7.0 (chr-ID 8; pos 1 51311862 to 151312576)
tgaaggtgaaactgaagcaaagaaagccgataaaggtatttctttagttgtatattctttatttttatgctactgatcctgagcttaagaggaagttgctgcaagtttgtcaataatcattttcccttcaggtgtacaaattattacatatactgtaggataatgaagtattttgaaaaaaactggagggttcaagtatattaactcatagacaaccaaaatggcccgagctcagcattcgccatgaaaagggaaaaaatgaacagaagcttacctggtgatatttagttagagcatctagtgaaaccacatcaaatcatttgcttttgtatttgcacatactatatattgttcagatttcgtagtaaaaattttcgtgaacaaacatcatgaaccgaaccttgcacatttcactcatttacatgtataaattaaaatgttggctgatgagcatgaccatcttggcacaattgcactctagtattactgcagtactgctggttttgtggccagcccaagacatttgtccgattgccttttatatcttcagaactgctacatcaacaagcttggaagcttgatcaattgcttagaaactttccacagcaaatagaaacaaaacggtcagaagtacattccagtgaagcgtttgatttgccttaccgaacatttttaacgcttatctgtttctgttactttgcagaacacacacagt

SEQ ID NO: 6155 - DNA, 834 bp, Zea mays
  Intron number 1 from transcript GRMZM5G864319_T01 (locus G RMZM5G864319) derived from phytozome v7.0 (chr-ID 9; pos 1 7315745 to 17316578)
gcccgactcgtcgcgtccgaccctgtaagtgattgcttccttgacccccttctccccccgatccccaattccacctccttcgcatagatcagaatcagatgcgcctcccctccccttcgcatggattgcttgcgggctcttcgcttgcccttccccaacttttcagcttcattcactagctgacatccacacaatccgtgctttgccttttccgctcccccccggatcaatcccaatctcgtttccttcttcctgataaaacagcaacacctttccgcatctgatctcctgtagcctctctatgcaaggcagaaaaaaactaacaagtaaacggatttcgcaagccatggtttacccagctcaattcggctttgactgtttcacctcaccaccttttccttaaattattcggatctagaatattcatagctccactactaataccagttttctcagtgtttccctatgaccccacgatgctgactaaaccgataaccttttgtcttataaacagtagttacgtgttgacttattctagcatacatgattgctttccggtttcgaactgtatattatccttgtgagaaattgtaatattgctatttctgttttagaaaaagcaacagtaagattgtaaccgtcattcttcctatttcccttgttcctagtttcctaaaggttgtaaaggctaacattgagccaaatcagcacccaagctttgattatcaagccaagataatgcatcaggttacagtagctaactttccttcgcgagaagttcacttacaattccacctgcttaatacgtaggtcttccgcaaggataacaggacc

SEQ ID NO: 6156 - DNA, 959 bp, Zea mays
  Intron number 1 from transcript GRMZM2G176977_T01 (locus G RMZM2G176977) derived from phytozome v7.0 (chr-ID 2; pos 1 71066697 to 171067655)
acaccaccggctgcactctccttcctcctcccaaggtaccgtcccccaccttcccctctttctcagaccctggcgcttcccatccttttgccctgccgctgctgtcctgcacgggcgtcccctgatttacaaccctttggctgcagttgcaagagccggattgccaggtgcttgtttcgtttcgggctgtgtaggtgctcggatgctgatttttttcttctttcttttgtgatgaattgtactgggccgatgaaaccgtatcggattgggttctctgacgaggaaatacataactaataaatacacatacactgagctgaggttgaccttgcacattcctgttgatagagtttatattgctgtcagcaggttcagattagtttgtgttgtgctagtaactaatgcagagcacagcgagtagcaattaaaactgtgagttgcagaggagagtgggtgtattggttgctcaatcaatctatgttggagccagtaaacattcttctctccctcctgcactggctctagatttgttccttccatctctttcttaactcttgcctgacatgattttacttcattcacgagttgaaactttaatcagtataaggcagaagccaaaatgatcatgctagctaaggaacaactgctctaaatgaaattactgtttacatggcattagcatcagtatgttcaatccaatatgattgttgctttctggaaattcggctatgatatacatcactccgattgtctttatagaaggattgttctgtttctgttaaattgtttggaagcaattagttattttggaagtctaattgatggatggatatctttgacatattgttattctcgtgataattttgagtctcttggagacaagtggtatctgtgattctagacaattcattatatttattttgactacatagctcatcgctacaggtcagtattcaaaa

SEQ ID NO: 6157 - DNA, 1019 bp, Zea mays
  Intron number 1 from transcript GRMZM2G052142_T01 (locus G RMZM2G052142) derived from phytozome v7.0 (chr-ID 2; pos 3 3802493 to 33803511 reverse strand)
gacgagaccgccctcgacgaggagctcacggccctgtaagtcgcgcaccacgtttctccggttaaacgcttctcctctcgccaagtcagttttaggcgaatacctgctggccgctgttgcgtggcgttcctcacttcaagcgcgggaccgccgcgatgcgcgtgaggagttaagtacatgttggcgtctggttcgctgcttcgaactctccaactgcgactcatgtgagatcggatgtgctcccgctgctgattgttgtattccggattggtgtcttcacaatctattgggtgccacgtgccagtacctttgctttctgggagcagttcgatttgcttaatgcctactgtactgatacatgattcctatctgttgcggatgattttgatgtggtgtatcgaccgctgtctgtggccttctcacatcgtctcataatcagtttcaccgttcttcgtttcaattttttccctgaaaacggaaagttcaatcgatcagctgttcttatgtagagttttgccgtttcgcctaatgcaaactgttgcttttgagattggatagaatataatatcatttcgtttgttcagttggtgagtaagttcagcctgtagggtgggtggatgcccaagcttgctcagcctctccctcgtgaaccttatgttctgctgatagttttgacaattgctccccatctaatacgtattgcttttatcacttccttctgattgctagattttagccattgtcttttgggtgtaattgggtgttcttgtttgaatttgatatttgtctattgtctgcatgaccatcaatagcagacaaagaaactaacttcgatttatatttggagttttaaggggggttgaataactgggttgctaatagaagcaatcagagcttagttccaagagctactttgtgtccctttattaacccgtttctgtttgtatatgcctcaactgcatctttcaattctacatcaatcagggcttcaattttaggggaggacttcaaagtaacat

SEQ ID NO: 6158 - DNA, 737 bp, Zea mays
  Intron number 3 from transcript GRMZM2G095757_T02 (locus G RMZM2G095757) derived from phytozome v7.0 (chr-ID 8; pos 9 922955 to 9923691)
tttttggcttactcttttcttcaggcaccttcaacgtgagttacagagctcttttcctgactctgattattgttttatatcaccacaatcaaaaggtagacttatgcgtagaggtgtccccagggctttgtaaggcaaaaaaggcactgaacaccagctgctcaggacgcagtcatgtaaaaaattctgaaagcattttactttttttcgtgaaagcgcctgaccatgtatttcatttgtggggggaggggggggggagttcgatcacacacatgtcaaagccaagaagagagtataaacttcagaaagcagtttacttgagccttgaggtacctcgtagtcatatagatagatatagtaaggacaatagtcatatggtacaaaagtgatgcattcccacaaactctgtgttcaaatttaacatcttgttagatgactcagtaaaaaaactttccacattgagtgatccatttgttttgttacggaaaatggaaccgcattttctgacaataaatttgttactattttcttgcttcatacttctgctcctagatgacatgcccttctctttgaaataaatgatgggtctgcttcatttcatctgaacaaaacagttacttccttgaagtatatagatttagttattaaggtatattgagtttatgcaaactgttactgacaattatttctgctacgatttagtggactcattagaccacatcctgccatttggaggc

SEQ ID NO: 6159 - DNA, 876 bp, Zea mays
  Intron number 2 from transcript GRMZM2G174919_T02 (locus G RMZM2G174919) derived from phytozome v7.0 (chr-ID 2; pos 1 34608776 to 134609651 reverse strand)
atttgcgaagaggttggcccagtcgtatccttcaggtgcgcttctgctcacccacataaaaactgtaacactgtcgtgcagctctagatgggttgtagaaactagcacttactgtcaaaatgtgtgtttttgccttatttattctgtttatattaaaaacgaaggaatatgttcaggtgttggcattgtgctacaaatgaaaaagaaccacggtgcctcaccacggtcagaataccgactaacggcaaattgattacacaagtttgatggctgaattgcgcttgtgcagcacatatcttttgagcaaatatgacagaagaaagctgtatatgttgtgatgagcagaacagggtaaactaaaaaaatagatgccccctcgccaatcttgctttgctttcaaagattcatgtcttcctcagacgggggggggggggggggtcgttatgattcttgtaaatttacctttaggaatggtaatgatatagaacattgatgtataaactaatgtagccatatgtggaacttaccaagtttcgttgggcatgcctgacatactatagaaccacagttttcttatgaagactatcacaagtgatattttgagttagactgatgcttaaccataaatctcagtaagtccagagcagcactggtatctgacatgtctggcatatacacatgtgcctttatttgatcagatttctcctaggtgaatatttgctgaaactgattttggcccagtaacatgtttgctacggttatgtttttgcaacttgtgaatttgattaaaatgctattgagctatgctttttggcaactgactgctacaaattgcttgcaggttggtgattgacaaagagactggcaagccaaaag

SEQ ID NO: 6160 - DNA, 1014 bp, Zea mays
  Intron number 2 from transcript GRMZM2G109425_T03 (locus G RMZM2G109425) derived from phytozome v7.0 (chr-ID 2; pos 2 17633313 to 217634326)
ggaacaccctcttgaaggaaatggtatgacttcatctttcacagaaacattctattgacatcctgatgatttatgtacttggtggtgtttttttttaatttgcagcaaattcagaacccaactgcaatcatgattgcgaggacggctgtggcacaggatgacacaagtggtgatggcacaacctccactgtgctatttatcggggagctaatgaagcagtctgagcggtgcatcgatgaaggtatgttgttggtttgttctgggaacttgtctaatcttctctgggttggtgtattgatttcattttgtggtttttgaaacttcttttactgtgtttgagatatcatgttggcatttaggaaattaatgtacaaccatatttatacctatataaggtgattttcctagttacactatacaattatgtcaggtgtagctgccatttgttggtaagaatttttacttgatgttaacctttctggatattattttactgtagattgtggtttggagttcctgaattgacgcggcattttgttctaagaacgggtctgcagtttgaatctttatctttatctcatcagatataaaagaaatatcctttctgggtgaagcattgctaatggtttagggatatcacatgatttatgtgatgattcatgacacccaattaatattattttgacgttgtttgaactcagatggcagtcaatttccatgtttaaagttagagagcaacacaaacacaatcttgattaagcattctttttttttcttgtaaacctgaaggtatgctgggaagttcttgtgcagctcattgtgtttagggaacatgagtaatatgtataccaggcttacatggatgttattacattagttagcaaaaaataatattctagaatgccaaggttctactatcttgtactaggagagctgtctttttggatgaagcctttcttgaaataagctattttctataattgtttgtaggaactcatccaagattcttggttg

SEQ ID NO: 6161 - DNA, 844 bp, Zea mays
  Intron number 1 from transcript GRMZM2G121063_T01 (locus G RMZM2G121063) derived from phytozome v7.0 (chr-ID 2; pos 1 0668247 to 10669090)
aggtctccgtcgcgcagcagctcgacgactccgaggtgaggggggggggggggggggggggggggcacgggtgttgtttctgttgcgtgatcgagatgaatttcctgtgctcgtgcgcttacaatggcctgggtcacgtgctgatttgcttatttagagaagatgaacttctggattcgtagttaatgatcaggtgggaagggaaatctgcataaattgaccttttggctaagattgagcgcagtgcaacggcacaatcacacatgcacgccaatttactcctccaacctgaagttatatcacaaagatttacatgtagttgattaaaacaacgcagatagtcttgctagagacaacattggtttggtccatacaaagttgagtacatatgtgaaagcagctaacgaattgtaaaagcaagctgggcaacatcaaaactgaacttacagacacgtagtgtaaatgttcaataatgttccaggtgggttttctgcaatatcatcagctaattcttttttcaaaagaaaacagtagccattgtttcaaacacctgtacttaacaatgatttatttgactatatatcttcaaatgaacctgaattatgatatcaactccctcaatttgaaatatatcacaaacacaataaattctgtgggataccagatacatgtgaaattcctttttggacgcttcaggaaattaggtttggtgtacatggttacttcctaatatgttcctgtttgctgaagaatgtttgcaactgttgatcatgtttcactcattatctttcatatggtttagttatttcatttacatgtgcaggagtttgattttggcaggaca

SEQ ID NO: 6162 - DNA, 218 bp, Zea mays
  Intron number 3 from transcript GRMZM2G121063_T01 (locus G RMZM2G121063) derived from phytozome v7.0 (chr-ID 2; pos 1 0669642 to 10669859)
tcaggtttgctttttttcattctctccacacttcaacttaaatcactaaagttctgttagtggattaaccatgaagaatactatagacatcgaatgaatgtttttattttccatgtcattcaaacttatttcagtgctggagtgttttttccagccaaagtaattatttatccttgaatgtagtgttatctgctgtcagtggcttgaaagttgggcta

SEQ ID NO: 6163 - DNA, 678 bp, Zea mays
  Intron number 2 from transcript AC213388.4_FGT004 (locus A C213388.4_FG004) derived from phytozome v7.0 (chr-ID 9; po s 40736893 to 40737570)
ctcgcaacatcctctctccacagcccctccacccggtacgccctaaaatccctagctaaaatcagttaacacttaataccactaggtaatatctgaaaattgaaaggaaaactgtggaacttcataagtttaacaaggaacacaaaaataacatgaacaatttagttcaaatggtactgagacgcatacctctttcaaaaggcaaagagaatctgaagattttttagctagttgatcacgcagaacttggatctcgttctcagtgtccattgcctagacatgtattcagatgacttgaaatatatttggtaccccataagctccataagtaatcaaataaatgcattgccattactagattcttgctcttagtacttggtgatgttcgttacacctaatcatgcacttatgatgatctaacatagcaggtgaatatgctgcttgtgacttatccgcagagccaaaattaccaacaagatgatttccataaaactgttgcacggaccttgagccaaggatcaacaccgatgagcatggattttcatccacttcaacaaactcttcttaatggtaaattattactgtattaatgcttctttattataaaagtttgggttagtccctattctgccatcttagtatgctgtatttacccttggctcgctgcagttggtacca

SEQ ID NO: 6164 - DNA, 762 bp, Zea mays
  Intron number 1 from transcript GRMZM2G459156_T01 (locus G RMZM2G459156) derived from phytozome v7.0 (chr-ID 9; pos 2 8841727 to 28842488)
aagtccctattgagaaggtatgcaatttctggttctgacaatatttgtttttccccaaattccccagttgcaaaagcctgcagttattgaacatgcagttctgctaacagattttcaataaatctcttctcaggaaatttgtatgggcaatggacattgactcggaattcagattctaggagagcattggctaccatgtgcgagccagtttggtccaatttctagcccttctcgtcggacactaattacagctaggaaggaaagttcgaagtcccctgctctagaacgaaggaaagcacccgacattttctttgtggacccttcttttttcttcttctttcggttcaattgcgttaagttcagtatgtattatgctgagaaatttgagctcgtttgaggacgagtgagtttgaatgcactagagctaatgattagttagctaaaaaatattagtgaaattagctagctaacaaatattctctcggttcttttttatttgtcatgttttagttcaaaaaatgaaccaacgagcaaacaaaatattcgagaacagtgatagtagctagctaatttgctaaaaatagctaatagttgaactattaaatagattgtttggatggcttcaactaattttagtagctaagtattagctttgtgttttggccatagaagacttgttcagggaggatcccatggtcatttgtatgtttccaatttgtgtttttattaaatcattgtctaattggtgtcaggtcttcttcc

SEQ ID NO: 6165 - DNA, 726 bp, Zea mays
  Intron number 4 from transcript GRMZM2G029833_T02 (locus G RMZM2G029833) derived from phytozome v7.0 (chr-ID 8; pos 1 37445395 to 137446120 reverse strand)
gaagaggcaaaaatcaagaatattgaaaggtgggtgtaccagtttacttaagacagcctccaagcattgtttctgcaccgatttatgaataactataatattatatctatgcaattgccaatattaagagtacatcatttgcatctgttatgatcccttctattttcttatctatggtttgtttatatattgtgagattgactattgcgagagcatcagatgttttctaagtgagaaagagagatttctcatgcttgtatgttcaacttcacggttagtttgttttcgtccttccctttgcttgagcttggacggatggatgaagctgagagagctgcttgataaaaatgacttctggtcacagcataatgtatgtccttgatgtggttgtagttagtttcagtagttaaaagcatctcatagctacctttgagcagatttagtctttaacaaccaatcaggcaccaattctaattgtttctatgttcttgaggatgggggttgtgtgattttacctatctattgtgttgctttagaagtagatgtgattttgtgtttcttcaagaatgctcatacaatgtaggaacttattcttacatgatcaaatgtttacagctgactgtaccagaaggttctttttgcaacctcaatttgagatttaaggtcggattaccaccagaggcagtatacaatatcataatcgaggcgggcaacaagggcttgtgg

SEQ ID NO: 6166 - DNA, 795 bp, Zea mays
  Intron number 1 from transcript GRMZM2G453488_T01 (locus G RMZM2G453488) derived from phytozome v7.0 (chr-ID 2; pos 1 05566509 to 105567303)
ggtcgggttcggatcgggtatggtaaatatccgcccgcgacaatacccgcgggtattactcatacccgcccgtgactatacccgcgggtaggattttgtacccgtgcccgtacccatcgggtatcgggcgggtatcggatacccgcgggtataattacactccacacaaataaaacacatggttgacaaatgacaagatagaaaaaaggcataataaatctgattactgttacagaagcaagcaatatatgagtacatagcgtttacacttgaaccaaacttcaaagttcaattcaacaaaacaacgaaggtctcttagagtcttggacatgattacatgaacttgaactgttggacagcaaagaaaaaatagcactcgcctgggctgcaggggcactgccgcactgagcagggagccagggacgcagggcgggctgggcgagccaggggcgctcggtttctgcctttctggcggctggtggtggcttggatgagaggctgagagagagagatggtgagagacggtgagagaccgtgaccggtgacttggacgtgggcgttcagcgacggcggcggcggcgcgctgcagtactctcccggccgctacaacgagaacaccttccaggtcatcatactcttcatttcccttgtgccgatgactcgtattcttgagatgttcttgctatttatctgcgttgtttctttcttggtgagctgacgcgttgccggtttatttttccatctactgctgttcgttcaggggctggatttcgtgctgtctgaggctaggaagca

SEQ ID NO: 6167 - DNA, 496 bp, Zea mays
  Intron number 2 from transcript GRMZM2G147572_T02 (locus G RMZM2G147572) derived from phytozome v7.0 (chr-ID 9; pos 1 0608550 to 10609045 reverse strand)
aaggcaagtgatttttatatatatagttcctatttgtttgttattcaatgcatttattagtgtatcaaataatctacaatttctcaaataaattattctgtcaatctcatgatctgtagtagttatctataatattgttaaaaagcctaagtacaaagatcttcatgtaacagagtgcctatgtaggtaataggtcttgtatatgcaacttttcaattctagagtgcctatgtaggtaacagatgcaactaatacttggtttttgattattgagttgttaaacatagaacaaggctagagtaatgaagttgtatatttgtccagaaattattatatgttccgctctgtctaaggaaaatgcacacatgcttcagaacccatccgatctttgtcattcacaagatgtttttgctagtttcgtaatttaatatctttttgcctgttatgatgatgatcaccagaattggtaccaaggcaaagaagtaggggcaaacaa

SEQ ID NO: 6168 - DNA, 918 bp, Zea mays
  Intron number 1 from transcript AC199701.4_FGT002 (locus A C199701.4_FG002) derived from phytozome v7.0 (chr-ID 8; po s 45879111 to 45880028)
caagtgcaggtgggcaggtactagaaaagcagtagcaccagccggcctcccttcctcaatgcgatgaacaactgttaaaaaagtagtcgctgaggaaaccacaatgaggaaggagccacggcggtggtgtggtgtcgtatgagtagcgctggtgttcgtgtcagtttgcggcgagttgaggtttgttggctgctgcttgctgataccacttttacagtattttatctctataaattttactcactgtgcatttgtcttttctccctaacaaacgctggatggattgacagcttgactccctcgggctgctagtctgctgctagcaaaacgcatgtgcttttggtggcattgttggtggtggtggggttggtgtggtggcttggtgcagctgatgttttcagtgacttgacaactatggagaggttttaaaacagattgatgatagggttgttaagaatgtacgttaaagtatgggggtgcgttaacaaagaaggtgaaactcgtctcgctttcagactatccaggtttctccatatccttactctatggcactatttatatcaagatttttcactctatattataatcattcacactcatgtctcgttatatattttctatatatcaactattacagaatctatctattcatgatctctccagattatatatctagtttcccatgaatatggaaagatcaaaatggatatacgaattaaagagaatggaacttgaatacgtgtttgagataaaaaaaaaagtttgttgccattgcgaagaaacatcgagagagtatgagccaaacgacaaccatttgtctatgtgctcactccaagaacacaaaaggccatgaagacgccacgatgctatctcatttgatcaggttcggtttgtcaaggactacagtctggactttgc

SEQ ID NO: 6169 - DNA, 946 bp, Zea mays
  Intron number 2 from transcript GRMZM2G094959_T02 (locus G RMZM2G094959) derived from phytozome v7.0 (chr-ID 2; pos 2 28081722 to 228082667 reverse strand)
gtcgctgttaccgcactattcagtatccagactctgtaagtaatggctattggaaggaatgcttcaccgttggcatcagagctatcttgttataaaacaaccttacataccttttcgctgctgtaacatgttgactgcagcaagttaatcgccttgagataacccctgacaagcggttcttagctgctgctggcaatcctcatatccgcctttttgacgtcaactcaaatagccctcagccggtacatacaattacatgttttcaacatcaatccatatggatctccatgttccttttccttatttaatgagaatacacctagcaggtaattagctatgattcacatactagcaatgtgatggctgtgggatttcattgtgatggtaactggatgtactcaggctctgaagatggtactgttagaatttgggatttacggtgagcttaagagcttttccaacctaatgtcttgtatcatactatcgtttctcatgctacaagcctattttacttggcatgcagttctagtgaaaacttgaaaaaaatgttcttaactaggggacaatccagtacagatctatctccaggtgctatcatgcatgcttgcaatatggtgctttgggtttgctttaaacgggttaaatattagggaaacataaaagacacacatatagacatttcgaaaataatcatgtgtccacgtcatgaatcgatagctcatccatgaaggatgaccacaccgattttattaaaatcggactatctgaatcttttaaatctcatacaacttctttcatgagtttgtctggtagtgctcctagatggtatgatgtaaattagatattaccttttaaattctgtacaacaaattttcttagctgtaaatcatatttttttgttatttgtgcatgtattatttcaggactggcacttgccaacgagaat

SEQ ID NO: 6170 - DNA, 748 bp, Zea mays
  Intron number 2 from transcript AC195831.3_FGT001 (locus A C195831.3_FG001) derived from phytozome v7.0 (chr-ID 8; po s 115554007 to 115554754 reverse strand)
agattgcaaaggttaatgttgctgcataccaataatgtctaaaattttatcaagatgaaggtatgcctctagatactcgtaaatttattagcattcacctagacaagttttgagtgatgggaaaacctttagaattaagtttatcaaaatgcattgatggtgccttcgtagtttcagatgtaaaagcggagttttctgggaattcaactcttaaactagtcgacgcctttatttctttaacatataaggctaggtgctttgatttatttttgtgtgttactttattgatgtctttgtttatgtagaatactttgcttatatgagggatgcaaaggccgccttcattattacgtgagacaaaattggccaaagaaattacttcattgaaggctcaacttgctgaaaaagaaaagaaaggatttcatgcattaaaactttgcatatagttgaggcttctctccttagggttttcactcacttagaggaaaaatataaagaggttttgatgttgaagatttagagttgagtgggaaagaaagaaggtatctagagaaaaatggatgagaaattaatatgagtatttcctatgctcaacaaatcacttatgagagcttagccatgactgttatgataaacttggagctaggaccaaaagtactttctatgcttaaaactacgtgtggtctaagttgcatgtattcgattcatggattgttttatttgatgaaggaagctaacgacctgctat

SEQ ID NO: 6171 - DNA, 803 bp, Zea mays
  Intron number 1 from transcript AC195831.3_FGT001 (locus A C195831.3_FG001) derived from phytozome v7.0 (chr-ID 8; po s 115554840 to 115555642 reverse strand)
tgggtgacctagcagaaggtgaaggtttggctttttaagaaggtgataaggttgctgaagttcaagctaaagtttagcatgctaatagtcctattgccaaggttataatgtttgtgcatgtagcacctttagtgataactgaagcatagaagggcactatttatgcaagtatcaattttgacaaggaacccaaagaggcaagagttatttgtttgaatgaaagaactatcgatgctagtactagtggccagatatgtagacaccttaaagagagtgttaccattagtaagttgttctattttttgatgaaataggaggggaataggcccctactaaaatatattaaataacaaagaagtttcaactatcacatcgaatgacctattacataaaagattatgtcaaatgatttctccattgcttagtagttatgaaacaacttttccactacattctgtgtaaaaggaaatcaaacaactccttgaaatcatcatagaagttttgaacagaagggtctgagcctcaaaatagccatttattcctttgtttttagattgcctaagatagaagaacgataatatccctggccaaaggcacctccactttggctttgatttaaaggattgcccacgtagtaagaacgtgtcgtgaataggaaacatttagttggctctagcaccttcttgcaaaattgcatctaaaaataggtaagttgtttctattaaaaaaatatgttgtcgatgggtgctaactatggttttgttttaggtgaagtatttagtgagccatcttctcaaaaggag

SEQ ID NO: 6172 - DNA, 649 bp, Zea mays
  Intron number 4 from transcript GRMZM2G082181_T03 (locus G RMZM2G082181) derived from phytozome v7.0 (chr-ID 2; pos 1 7545245 to 17545893)
tttaggtaagttatgcctataggcattgctattttgagaaaatatgtagttgtgttcttaaaagaaaactcggcctgcggggggtaagacagccccgaggcatcgtattaagaagaagaccttctcacacaggtcgagaaaatccccgaacctctgctccacccatatacagcggcactgtagcccatgtgagaacgaccgcgatcggggccgggtcttagacctatgatttggcgtgggatagacgagaggatttttttaaccacaacctgaaaattcgttcccacggggagtcgaacccaggaccaggagtgctactcagaccatctaaccaactcgactagaggctctttcgctgtagttgtgttcttagctgcctgtatttttccaatggagttttaatttcaaagagtaggaatgtaacataattttgaacaatgcaatcttttttgtcctaaattactttcttgtatgtacctctgcagctaaaccaatcaaacccttacattttgtctttctgatacagttcatgatatatattgtttggtgcacttgcagttttcatattttgttttcttcgattgtatgtgtttattatgtctgaacaaatgtaggtggggaagataaaacaatagcctttttaaagagg

SEQ ID NO: 6173 - DNA, 847 bp, Zea mays
  Intron number 4 from transcript GRMZM2G142664_T01 (locus G RMZM2G142664) derived from phytozome v7.0 (chr-ID 2; pos 1 7581450 to 17582296)
cgacgagcggcggactgaatcagcagcgaacaggggtaagaacaataacatcagatgctctgatcagttaaaaaaaatcaaaagctatctgattgtgctgtggttaaatttaagcaaactgtgtcgttgttccggtacatacagagtttatctgaaatcttattgcccgtgcctatgtctgacaattatgagagtaggagcgtgtactgatcgacatgctaccattgtagcttttcttcagttgtactcgtccagcgtgtacaagttagtcatttaatccaaccactatttgatgcgatcggtgatccgccagtcactcctataccccaaccacttgttttgttggccttgtacgtcaccgcacccgtgcatttctcacttttgttggtatgttccaactactttctggcgccctcagcggctatcgtgtatatgtttcatttcctgccagttggcacttgggtacaactactgtcagaaatgtgtaaataatgcttgcctactcctgtcgtgaataagaataaacttatcattatttgcaattctgtagcatgatttatacaaatgtatagttatactgaagtggttttggtaactaatctaaatacatttatgtttatttactacaatgttttgaaaagttagccattttgcaaggtaatgaatgtgtgtgagatctcatgtcttcgtctctcaataactggagaataaattaaacataagaacaaaaaatcttcgcttccaacatcatttattttaaaatgatgatttgccgatttatcttgagtcaatctttcaccaataaataacgggaaattctggtacttatctgatttccagatcatag

SEQ ID NO: 6174 - DNA, 783 bp, Zea mays
  Intron number 2 from transcript GRMZM2G097987_T02 (locus G RMZM2G097987) derived from phytozome v7.0 (chr-ID 9; pos 1 19288239 to 119289021)
ctgaggtcaagaggtatttatttggatttaaatgttccttcctctatcaatatagccactccatactttagcactcttgtaagctttgtttttgagaccttgtggtgtcctgttcctgtgtcattggggagaattcagtacctgatgtacaagggaactaagggggtgtttgatttctagggactgattttattccattttagtctctaaattgccagaaattttagtttttctatttggcaatttagagactaaaatggaataaaatggagtgactaaaaattagttcctggaaaccaaacaccccctaagtctcacaatatatatactctgaatgaagagttcattcacagcactagacactgctgaatgaacactgtgcctataagtaattcttactacaactatcttggtattctatgttagtgcaaatgtacctggaccatagttataggataggagctattttagcagtttgacgaagtgggcacttgactgaaaaatttctgaaacagttacttgttccattggcttattatatacttggtaactaaacagagtgtaagatgtgtgtgaaacaggaagggattaataggttgtgtttcctatagttgcattatagtatatggagctactaagtactaattactccatccgttcttttttatttgtcgcattttagttcaaaaatgaactagcggacgacaaatattcgagaatggagagagtaccaagcaagtatctcttcaagttcaccacccacatttgcaggctcttctgaaa

SEQ ID NO: 6175 - DNA, 1028 bp, Zea mays
  Intron number 1 from transcript GRMZM2G160994_T01 (locus G RMZM2G160994) derived from phytozome v7.0 (chr-ID 2; pos 4 4263747 to 44264774 reverse strand)
tcacccgcgtccgtcgctacaagcacgcccttgaggttcggcaccggcagaatccttgtcccttgttattattgctcctcctgccataggcctcgtgaatgcggggttgaattcattgtctgtgctgcgcaatgaactttgatctaatgtgttctttttttgttgtggaaatggataattttttgtacaaaactaggcaactagcaatagctaccaagaccaacggcaaggccaaaacaatagaaaaacataaatggaaaagttccaaataatgctcctcccatgacaggcaaaaactttgcatcactgctgtgtccaaaacctagccggctatgatatgagaccctctgaataaaatctgtacaaaagaatttgtgatgtgcacgcgttgtaggtttatctacctgaataattaagatggttcggttggctctttacagtgccgctgctgatgcttctggtttcatcaacaggccgagcttttctaactagattttgctgtgggttagtaagctgtattcatgtgctgtaactttgttccttattgatgagggtgcctatgaagatgctcatgaagactggcatgatggcgaaggttgcagctatgatcttataattagtaaccaacatctcatcaattgaatttgtctcaagtattccttttgttgccattttaatgctaactgatactagctattgcgtttctatatttttacaacatgatgagccatcttacctttacattcctttgcgaaatggtcttgtgtcattgagatcggataatcctgtatgagaactatcgctaaccctgaaggatgtcatcggccagacttttacgttggcaaagcttatagcatatattcctttcctcttattttgtttggttgcttatgctgatacccaccataccctagcaatattacattttgtcgatggtggtttacacctttccccttctagggagaaaaaaaatacagatcgctgtatcaactaactattaactgcatattttacaggtagcagactgg

SEQ ID NO: 6176 - DNA, 655 bp, Zea mays
  Intron number 4 from transcript GRMZM2G396562_T01 (locus G RMZM2G396562) derived from phytozome v7.0 (chr-ID 9; pos 2 3539578 to 23540232 reverse strand)
gctgctggtgctggacttggcaataagataatcaggtgactggataggagccatttagtttgttattgtccgtttttttgggaggggggttgcacagaagtttatggtgctcttgtaaacaggctacttgacatgttctgttgtggtgctacaaacttgtaatgacaataattcatgtctgaacatcaatttcttaacatagatatgcagaattggaactgtacttgaaggggattcttcaacttctcatgaatttaggattaatttggactagatcctgaggagaaaagttactatgactggaccatgtatcataataaataatatgtgttccagacaagtagatagtgtctttagtctttacattgttgactgtagatggaagagctgttaggtgcagctagggcctaggggtgacaatgtgctctaaattttacactataagatttaaggattggatcggattaggatcgagccctatttttatttatttttaaactaaaatttatttagggccctatcattttgtgaagaatcatttagatcacgatccattaccacccttaggtgcagcatattttgagctgcccatttttctgttttgttgattttgatcaacatgtttgcttttcatgttgatgcagccagggcaggg

SEQ ID NO: 6177 - DNA, 804 bp, Zea mays
  Intron number 2 from transcript GRMZM2G354611_T01 (locus G RMZM2G354611) derived from phytozome v7.0 (chr-ID 9; pos 6 7107 to 67910 reverse strand)
ggtgccaagcagctggccgaggctgtctttgctgaacaacttgggtacccttcgggggccacaatcttcggaggagggccagacgactatctgtattgctgcccggacagcctggaaaccaatgtatgccgctatatggcggataatattggttttccgaagcttgaagctaggctatcgttgatgctattcgactaattttctaatagtcttgaccatacacacgtaaaggaaaaattcatattggcttattttagtgtttgggtttgttttttatgcagcgtgattatcaccattctttttttatagggtttgtttttgagtaaagctctcaagaataggagaaatattgagggtgaagctgcccagagagagattttgaaacttaggtccgaagtatccaggcttcgaaacgaatgcaatgaaaaagaagaatctttcaaagttttgaagagcgacttccttgagagtcaaaacgaagttcggactcttactgaagaaaagaataaactcaaggaagccttggatacaaagtcttcggagttcgaagcttcaactttagaaaaggacaagcgcattgcctcgctcgaagctgagctgagagaggcgggagacaaatttgaagctgagagtgggaaactaaaactagcagctgccgaagcgaccacggccagccagatgaaaataggggatctgaaagatgaaatcagtcacctgatgcaactaaaggaaaactacaaaattttgatgagcaactgttatactttaggcagtaggtgccaaagggagttggagaggaccttc

SEQ ID NO: 6178 - DNA, 839 bp, Zea mays; identical to SEQ ID NO: 5816
  Intron number 1 from transcript GRMZM2G173926_T02 (locus G RMZM2G173926) derived from phytozome v7.0 (chr-ID 2; pos 1 70038379 to 170039217 reverse strand)

SEQ ID NO: 6179 - DNA, 997 bp, Zea mays
  Intron number 3 from transcript GRMZM5G892645_T05 (locus G RMZM5G892645) derived from phytozome v7.0 (chr-ID 8; pos 7 8644482 to 78645478)
tatccaggattgtggttttgagcatccttccgaaggcaagcttctttttatctattgttgtcagttgacttcggtgttcccgtccgtgaaaactgcaaggtggctgcaaactcatagtcaccatgatactcagttgtcaagaagataaactctctactgaggcagtagtttttttagtttttgagaagttgaacagctgaaactcttgtacatacatatggaataagatgtcaaacttttatcatactgtggtttccttccaaggactaagctgtatcctattaaaatagcagtaaattagttcttccatcgtgtgccttgatgttaggaggctcgattcatgtggagaaactgttttgattctgtacaagtgtggctttagtttcttagccatatactgtaaaacatctgaatagcaagtcattttgtagtttgtcatatagtgaggctacctctagtttttgtaccctttgggtattttgctgctatggttttgctcggcagcagaatctagttagacaagtattaccaattccagtgggattatttctgttacataaccaaaaaaatattctttcatactaataaagacattaaagtaaaaaaagtacttttgaaaaggttccacgacaacaatggaacattggcaatatttattgtccagtttactcactccaatcatgatgtattagtacatcaatgtctaagtagtttaacatgttataaagctgttttgttcgctgaatatattactataaagattaatggccaaatatgtgttttgaaagctctcattgctataatttgtattttatgacagggacttatagctccttgctgtaatgcttgtcctagtgctctgatttgttacaacgccaataaaagaaactattatctgcttggcttttaatgtttgatatcgtttgttttcactgaggagtttgtaacattcttgtcttgttggcgtgcaggtacactttcttctttggagcagaac

SEQ ID NO: 6180 - DNA, 815 bp, Zea mays
  Intron number 2 from transcript GRMZM2G700132_T01 (locus G RMZM2G700132) derived from phytozome v7.0 (chr-ID 9; pos 1 51156201 to 151157015 reverse strand)
cagcattgaaagcttgcaggtactatttgtttactctatagtttctgtgctatggacacattatttttccttttagtacgatcttatttcttttggataaattaacgtgtgagaactcattcagtgtttgtcttaatgtaggatctacatcttgatagggatgaaagtggtaatccgaactgttagaacaaatttaatattttaaaatagatatgtataaagtttgatgttgatcttttcttatgttatcaagcacattagtacaaatatgaataaaatattatataagttgttttatgtattatttgctccctacaacacaaaaagttgaaaaaattaccgaatttgtttccgaatccataccgaagtttatatctattatttgaaaaaatgtaggatgaatttgaggtttaccttttatgaatcttaacaagctggatgttaaaaataagaatacaaatttgtattgtatattctatatcctatttattcgcaatcaaagaaaaaactgattaccgaataaataccgtttcagaccgttttcatccctacatcttgatatatctgggagatgcatgcctgattacatattgccaactaccttagctaaggttcctaactgtatgccattgttgagaaaaatatctctgaagggaaattatcagcttttagataatggtttagtcacgaatcatctcggctgcaccttctttatgttccataaatatgtgtgagtgttctcttctcacttaatctggaatcaatattcttgcaaacaagttacattcagttcttagagaactgtatatagctga

SEQ ID NO: 6181 - DNA, 894 bp, Zea mays
  Intron number 2 from transcript GRMZM2G318737_T01 (locus G RMZM2G318737) derived from phytozome v7.0 (chr-ID 9; pos 3 3556143 to 33557036 reverse strand)
aggtacacacatggattgactgatcttcatggtttaggatgttggataattaatcaggtgttttgttgtttgtgttggtcttgccttggtttcttgtacgggacacaaatttataatgttgtcttgtacaatgtgtttacatttatatcttctttcatctatgcagtaggatatttctctagatcatctgctatcttcgttgccaaattcatactgcacaatgagctcatttaggaatttgtcgtggtgggctgtctttttatatttattatgctaattgttggactgggttgtgttcaattgatctctgtaggagattttatacccttggagaaattgaaatacttaggtctcaatactttgttttggatatcatgaatgatgatatgttttattggtacatgcaaacatgtcgtagatggtgttcatgaccagaacttagaccaaactgggagaaaattaaaaaaaaatatattttacagatcctttaaactgatatttttagcgttctagcaacgatgtgcatctgtccttccattttgtattttgggataaaatctgaattaaacaaatactttcagccatatcatgtacttgtaagatttaaggtgttgccccttcctagcatcatcaggaagcagcgccttatgtgcaccaatgaattgagtttgaattgttgtctgtgtagaaaacggtaatatttagagctttttgtggcacatggatttttatttattgtaataaaagcaactcaattcccatagtaacaactcaattctaagtcacatctgggaacctggtatgtggtagcctggtaggagatacaatgttgctgattgttcatgtgtgtgtgactatgtgcggccatgtttccactggcctatgtgtagtcag

SEQ ID NO: 6182 - DNA, 185 bp, Zea mays
  Intron number 1 from transcript GRMZM2G327295_T01 (locus G RMZM2G327295) derived from phytozome v7.0 (chr-ID 2; pos 4 0009236 to 40009420)
aaggtaacatgtttttttttctgcttctttttttttctgccgggaagagtttgtctcttcgatggaccacggcatctagctcttttgtgtgtgtgtgcctctagccctccagctgatgaaacatcttcttgggcttttttttgatattattcgggtcccagcaaaggattgtgatcaaggtgcag

SEQ ID NO: 6183 - DNA, 256 bp, Zea mays
  Intron number 2 from transcript GRMZM2G044744_T01 (locus G RMZM2G044744) derived from phytozome v7.0 (chr-ID 8; pos 1 25309317 to 125309572)
aagaacagaaacaggtactgcagcaaattctttagcaattttgtcttccataagataagatgttttataatctatagtgtttgacactgagtattttttccatgtttcatatgtttttaattcttactcttacactgcaactgtcaattttaaaactaacgtcattagaaatatcaatactcttctactttttctatattagtttattcactgttttttctttttaagcatttctgttttgatctctttgcggcag

SEQ ID NO: 6184 - DNA, 714 bp, Zea mays
  Intron number 5 from transcript GRMZM2G376542_T01 (locus G RMZM2G376542) derived from phytozome v7.0 (chr-ID 2; pos 1 85601205 to 185601918 reverse strand)
ctgaaaaggtgtgtgtatttgttctttgagtttgactttctttggtaatgacctttcccttcaccctatgtttgtcttttgtggaaataattactgctaatagtctaggttgcatctttcaatgtattgcccatacttattaatctcttgccagaacgttcaatttattctcaagctagtgaagaatggctataaagctatagtactattgttagttttaaattcttgctgagttcttgccattttggtgatcaccaaggatttaatgaaggatttgacactttttaagacattcacatttttgtagcaatataacttgagttttagagccttaagggccacaattgcaaccgcgacatatactgtagtcagctagcacatcgaccaagcttttctattcagaatctataagccatttggttacttaatttttaggctatttgattgggatcacacttaatttttaggctatttgattgggatcacatcccaatatcccatccacttgtttgtaatgccactttctcaagatgtcaagctacatgatttttagcatctaaatttatgttggcaaaagttcaggtagtgtatgagtaccttttaaaagcatggatgcattcctggccgactaaccgcttttctcttctttcacaattgctacactccaagttattattaataattaacaaatattttcttattctgcagtccttg

SEQ ID NO: 6185 - DNA, 942 bp, Zea mays
  Intron number 1 from transcript GRMZM2G502412_T01 (locus G RMZM2G502412) derived from phytozome v7.0 (chr-ID 2; pos 1 58511074 to 158512015)
aacccacgttttctgaatattcatctagagtgcttgtaatgtcccgtgtcatactttggtactcgcaaaataggtgacacttttgactttttagatatcatgtttgtgtcgtattctttttttgtttgcaaataataaaataaataagtcattaaagtatctctaatgataaatgagtcataacaaaattaataatatttgtaaaaaaaactttgaataagacgagcaatcgaacaagaatacaagataagtagaaaacttcatgtactttgagacggagggagcagtttagtcaaagctatgctggtcctatgttgtgcatagctatagtcacttagtaaaactgtccgtctggtttttttaatcatggatacaatttggttgtagtttatcataatgcttagtagcatagcatgtaatcggtcctgttcctaagttttctagtgtcagtttaaaaatccatattggatatatttattttagagttgcaaggatgaacagtgacataagctacataatttttatcctaaatagtcatccatggagcattcatgcatcattaggaagctccaatattcttaggtataggaaactcaatttatacgtccttgcagccactgtgcatatcacatgtctggtttgattcaagaacaggataggtagatgtctccgaaggaacaatgatttgatccaaaatatcaatgcatcaatctggcaaatttgctaactgtcctttgttttataggatgtaaagtttgttattaccaagtttacattcgcaactatgctgcaccgtatattgatgtcatgctttttaatagtaaatttgcattccaataatctgcacaaaaacctttgtatcttatttatagatcaattataattcccgcttctctcatgctcttttctttgcacaacagcacaagaggatatacattggtt

SEQ ID NO: 6186 - DNA, 510 bp, Zea mays
  Intron number 1 from transcript GRMZM2G034551_T02 (locus G RMZM2G034551) derived from phytozome v7.0 (chr-ID 8; pos 1 25742548 to 125743057 reverse strand)
catcgcacaggtgagaatcaaaacaacctataattgaagagctcagagttgctgattttgtcaataaacctagcagtggctggagtgagatttaagttcataactaatttgcgattttttagtgcgaatttaggttttgcagtatcaggaactagaaagttctaactttaacgaatttgtgatgtcaccgttccctctcttatacactaagctagataaaatatcatttgaccaattggcttccttctggagtataatgaactgataatcatatccttattagggagggggtcacattgcgtgattagctacctatatgctcatgcctgatatgataatttgcacatagatacgacaaagaatcatctcttattttgatttttcagtgaagtgtttggttgttttcagtttcagacttgggaatccggtccgcagtgcatttctatattctatactaattgttgattatgatttgtttaagcccccttgtgtcccctgatccctccgtct

SEQ ID NO: 6187 - DNA, 592 bp, Zea mays
  Intron number 4 from transcript GRMZM2G169412_T02 (locus G RMZM2G169412) derived from phytozome v7.0 (chr-ID 8; pos 1 66668686 to 166669277)
aagaggtaaaacatttcaatgcagatcagcagactgctgcgccttttcttgtgcatttatttggattcttattgagaactgactcaaaacttcgttggatacacgaaattggtccttaattagtttgttttcataaactcatgattcttgaaatctgagttttgatttaattttgagaaatgtgaattgaagtcttttggtattttctttcaatgatttttttggcatgatatgcacaggtctccgtaggataactgctaataactacgtaactcttatgtccagtgatcatttgacctgatctcttgctgaaatttccatcacaacataaataataagtaagtcagacatatccatgtgaaggtttgatagtttgagtatgttatatgaattcaactgctgactttgcaataggcatttgcagccttctacctcacatgcttgggtgatggttgtcttataactttctttatccatgactccatgccttgcaaatatcattcctttgactaaataattctttgatggttacttggttttgatggcatttcttctgcttctatttctttttcccatgcttttgaagcagata

SEQ ID NO: 6188 - DNA, 717 bp, Zea mays
  Intron number 1 from transcript AC197717.3_FGT002 (locus A C197717.3_FG002) derived from phytozome v7.0 (chr-ID 9; po s 146816551 to 146817267)
tgcctcttcggtaggtgaaggacagattttgcaaggtgtgtgtggcttcgctttgtgaggtttatactatctttagtattttgctacccttgatattgatagttaatttggcgtttagattccgtgcttagtagtgcaggttgcgatcgttttggtaaatggtggtcattgtgaattatatcttcattcttgaatatttgtcgctcgctagtttatttttgaactaaatagcgacaaataagaatggacggatggagtattttgcaaaactgcattaagcaggccgccataatattttattgcagagaactctgttgattcagtcattcttttataggtgtgtattttttcatcaaatatctgagggaagattagtagtaaccagtgtgatgtaacagtttgaagcttagtatttgataatttgatattttcatcaatatttaaagagtcacgtacagaagcaatatgcacatatgtgtgtctaaagtactttcataatattgtagttttggtaattgttttttaactaagttaatatatatagatttggtaaaacataatgccaatgtaaacagaaagaatacatgttttaaggtaacagtcacatgttgagcaatctaataccttcggtgttgcttgagataaacatcaacaactttccacaaattcccaatatctctaaatactgactactgcaatggtattacaggcaccctc

SEQ ID NO: 6189 - DNA, 562 bp, Zea mays
  Intron number 1 from transcript AC193665.3_FGT004 (locus A C193665.3_FG004) derived from phytozome v7.0 (chr-ID 9; po s 20289015 to 20289576 reverse strand)
aacaccagcacaagcaaggtctgccttgcatcatttgcagaaagtaaaaatacagctgcaataggaaactaagtaatttgttaacccttgaacgcaccggatgacacttcccccacgtcgtttgcggagaaaatttaaatagaagatcctttcatatggcgtaacaaaactgccaatttgaaagagagcatgttcacagaatttgatgcaatgatgcaaaaagaactccatgccaacaccacgacctctaatttatggtagcttataaaggggtggggatgtgtgtttgtgtcgctgactattggggaaatgcgtatccactttgttttgtgaagttgtttacctagaacaggtgctatttacagaaacaaaatacatgtagtcatcgtttgtagcgagtttttttaatggcaaattcagcttaacactcaactctgatgaagagtacatttacccttgcatcttattcgttgcatgcagtgttataccatctaattgatttggtgcctttgttccttcctgcgcagatagcttttgacagagttcacagaaggctgctcgt

SEQ ID NO: 6190 - DNA, 659 bp, Zea mays
  Intron number 1 from transcript GRMZM2G163473_T02 (locus G RMZM2G163473) derived from phytozome v7.0 (chr-ID 8; pos 1 64184503 to 164185161 reverse strand)
cacacccacacgcagtggcctgtggcgcctgggcggtgagtccgcctatgactgcgaatgttataattttattgggcatccttttagttgattgaattggttgtagcctgaaccttatctaccattttatctcccctgcttgtcgtgttctatgtccctgttcagcagctataccacagtcttttatgctcacagaggcagacattagtggcttgaagtgcagccaaacggcttaggtttatctatctcttctgagatatgaaatgggacattgtaggtttatgcatattcagccacctttgctagttattatgtgattttgtaaatttcctgagcctgcgactaaattatttcaacatatttagtaatgcgctgggagtatatgcagaacttaagtaccttttctgtttgttttgtcaacaaagtgagcaaaaaacaatgctttgttatgtgtggccatgttgcatgagtgaagaagcacgtgtttctttcttttcacctgaaaagtaaaatagttctgcaagcagaatctctagttatggaatgttatttctgaatccgcagttcacatcatgttcagtcaagtactagcactgacggttgcttcctttttgatatgtgcagaaagcacttgcaggtctgagaagaatcaatttaga

SEQ ID NO: 6191 - DNA, 1025 bp, Zea mays
  Intron number 2 from transcript GRMZM2G129792_T01 (locus G RMZM2G129792) derived from phytozome v7.0 (chr-ID 8; pos 7 756605 to 7757629)
gacggagatctggtgcgccttgcggctgggatcaggtaaggctccgtagatcttcggaaagcaaaaacgacgagcgtcctgttatctatgtccgtaggtctccgtagatcagcaacatcactgaacggatggaagagctggtagcttgtgatttgtggagatcgaatatgttagctgatgcagcgcttctgattgcattcagaatttatgcggtgattaattcgttaatggatagcattaattcatgcatgcgcgcacacacatggcgcataaacttggatctctgtataggtagcaagaccttcccaataagaatacagttaaccaatgctgattgcagtcactgaaccgaccaacgcttctgattgccgtcagaatttgtgcggtgattaggagcagtagccaaggatttgtttgtagtgaattttccctgttatttgcatcactacaggtctgatgatgcacgttggtgcattgctgggttgtaattttagttctggtccagtatagcttttagtaggtaactactttgattttgcagatctgacagtggcttcttcaccgcctgaccggcgtccatgctatcacggtggctacttctcgccggtacacacgttatcctcctctaactcctttccatcttcaggccatatagaagtgaatcaaatatctttcctgtaggtggagttttgcttcttgagttttcagaatattagaacttcagtaaacttttaggacagtacacttttgtgctctgtatgacttatatgagtcctcgagctttttatctccatttaagttatttgttttggatatgtgtacgacggcacaactatttctgacttttttattggatcaatatattttgttgatgagaggattgaaagcgaccttgtctgtatactgtacaccaatgtggtaggcgctagtagttttacacgggtgcctcaggttatgaacaattgaacatcatgtttagcacaactggattttaaactctatcgcctttcttttatgcagaagac

SEQ ID NO: 6192 - DNA, 522 bp, Zea mays
  Intron number 4 from transcript GRMZM2G158887_T03 (locus G RMZM2G158887) derived from phytozome v7.0 (chr-ID 2; pos 2 15765369 to 215765890)
agccagaggaagaactgtaagcacactgattctccttcctcttcatttttgattgacacttgacagtactggttttatgcgacattaatcatcgcaagtactagaaaatggagaaccgcagcaagactaattacgttcgaaacatcaagtgatgctcatgttgggtcttttgctccagttgttagtcatcaacaaaactagacaccttttgctggtcctctttttgggggtgtaattggatcgtgtaccaggactagcatcatttgcagcaataatactagagtagtaagattttgaatttaaataacttatgtcggtcccttctttcagtattatctatgtcaaatcatcgttcaggtctcttttcctgaggaccagacctgttttttgtttccatgcgttggttcttttctttgggtgatatgtttgcatagtttcaggactgcaccgttcgtttctttctcttggttgtatttctttctgagcgttcttttttgatcttgtcgatctgttcttgaaggt

SEQ ID NO: 6193 - DNA, 943 bp, Zea mays
  Intron number 3 from transcript GRMZM2G481103_T01 (locus G RMZM2G481103) derived from phytozome v7.0 (chr-ID 8; pos 1 61779933 to 161780875)
aaggcactctgcaggtttgacttctctcgcatcaaactcaaatattattcatgctgagtgtattctttcttgctactaacaaattacgtttattgattcatagtaataaacacatgcatccaatgatgctgagcaagtgcttcacattcctaaggttctgatatttgcattagcatatgaattgtttgcacttcttgagaatgcatgatgttttttccccaacttctcagtggtcctctcaatttaaatgcctttgacgattacaactgaatgcatgtgaaaggcacacattaatatgtcacaaccccaaacattgttctatctttctcaaatatgtgcagctaaattctgaagcaaaagtgtgatatcctggcccaaaccttaatagggttgatagaatactcaacaagttgcatcttcttttttgaaagtctatctcgaaagaacctctctttaagagtgcttggcccagagtaatcttgagatgggtgatcgactgagaagttttctctgatgcgcatgaatgaggacaaagtgcacataaaagactcatgttggtctgtgtggatgatctatggtcttagagagctgtcaggagtaagtatcgttggttcgagagtgaacggggcattacaaatggtattagagccgactctcgcggtttcatggtcgtgtggcgctaggggttcggccatatgatgcatggcgcttgtgggcttagaatggtcacatggcatgacatatgatgacactagacatacatacatgaccaagaggggaggttactggcttggggttgaccgacgaagacgtcggttttctaagaggtggtggattgtgatatcctggtcaaagcttaataggattgatagaatactcataacaaaaaggtgcatcttttttttcaggagcctatctcgaaagaacctctggattaagtgtg

SEQ ID NO: 6194 - DNA, 1051 bp, Zea mays
  Intron number 1 from transcript GRMZM2G089506_T01 (locus G RMZM2G089506) derived from phytozome v7.0 (chr-ID 9; pos 4 1671367 to 41672417)
cctggagccatcagaagtctgctcaggccaaaaaggtaaattatataaatcgtagtacggcccgcgtgaaaataaatgctttcatcgtatatatgctgattctgttttgtatgaacatgtctgagtttaaaaagataaattcttgattttccatttttttggatgaacctaaagtggggatacgataacagcaattggccaattgcttcttttatctaatataatgataactgattatacactaataaatttgcactgacactaatctggtcatgataataacctaattaaaaataaaaatatgttggttaccactactacacttttggcatataaaacatacactaatcaaactcgctattataacaacactaagtaataatataccatactaagaatccttagtttattcactaacgatacatattaaaaaatattagggtgtttggtttgagaaatgagctagtccatcatcttctcactcttcactatttttgtttggtttgtgcaatagaatgagttgatccatcaccacctcattcttcatagttagttagttagtactaatatgaggaatgcggtcatcccaccaaatttgagtaatgaacccatgatgcaccacctcaatttggatgtagtgattccttaaaccaaacaccccctatatggatggactcgtccggcaattttttataccatatatatcacaacgtctgaaaaaatggttatttaaatatagccacattttattctggatttctcgctagtcaaaaaaggtaaaaatagtgaatgactctctaaaatgtaaataagatatagaaaacttgttagggattggaaagatatgaacatggtttttatgtaaatgactgaaatttagaaagacaattggagtgttgcttgcttgtctctagagattcattagttgtacatattctaaaatagtacgtatttatccgcatcagaaaattaaactggttttctctaatatttctaatggtccatgcatcgtccagttacctcatccaagaacggtgccacgctaccacta

SEQ ID NO: 6195 - DNA, 992 bp, Zea mays
  Intron number 2 from transcript GRMZM2G582351_T01 (locus G RMZM2G582351) derived from phytozome v7.0 (chr-ID 7; pos 1 43440492 to 143441483 reverse strand)
agaggccaggtacattgtagagatcttgtttcagcaatgccgcatttaataatgtgcccattttcatgatctgagtgttcaattgttcatccatttatcacccgtttcttgcttttttgttctttctgtaagctatcatggcatagtagtttatgcagctgtagatcactagcttggcagcgacagagttccttgtgagacctcagagaacctgttcccgagtatctccatcatattgttgttcctgccatgagtttaggtgtcccttggtccattctgcatcattttattatatgatcataagtagtataaacatagggaaaagtgtaggaactaaagaaatgtctcttagattcttggtgccaaagctgaggacatgttgatattggggactgctttccactgacattgttttgattgttgaatgatttaattttgatctcagttttacttggcatctaaaatgtttgtgcaacaggttgtcgagaaaacctagtgtacgataggcggcatagaagaattctacgtgcatgggtgcattgatgttttcgtgcatgtatattgtcgttttttgagcgatacaacattaattaattaaagactattttggagcgatacaacattaattaatgactattttggcctgctataatttttgcttgtgctactgaaattatttgagcaggagatgtatttattgaatctattgtgtttcttccttctatatagttctttatttgaattgcgtgcaattttgttccttgttacatcatacacacatacatggtatatactttttgaggctagaagctaacagatgctcaagggatcctttcaattaagattaaggtttctcttagacaacccatcagttagcgctaaattcactttcctagcacctagctcactgcaccagggggaaaatatatcttgatctagattttatttttagtttgcaaaattcacctcattcctttgtttttctcttgcag

SEQ ID NO: 6196 - DNA, 459 bp, Zea mays
  Intron number 1 from transcript GRMZM5G832108_T01 (locus G RMZM5G832108) derived from phytozome v7.0 (chr-ID 9; pos 1 19492988 to 119493446)
gtgcacgtgaacttctatcgcaactgtaagctacccgctggctccctattggttgttccccccgtttgatcttattccgtaatggcggtaggatctaatgttgaggaccagctgaaaatatcgcactgtatttttaatctagagtttggtggtctgagtgcttaactgtagctggttagtctgttcgtttatttatcatcatcaatatagaaactttaaagcaacgcttcattcttcatttacaatgctcgccaagctgttgtgtttgggattttatgatataagtattctttcctgaattgcattcataaacagacaaacattagacttggataagaaacgaatcgatggattgtgattgtggtgctattattttggagtgttgtgtttgtgcattttagctgatgaccagtatatcgtcattatttatttcgctcattccaataatctgtgacacag

SEQ ID NO: 6197 - DNA, 974 bp, Zea mays
  Intron number 2 from transcript GRMZM5G832108_T01 (locus G RMZM5G832108) derived from phytozome v7.0 (chr-ID 9; pos 1 19493798 to 119494771)
ctcgtgtgctcatcaggcaacgccacattaggtacaaacaataagatttgttcccctgaagattatgtttttgtgatatgatggttaactagtaacacatttacttaaacaaagctaatgccatgggatgtgtagtatttacacctgtattttactggataactttttcttacaaggttgtgggtgtatataagtttgtgtgagcacactgttttataagtgctgttgtcaattaaactatctatcttcctgtttatgttctggggcatatgatgagaaactttatgcaactcacgacggtcgtctgagacactttgtgtgtaatgttgcagtcatattttctctgatgctccctttttctttgtttctgagacatttaatatttttgtgtttcttcatttgtttacattttacactttcttgtgaggtgcagttgttatattaggtggcacagtgaggaactaattttgctaatgtatctatgaggtcaaaaggccagtgaatcaaatgtccttttcattctgagtgccaatatgatttttgctgcaaacagttcttgatgcgagaactaggctagacttagtgactccgtcaacctgttggtttatgatgtcaagtttatttgttatctctaccagatattgctatggtaatgcacagaaacttagtgactccatcaccatgagtctcgctgcataactagttcagatgtatgatgcattgaagttacttggttttaatgcaaatacatcaacatgattgatttgtgttcactctttggaatccacaccaatgtgtgatttcgttaaattgtgcctgttggtgcttatgatactttttttctgttctggatgcatggattttcaaattgcatgttcaaaagcatacattattttctctcagcaatttcacctcaatgtaactcttccatttctgcagagttgggaggcaacttgtcaacattccctcattca

SEQ ID NO: 6198 - DNA, 647 bp, Zea mays
  Intron number 2 from transcript GRMZM5G890647_T02 (locus G RMZM5G890647) derived from phytozome v7.0 (chr-ID 9; pos 8 9329506 to 89330152 reverse strand)
gaggcacaccatagaaggttagttctttgactaccgatgtagttggtcttcagcattccttgttaccataatttgtccaattctagcattgtgcatattgttattttgagagagaggtgaacaactataatctaaatataaaactcggccagtagaggaaaggccgttctctaggtgtccctcgtgctcgtgcaacatgagggtccgtcccctatagaccagatctttactcgtgctttgagctctcctagcccatacacgaggatccgccccctataggtcagtccatctcatgtgcacacgaccaggagaaacagcgagtgacctttttttaatcttctgaaattgagattcgaactcaggacctaaggagtgctactcagaccacctaaccaacttggctagaggccctttcgcaactataatctaaatattagtatatatatactttttctgtcctgccatcacaatgttgtagtaaacttactgtagcaaatattggagctactgttctattaaaatttcatacatttgatgtgtcttattcatggcgttgtttataggtttcctacttttgtaggcagagaccatgtatcatgcatgatttagatcactcacaaattgtcaagtttcatttgcaggacctg

SEQ ID NO: 6199 - DNA, 858 bp, Zea mays
  Intron number 2 from transcript GRMZM2G350195_T01 (locus G RMZM2G350195) derived from phytozome v7.0 (chr-ID 9; pos 6 5969134 to 65969991 reverse strand)
agacggtgcggtgaggtcagacctggagcacagaggtaccgtcggtcgctgccgtcatggtcgagtcgttgctaccatcacacccaggaacaaggctcatatcgtcgaaaggtatctcgagggcttaaaatctttgtttccctttcctagatctgtgatgtgctttgctcaaatgagtgaatctggccactaagctgttgcatcttctctaaattacttaacgaatgtagcttctaggatcctcaacaaaataaggatgtggcatgaatctggccactaaacaaggagagtcgtgtttttaaatgttcatggttaagactaatgtttagttcctgaaaagtgtatctttctgtctcatgttgttttttcttgtatatttggggggggcaaaaacatgcatttatgaaggcatttttatatggcaggagctagatttgatgatgggaaatcagttcgtatgcctgaaatgagcttggagaagagatttggctaatccacatcttttgttgcctccactctgatggaatatggtggtgctcctcagaatctattccagaatctattctttcggtttgatatttattgttgttattgctcagttttggttacacaagtttgtgtttctacaggttcttgatcctgagtgaggaagcgggtcctaagggaggaagcagagcaattggagctcaagctggagatgtgtagagagttaagggagtagatgctgcaactcttgtggcctacggtggggctgtagccagattagtggttaatgctatgacttactttaacaatagcagaattctctttgaattcttggccttgacaaattttggcatgtttttgtttttttggcag

SEQ ID NO: 6200 - DNA, 641 bp, Zea mays
  Intron number 1 from transcript GRMZM2G100146_T01 (locus G RMZM2G100146) derived from phytozome v7.0 (chr-ID 8; pos 1 36131126 to 136131766 reverse strand)
gagttctggggtgacctcccttactttctctctcgcaaactcaattctccgtgatacctgcgctttcttcgttttgttgcggttcctctgtttgatttttgggcgttttagccttttatttaaggccctgggaatcatgggcatggtttgattggctactgctagcacttgtttgcgaatgttttagggccctgtgaatcgtggctattgtttggttcgctactacttactactagggcatcgttgttctacaatcagcagttatgtggcattgcctatttgcacagtatggaaaaaagtagattaaaatggttgaaatcatacgtggccgtgtcctgtttcaatagggtcttattataggacgtgacggtgatgccactgaattaggatgtttgttcttttgtaccattgttaaacagcaccagatcattcttaatgtaacctacatcagattgtttgttttgttctactacaagtatgttcagcatggcaggaggaagtgtgctcctaaatctgttgtttaggcgcattgcgaaatgtttgttctaacagcatcaggtttgcattcttaatttaacctatcttgtattgctctgtcttttgcaggtctcgaggtcaaacctggatccactgtcaagtgt

SEQ ID NO: 6201 - DNA, 587 bp, Zea mays
  Intron number 1 from transcript GRMZM2G020728_T01 (locus G RMZM2G020728) derived from phytozome v7.0 (chr-ID 8; pos 1 66833735 to 166834321 reverse strand)
tccgcccggacttggatcgagtcctcctgtctttggtaaggaaaccctagtccgcttcaaagcatgcctttaagctttttttattttttgctgggatggatcatggatgcagcaaatggaccattgaattggcacatcctacgatctgagcctcgaccttgaggctgtgatgttgtttgcgaattagggcttactgctgaagtgctgaggatgcgtacgccatggcgtgcatcgacccctagtgcggactacggtgtcactgttgttggatgtttccttgtcttatatagcatccagcaatcagtaccgtttcctcatgtaaagcccctcagtttaatacttgagagctaattgggtagcatactgccgtcactgcaacgttgttttgactttaatcagcacaggaacaaggaacttctaggctccgtttatgatgtgaatccatactctgctgcttttattaatgcattgcaattacatcagatgtattgaagattatgtttacataaatattatgttggccctttttcttacttcattaaatgttcccaggacattcattggagtgctccattcattgagacagc

SEQ ID NO: 6202 - DNA, 576 bp, Zea mays
  Intron number 1 from transcript GRMZM2G146292_T04 (locus G RMZM2G146292) derived from phytozome v7.0 (chr-ID 2; pos 2 09344231 to 209344806 reverse strand)
tggggtgcggtgaagactccttgctactcgtgtcggtgagtgatcctcgctctctgggacggacggattttttttttgtcgttgaagagttagtgctgttctcgatcaagcccaaggtcctctctctctctctctctctctctctctctctctctctctcttagttgtgttggttgtagcttgtagccctttgtgctgcgtggtgctctactaacccagtccatcaactaacccgtccacgttcagttaggcttttctcgtgtgtcttataattactgtaataattatggcgcgggagtgattttataattttttgtgtgtttatctgtcaatgatccaagtgaacccctcttctgtctagttccttattaaatttcaagtgcattttggttttagggtttagcgattctcgtccttgtcggtagtagtttttagttgaggcactagacatgatcaccaaccgagttttggtaagatgtgtgattctgtcatccctttttgttacgctgaaaataatttagcttgaatatttccttggcagcaagtgtattatcgcgaaattgttgtctgggacaa

SEQ ID NO: 6203 - DNA, 755 bp, Zea mays
  Intron number 3 from transcript GRMZM2G113430_T01 (locus G RMZM2G113430) derived from phytozome v7.0 (chr-ID 2; pos 5 3398605 to 53399359)
tctgcttgacacgctgctactgaggaaaagaccaggttagccacttagactagctttagctgtgccaattcttacaaaagctagaaatatactgatccttgatttaggtatccatgccaatttttgttgtaactgaaaatacaaggttcgccacaccatcatcttgtgccacggtatggacagaaaaataatatataatggataaaaacaccaaaatttatggtcaacggaacttaaccaaaagtatgcagcagtgttggatgcaaatagaaggttagataaatggtatgtgttatttttctaatattctgatactcttgaaaaaggttgaatagacagatccctccaaacttcccacttgcttttactatttcgtgattattgcaaactaagactatcaaactcaaaggatttctaatctcgcatgtatctattagaatccacagaaactagagtggaaaccactgtcaattgatttgttgcctcatcctgataacttcgccaatgcaaggttcaacaggagtagtaggtttagttattctgtgtcgccacaacttctcctattttgcctcttcattttgtaagaaattttctgtcctacgaccctacctcactattttatatgttgtcaacacacattttagcaactcagtactgccattttagtcatctttttatagagaagttccaagtttatttttttattggaaacaaaattcaattttctattgaattgttgattttagttacgaacg

SEQ ID NO: 6204 - DNA, 721 bp, Zea mays
  Intron number 2 from transcript GRMZM2G071854_T01 (locus G RMZM2G071854) derived from phytozome v7.0 (chr-ID 8; pos 1 55667896 to 155668616 reverse strand)
caagtggaagtgagtaagtacatagaaagtagcaaggataaagtgacatatttagacactatagttgacatggggcccaactagacagtgacaatgtacatcaaaatctacatcattagggttaaaaaaaatcgatggggaaccttggtaacccactcgttttaccgaatccgtctcggtctaggaacaattctcagttgttgttttttcaaaattcatttggaattcaggaaaaatgaaaataattataaaaataagaaaaataatataaaaactaaaaatcattttttgttttaaagttaatcagtatttttagttaaagacaatgaaaatcgataaaaaaaacaacgaaaacaggtaaaaaataccggcttctcgtcgagaaatcttcgaaaacagttttatttgaatttgaaaatacaatccggtcaaaaaataaaaaccgaggaaaaccgatttctcgttgaattttaaaacatgtttttaaaaatttaaacttgcaaaccggttggttttgaggtttttgttgttttttcgaaggttttccattatggacaagtcccgtttttaccgcctaaacggttaagcaaaccctgaatcattcgtatgtgtacaaacaagcagcacacagtaatattacatcgccttaaacatgttttaagcttagtcgaatggctatattacaggtacacgtacgacactcatcgtctcgcatcattgc

SEQ ID NO: 6205 - DNA, 967 bp, Zea mays
  Intron number 1 from transcript GRMZM2G157741_T01 (locus G RMZM2G157741) derived from phytozome v7.0 (chr-ID 9; pos 1 9844041 to 19845007)
tctcctcaccatcattctcggtaagacttgttgccactgattcgccgtgttcatagcttcgtgtagctccatttaatttgatggtggtgctcgggggagaccgattgggtcacggtcgatctcctccaccgcgcggtcatggcggaggcgcccctgcttggttggcgggggaagatgaacggcgaccgttgatctggcctgggtggccacgattaaatggttcgtgtaccgattcgctgggtgaacctgggccgttgatcaaagaatgggcgggcaagatttaatgttagggaattaagatctggccgtcgatctggaatcaaacgaccagcgtggtgtaccggttcattggacggatgggtttaatcgggaccgttggatttaatccgatggctggaaatacgtgataccccttcgcgtggtatattagctaaagagacccttactttttcagtaactaacccgcggtccagtcctgagttaacctgagtctggggtatcttacaccgaggcccctgactttttctgtaatagtgcgcccagtccaggaatcaataaaatcagagaaattctttctaaattcatttttaatacaaaaaaataatggtagaaacttgtataaatcatagaagatgcatactaaatcctttttaacccattccagttcctataattttgttttaatattatctatcaactagtaacactatttagccttgaaacttgaattaaaattgttcatttgaattaatctaatctaagtacctaataacttcggaaattcataatttcttcgttttaactccgatttgatccgttcaagttgcgttagtctcgtagcaacgcgtagatcattattatgcagtatattcttatgtatggtgtgatgttaattttatctataccatgtttgtttgtattgctacgactagcgcgaggacacgtatcatctgaaaagcaagttggt

SEQ ID NO: 6206 - DNA, 374 bp, Zea mays
  Intron number 6 from transcript GRMZM2G178254_T02 (locus G RMZM2G178254) derived from phytozome v7.0 (chr-ID 9; pos 1 47489631 to 147490004)
tcttaaaacagaaaaaagacagaggtattgtctcatgttatattacaacgattttccttgtaaatgtgtgtgattgtttgaaacagaacattctttgtttattctattgcttcaaatgtcaacttctcttaactaagtagatgtaaatgccttctttacttttgacgcaagtcatttgggaaaaaaatgtttgatttgccgatattcatattcttatattaattcatacatgggtgctctaaaatgtattacttgtagcagatattctaactcaatcttctagttcccttgattgacagttttaacacaagtttaatccctttaagtgctacgtttcagcaaatttgcggcgtgtatctagcattgaagctctt

SEQ ID NO: 6207 - DNA, 509 bp, Zea mays
  Intron number 1 from transcript GRMZM5G847622_T01 (locus G RMZM5G847622) derived from phytozome v7.0 (chr-ID 2; pos 2 28344430 to 228344938)
ggacaacattattgtgataatttagagtgtttactttctcataaaaactagtatggacatgaaaaaaaatctatgcctctatgtcctggattgatcttgtttagtgtttacttccaacaaaacaaaaagaatcaacctcatgctgctgtaatttttcctctcgggcaaccaaatcaaatagcactttttaagagagatttttcttaagatattttatgtgttttcaaaatgcaatgttttctgctaacctttctggatgcttttttccagtaccgtgcagattttcctagtgatctacagaaacaggttgtttttgtggatttagccccaatcttctcccagatggcggatgctatattgagaagacaaatacaactcactgttgatactataagtgaggtcattagatctttctaattatgaagttctttttcacatacataattacttctactttagagcttctatttaaattttctagtttgttgcattgttttaacaggctatag

SEQ ID NO: 6208 - DNA, 1005 bp, Zea mays
  Intron number 3 from transcript GRMZM2G412911_T01 (locus G RMZM2G412911) derived from phytozome v7.0 (chr-ID 2; pos 2 21066498 to 221067502)
ttgttagagcttgtgaaaggtatggtcacttacagtttgtttttccagttaactcctctgtatcataccaaatgtgttttggtttttataggtacaagtgtttgctatgtacctagatatttctagagaagccaaaacgacctataatttagaatggatggagtagtagatatcggcaaccccatttccatttatttttaacgaagcttcttagaaattttggtaatgcctattttgtttcaaaaaagttgcgagccttccggtagatccttatactcatgggtcatatttgttagactttttggtagactctttaaatttacttacattcccaattttgtttatatgccaatgctgtttttcttttctatgattatggacaggttacggtatgagaatggttctataattgagcactcagaggtgagcacaattttacccatatggtctgtattttctcagtatataatatggtaatatttaactcatattctgcatagattgggttttctttaataaaaaaataggctcctagtttaacatccactctatgccatcaattgtcatgtgccgatgtgcctagtgtcacctctaaattattggcccttgaatgattgaatctcaatcgaattcaaaaggatatatccaatatcagtatcagatcttaaatgtttaagagatgtttttagctacatattgattgaagagttagtgcatagttaaaatgtaatacagattttcatgaaaaggtaagtctttctcgactggagattataaacatgagaattgttgctttggctgtaggcattacttaagtgacccagcagcgaagtgtgggagatattctagcattaactaaaacatggcacatagatggacattcctttgtttttgtttttaattatatgtcttgtacaatttataatttccttgcgattctcatgttttcccttgatttggcttgcactagcctgtttgctgtccctgtggtcctaaccgccgtgt

SEQ ID NO: 6209 - DNA, 670 bp, Zea mays
  Intron number 1 from transcript GRMZM2G529070_T01 (locus G RMZM2G529070) derived from phytozome v7.0 (chr-ID 2; pos 9 5463132 to 95463801 reverse strand)
aaaggttatttcttgggttttaaacgtcagtaattgctacgaagtagcataatttatatggagcgcatccagtttttattggtacctgactttagcaatcactccatattttgatccatcttttttataagtttgaatttatgtgacttattttagaaacttgagctcacaaactttcttatttggtctatgtatggtgaaattatgtcattttttaatctttgttcgttcagtcagtcgttgtgaactctcttctaatcgcacacttcaatggttgtgtcagtcgttgtgaactctcttctaatcgcacacttcaatggttgtgttgtaccatgacatgttgcacgatataaacaataacatcagttagccaaatcaaaaaaatatatattatacggagagctgagacaatcaataaaaaatcttgaatttttttggtggatagtttacgtggatattgttgtaaaccgtcgcaacacacggacaatcaactagttctatttaaaatatgacattttcttgtaactgcacaaatagagaattattagcaaatgctatattactcgcttgtgtgattatatttttaataaacatatactaagtgatagctagacctaatattatatattttttagaggtaattgatagctatatagggtaagtgacaact

SEQ ID NO: 6210 - DNA, 692 bp, Zea mays
  Intron number 2 from transcript GRMZM2G165083_T01 (locus G RMZM2G165083) derived from phytozome v7.0 (chr-ID 2; pos 2 2895052 to 22895743)
cagtgacctgagtaacactcgaggtcctgagttcgtatttttattttttgtagaaggcagactttaaacggggctaattttgagggcgctaattttccaattacaaatatctgattcgatatagagatcggtaaaaaaagatggaattctaaaaacatataccacatgcagatctagaataataacatacaaacctatatatctattcttattttggaagcgtgtagcacttgagtgtccggacagaaaaaaacattttggtctggttcggtttgattctaatccatgtggattgaatggtgttgagtctttttaaatctatcttacaatccacgtgtaattgaaataacctaacaaaaccttaaggtccattcgtttatctcgggctgaggctaggaatgattctgactaaatctatgataatacagataaaatgctattgtagaaacatttggttcctacgtgctggttggatagtgttgctttgattgtttgcctgtaataatcagttcacatcgttaacggatcccactgctatctaatctcctacgcacttagaagaaaaatcctctaagagctagttttgagaacctcggtttctacagttcacatcgttaattcgtaaaccatgtggcgtgtgaaaaagaaaacatgcatttgcagtctgagttgcagtggtctgagtaacattc

SEQ ID NO: 6211 - DNA, 547 bp, Zea mays
  Intron number 2 from transcript GRMZM2G041125_T01 (locus G RMZM2G041125) derived from phytozome v7.0 (chr-ID 9; pos 1 15055757 to 115056303)
ttgcgcagacctgtactacggctgctactggagaggtatgatgtctcttcccagttgtatgcctgttctttcatgttctaaatcaaatatctcgaatatccaaattgccaacaaattttcaatctagtcttatctgctttcatttgcttgtagttagtttgattgggcatttgaaatcatttcatttttgtttccctttataggccatctgcgcaaaataatagttccatagtgcttactggtttttattagtaggcctgtcacaatttcggagtggtgtggtacatcagtagagtaaatgacatgggagatagcttgaagtgaattttgggcctctcaatcttcaaggcatcattttctttcttgtttttggttgacactagttgagttgaaattcatagttgtaatgctcaaatactaattgggacacacattttaacaaggataatgatgataaaatttttctgcagtgttttcacatccatataagtttgttgttcacatctaacatgttttgtcatatccgactcaggtacatttggaggtt

SEQ ID NO: 6212 - DNA, 567 bp, Zea mays
  Intron number 3 from transcript GRMZM2G064163_T01 (locus G RMZM2G064163) derived from phytozome v7.0 (chr-ID 2; pos 1 57212769 to 157213335 reverse strand)
acctgcccctttgctccatcaaagaccccaagaaggtacatgccataatcttttgttttcgctgttggtaccttgcctttatgaacatctttgtttgacttatatacaattattagaaaataagctgaatgcatttcttcatttatttttatggcaaatagactaaatcgaaactgcaattattagcttattatggcatgattgttgaggcgaatttgaaatacttgcgggatcatagccaaggataatcacgtacatgatgtggtgtgtttagcattaaaatgtgtactctgatgctatttgcatcgattgaaacagatgtaagaataggtcatcggttacttacagttctcgtttataatttgtttgaaaacttgtagtgcctggagaagtctgttgtaaaaaaaatgttagaatgtggttgtattgccaagttcattaactaggtgttttttatacttttcaaaatggtgaatgcgaatagtttctaaaatttattggatgtaactttaaattgtttcatggtacacaggtgttggttattggagggggtgacggtggtgttct

SEQ ID NO: 6213 - DNA, 986 bp, Zea mays
  Intron number 1 from transcript GRMZM2G100315_T01 (locus G RMZM2G100315) derived from phytozome v7.0 (chr-ID 2; pos 3 7049697 to 37050682)
gcggtacgcacgctaccaacgctctgttccttcccctccggacctccgtttcgtttctgtgctcccttggtcgtgggtaaccggattatctcgcacgggcacctgttaacttgttagttgatacagacatacagtaaattgaagggctacacgggttaggtaaaaccgattttaagtggaattgagtggcaggctgggtttggaggaacaaatttggaaattggcttcctttagataagggcttgcttttggttattacatggctttgctactcttaagatttggttttgaataagtcctataaaaaaagtactctctccgttcatgaatagaccaattctagagttgttcaaacttttttccagcgtaactgaatttatagaaaagggcgctgaaatttatgacacctaattagtatcattagattagatacatcataaactatattttcataatgtgatcgtttggtgctacaaatttttgtatctttttttaataaatttagtcaaacataaaaaccttaacttaaggtaactctaggaattaatttattcaggacggagcgagtatataaaaagttccctttgtttgtgggcagctgaagatagtcagcttctgccaggtgtagcagaggttatgtatctgaagctcacctcttgtcgcaactttctggtgcataggtatccacaaataatttcttaggataatccacagagaattttgcggcttgcaaataactagctgctccatgattgataattctgattacggcaatatactggacaagttgaggggattcatggtcctggagttgaactagctgtgtaaatactgttataagaacaggaagtgaattcaaattatcactgtgatggcatgtttattgctgcaattccatcctgtagccatacgtataaagtggagtctcactgattcttgatcaactttcagcaatattggactcaaccatcactggacaggaacaa

SEQ ID NO: 6214 - DNA, 631 bp, Zea mays
  Intron number 2 from transcript GRMZM2G035651_T02 (locus G RMZM2G035651) derived from phytozome v7.0 (chr-ID 8; pos 1 22933214 to 122933844 reverse strand)
cctccacgttcgaggtaagttataccatgcgatcctctgttacttattgttgcttgttagtattcttgtgagctaccgcctgttacttattgttgcttgctagtattcctgtaagctgcaaagccaattagtcatacatagcaccacccttttctcacctaggagggagcgatggtactctgattattggtcttttttgacagctcagattcttttaagatgactgggaatgtctgttcagttcccatgaattagactgactatgtcaaacggttgccagagatgcataatttgtgtcactagaatttgatattccctgaaatttcagcccacagtatttgctgtttgttgtggagtgccattctgttgtctggatttgtgggaggatcgttgacttcagttggctgtgaatttattttttatggcaccattcaagcatatcataaatgaacgacacaatttgtgctgaaaaatattgaagcatgacataacttatacgcctcatgatgattttacacgtgggggagttacattaattgaaatagagagtgaattcttctcccattgagtgtgaaattatattttgactgtagattattactatttttctttcatgcagaagtataaagct

SEQ ID NO: 6215 - DNA, 722 bp, Zea mays
  Intron number 5 from transcript GRMZM2G114332_T01 (locus G RMZM2G114332) derived from phytozome v7.0 (chr-ID 2; pos 1 84948866 to 184949587 reverse strand)
attccattagctgtaggattttcttttagacacgggtatccaactgttgattgtttttcgtcatattgtgtttgctgcaaatataacacatatgcacaacagtcctgtattggtggatgtcattactgcagtcaaggtgtttgtttactcatagtgttgcttatttattaggccatccaacctgaaatgtgtcatgtgccatcacaacattgatttactccatgatacatatggagtggtggagggagatagtcctttttaattgatgttaacttgattctcatgccactttactgttttagtaatcactaacttctctaccacatttcttgattgctagactctctgtagtttactaagttacttttgttgtgagctactgtggtaactgataacaaccatcatctttatattagttattacttattaggatgtgcaacatcttgtacttttcggtacatgcaggtatacgagtgaatggcctctctacttcagcggattattttgctgctagcttttgtttatcacacagacgcagttaatgcttaatcctcagagctgcattaaaccaagtggtgcttatctggatttgaggacctctgatgcttgtttatctcaagtcagccttttgagtcttcatgtttcgttgaagaacatcattacatacactatccatttggcaaattgatagcaaactgtatttcttctctgtttcaggagtg

SEQ ID NO: 6216 - DNA, 751 bp, Zea mays
  Intron number 1 from transcript GRMZM2G491868_T01 (locus G RMZM2G491868) derived from phytozome v7.0 (chr-ID 9; pos 1 30879178 to 130879928 reverse strand)
tcgtttaacagcatcatcagaggagtcctagccttacgagaaggattatgactacactgatgagctaggagacgacgcgattaaaggtgtcacatcccacctaaactcgtagaatccatttaatatcttgttcggttatttctatatcatatgtggattaaaagggattggaaaatttgtgaagaattttgacttgcttgggatttaatctcactcaatcccgttcaatccacatggattacgtataaaacgaacgtgtcttaatgtttgttcgtttcaacgttaatccatgtggattggataatattgagtcagtttaaatctatatcaagccaacatttatctcaatccattccaatccactgcaatctatatggaattaaaagaaccgaacatgccttaaaggtttgttcggttgtgtctatatcgaaagagatcaaatcaccttctattcgattttgactagagagaaatttaatcttcttcgatccagacacaatggaacagggcctaaacatgtaagagatggctaggcgtctattgcttagacataacacaaatttgtagaagcatgaacaaaataaatccttaagatatttaaatattcaaggacaccctctttcgccccaatatgcatgcatagtagggaaataccttgtcaaaatatttttgtccttgttcaattactttgcatgcacacacaaacttctcaacttgtagggaaaccatccatttcataattacattgcac

SEQ ID NO: 6217 - DNA, 761 bp, Zea mays
  Intron number 1 from transcript GRMZM5G829840_T01 (locus G RMZM5G829840) derived from phytozome v7.0 (chr-ID 2; pos 6 641904 to 6642664 reverse strand)
cacggccccattttcagcttgcccctccagaaccggtgcatgaacagttgcatctgatcctaagtcgttgcttcctttcccttctttcttagatctagctagccaccgtgtcgactggtggatgatacagtatctccacatgctggttgttgagtgttgaccgtacctcgccagatctgcagcaaactatcctatcctagctcctcacatccgcacaaaacaacaccttttagcaaaaaaagtttttttttaaaagagtgcggtagtgcattatagtcatctttcatgtttccagcctccttacttaccaggctttgccgtttagcatttagaaccccaccctgttagaatggaacctggccaagcattcagttcttttgtgtcaataagactacagcagaaatgcagaatgtcttggagagtatagttgaaaatcggggaatgagttaatgttcttgctgcttgacatatctagtttatcatggtagcctactactctgctgcttgtgttgtgactaatttttatttgcatctgtacatctggtttggtttcccttgggtcatttcttccccaccttgctgcatatttgatttgtgtgtgttcaagcatgctgtgacagtgcgatctcaagatatgaattaaaattaccatttgtgctatgtgaatttctgtttattcagtgtttaactttgttctgaatgttgacatctgaatattgatcattgtacagggtcctatctgtggtgtgccagacttcaag

SEQ ID NO: 6218 - DNA, 1033 bp, Zea mays
  Intron number 3 from transcript GRMZM2G062069_T01 (locus G RMZM2G062069) derived from phytozome v7.0 (chr-ID 8; pos 1 7380664 to 17381696 reverse strand)
ctgaaggtgaagcaggttcgtgaaccagtattgaggtatgagtgaatgaaatgacaaccagaacccaaaaagtttacctttacccatatcacgtttctgtcagacaagtatgtattctataaagtacatttattttaccaaatgcactttggcccttcttcatattaaaagcaaagggttatgctgggatcaccagcttttcagatcaaacctcagaataacatgttcgtctatcatcattttagctttcagtaacaattttgtctgcattcttatggaaacataaatattttcatctataatttagtttatatttagaggcataattttgttctcctgaagtttgaaattattgtgatggacctgttcttatccaggtgatatcagctgtattggctttgatggtttcagtttctactgaatcttccaattgtgtgctgttagtctaatttatcacttcattcatgttgtgcactatatgttgctcaagcccaatatgttctttcatgcactccctacgatttcacaatatttgctcatcatcctcactagcgtcattgggaacacttctacacctattttaattgtagggattaggaagtgattaagtgattgtaaaacaatatctgataaggttatattgagcttggtcatgcatactgtaaatggttatatctcatgtgacctgtaagttctacaacatattgtctaagaaacttccataagcaacaaatagcgtacctttgaatcaaatttgatggcagctgctcattttacaagaacaatgcagtgaaccagctatgatgttaattgaataagaaaacggacagtcagtcttatttctctacaatttgtttccggtgaaatagatacaaggtttttattccattctgcataatatgctgatatcttattttgcttctgattgtgtatttcgtttgtgcaaccccaagaagctttaaggaatgctatcttattgactggagatttctgtgattgtgctaaaaaatctatatttccatatgcagttgga

SEQ ID NO: 6219 - DNA, 783 bp, Zea mays
  Intron number 2 from transcript GRMZM2G062069_T01 (locus G RMZM2G062069) derived from phytozome v7.0 (chr-ID 8; pos 1 7381718 to 17382500 reverse strand)
tagcagtcataaccttcctggacttggtaatagtaggtcactctgaatcgttttttaaggtctgctaaactagggtgttttcactggatcgacatattgtctcatttactacaaccttaaccttgattttgtcctagcttctctgagctgaggaaaagaatgtcagtcttagtttttccgtggttgtaatgagaagtttatctccacttgatatgttgatcttaaaagtattattgcttggcataaatctcaatatttatttgaattgtgtcatgatctaactattgttggtacttggtaccaagacttacatttggtgtactataatatcatgtcttagttttccatggttttaatcagaaatttatttcgaagatttgaaaccacagttttgttctgtcatctcataacatctggtacatttggctactagattggcatgtaaggaacttgagtaggcagaaaaggcagtgccctggtggtggggaggctacttgacctctctatccaccagagtttggcaccttcagccagctaaggtgcccatgttcttcggtgaacatcacatcttctaatcatttttgtttatctaaagaatgggtgaagaagttttgacttttgagtatggaaactattgccggatggatatgctgatgtttgtgttagataacatgtgaaatcggcacattggtatacctattgtgaacaaccttagtaagattgtctgaagttcaaaatattgttgcaggacttgttctgtgggaacatacaaggcaggagtgg

SEQ ID NO: 6220 - DNA, 812 bp, Zea mays
  Intron number 3 from transcript GRMZM2G004555_T01 (locus G RMZM2G004555) derived from phytozome v7.0 (chr-ID 2; pos 2 30631731 to 230632542)
atccataggttgtgatttattgcatctagttgatgaattttacctttgttgctagggaagatcactcgagtttgcaattaatgacctcataagaaacaaaatgccctggtatgctctttgttaatttctgtgcacgcaaactagtggagttgttctttgatcaagggaatatgcatgatgtttcataacagtcagtatggtttgtgccatggtttattggttcagctaaaataattttgacttgttggttattgataccacaatactttcctttgatagattcttgacgttatttcctacctggaacacatctaccttttttctttctaaactgatgtattttgattgtatagactctatggctctgcattgtcttttttacctgtatttgacttaaaatgaaatgacgttgcagtgtgagtgttggcttaaatgttgattgtaaataaaaccacactagactaatgcctctttggaagtggtcctggggacatgtgtagtctttatatgtcggccatttcaagtgctgtctatatgtgcactaattatcttctcttctagcaataaaatcctgaagcaacatatagcacctataattttgagattactagtcacatactactactgttctcagtcctctagggatgattgacatatttcccaattattcctactgtttctatgttggcgaagtttatgtcattgttcacatattgggcatagtttctttcgtacttgtttataatcagtcaaactataacgaatgatgaacaacctaaacttctatatgcttttatgaaaacccaggaggc

SEQ ID NO: 6221 - DNA, 833 bp, Zea mays
  Intron number 1 from transcript GRMZM2G464963_T01 (locus G RMZM2G464963) derived from phytozome v7.0 (chr-ID 2; pos 1 35120975 to 135121807 reverse strand)
tccggatcgaggaacctccatcaccgcgcgtcgaggtaatggagttgcggccaccggcctgggaaccgtcgcctccgcacaagggcactgccgtcgctcgccctctgaatcgggggccgccggcgacggcctgggaaccgccgccaccgcatgtcgaggtcggggagccgcggccacctgccgagggtccaccgccgcgcgcgctatcgggcaaccgtcgtcgctaatgaatcgagatggggcgtgaaaaactgatccctagcactacggattttcttttatagacgtctggacctggtccggctcgaccggattgcactgtctggtctgggcttcctttagttattggaagaccagggctcctaatatacaatatatatatatatatatatatatatatataatgacagtaataaaagacactaattatacgatacaatatctcggtcacatttttaatagtcaaaatttaatatgtatgtgctgcaaacgtttatttaaaggatcatggggaagttgaggaataggggcctcgatcagcagcaggtcatttagaagatcttggtctgagtgacatcattgtagagctcagggatgaccccatacagaagaatttgatcaaagaagcagaaaaagaagagaaagaaaaaatgtgaaagaaaagaattctttgtcagctaaggtacaagttcatggaattgtgcatctgatcgtcaatagtctggtatggtcaaaaaaatagtcggtaacttcatactaacaatcattattataatgtacgtaagtattattttgcaggtcgaagtcaatattgagtacacaccaccaccgaa

SEQ ID NO: 6222 - DNA, 586 bp, Zea mays
  Intron number 1 from transcript GRMZM2G461035_T01 (locus G RMZM2G461035) derived from phytozome v7.0 (chr-ID 8; pos 1 62347794 to 162348379)
gaagggaaggtaacgcagttgtgtctctacgagaaaaaaggcagcaagagcggcaatagaatcgatgagcaagctgcaagcacgctgattctgaagtgtctacagactctgagaacagaagtgcacaccaatgtcttgtaatatgagttcctaggtattgtatgctagtcaatctgctccaccaaagattttggagtgtaggattcggtctatgggccatcatttgttcaggacaatcagtgacccagctgagaaagccatatttgtagagctacataagctaatttgtattctaatatgttggtcgagccatattttctaacttaatcttaggcatagcgatagcctagatcactctgtctctccctaaaaagtacagctccaagaaattgatgtgcgacataatgacagctaaggaagcgccacacgaccacacctaatctgaaaagtctacttgaattatttgagtgtgtcatatcttatctctgtttttcttttcattcccttgttctttttccaagaataccatgaatgtgataatatacatgcaggtgtatcagaaacagaccgtatttcttttgctaat

SEQ ID NO: 6223 - DNA, 531 bp, Zea mays
  Intron number 2 from transcript GRMZM2G108309_T01 (locus G RMZM2G108309) derived from phytozome v7.0 (chr-ID 9; pos 1 26337441 to 126337971)
accatctcttcaaccacttgaggagtaaggcctctaccgctgttgaagttcatgctttagatcaaacagtagcaatcaagctatgctatcggatttacaatcgatacatctgatattcagatatgcaagctgtgcatatgagttaacgttgattgctctcaagtaaagatgtttgccatttcagtggtacttgaatgtatgtgtgcattgcatagaacgttgttctatgtatattaacatggaaaagtgcgcgcaaattagaaagcaattatgtttagataaaggccaaagttatcctaatttcgatcttggtataattgggaatagaatggaagcacatcattgcatggaatagttcagttacttcagtaactgtaaaactgctagaaagtattgattattgcaaaaggggatagcgtcttctgtcacatcttttaattatatcacaattttttaactgcttgtctatttccatttatgtttttgaatgacaaactttggttttcaggattcgcatctgagcacaagtgc

SEQ ID NO: 6224 - DNA, 584 bp, Zea mays
  Intron number 1 from transcript GRMZM2G150813_T02 (locus G RMZM2G150813) derived from phytozome v7.0 (chr-ID 2; pos 2 26423161 to 226423744)
cggctgcggctgccgtggacgaggaagagaaggaggtaagcttgaggctctaattcccctccccctaactcttgctcattcggtatgggtgtcgtgttcaattcaatagtgaaattcgtggttatagctaagcaatcccatatagaatcaagttgcctagtgcctacttcccctctagtgttagtttaggggaagcttcaggttgattggttgtactgcctagtgcctactccccctctagtgtgagcttacggaaagcttctgaatcaagctgatcaggagtccaaagtagcatctttgctcgtcctgctgttgttggtcagaattagttgatttcatttgaaattgaagattatctgaatactctgaaacgcaggagtgccttcttttgtttttccttatggatcgagtgtaattgtgaacagttccatctagtggggggggggggggggggttaaaaaccttttgagctcccttcctcgggaacaaaatgcaaggtctatttcctttagaggcagtaatgagtggatttgttctttttgtcttcaggttggtaccacccaggaggagcaaattgggacagc

SEQ ID NO: 6225 - DNA, 479 bp, Zea mays
  Intron number 4 from transcript GRMZM2G150813_T02 (locus G RMZM2G150813) derived from phytozome v7.0 (chr-ID 2; pos 2 26425341 to 226425819)
atatcgaggtagtgcttctttgccttgtttaagctaatttgttatcttgttgccataatgggatttttgtttgttagcttttgttttccagtctctgtttccctctagtgttgtgtaaagaaaaatgcatacagagaaattaaacatgagctagttttttatgcattttttgtgggctaggtgactaagatttaactgtaagatatatgttttgattgatgtttctttatataataccaggtatatttgatgttgtgcttccccttccataacaggatccctgaaacttgcatatgtatttttttttgaatccacaacatgtattaattacaggataagatacgtgccctctatgtagcactttaattatttgtgcagtgcaatagtgccctagctgcaaggttagagtcacaaagccatggattatgtagaagagcttacaccttactaattgtatttttgattatgcagcaaataag

SEQ ID NO: 6226 - DNA, 906 bp, Zea mays
  Intron number 3 from transcript GRMZM2G075384_T01 (locus G RMZM2G075384) derived from phytozome v7.0 (chr-ID 2; pos 1 50233282 to 150234187 reverse strand)
ctccaacattggaaaggtttgcactacaacttggtttctgatggagttgtaccagaattttttgttcaaactagcagttgacgcattgttggaactttagcagtctataaaggatttttttcttaaagtaagttcacagttacctagggtacattgtggttgttgttgcatgagtaatcctacatatcatttcatatatggattaaccggatggtctcactcttgaaactgtgggagtgttggtgcaattcttatactagtttcacttaacttaatagtgccatgtgtggggacctattaatcttgaacatttactcgctagattatatgacatttaaaccatgtactcgtgattaaccagcaagggacaccttgaaccacatagaatatcatttacccttgctacccaaatgcttacatggctacatgcttcttggattgtattctctcttctctgatatcagtatgatcatcaaagcacctaaaatgtgctgctgtatgtatatagccagtgtaatgttgtttcttaggatgcattgcactaataaaacagcaatttcatcaatgatatgctctcctagtctgtagttataggaatagctcttgaacttcccttgtgatagagcagtgctctatttgaagacactgctatatatggaatattctttttgctgaatatcccctgaaatctgcttcagttatatgtgtatattatttgattcaccagaatttttcttcacgcatttctggttgtgttacaaatattcatgcagtatggattataatcgtttaccatgttaagtagttatgattgcatcatatatgatcttctgaggatcagaattaacccttctatttttcttttatacagtgccgttggaccacatacgattgttgattgttgat

SEQ ID NO: 6227 - DNA, 429 bp, Zea mays
  Intron number 4 from transcript GRMZM2G368436_T01 (locus G RMZM2G368436) derived from phytozome v7.0 (chr-ID 2; pos 1 72462698 to 172463126 reverse strand)
cttgccaaacattcaggaggagagttctagctctggtcaaaagcggagattcagttgttaaactattgagagaaaagttcttgcaccaagacgtttggcatcaaatgataatgatcaaagcaatattgctggatcaaggattgtcttaccaatagccagtcacatgtcatggatgatgttgtgtggagtgtaggggagagtgaggatagggaagggggaaagcaggggaacagaattctgctgttttaaaaaaacatgaatgaccttgagattcagtactattatattattattgagctcgattacttatagaaaaaagtgagaagacgatgctttgttctctgtcagtcaggctgttttgaatgatgaaatatcctgaattctcaccttttctttttgtctggttttcaggattcatcagatcaggaa

SEQ ID NO: 6228 - DNA, 1021 bp, Zea mays
  Intron number 1 from transcript GRMZM5G827463_T01 (locus G RMZM5G827463) derived from phytozome v7.0 (chr-ID 9; pos 1 3426489 to 13427509)
acgcgcccgccgagcggatcgagcgcgaggacgcggtatggctgatcggggtctcgcttctctttgcttgttgttgcgatttttactgaggctgggtagctattgtttttatggggggattgagcctattattgctaggatttctgctctgcatcgggagttatgttgctagatggctaaaactgttgcaaaacaggatgaaacagttgtgtaattccgtgtggagcaggggaatgcaggtgcctgactggtgttgggatgtttctaggaatatatggttagacgacatggttgcttgatgcttttagggagctgaattgtgaatctgggttctccccctctgttttcttgggtctgatttcaggtatgagatgctaagtctaggtacttactacttagtatgacgagactgggttaacatcgaaaaatgttaactttattgaaatttgtgcattctgaactgaggacctaagggtctgtggttttgaggttgacacatttggttggtatcatgctacctaaatttgaattcaaatggaagaatcagatgtgacacccatgtttgttaactggcttgacgtagctgtgtaaatactacgctacccatgttgtgcaggtgagttagtagttttctctatatatatgataggtggtccgctcaagcttgacctaggactcttgatgaaattatcataagagaggacattcaaatatttgaaattttatttgttaccagtttaccacttcactgtcggctctccagaacagtaagatagtgatcttatccttatcattttgaattctgggatatcttgctaaaaaactgaaccttgtcttctctatataccggagctctaaacgtctatgatgcaccatcctgaatttcaatctcctctagttcatgtgattttgtttttttaatcttgttttttctatctgcataatcctgtagctttagttggttcattcttattttatatgtgcagaaagaagaagcttgccagcgctgtggaaaaagtga

SEQ ID NO: 6229 - DNA, 418 bp, Zea mays
  Intron number 2 from transcript GRMZM2G103169_T01 (locus G RMZM2G103169) derived from phytozome v7.0 (chr-ID 9; pos 1 13825421 to 113825838 reverse strand)
tcatcatcgccgcgacaagggacgccgttggcgtgagtcaccctgcccggcccggccctacctacgagctacatgtactacgtgaacaagcaataatgccgattggttttctttctgaagaatcgcaatgtcgagctgaatggcgatgattgacttcatccgctgctcttaccttttgacatatgatgatttatcttttggttttgctaagagcgagctggcaacggcttcgttcgatttttaattattcattactaggcaggctataaataccacattgtgaatccgtttattgttgctttaatacttaaatactggttacaaatgacgaattaagtgacgatttatctgcgctgtgaacgaattattcaatgcaagtccagtgcggggggccgagctaccaagtgcagctgggcag

SEQ ID NO: 6230 - DNA, 698 bp, Zea mays
  Intron number 1 from transcript GRMZM2G116327_T03 (locus G RMZM2G116327) derived from phytozome v7.0 (chr-ID 9; pos 1 13704771 to 113705468)
cctccctccccatcgacttcccaaatcccagccaggtaattcttggagctcgtctttccggttgtctcctctttcctgtgcatcctgctgctccgaaaatctctcagatctcctcgtcctctggcccattctcttcatctccatgcatggatgaacaagagacggagggagacagatgcaaacatcgagactgggtaggtgtggcgtcgtgctgatcttcctcccaccttacttgaccatggaacctttagagctaaaaggcaccaggcactgattatattaggttacttgttaattaacaattagcatcgcgattagactagaccagttggttactaacaatcaaacaattggtatcgagatgtcaaaggcagtcacctttagtgggatcgatactgttcttttagtctattcaattcagtagcagtctaatcagaagacgccacttgtttccctcgcttcaacggcgctgtcacgggttcagacgtgtttctatttttcttcttttccagccttacttttgattaaactaattatttgtttctggtcttcgttacgtgtactttctcgctcctacaatttttttcgcgtgtgccatatgtgttcccggaaaagtttcctgtccctttcgggtactccggatggttcccattttttttctttcataaaagttctattttgaagcttggagaacagtg

SEQ ID NO: 6231 - DNA, 982 bp, Zea mays
  Intron number 2 from transcript GRMZM2G027835_T02 (locus G RMZM2G027835) derived from phytozome v7.0 (chr-ID 9; pos 1 07312285 to 107313266)
cgaagcactgaagtgaagaaccggtaacttgtttatttctaaaagaatgctgacaatactatttcatctgtatttttggcagtatttttagccttatgccactcgacaagatgttagttttggtgaaatttgccatatacatccatctaatgagaataaatcgcttgcgtaccttatattgtactgatcagtcttttttgattatatattatccctcaaattctgaactttgaaaattaatacaagctgaaaaacattttagacagccatcagttgggagccaggagccagcttttccctcatccaaaatccttgtagaacagttgcaattgatccttgttgcttaggtaaagcaggttcaggatatagctagtgtgaaatcatttcatggagttttttgaacttgagatcaataagttgaagtctgaaacttgaaccatttactcgatagagtaacacaatctgctgttattttcattaagctaatcggtgaagcttgtgtaattatgttgaaacagcaattgtctatgtaagattacaaacactgcagctagaataatctaatcagaaaataatgtgaattgctttgtctagaaaagaatattactagggcttgtttgttttgatcttaaaccatgtggattgggtggtattgagtcggtttaaatccatagcaagtcaaaatacatctcaatcccatccaatccacatggaatgaaaataaccgaacaagttctaaatatatgcttcgttgaatggtaattctactgcaatttgagtctgttctgcttaatgaatgaacatgtacgttctttggcaactgcagttggtatttctctattcatggttttatagcttagtagtcaagtactcaagtgtatcttattcttagttttgtgcacaagtatttgaaggctgtgattcaagttatcttctgctttggtctcatcttcatcttgtctgagatgcaggacatcaacag

SEQ ID NO: 6232 - DNA, 907 bp, Zea mays
  Intron number 3 from transcript GRMZM2G053525_T01 (locus G RMZM2G053525) derived from phytozome v7.0 (chr-ID 2; pos 3 3172353 to 33173259)
agctcggtccttctattcagactcatgtatgtttgttgtgtttgttggtttactactgctcgagcagcaaacatataggtcagttacttattctattggcacgtttcagttgcttcttcattagccatggttgtttcagttactgggatgtttctactgcttgagggatgtttcagttacttcttcagagtgtatgcttgtatatatgactgaatatattggagtttgcatatatgactaaacctatgtttcagttactagagcctaagtgcttgtgcatgttttgacagcatgttctgtagagtgtatgcctgaatgtatggatgtagaatatatggttgaatatacaacatgttgaagaaacctgtcaaactatacaattcgagaaggaattgtttccgaatggtttccattttgtgtggctttacatcaatctttagcttgggtatacatactccctccgttttaaattatagactattctaacttttttaacagttaaatcatctcgaatttgaacaaaggtatagaaataatcacaaaaactcgtaacatcgaataagtatactataaaaataattaataaaataaaaaatttatttggtattataatagtaattattttattatatagatttgattaaacttaaaatactttgaatctccgaagaaattaaaatgacttgcaaggaacgcaatatttttgtttggtttatcatttctgaacatgcccacgtgcgggtgtgctgaagtaccagattgaagtccaaaagaaactgcatgaacagctcatggttggactacgcaaaaacctccgctgctacaactattgtagtcacgattcacgaacacaaaaaaattgacctcttgatctattttccacatgcaggttcagaagaagctacaa

SEQ ID NO: 6233 - DNA, 921 bp, Zea mays
  Intron number 1 from transcript GRMZM2G048411_T01 (locus G RMZM2G048411) derived from phytozome v7.0 (chr-ID 2; pos 1 88156259 to 188157179 reverse strand)
tgaggtctgttcctgtacccaggcatacttgtttattgtagtataggcttcagttggtacggtttcagtctttcagagtatgtataatgattcagattctgtttcaaactgtcacgaagtgattatatgcatgttttttcacaagttccatagtagcctcacagtgcttctgtcatagaaagattgtctacttactctttagcactgagttgtctttccccaataggtcagtaacctaactgaaacatgaaattgagattaggaggataggacttctatatgaaatatgctgctcagatccgtgccctcaagcgcttaaacatatatacaataggcttacaacatcgagctgcatatatctgaacaactatcatcttcatctgagtttgagaaaattaggctaatacccaaacaagcaaaattagtgaaataccatcgcatcaagattcaagactgatgttagtgccatcacaaatgcatgcagttataaaaacatatctttttctgtgaaaatgtctttttgtttccttttaacgatatgaatcacgtaattttgtagttgtttgatgaaaagcatagctgtttggcgtgttgtaatcagtggttgttgtagggtttcttaaccccttgtttctccttaatataaatgatacacagctctcatgcgtattcgagagagaaaaagcatagctgtgccaagtttttgctaggagcctagaacagtatgccactataacatctgcctttacagtggttaatttccacaacacctggatatatgtactttttgatttgtttcttatttcattagtagcctatagcatttgtcaaattatttttctacagctgttattcacctgtgctgaattgcttatatcatactcagccccaaaggacatcagtttgctacttgcaaagaag

SEQ ID NO: 6234 - DNA, 707 bp, Zea mays
  Intron number 1 from transcript GRMZM2G555788_T01 (locus G RMZM2G555788) derived from phytozome v7.0 (chr-ID 2; pos 2 13714565 to 213715271)
ctggtgcagacccattcattagtatgttactgttcctgaattttagctcttaataattttgatagtatattattgttccagagttttagctcttaattttgcccataaagtttattgttcttctttaactagctgctaaattagcgattaatatgaaggccttctagtattgttggtcattacccttgatggaaatcagactgatgctgatttgaactctataagggaggaacttgcttcaagactgttgaacagatagcaaaggtacctacctctgttttctcatgtgtctgcctactttggaaattaacacatgaaaattattttgcatttttgctatgtgcaacgaaaaaataatatagctactactgattcatttgatgtgttgtttgtttgacctgtatgacctgtttctaccatatatcttcctcctgggttttggtaagcattgtttcatccatgaatcctgcaatcgaataaacaatctgtaaaaagttagctatgaatttttgtttcttatggcttcgtgaactgcatagattgtactgcctacctttgaatagttctgttgtgaaatctaagcaattttttgttggtgagttgtgatttcattcaaacattatggtcattgtaccaatgacatgattttttagacccattacatatgaagactctcacaagcgacctcctttgagcttgcagttcat

SEQ ID NO: 6235 - DNA, 966 bp, Zea mays
  Intron number 1 from transcript GRMZM5G840111_T01 (locus G RMZM5G840111) derived from phytozome v7.0 (chr-ID 2; pos 8 164844 to 8165809 reverse strand)
aggctgagggcagtcatactgccaccgcggggacggtacgcagtttcctggcccaatccttagatttgacgcaatcgttcgttacgtatatttgcgacgctttttattcgtgatcatgaaacatatatcaagcgagaactgctatgtgccagtactagccacctgcaggctgctgcttattgctcgtatgctgctgtctttctggctcctgcaatcctccgctcgtcagcttaggctttgtttggttatagtgggattgaagtggattgaggtgtattgaaggggattgaaaaaaaattagttcatattacactccaatacaccacataccacctcaatccacttcaatatcagattatccaaacaagcccttacagtttttctagagttttgcaacccgtgtcttgccatttcagcagttcttgacttcttaatcctataatgtaagaacggtaaaaccctggcctactagggaaccggaagtctttttttccgttactgagtgttcattttattagttagcaattaattggatgattgtttttaaagcacaataaacttctgaagattatcaataacaataaaaaatggaaccaaaagaaacaaacaaatgcaagaacaatgtcaaaactagtataggtatctgttgcaaacttgcagttgataaaatttgatataaaataattagacagacattaattttaaatataatcacaaagtcccctaggacgtgtcggtgtacactatctgtaagagatttttatatagtggtaacgaaaatgactccgtatactcgtattggagacgacgttctcgggtcgaaggtcgtccgtttcttgtgactatgatttcaaatagtgttttgttatctatgctatcaatttttgccataccttaattttttttgtcatccgccactatttatgctatctttttctttttcattctaggacggtgttccaattg

SEQ ID NO: 6236 - DNA, 1003 bp, Zea mays
  Intron number 1 from transcript GRMZM2G306741_T03 (locus G RMZM2G306741) derived from phytozome v7.0 (chr-ID 2; pos 2 7586365 to 27587367)
gcgagaacagatatattggatcggatttgtgccgggtaagtttgttgagaaggattattcgtgccgcccgtgcttctagctggttgatcctggcccggcaggatctggaccggcatccctttgccccgcgttcttttggattgcttctttcgccggaatcgcgtgcgtagtttaactaggttttggatttggtatatgaactctcgtgtgaaaattcagttccttgccagcgccttgcatgcagattgtacggccacagttgattggcggtgtctgactttctgtagtactttactaatcattgtcaccgctagatttggtttccctaggtcattttctagtacttatgaactgcaggtgtaggctgtccaggtccctgtccacaattatctttcttttttaatgagcttacctttgttgttccgaggatttgtatgcagccagcatactcagttatgcttaattttgcctaccgatttgatcacttggtgttctagtgttgtgctctccgtacggtttatgcaaatttgtcagttgcacaactgactgatcgtttcaatttgattcagagactagcggagcgaaagaaaatctgtttctaaagcatacgtcttcatcttcatgtttcttgagcttctttttttgccagtagtcttcacgtagaagtttcgagattcattcctatgtcaaagcaaatctgttactctttctggcccaaaataaatacacatctcgcttcacgagaagtcatagtttttgaagtttgactaaaaacatagaaaaaaaaactgaatatctagcatgaacttattataaaagtgtacttgataatactacttatcatacattttatataaatttgattaaattttaagacgtttgattcgtcgggaagcgagatgtgtgtatatttggaatgggtagttcggaaggttaactttctttgatatttttaatgccatgtgcaggttcttggagcagtaggcaccaaactggtccaggt

SEQ ID NO: 6237 - DNA, 914 bp, Zea mays
  Intron number 1 from transcript GRMZM2G151122_T01 (locus G RMZM2G151122) derived from phytozome v7.0 (chr-ID 2; pos 1 96379737 to 196380650)
ctttggactgagaattggactcaacagtaagttcaagtaattcacactcaacatttgtctttttcaccaattacacaaatattacgagacaacattactacttatggaaggtgcataatgggaagaattgagtgagatgaaatatatagcgctgcttatagaaagaaaatctaatgttctaatgaactggtgagctatggccattccaagaaccatgttgcacattcatacgtgtggttacattacatttagggatgcgagttccacttgtttttgggttattgggtagatccaaaacttctataaaacgaagtaaaatatgtcgccacatagttaatttaggggctaccagctgacctagaaaacacaatcgggtgcctacctggatccctgcatatatcgattcttgcagtgtcttaaccttgaaccaatctctctatgccctttatgaagtgaaatttgtattttatgtcggaatcagaggttccaccccctgtttgattgagcaaacatgttcatagctgcatattgtagaatataaaaagatagagttgaagagtaaagcatacatctcatcagttagcagatggacccataaacacaataaagcaatctggctgcgcaccaactaaaccagtaatttggaaactaaggatttgcttcgctatataatgtagttattttgggcaatatttactatttattttgttaatattcataaaatatgctcttaactaaaacctgcattcaaaattagggttgaataagtgcttttaaagtaccaccgctatgtcaaaaggcaattctccattatgtaaatatttggagctcaccccctgcaaatacggaaggtacacacacaaaggattaatcttgtcgtctaattttcctgggcatacacagattcagagcat

SEQ ID NO: 6238 - DNA, 886 bp, Zea mays
  Intron number 2 from transcript GRMZM5G881077_T01 (locus G RMZM5G881077) derived from phytozome v7.0 (chr-ID 2; pos 1 75340934 to 175341819 reverse strand)
attgttaattccagtgacaggtggagtagttgtgggtatgatgcatggattatttgagaactttgagtagataaagcaatcattatcatctcaaagggagggtttgatttcatggccgtgataccccctccctccttgtcaaagccatccaagccgcaattactttagggacagggtgttcacttgggctagaaagattctgtttttattgcacgacacatggcaacatgtccaagtagtccttaacttgattcatttagctggtagtgagcgtcttgctaaaagtggctccacaggtgaacttaggtgagtgtttggttaccatgtatttccagatcaatgacatactaaaattgttctttgcacatgtaaatacaaaaaaggtacatgtcttccctgtcgagccccaaaaataaatgacatgcaacccaataaatcctttttgtattttttataagaaatgacagaaaaaatcctcggcgttaaaataagtgaaagattctaacaaccactaattatcttccaaaaaatcaattattatttatgcaccaagttgtaacaatactaaaaccatattcctttcatctcattttatcagtttaacacaatagttttaataagttcaataccacactgaaaagagtgaaccaatgatttgtcatagactacaggcattagctctcttttgatactaaatccatattcctttcatcctttgatctcatttgatctgtttaatacattgattttagtatattcaacatcacactacaagcatggttattttttataaagatgcctaccattttttatcggtcaggcaacttctcaaaattgttccataacacaatatttaccaatctatacatccatacatcattcagga

SEQ ID NO: 6239 - DNA, 407 bp, Zea mays
  Intron number 3 from transcript GRMZM2G363649_T01 (locus G RMZM2G363649) derived from phytozome v7.0 (chr-ID 9; pos 1 17959051 to 117959457)
ttgtctcatgtcaagtttatggcatgcaaaaagacatcaaaggatttaaatgaaaaaaggcgctatcagaatatcctcagtctcatgataatgtacaaaagctaatgctctataccagtatacctacatagtaagcttgctccaacccaactaacttgtaaattacacaggaacccatcactacgagttgctttcattgatgaggtcgaagctccaaccagaaatggagcaactaagaagacatattattccgttcttgtcaaaggtggtgaaaagtatgatgaggtactttctgttttttaaatggatcaattaacatggtttttaaatggagcatctaacattcattagatttctgtttgattatttaattactcactctaatgtatgaaaaggcaaggtagaag

SEQ ID NO: 6240 - DNA, 1002 bp, Zea mays
  Intron number 1 from transcript GRMZM2G017831_T01 (locus G RMZM2G017831) derived from phytozome v7.0 (chr-ID 9; pos 1 48664724 to 148665725)
ctatccgcgaggcgcagcaaccacggacgctgcaggttggtctgtgattcgcacacgcacacgcacacgcacaccatgtgtttattctaatgctctagtgcagcaaagttgggtgtgcctaaccgcgatagcataagcatgcgtgtcttcaaacaattcatattttggactggttatatggataattatagttttggaaacataaaccttgctctgtttatttcatggaattggggatgctgtgagtaaactaaaaaatgctaatggtttcaattccaaagatatgctactttccagcatattaagggcatgtttggtttgatgcctgagttgccacaatttgcctaacttttctgcctaagtttagtttttcaattcgaacgactaaccttagtcaaagtgtggcacatttagacacgaaccaaacagcccctaaaatagcctaccaaagcatcacttcaatcagatcacccgatccagtgtccctttttatccatcataggaaccacgatgttgtgcgcgccattaacattgatggaagaaaaaacaaatcaagttatcccactgtatgtagactgatggtgtatctagtacttattaggatatctttaaccccgttgggaatacatgaattcatcccgaacgattttaaagatgctttgttgacagccaatgaaccaaatgattgtcagctcggttatgttcggtcttttgtcccacaagcacttagtgtagaagtagaatgcattttcatttaatgctatgttgttgattagaactgagtcaccttctgcggttctgcctgctacgtagccaagaaatctctacgctagcaagcttcctcagaaacaaatagcaggaaaaaacttttaaaatacctgtgaaatatcggaaacttggtatactattcatgtcacactaattttatcaatgataaccagttcaccttctgttctcacgtggacaggaaatctctactgctagcaatcttcctcaaaagga

SEQ ID NO: 6241 - DNA, 737 bp, Zea mays
  Intron number 1 from transcript GRMZM2G178916_T01 (locus G RMZM2G178916) derived from phytozome v7.0 (chr-ID 9; pos 1 51300474 to 151301210 reverse strand)
gactagggcaagtatattggtgttgtcttgtaggtggtctcgtgtagtaccatgtaatcttgagttgaattatgacacaatctgtacaataacttatcatttgagttgtcttgtagtgactcacatttacttaatttgtgtgtagaacaaaaggaatgttttgatttgcatgtcgacaagtcatacaatggtgcagaagcagtctcatattcctaaatcttagtttatgaggtggttgtttcacgaaacaacaacctctttctctcaccctccctcttctcgtccacatcataaaaaaaaatcctatgtggctttgtatgagaccatgtacttgccctaatggttctaaaaaaatcctatgtggctttgtatgacgtaatggtgtcattaataactagtgagtagtgatttgattgctgtatcaatatggttgatacaaactccactgatttgtgtctgtccaacagatttttcatactccagctgatcgagagaagatcaagtcctgtttatcagagctaggagagatcagtgcttcctttaagaagatccttcattctgcgctggagcatttagtggcatctgtggcgccacgcatccgtccaatccttgacactgttgctactgtcagttatgggttggatgatgctgaatatggggaaaatgaggtgaatgatccatgggtgcagaagctaatacttgcagttaacactaatgttgcttggctccagccagtg

SEQ ID NO: 6242 - DNA, 951 bp, Zea mays
  Intron number 1 from transcript GRMZM2G097573_T01 (locus G RMZM2G097573) derived from phytozome v7.0 (chr-ID 2; pos 3 1589595 to 31590545 reverse strand)
gaagaggaggtgtgcgtgggtgacagcaaataccggtgcgtgcttctggttttgctcgcatgttttcagcatttgattaggggtaacctgcaattggtctagtataacagtttgtagtgttttaatagttattctcttgtagacaaagaagtggtctacaatgcacaactaaactcagtaagacagaatccagaatgctagttgatttaagctgagctttacatagtggaagtgggagccatgtcaattgtttgtgattggggtattgtagtcttcagttctcctatgagcattatgctaagatcccaaaattttaaatgataagaatgctatttctgtgtgtttacattgcaatatctctgctattttacactgaactggcccatttcggtgccgaaggttagaatgatctggaggtatagatttgggttacagatttttttgtaatatattcatgttctacagtttttatttattcaagattcagaaagtttacctaaaagcatccaaaatgggaggtgataatgttatgcaccaaggttccttgctaacgtcaagtttgaccatgcaacccactgaatttgagtctgctaataagggttacaaatttggtcaaggtggacaaattttctcacctgtttgcccaataatagacttgttgaaatgaactagattatttctttatttgtaggttgtgttatctgaatctgctcctcatttatcacccaaaagtgatagttcaatctgaaatcaactttatgagcttatatatttcaagctttcaatgcatatgagactcagggcacaatgtaggactgccactcgcctcttcgtgttcattcttcattgacagaacattagaacatctattttttttattctccttatattaccttatgtttattgaatatttcttttgatttttaccatttacaattgcagatccctgtt

SEQ ID NO: 6243 - DNA, 775 bp, Zea mays
  Intron number 1 from transcript GRMZM2G043724_T01 (locus G RMZM2G043724) derived from phytozome v7.0 (chr-ID 9; pos 1 30514569 to 130515343)
aaccttgacaactgcaggtgtgtgtgttcgacgtagcagaaacaagtttccatagcaaacttttgggtatcttcatgttatctgtttaacggtgtgccgatgtgaatacctgaacaaaattttatgttataagtgataacagcactatctaatatcaaagtttagcttggtcactcttttcatgaaccctgtttcaaagaaattgaaaaaaaatatggacctgcttcgaaaatgtgttcatggcagcacacaagttatggtgactattgaacttgttttctttgtactaggtggataataagctacagtgaaaaggagcatttagagtatttcctgttattctgcttctagttcagcaacggtttttatcaagtgcttgctgtagcaagcatctcagcagctggacctacaatccggtcactgcccatttttcagattttagcttgcattatttatctttcgctaatttgttccttccagctgaatgtagttctggcttctggtatccagaagtattcggaagatgccttttttcaaaatctgtcaatcaaactagatccttgcttaagtatcccatgtgaccatgtgtcagtgcttgctttacgtttccagttcatactttgtttggttgaaaatagccagttggttggaatatatagagcgtaaactagtcaaatgtctgactctcttgagggtccctaccattccaccaatggttgtacatggttcaaagttaatgtccctttttatgatctctgcaggtacttaaccttag

SEQ ID NO: 6244 - DNA, 622 bp, Zea mays
  Intron number 1 from transcript GRMZM5G830178_T02 (locus G RMZM5G830178) derived from phytozome v7.0 (chr-ID 2; pos 2 06383133 to 206383754 reverse strand)
gaagggaaggtaatgcagttgtgtctctacgagaaagaaggcagcaagagcggcaatagaaccgatgagtaagctgcaagcacgctgattcgaaagtgtctacagactctgaaaacagaattacgtaccaatgtcttgtaatatgagttcctaggtattgcatgttagtcaatctgatccaccaaagattttggagtgtaggattcggtctatgggccatcatttgttcacgacaattggtgacccagttgagaaagccatatttgtaaagccacataagctaatttgtattctaatatgttggtcgagccatattttctaatttaatcttaggcatggcgatagcctagataactctgtttctccccaaaaaagtacagttccaagaaattgatgtgcgacataatgacaggtaaggaagcgccacagtaccacacccaatctgaaaagtctacttgaattatttgagtgtgtcatatcttatctctgtttttcttttcattcccttgttctttttccaagaataccatgaatgagataatatacatggaggtgtatcagaaacagaccctatttcttttgttaatgcaggtgtaaatcagggccctcacaggaaaggcac

SEQ ID NO: 6245 - DNA, 751 bp, Zea mays
  Intron number 2 from transcript GRMZM2G080110_T01 (locus G RMZM2G080110) derived from phytozome v7.0 (chr-ID 8; pos 6 2839034 to 62839784 reverse strand)
gtaaagctgagccacgaattatcacaacattcaaggtgttgttaagtcttttttatgattgcacaaatcattagcaaacatataatttttcactatttccttttgatttgttcagagtgcggcaggttaccattggtggtgtaaccatagatgggcttcttgcagcaacaactcgattctcgattaggcttgcatttgtgctgataggatttttcaccactcaatgtgctcctgatgtattctagaaccagctgctagctatacccttgtcacagctgccgacctatgtggaagtttgatggattccttcttgggcgcaacagttcagtatagtgggttctacagtgttcacaaaaaggtattacaaccaaactatttgaaaattttgccatatccttgtctcctctggttttgaaagcttattctctgctatgtcatgcttgttttgcttagcgactaaagactccacaaaatatgaaagtaatttttcctagaaattgcagacaagtgtgacaaaaacatgaagactagccgcaacaaacatgattcaaccatatttctcttttctaacattgatgaaattttcttctgatatctacattgcccaaattctgaaaaatcttctctaataactaattatcactttttggttggttatcttcatgaaggttccatatggttggtctcaacttcgttgtatacgagtccctcaaagactagctaatccagacaaattcatttggccttgcaa

SEQ ID NO: 6246 - DNA, 767 bp, Zea mays
  Intron number 2 from transcript GRMZM2G114322_T01 (locus G RMZM2G114322) derived from phytozome v7.0 (chr-ID 2; pos 1 99174406 to 199175172 reverse strand)
accgcgggggcctcggctgcggccgctgtttccaggtactgcctccactccagctgtgtgttttctccccccgcatcgcgcgctctacgtctccctgctgctgcttcttcctcctctcctgtcctttcggtttgctcgcttgagtcgggttggcagcaatccactttcttcgctgcactgctctgctgcacccgcaagaatctttcggtaccttggaatcttggattgcgatgttgcggctgcgagttttttttttttggctcaacagtctccgggagtggacggtgcggtggtggtgggctgttcctgctcgattcgtgcgggcgtttgggatggggcttgctttcttcagaaactcagagccagcacgcaaagcaacattctgcagaccacggggggatctgttttgcccccccccccccccccccccccccacacacacacacacacacacacatctccccccttcagttcagtgaaacgaaattgggacttccagttcgacttcgtaccaaatgtagttctgataattaacaaaaagatgctcccaaaatcggggagcatctgtttacttcttagtaagttcttttaatcgattgttttctgctttgatttcttttcctttggagtctcagaagagtaataagcaacccgactgttgttcgcctcgcttgtctttttttttctttctttttgggatgttctttgcgttaatttgtggcgattttttacgggtggattaatttgggacggtccaaacaaaacag

SEQ ID NO: 6247 - DNA, 570 bp, Zea mays
  Intron number 3 from transcript GRMZM2G017761_T01 (locus G RMZM2G017761) derived from phytozome v7.0 (chr-ID 9; pos 1 7817260 to 17817829)
ataccaacttcatcaatttctcgatacagaataaggttagtcgtttaattatctgctgctctcctatttcactgatatattttttatgcaacagagggtcaatacttgcatgcccactgcttcactcagttaataattgaagatactgagttaatgtggtggatttaattgattgttgacccgttccagcttatctgtactctgtatgctgtattgtcacaagaaatgttgtgcacaatttcacgttgttcgctggagctactgattcttaccagatactgaaaccttagggaaattaaaaacaaatagttaggatgactgttaagtaagttaggatataagcattgtgatccgttttactgttttagcaaatagcaaaacaaacagcagccaacccctctgggactgggaatcatgttataactgtctcgatttcccatccgatatggttgctgtgataagaatgttcccttcaactcaggatttgattcattaacacataataatggggccactcatatttgtgactaaatcttcttttcccccatgcagctggatttggagaaggga

SEQ ID NO: 6248 - DNA, 991 bp, Zea mays
  Intron number 1 from transcript AC177920.3_FGT008 (locus A C177920.3_FG008) derived from phytozome v7.0 (chr-ID 2; po s 52260056 to 52261046)
tttcgacctatccgtgcgagatctccgtgcttgaggtatctctgtgtcgagggaaagcgagtgcgagatctccatgtttgagatctccgtgcttgagggaagccccgccattcatgcctccgagcgccaccattctcgccaccgagctcgcgccctgcacgcccgcgccttcccctccccctgagacagccaccccactcgcgggcacaaccaccaccgcgacagccaccgccccctgctcgcgttcttctcctccaagttagccgccgtgagttctctgtgtttgttgatctctgtgtttgttgatctccgtccccctgctcgcgtgtttgttgatctccatccccctgctcgcgagtgcgagatctccgtgtacagtccttttagtattttctattactaactgagatcaaatcatcttgctgttttttggtttaggtagtagcagtaatcacagctaacccattggttgtttctccaaatacgatagttggctacattgtagcaatgttcttttaattcagagatgcctactgatttttgtcatgctttggtgtgcgcaaactgttatttgtctactgatcatattgttgccatggctttgctttcatgtgcgcaaactgatttttgtcatgcctactgatcatattgttgccatggctttgctttgatgtgcgcaaactgatttttgtcatgcctttgattacactgtgggatatgatgccaagcaatatgatatttctagacaggcaaggaaccatatcttgatacctgatatatgaagattaatgaccacaaatctatggctccctttgttgagtaccaaatgggtgttttatcctctttgtcaagtgaatgcagtccgaggccagggtgagatctgtagcggagctggggccaatatttatatttgtatataattttcaaaccggtacccttatctctgagattttactaatagctatttcctattttcctctttggtttgcag

SEQ ID NO: 6249 - DNA, 631 bp, Zea mays
  Intron number 1 from transcript GRMZM2G016605_T01 (locus G RMZM2G016605) derived from phytozome v7.0 (chr-ID 8; pos 1 06628444 to 106629074)
ccggcagcgacgaggtcaaccgcaacgagtgcaaggtgcgcgcgcgcaagcggctaccgctgctgcttcctcctgtcccctggggcctgtacgtactagtttcttcgcgcgggcatgcgcgccgccgtccttgcgcgtttcttctgttgggatgcgccagggcggcgcgcctcccgatttgtgccgccgctttatgcatggttcggtggggcggtggtgggtcggggccagcgccggccggtgatttcgcgggtcaatcgctcgctcctttcccctttgggctcaatcccaaatttatcctcttctcgcttgcccccgttgttttttttttggagtttgggagggagtggcgaggggtgtcacggaaatggctacccaacaagacggaagcgaccaaatcattgccaaagcttccatcttttctgctggcagtggcaggcggcggccgaaggtccggtggccgctcgcattgccgttctcacgaaactgcaaaagagtagggtggcgtgtgtgtgtgtgtgtgatgaggaggaggtttgagtgttgctgaggaactgtctgttgctgctgatgtttgttccttgttgttgttgtgtggtgtggttgtgcagggggcggtgccgatccacac

SEQ ID NO: 6250 - DNA, 569 bp, Zea mays
  Intron number 3 from transcript GRMZM2G178294_T02 (locus G RMZM2G178294) derived from phytozome v7.0 (chr-ID 9; pos 1 47457442 to 147458010)
ctgaggtaatgtttggttagccgtttgtggatacaaccattcttctaacatattttgtgcaaatgagccgatttctgcggcagcttataattataagctatttgtcaatctgcaattatttgtgcatgccttttacaccattcggaagcccccccacccatcatctgcagcctcacatgttactgtagaatatagcggccgctggtgcagctgcagcaacacaggttatttgatttggagcatattgtaacgatgcattatttttgctgtatgatcagttgcttccttgcttgtctctctgtctatatcctgttagtagactatgtaatccttatgttgcctttatcaatttgaagtttttatgcatctaatgttttatttagttttccctgctgttgtcttgaatggcttttggtattcgaataaagtatacttaatttgaattcagtctgattaatcagccataaaaaccagagctctttgatatgatgacaatttttatgctaatgcatacttttgtatattctcgtccagaacgatattttgaagatacggaaagtgtacgattc

SEQ ID NO: 6251 - DNA, 957 bp, Zea mays; identical to SEQ ID NO: 4526
  Intron number 1 from transcript GRMZM2G114954_T04 (locus G RMZM2G114954) derived from phytozome v7.0 (chr-ID 8; pos 9 8598114 to 98599070 reverse strand)

SEQ ID NO: 6252 - DNA, 521 bp, Zea mays
  Intron number 5 from transcript GRMZM2G124063_T01 (locus G RMZM2G124063) derived from phytozome v7.0 (chr-ID 8; pos 1 73038283 to 173038803)
tttggaagcagagaagaactctgctctatcgtcaggtagttaagtcaaattggcttactatgtgtattgtttcattgcggtttaccttaatatttttatatttgtttgttcatttatattttcttgcagcatacattgtcttaagaggtaatgtgtggacgcctcccttctcccttaatacgagtatatattttagaaaatatgggatgaactgtgtgtggagtgtgttcgtagatgcagtcacttttcacacctaatttatggtagtcattgacacttcactgcatgagtcatcatttgattttgtggtcttcttgatacatgtttctctcacattagacacaaatcaattactttaaactataattttgtgaaatgcttgacgcaaaacattgtcgaagacatctccattaatcaaattggtgggcaagttctgtatttaattatacgagtcctttaactacaagttttggctcattgtcgcagaattggacggtcgcatcgacgccaggttccagcag

SEQ ID NO: 6253 - DNA, 368 bp, Zea mays
  Intron number 2 from transcript GRMZM2G032214_T01 (locus G RMZM2G032214) derived from phytozome v7.0 (chr-ID 9; pos 1 2426683 to 12427050 reverse strand)
caataggggctcaagtgagtatcactagttcatctcttaagatttgtttgagtttcgtgcttttgaaatttctttgatgtgcatttatcactgctagaattagaacccctggatatcttcatcttaatctaattcgaagtaatttcatccgatgcattttttctgcataataatcagtcaactttacttgtactgcttctcttttctgtgacttgtcaaatgtaaattagactgacagttaccattacttggatggtgctggcatatttttcttcctttcaaaatgcatatggtgttggtatctgataatggataaatcttgcctttctcaagggtgcccttggcctgttaaccataccctctgcctt

SEQ ID NO: 6254 - DNA, 666 bp, Zea mays; identical to SEQ ID NO: 5806
  Intron number 1 from transcript GRMZM2G153541_T02 (locus G RMZM2G153541) derived from phytozome v7.0 (chr-ID 9; pos 8 7061800 to 87062465)

SEQ ID NO: 6255 - DNA, 441 bp, Zea mays
  Intron number 1 from transcript GRMZM2G134105_T01 (locus G RMZM2G134105) derived from phytozome v7.0 (chr-ID 9; pos 6 5169217 to 65169657)
tgttcagtgctgctcgtgtttggtggtaagcttttttcttcacaaaaatatgtaaaaattgctagggttgaagacgaaataaataaatgttcattttagctgtgtatttggctatatgcaaataaataaatgttcttttcttttggcatttagcgctaggggatgctctttgaagtggttattgaccagtaaaaacttacacagtagtttgtttgtgttcttacttgatagcctaaatgccgcgccaaggagtatagattaacgttgaattacatattgtataggttgagttttgatttacagaattgtctgtgtgctaattggttcatatatgtgaagttagcaagattatttcaagggagggcatgaaatcctcatttcagaaaacatgttcatttgttgccaggtggggaggactgcacagttcgcatctggagcatc

SEQ ID NO: 6256 - DNA, 491 bp, Zea mays
  Intron number 1 from transcript GRMZM2G473521_T01 (locus G RMZM2G473521) derived from phytozome v7.0 (chr-ID 2; pos 2 11783536 to 211784026)
agctgagcccctcaacctctccgtggctcctcaaggtcagtagtagccgcagctggaccctctagtttctgcgctttgaagtaccatataccatgaaagaaacaacatttgagtactactgctgtactgcagaaagatattctacagaattttctctcacgatcttttttgtcattgcaactttagggctgtgatagtgtgatagctattgtctagatatgcaggttatttgtactctgctatattgaaggcttacaaaataactgtagtgtgatctactggtaattcttaccctttgtagtgaaaaatgttagtagagtaagaacgtgaatggtttaagggagtaaccgaacaaaattgtccggtattgaagtcaggaactgcatgcattctggtatgaagactgaatgtttcagtagtgactccatcagtaatttgttttcttttaaatggcagtcaaatcagaagttacaaggtttaagggaagaatt

SEQ ID NO: 6257 - DNA, 639 bp, Zea mays
  Intron number 4 from transcript GRMZM2G473521_T01 (locus G RMZM2G473521) derived from phytozome v7.0 (chr-ID 2; pos 2 11784423 to 211785061)
agtggtgagttcaaacgactttggatgtagctttgaacaagctgccaataaaccacttctaaagactatattattcagtttcaactaactgaatttgggttcagtgtgatgtgctccacttttgggcaccataactttgaatatatgcatttttggcctgggaattctatagcaacgtgaaagagctatgcttggtgaaccactttgatgtagtgaggtaggtctgtccttatgtagaaatgggagaaaatgggaggtgaatttggtcctgtagtcgaactgaagaagttcagagcagtccaaaacatctgaaaatatctcagtccactaaacttgtgtccattaaaatgtattgcagacctgaaagagcataggagacgtgctcattgtagacctgaaagagcataggagacagaactggaagagcataggagacgtgctcatttgattggcgaggaaggctatgcagctgaatttagcgatgaggctattgaggcaggtaaagatcatatcctggaatgtaaacttgtgtccattaaaatgtattgcagacctgaagataatgggaactgagaacgatcttatctaccttcgcttcctacaggagctattgatcctgcgctggtgctggaacaaatt

SEQ ID NO: 6258 - DNA, 636 bp, Zea mays
  Intron number 7 from transcript GRMZM2G462537_T03 (locus G RMZM2G462537) derived from phytozome v7.0 (chr-ID 9; pos 1 25808008 to 125808643 reverse strand)
ccatcttggggagaagaaacctgttctggtacaactgctcttcacgttatagattataccttgccatttttttttctcaaaaactaaaatacctgtcaactttcatgattcctccactgataaagttgcaataccagtgtacttggtggtgaaagtccgaagctagaactgtcactgattatgaaccattcttgatagcattatcattgatggtttgcaaaccaacagtgatagtcgccatttgtgctgagaaacatgtaagctgtgtctagttcatgtcacaggcagagagttatgcagtgtaaccattagtttcaagttgtatagggagcgcttattgttttgttagataattaactacagaaattttctttgacggtgtgttcgtgttcagcaattgacacattctagttcgttctggttacattgaaagagaaatctttaatgtacttgatattcagaaaatttaaaaaggtatttcaaaataagaaaactagacaaatgcagttgcctaggtctcctagaactagactcaactagaagtatattattatttgacttgtttaacagtttttactttagtttgccatcattaactcattttctcctttttagattttattcagtattcactat

SEQ ID NO: 6259 - DNA, 501 bp, Zea mays
  Intron number 1 from transcript AC191097.3_FGT010 (locus A C191097.3_FG010) derived from phytozome v7.0 (chr-ID 4; po s 195214400 to 195214900)
ttggcttcaggcctcggtgtggggctccagcgaaggtacatctatctgttcactcgattgtagctgtttgcgcaaactaaatcttcattcaatagtacataatttgctctcttttgttgcttggatttgttgaattttgcatttcgctggttaaatctgggcttcagacatccatttttgttgcgtgtgttgtctgattacaggttggcgttcggaattggagtgatcagtgtatccagtttgttataggaactacaatgttgcttatcaactgactatgctatatgcttagtcgaccgctactcatggtctttttttggtcttggaataatccggagcgtcttttctctttcctttgagcttatagggatgggcattgtggcacgtctcatgcttcagaaatggttaggatgggccaacaacatctgacgaaggtgatgacttcaagtgtgttgcttaatcacagagctctggtggtgcagaggtgaaaaaggaagaggt

SEQ ID NO: 6260 - DNA, 474 bp, Zea mays
  Intron number 1 from transcript GRMZM2G046620_T01 (locus G RMZM2G046620) derived from phytozome v7.0 (chr-ID 1; pos 2 3795772 to 23796245 reverse strand)
aaggcaagtgattatttgttattcaatgcatttattaatgtatcaaataatctaaaatttttcaaataaattaatctgtcattctcatgatctgtagtagctatttataatattgataaaaagcctaagcacaaagatcttcgtgtaacagagtgcctgtgtaggtaacaaatcctctatatacagatttcagttatagaatgcatgtgtaggtaacagatgcaactagtacttgatttttgattattgggctgttaaacatagaacaaggctagagcaatgaagttgcatatttgtctagatattactgtatgttctgctctgtctagggaaaatgctcacatgcaccagaacccatatgatctttgccattcactagattgtttctgctagtttgaaaatttaatatctttttgccttttatgatggtaatcaccagaattggtaccaaggcaaagaagtaggggcaaacaa

SEQ ID NO: 6261 - DNA, 736 bp, Zea mays
  Intron number 1 from transcript AC198743.3_FGT008 (locus A C198743.3_FG008) derived from phytozome v7.0 (chr-ID 4; po s 25627296 to 25628031 reverse strand)
tggtagtaagtatttccagcttatctaaagattataaaagatcttacatttccagttaaaaattaaagatggctagagctcttggaaccctgagttatacctgctattagttcatatcttctggtaagtagaatctatttcacttcagtagaagtacagatcgtctgttgttttctatcagcagtgatcagaaaatcttggcatgcattactttgtttcggtcccttcgcatttcttgtcaatggcagatttctcctagaagaaaatctgtgtgtgaaatttgctaatatgaaatagtacagtatgcccaccagtacttgactttactgactcaatgggccaggcagaaggaaattccaattggttgttttctttgagttgaatcattataacaaacttagccctcattatgatgtatctgcagtttttgaattcaattgaagtaaaaggaaatatcatagtttggtcctttcgtgaaatttttttgtccaattttttgtccttgtaggtttttacgttgcattagaaaacattgtaggcaactgattttctaacatgtccctatcagaacttcctccgagaccatttcttgagatcttggcacgagaactacgacgactggtaatgtgattcttgcgccttcgtttttcccctgtttagactttagagtgaattagtctcattttgctttttcctttcacctgattggcagggtcttagattattcaacattgat

SEQ ID NO: 6262 - DNA, 940 bp, Zea mays
  Intron number 2 from transcript GRMZM2G175453_T02 (locus G RMZM2G175453) derived from phytozome v7.0 (chr-ID 4; pos 2 12217759 to 212218698)
ctgcacaagctcaagctcagcttggtaaagctccctagagacatttcgtacagtgcactgttcattagaatactaaacctcgagaagcaaacaacacaacccaaaatccaacacggctcaaattgaggagggctgtcaacttgaacttacttgagcgtctgtgttttgtcattcaattggaagttgattgtggaaactgtgcggttcccttaggtgtcaaatggagatgtttatttgaatttggatgggaatattcattcgattcaaactgaattgcttcgtgggcacaaattttatgtggaatcatgcatatttttagtagctttgctgaaaagtggttttttatgatccaaagggcacacgagaatttgaaaaacaaggtatgacaaatcaagattttggttagtactttccatagttggaagaaaatagaaatgatgctacaaggtgcactctgtgactgtaagctgctcaatagatttaatattccttttatgtgccatgcgaaataatagaattttgatggaattgaaatcatgaatcgtgtactgaatgagttaaggaaaatagtaatgttaaacaactggaggttcaaagctcatggaaatgttcttctgtgaagtctacaggtgacaggtcaaccaattttatttttcttcattttagatttttataaaagggaacttatagactttgacgactcgagttcaacaatgaaaagtcaaatctagtcatagttttcaatcttcaatagatttagtatctggctatctgcataatcatgtaatttacacttgcttggaatgtgtcaatcttaattaagctaatcctgggatatgcatgacacagactgctctggttcctgtagcagattaattgacccaccgttgcacttcttattgcagaaatcactgacctttgcgcctgaagcgtctgaggt

SEQ ID NO: 6263 - DNA, 750 bp, Zea mays
  Intron number 1 from transcript AC186623.5_FGT003 (locus A C186623.5_FG003) derived from phytozome v7.0 (chr-ID 1; po s 287198582 to 287199331 reverse strand)
tcagccagccagacaaaaagctgctagagttgatcgtgagtgatgtgcatgtgtttctggatgaaattcagtagttttagaaggtaatttcagaagttatgagtttgatgatggagagttactgaccactgatctcctagtcgtccaagtgttcatttgcttgagtgaatgaggataatcacgtttttttgatagtgtccgccacacgactgcttactttctcatcttcttgtgttttcatggtggtcaaattgacacagcaacaacattgcagtgcattatcggccggtacaattacatcaactgccaatgtctgttgttgagtatttatcttatcagtggcttaaaatacgttcctttctattttgttcatatttatcatgttaaatttacatgtgtacaattacatcaaagtttgttatcaaatatgttgttttctattttgttcatatttatcatgttaaattcacacgtgcatctttttattattaccaactatttagtactctctcttggtcgtaaaatagtattcgttttagctcgtgtctatatttaattagatgataatgaatctagacacatatataatacatatatatattaactattgtatagatctataaaacctctaaaacgaatcctaatttggtactgagggagtatcattttttttggattgaaacgtaaattttgctactttggtgagtttgctcaggcggttcttccaagaggtggctcttcgccttccac

SEQ ID NO: 6264 - DNA, 632 bp, Zea mays
  Intron number 1 from transcript GRMZM2G156937_T01 (locus G RMZM2G156937) derived from phytozome v7.0 (chr-ID 1; pos 2 94637077 to 294637708)
ctatctcacggcgctactcggaagtccccttcaaggtctcacttcctcctgtccttgatggttagttagttggcttgattgctctcgtgcggcgaattaagcactccctgacgagcattttgcaggccgaacacttggcgtaattttaggctgtcgcgtcacattcataccgattatgttatgacttatgagcaacattacgctgcagtattcgtgcggcttatataatttcacacctaacatttgaatcttagattactacgtttaaagcgattgaggatattaactgtgaaactgtacttatgtcttacaaacttgcaactgtgactctcttacatggacagtataatcattgtgacaagaaaatctacattaagattacagattgtcgatttgattcttaattgtggagaaacttggagtaaaagatctagtacgaatctgaatgctgattgctgacaatgaagttctcctgattactgtttatcatagacttataggaaatgccttagtactagtccatctgaatgacttcactatttcagtggcaaaccattttcttttcagcattttgtttctcacaaaagttacctgcagatttacaatccatcaatccaagtaaagaggagatt

SEQ ID NO: 6265 - DNA, 554 bp, Zea mays
  Intron number 2 from transcript GRMZM2G115350_T01 (locus G RMZM2G115350) derived from phytozome v7.0 (chr-ID 8; pos 1 24146312 to 124146865 reverse strand)
gatcgagtattgacctttttgtgttctcctcaactcattatttagctacatatcttattaaatcttaatctttggtcattagctaccagctcgcactacttcagttcctcgagcccttgtgcatggatatatcatttagttgtgtctaataatttgtaattagtggcaacatatttttgttattttggttttatctgctttttattgttataagatcccgattgcaaactggcagttagtacacctttaggttttcctttgtcgtatcaagctaataatgtgtgaagcagggttcccattctgatctttagtttttttgtgattttaatagcaataaccttttttccacaaaaaagtaacaaactttatgcagtatgcggttcatatagttcccagtatccttttggacttagatttagtttgatatatggttatgtttattgacagaatgctttttagctttgcagataaaatcttgagcaaaatgggagaaggtttgggttttctgcaatctgtcgtctcctcttctgttgggtatctccgttattattcta

SEQ ID NO: 6266 - DNA, 1021 bp, Zea mays
  Intron number 4 from transcript AC193789.3_FGT006 (locus A C193789.3_FG006) derived from phytozome v7.0 (chr-ID 8; po s 3199947 to 3200967)
ggatctgtggcacgacgcccaccgcggtaacatcggtatggcgagcatcaatggaagggtgaccacgagcaagataggcggcttcggcacgacaggagaatgtccgggggacggggtgtgagcaagatgccacacggcatggcacgtagtgctgctgtcaccgatgagcatgatgagcgccatcgtcacgaggccatggcggagtagagagacgaagcgtcacaagtcattactagcggctaggagaagtgcttccttaggagtgaggagctacaaggccatcgcgcacttacgacgggtccttggtaagcattttattgtagctccattcgaagttgagcgtgtacttttcaccagagctaggccagttgggaacgagatggagatggttggtggccttccgatgcaaagcacggacagctattgttcgagacatttggttcattagctcatttgttgcacgcaagacgatattgggtaccgctcaactcatgcatggctcatgcatgctacatcatgaatctctgcatggcctctgtttgacaattattgaggcatattttcttctctatcagattattgtgcaatagctagaggcatctttacgatccatgaattttgtgtttaatgcgtgtgtctaagagaaaataaaagaacataggttcagtggaagatgttgtgggtctttaaccggcagtcataccgtgcgtttatatggaatcaatgtcttgagttataaatcatcaaggccgttacaccatatatagatcgaagatcgtaagaagccactaagcccaatacaacaggaagctacaccctgttagctgaaagaggacgagctacagagagctctataaaaatagggattgggtttatttttcaactcatatctttctcggtcttttggctaaaataaaatgtaatatttattcttatcaatttaacatctgatctatagacaatatgctcactttgatattaaatttatttataattggtatttttttaggggagggtccat

SEQ ID NO: 6267 - DNA, 867 bp, Zea mays
  Intron number 2 from transcript GRMZM2G073026_T01 (locus G RMZM2G073026) derived from phytozome v7.0 (chr-ID 1; pos 1 10377079 to 110377945 reverse strand)
taggttatcgcctacagcgagggaaggtacatgatcttcagggttttgattgatattgctattgggaactgccttgaccgagtcgcctagtcccagctataacatcgagcaggtaaattgttccatcaaatgccaattttgttatccaattatcgtggcttaatattgtttatttaattctagtgatatgcacatagatgctagtttgtgtgagtgttttttctagcacgaatccttgtgaccatgacaattgatcacatacatgtaaaatgcactgggtggcaaattatttatcagagaaacggtaaatgttattggtgcaccatgagtattttagcatgagttgtcaaactgtatattctcatcaacttgtcactgttatgcaggctcaaaatgttcttggaaacaagtggactaaaattgcaaaggttgtctcaggaagttgtgtttttctatcataaaactcttggtataaagttctcacgttaaaacttttggtgctttattaacaggtaacttctaattcctaacatttttagcaattgcaagaccatttagtaatatatataggaagcctggtcggtttcccctacttaggatttggaaaactcttcagttatgagaaggtctggttcagtctctaatgacataatattgaggcactacatttgaattatcgattgatatcagagaaaatacttgttctatcaatagagaagggcaacttttttgagaccagagagggccaattttggcttcatatgtgaacaaagtgttgtgttttctgctcaaaaggtttgttttacctttgtaagttgtaagttttatattattcaaacagcagttacatataccttggtaggctgc

SEQ ID NO: 6268 - DNA, 840 bp, Zea mays
  Intron number 3 from transcript GRMZM2G100457_T01 (locus G RMZM2G100457) derived from phytozome v7.0 (chr-ID 4; pos 4 4129575 to 44130414 reverse strand)
aatacctctgcacaggaggaagcgatcagaaagttgtgagttgcttatttgtccttttagtttcttatgtggcttatgttatgtcgtactggaaaaggtatgtttggattgttttgttggttaacaactgaaatcagtagaaatgcaatacatcttattgatgtagttatttttttttctcaaacacgtaggagagttgtgtatctttatattatagagagagaaaaaagggatataaacctatacaaggcaactggcaacctttatgcctcaactatgagacaacagaaggttgcaatgaaaaaaatactacacagcactcaaaccttttttacaaggaagaaagttgcgacctttctagcctgtacatgacaaaaaatagctcctgaagtttttgagcatcagtgaagcaccaagactcagcctcagtttctctttgaaggaatgctgttgctgtgcccttactagggaagggacacaactgtcaaaaattcctcttttcctgtgaagccatgaggctcatgctcccaggatcaccatactgttcaaacattttctttgggtagcttggctagtggttacatgaaatgggcatggtttaaaaatactattggcatacttgtattcattatacatatgtatggttcttgccttgatgtgcataactgactaatgtggcccttgaagagggagttattgtaactgatgtatgatattatttccatttatggctttgggcagaaccacgagtgtttgctttgtttttatgtttagctggtcctctcattgactattggcttggcaggttttatatcataacagaagtgggcgtacacatct

SEQ ID NO: 6269 - DNA, 465 bp, Zea mays
  Intron number 4 from transcript GRMZM2G317691_T01 (locus G RMZM2G317691) derived from phytozome v7.0 (chr-ID 4; pos 2 05272391 to 205272855)
gaagaccacagcaggtttgatttcagtctcccaaaaatcagaaatgacatttcattttcgttattctgtttcctcatcgaacatatttaagctcttgctttagttttcaggtccttttacttctattttaccggagtgtgaattgtttgtttttctcaaaaggcccaacaacttaattttcatgcaattggacttgaccacgaacgttcttggacaactttgtcttttcttctgctcctatgtagcaggattaagaaccatgccctattgcttcagacacaatatacttcttttggtttctactgggcgctgctatttatacctgcttacaagttttttggtttgatgcttatgttcaatctaataatgtttattggactgacgatgcatttttttggtttgtttctcttatttttacatgttgttatcatttctaccaccaataactttctacatggagggtcc

SEQ ID NO: 6270 - DNA, 807 bp, Zea mays
  Intron number 1 from transcript GRMZM5G884165_T01 (locus G RMZM5G884165) derived from phytozome v7.0 (chr-ID 1; pos 2 60050389 to 260051195 reverse strand)
agcacgcaagcgagaccgcagtcccaggtgaaggcctgctgcacatgcggaacctgccagcacgagaagtccatgacaggagccaaattttgtcaagcaaacagatttaactatttacctcatcctagtctccaaatggatgttacactaaggccggatttacaaatatccttttctttcttgtatgaaggaaaaaatacataccttatcttcatcatggtaggaaaactaaacaactaagcataatccatactaataagcaacatgatgcatactggtttcggtgcttcaagtttcatttgaagatctacatggaaaaatgtgaacacaagatgatgttggggtgtcaaaagagcaggtaggctgattttaacttcatcatggtaggaagccattcttgttccaacagcaatctgtgtatggccccacttctgtagcatcatattccgctccctaggatgaacagcctggaagcccacgtctctaatggataaggatgtttgaatagacaccaacattcaacattaggacaaataattcagcaggaaaacctctaatggaggctttcggatgtcggaatcgtcctttctcagttccactctaacaaacaggtttcttttgcggctcaagctaacagtcaacgagtacacatagaggcaatgaaaaagttgtgaaaacgactcacttcgggtcagcatccgaaagtcaaaagcttcaaactgcaataagaaagtgcatctcctctaagcagaacaacatgaataacacaagaatgtatcacaaataaacagaaaagtgttgtcctat

SEQ ID NO: 6271 - DNA, 847 bp, Zea mays
  Intron number 1 from transcript GRMZM2G106424_T01 (locus G RMZM2G106424) derived from phytozome v7.0 (chr-ID 4; pos 2 09798000 to 209798846)
aagggtgactaccacaggtataccactatcgctagcagatctcgctttttattctgcctatccgcatctagagtctagactacgcgatctatttatggagtggcccaggaggggggtttattggtggatgtacgcgcgatctttatgtgcgacgtgacagagttgatgggtttttgaggatctttacgttactagtggggctggagtcattatttattgcctgttatttgtagggcagcacgatctgattttggtgactttgtatatggaccttgggagttgttttgaagagtcaaaactaaagatctatgtgcagtagtttcttgtggggtgtgattgggcctgagttcttggtgttgattaggtctagatttaatgcgtatcattttttatttgattttttgcggttcgttcgtttgctatttgtggcggaaagtcaaaggacaaaaaagggaaaggggcattgtgatatctgtgacgtttttagtgaggttgtttctccttttatttaggattaagattaattgtgtacatgctactatacttttgcaaaattagacggttagtttattttgatgacttatagtggcatgaaaatggactagtttctaactttttcaaaattggagtggcatatttctaattaaccctattatttatggtgcacattgaggttgctttctatgaatttgtctatatgatgcatggtactgcgcagtctagattgaaggatatgaatttgtgttccatggattctgtaccccgtactgcacgtatatgttggtatctgatttctcatgatgattttgtaggtaccttgctgagttcaagtcaggtgcagagagga

SEQ ID NO: 6272 - DNA, 559 bp, Zea mays
  Intron number 4 from transcript GRMZM2G092954_T01 (locus G RMZM2G092954) derived from phytozome v7.0 (chr-ID 1; pos 1 98905067 to 198905625)
caggagccacccagaactctatcagggttgcccaagtaagctcttaggcctcgtttggttagtgttccattaaaaaacaaatgtaacttagttagtgttccatttgaaaaccaattgagatgctattttagaccccccatgaattgattggaactatcttatgctactattacagttgtccttaatttattcatgatatggtaagatccaggttacgtccaaagtacattctattaaatatatataggatttcaaaattttgctttatactacttgtctaacaattcatgcatggtctatttgattcattgtagggaaactcatgagctactcgagcggccgccatcctgctgctgatctccatcgtcgagcacggccagtccaccactgcctcacgcccttcttcctattcatacacctccgcgcgtatctccccgtggcgacctgaaagccaaggtgtgttcctgatcttcaacatcgcctgtcatgtttatggttcttctctcactgcccaatagtctaatatgcatttgcctattttgtgaatgaaaattgcagt

SEQ ID NO: 6273 - DNA, 673 bp, Zea mays
  Intron number 5 from transcript GRMZM2G092954_T01 (locus G RMZM2G092954) derived from phytozome v7.0 (chr-ID 1; pos 1 98905629 to 198906301)
aactgtttgtttcatccctgaaatatgtaagacaacaagagtagcagaagtggcggtccataaccgagtatcctactgcctattccatctaaactccaagttgttctgccttcaccttgtgattcctctttctagggtgcaacaagtctccatggcagtacaacagtaccatatataataccatctctctggcctttgttgcaggcacacgctcaaagggaataagctccactcactttcactgccacagtagccctgtaactccataaaatcttaattgtgaagatttagaaaagattctcccaagctctaaataaacataccttctaataaatcagaaataagaatttcttttcgttcctataaatgctatatttggttataaatattctctatagttatgttttcttacataaataaataatgaacattttttatggtgtggctaaaatttattgtcttaattaaattgtgtgtaggcatctttaattattggtgtgaatcattttctcattcttcataattatagcaatttgcttaaatgaataaggtaataaataagctcaaatatttacatactttgcatcatgttggatttttatatgtgcatctgatctaaatatgaaatttaaaaacagttttgtgccgcagcaacttcagcaaaaggtaggca

SEQ ID NO: 6274 - DNA, 521 bp, Zea mays
  Intron number 2 from transcript GRMZM2G471108_T02 (locus G RMZM2G471108) derived from phytozome v7.0 (chr-ID 1; pos 3 00148391 to 300148911 reverse strand)
acgaacttgtcgtcaactgcacctctggaaagaaggtaactaaatgttaaagaaatgttcatatatgaacatttctttctactcccactatttttatctcaaactttagaatgtatatggccgatgaagtgtatgtacatactaaaccattcggggtactatacatgtcaattgtcatgtatgcaaatatatatagagtatgttgttgcactttttttatactactataataatatattttaaaaatagtcttctctaaactttttctatgtagtaagatttagtgtaccctaaaaagagtgtgtatatatatactctacaatttatgatttatgaaacaacggctacaaaattacagccttcgaattatttgtttaaacaaacctgaaactctagaaccagtatgcttaatttaatttgtttttcttgtttaaatagggaatcattctcttctctgcctatatgaaacacagtatgttcagtttaatttgattccacaattctcctgcaggtaactgcta

SEQ ID NO: 6275 - DNA, 700 bp, Zea mays
  Intron number 1 from transcript GRMZM2G472547_T02 (locus G RMZM2G472547) derived from phytozome v7.0 (chr-ID 1; pos 2 05146412 to 205147111)
gagaggagaggagctcgcccaacaggtactctcaccctaccaggctatttttcttttatggaatttataattgataatctattttatacattcagaagcatcagatagcatgcattatatgccaatgaaatttccttcgtggagagtttgagtagcttgtctctgatgcttatcaatgtccctttcttattttttttctccttttttaattagatagacgtcgccgtgggttaaatatcttgtgtagtcatttgttaaggcgagaatattgttacttctcagacatgtattagtagcttgtctctgatctggtagtaacatgataacaattattaattctgagaaaaaaaatcgtacgtacattataacattcggagtgaagtcaatattatgcatcagtaatattgtataaaaaatttagccaccttactttgatgtatgttacatgatttaatcatgaacaaataaataaaaaacggggaatgggaggtaattatggtggttgaaagaaaaaaacgatattttatggtggcggtgaggttaagatagagggaatggttgacgaagatattgaaatactgattgcttccgttcttttataaaaaaatagaatatatggtgagaaatttagaagatagccttagcttccgttcttttatccgcagccacaagttttgctctgcgtctcccaagttcccga

SEQ ID NO: 6276 - DNA, 901 bp, Zea mays
  Intron number 4 from transcript GRMZM2G523505_T01 (locus G RMZM2G523505) derived from phytozome v7.0 (chr-ID 4; pos 1 47759480 to 147760380 reverse strand)
gatttattcaaaggtatctatatcgcaatgtcatgtaacttaatttattagtagcctgcttgttgtaaatcatttggcagacatgctttaaagagagcagagctttttggcatttctggtgttacatatactttggcacatgtttgttttttgtttattgacaacattttgcccatgatttaaggcattaaatattttttgcatgtaaatatgttaaaaaatacaacactgttctatttatttttatgttataagaggctagcaatttgggcttgggtattaaaaaatggattgctgagatagctcatcatcttcttgtgtgactgctcgagttatataaaatgctaatgtatgagtataagaatggttctaaattaggggtatatcttctttaggtaccattaagtagtggagttgcttatgtttttaatagttgtcttgtaatatggtaactggttaactggataagctctaccccggttcaaatgaaaactcactcgtttatttgtttatctttggttttagtgctactgcatatatgcttatttgttgctttgtgcacaaaaaagatgtccatcatcatttttttcttgtcttctttattattcaaattcacctcaattgtatgtatatgtctgtctgtcaaaaccggttttttgtttctttacgcacaccttaccctgtagcaaccaattcacggatgagcgaaaaaaatgtccatgatttgtactgatgcacatctcctatatatactacctactcgaggtgctagaagaagtatggaacattctatttagatgatgtgccttttaattacagttttaatatttatataaacactttgtgatattctcagtagctcatcatctttctctctctctctcaacattgtagattggca

SEQ ID NO: 6277 - DNA, 555 bp, Zea mays
  Intron number 2 from transcript GRMZM5G801945_T01 (locus G RMZM5G801945) derived from phytozome v7.0 (chr-ID 4; pos 4 0344183 to 40344737)
tcgggtcagcgccaccaccacgcaaccaggtatttcgatcctcttctcttgcgttaagcttaatcaatccgcagcctcctctggcttggctcaggggttgcaaccaatccatctacttaaccgagttactctattatgacttcgcttgcttccatgtttagctttcctcacctcctcaatcaggtccaggtgtaccattcgcgttactggacctcttgcagaatactcttccctaccttagcgggtttttttttttggtttctaccatcaatgtttttatacagcatctgtgtctcttaagcatttagtcccttttcctgaaaaccagaccagcgttgcacagcttgaatctaagtcaaattattcactgaccgacaccctatacgctggtaacacactaacactgaatacagatctttttgtttctttgcctgccaacaactagctaaacctgtactgctttagtttttgattggcaattcagtgtaaagcacatagatatgtatggaggcctccatcctaatcgttttccttttgcccaacacagcagggaga

SEQ ID NO: 6278 - DNA, 631 bp, Zea mays
  Intron number 3 from transcript GRMZM2G077183_T01 (locus G RMZM2G077183) derived from phytozome v7.0 (chr-ID 1; pos 3 00469965 to 300470595 reverse strand)
gaagattcaaactatttgaaaggtgtgcctttttgtttattatttgcttgcttatctttttctcaactttgctgaaaggtcaaccacatagacagactgcattaagcttgacacgggctaaaaaaatctttattttcccttgttttctgctggtagcgtgttagctttgtttttttttctttaccacatattaattagaagatgacgcattcctattcttacattatataagtttgaatagaaactgcaagcgtatctgatgcctaaaaagaaattttctagaccttccaatagagctgtttaacaactatggcgatagtaacagaaagagacttgaaaaagagacttgaaaggatgaaatataaccgaatacttatttttaaataggagcacatgaaaaactacttgattcatggtttctgttgggtttgaaccctagtctatccaacttgcttgggagttgggactaaaaaggctttgttgttattgttgtttttattgatatgattgggatcatctggttacaatattatttttgttatacgcaattattttgtacatgcttaaactgtcctatttatggttgtaatacttgatgtttcgtgatgaaaaatttgcttttgtggcagtc

SEQ ID NO: 6279 - DNA, 501 bp, Zea mays
  Intron number 2 from transcript GRMZM2G164117_T03 (locus G RMZM2G164117) derived from phytozome v7.0 (chr-ID 4; pos 8 0641387 to 80641887)
agactcgtgtttgattgtacaaggaagaactgcaggtctgtagctctgaatcttcagtattctgagttcacaatcagtcttgtcattagaaattcccctttcagtttattggtagagctggcatcgccataccttttctctactacatgcgtggctccatcaatgatttctggcagtcactagtctcacttttagatatttacttgcatcggatctcctgtggtggtgccgtggtggtatagctgacttggtgtttctttttggcaatggtcccgtagctcatttcccccccaaccctatgggctacatgaaagcagcttggcatttagttttttggtttgttgctcttgtcttcggaatagttggttctgatttttgaagtcttgttctgtaggtctattgactttgatctgacttataccgattctcatttttgaaaaaaaaatggttctgtgtatcttcgtttctgacgattttgattatacttcagggaagtgaagg

SEQ ID NO: 6280 - DNA, 912 bp, Zea mays
  Intron number 1 from transcript GRMZM2G134625_T02 (locus G RMZM2G134625) derived from phytozome v7.0 (chr-ID 4; pos 2 4421601 to 24422512 reverse strand)
cgcgaccactttgcccgcatctctgaggccctggcgtgagtactgtcctgcccaccatttgctgcctctggctgttccccttctctcctttgattggttgcttctggttctaggattcctgtgttttaaatccaggttctagggttcttattagctgtagctgtgtgatgtaatgttcatgttctacctgagtagctccgcagattgataaggtaggcccgaacagaaaacgcaggttctttgcatatcccatggccaagatgctcgagtcttttacaccagtcttccattggttagtaacagaatggttcagaattaacaaggatatatggcatgttgtcatgaaatatgaaacgcactactttttgggatctaggcaatgaacaacctagattatttggttttaagtataatatgaaactcatgctgttcaaaacatccatcacatgaaaatttgcagacctgatgaaacatttctgcattacatgcttttctcaggttaaaacaataaacaagtcaacttagtgcacagctagcgtttaaaatatttggaagataagatgatcactagatcagcacatcagatggttggtatgaagagactagtatatatgtatgtgatcagtctctttgttcatagttattcaaatgtgcaatgttatgttatagttagttctcggtttcgacttgcaacatattttttctgaagtatgaacttttatgtgcttatcttagccaatctgtgtttgcggtactgttctgaactccggtgctaatttttgttttgtgtttagggtacttattctgaaacaggtgctaattttcagttagtgatgactgttactgttatatatgactagttattacttcccggcaggcatccttcttgttattcttgtatccgtgtcaata

SEQ ID NO: 6281 - DNA, 697 bp, Zea mays
  Intron number 1 from transcript GRMZM2G153476_T03 (locus G RMZM2G153476) derived from phytozome v7.0 (chr-ID 1; pos 2 65175952 to 265176648)
ggggccgcagctcctccgcatccttccccgctaaggttagtgccgccttctgctatacccctatacccccctgcgtccagggagcttgtctgattggggtgtcttgtttttctaaccctgtacggccttgttggaatggggtgtaaattagttttttagtttcactctaatctatatcaatacatattgattgtgctgaatacgagagtatccaaaaacaaggcctacttgggatggtcgtgtcaggagcgttggaaggatggtcttctgtgaactgctaattttcaatacattggtaggaaatggcgcgtgttggttcatgcatatgaattttctagcgcattgtcagtaatgctagtgtttcatggtacagcagtatgactgattctagtagcaaagaaaaggatgtttctttagacttttgatgtggatctgaaattctgaacctgattataggagctgttgtttattatcgctgttgcattgtgcgcacagcctgaatacgacacaaacatgaacttcgatacatcattaatttatccccatctgaatgacccttcatacccaggctcatgttggtggtttattttgcggtttttgattgtgctgtatgttgggtggcctgacagaagggaggaatcggtcacggtggcttgcggatcgagtgcatccgtattggtggtgttgagattccaaa

SEQ ID NO: 6282 - DNA, 989 bp, Zea mays
  Intron number 2 from transcript AC194452.3_FGT006 (locus A C194452.3_FG006) derived from phytozome v7.0 (chr-ID 1; po s 179608190 to 179609178)
ttcaaggcttcaacttaaaacttattctaaccaaggtattatgcttttaacttaaaaatgaagtacaacatcaatgttggcataattgtgagtgtaagagtaaacctatgaatctatgatacatttcagctcaagtgaaactttcagtttataagataataattattattgttcaatcccaactagaaacatgcccaattctcagaagtcgtatatgcttattgtctaaggagaaaagtttagctacacctcaataatttccatttctaccaaacaacatttgtcagataacttgcaatgatgcttgagctgagcagttataattcagccaagatagaccaaattctaggcacaaccgcacaattaaacactaaccatgctactgtttcagggaccatgcaggatacaatctctcagcttaagaagataccaatctgctagaaatcttcctaggcaactcaaatgcgtgtgcatacttcttaaacacatttgtaaaattaggttctaaaccaacggaagtgacactaatgtttgttgtaatcaacagtgtcagttctacaataatacagaaagagttctgggcaaggaattagcctacaaacagagaaccattgaaccatataaccaatatacttgagttttgggcaaggaattagccatctattgcgaaaccaatcaaacaaaggaagcccatggtccaaaggcagaaaggtggtccctttctcaaggaaaccctagtcttgagccccaatcgcacaagaaaaccaccacgcttctcgattttccggtcaagattaccaagaaagacaagcaagaacctaattgatattcttggctgagcacaagggaaaagaggtgcctttgatgcactcacccttgggaccggagcacgcggcggcgctcggtggaggcgcagatcccgagcagcgcgagcaggctagcccgctgcgtccgcttctgcgctgcgggtcagagcccgtcgagcgcga

SEQ ID NO: 6283 - DNA, 801 bp, Zea mays
  Intron number 1 from transcript GRMZM2G542926_T01 (locus G RMZM2G542926) derived from phytozome v7.0 (chr-ID 1; pos 1 48831400 to 148832200)
ggaagaagaggaggaggaggtaaatgaaactatatgatttttttaattgatgcatcacatgaacccttttatttaactttggttctttcatgtatataggcaacagtaaattttctcttctttatacgaaattctatctttatgtagttgtgactgttataaacatgaatgcttgcatgttgatagcactaattgataattattatctgttcgttgcttggctgttcaaaaatatttgttggagatacttgatgcatatgcccttgcagtgtaggtctgatttcttgttcacactaccattctaattttagtggcatcacaatctgctagttgaatccaccttcatatgctctgtttctgtgttacggaaactaatctgtactccatttcagattccagttagctcaaatgaaaacaaaaacaaatacttgtgcaaatctatatcccagttagcttatcataagtgcatttttgctgaaatgttcatacttcaaaatgtccatatatatacaaattatataactttttgttttgttttcatttgagcaaactgttaactgccttttgagtgcctgatagaaattcaaccatttttctgagtttgttattttgagttgattaacatctagttctgaggtggaggactttctgagggtaacgttctatttaaagaaggaaatttcgaacttgcaaaggctcccactaacatccacactttgtattcattaaattttgaggtgatcaggcctgtccaacaaaatgcattaattttgttcatattatttttcaggaattgcacgc

SEQ ID NO: 6284 - DNA, 710 bp, Zea mays
  Intron number 1 from transcript GRMZM2G314882_T04 (locus G RMZM2G314882) derived from phytozome v7.0 (chr-ID 4; pos 2 40035925 to 240036634)
gacgacgaagatctagccatcttctgcgacggagggtacggcgatgccgaccggaacagtcctttcccgtagtatatatgtagactgcgtttctgtttatggcgcggcgcacctaggtcgttttcgctgcagattgctttttgggcttgttagaaaaaattgtgggcggtggtagactaattatttgatttggctgacgtatagcgtctaaaaactattcgcatattatatttcgtttttttgtcaaaaggaaaggacgaaggcttatgcatctgacagtcgagtctgcaatcctgtaacctttgatatctgcatctgaagttcagatatttgagagatttgcagtactagttggttcgggaactaatacctgtacgaaatgtttttactggttcaccaacacacttactgctgctatgatcatgtacaaactgtaccttgaagcaattggagtttgtttgctagctggtataaccttttccgctgatcaatcatgcattatagtataataatatatcgattcaagtgatttgcattatcatgatcatagacatttgattcttatcttctgactggaatgcaagcatgaagcagcacaatgatttattagatatttgagaagctattctgcacgtgcatttcctttcctgttgtggcatttgttcggtacttactttgcaattgtagcagacttgggattgagggtgtca

SEQ ID NO: 6285 - DNA, 829 bp, Zea mays
  Intron number 1 from transcript GRMZM2G434842_T01 (locus G RMZM2G434842) derived from phytozome v7.0 (chr-ID 8; pos 8 0628276 to 80629104 reverse strand)
agattcacaaagttgttggagcaggtaactatgaaggatgctctgtggttcccctgactattagatgttttcagttttgccattaatttattttagaaagattacacagtccaagtaaaagtcaggctttgcatcaccctagaaaggttccatcttcctttcacctatctcaaaaaaaaatcagagagtacttcattaacatgcattctttccttagtcatctgtgctatttatacctacctgctctcttagtcttagctctcagtttgtttattgggattaatatatttttctagaagcgccattcatctcttgttgttgtttcaagattcatgacgtcaggccttagttattagatgtgttgttgtctgtttcttacttaaatttggtttctcaagttcatcacctcaggtcataactcacagtgtttgtagctacatactatgtgtgttccaggtgttccaatgcacatcaagtatgccaccatttatgtgaaagagatggagcatattaattttagttaaaacatttttttgaaaatcatagttaaacatttgttgcattggctacgttggtatgtgtaatttcttataagtggtctcttcggttagatggagctccctaagtgacttaacattgtgaagaatgagaatcaaggagctccctccttatgatcctgatggtactacatcagggccaaaggatcttgtctatttgacaaaatcatttactagcacacacttcaatgtccagattatgcacttctatcagtttttaattttcttctcctgtagcgtccattgcaaggaagatctaccagaggcaagac

SEQ ID NO: 6286 - DNA, 688 bp, Zea mays
  Intron number 6 from transcript GRMZM2G169890_T02 (locus G RMZM2G169890) derived from phytozome v7.0 (chr-ID 1; pos 6 0147593 to 60148280)
atcttggaaagggtaatgatattatttgtgtccgcttttgtgtttttgtgtgtgttgaatgtggcggcgcttttcctctgttttgagctatgtttttcacattggttctgagttcagatagtcttataatcactatatataggagtgtaattttatctgattattcaatggcggagagagaaaaaatttggtaaggctatgcttgtactgtcctataattcccttgaaaaactccagtttttactgttttcgtcatttttaagtcagggtaaaggatacttaaactccaaatgagttttacaattgagatccatttggctatcctttggtctgctgatctgaatcttctgtaaagaactttggctttccacaatgccatctttaatcttgtttgggcttatggtgcatattattcttgtaaaaggttgtctatgttatggtgcatgtcactgatcattccacatttgcttgtgtatttaaacaccttgtttgtgtacattgccagattttgttgccttatcctaagttttcagaccgaatcctgtactgttgggtttgattcaaagacattctcctaaatggctaaatggcccatctcagatagttatagcttaacatctgttgattttttttctttctgtttgtacattcaggtggacacgagctcaggaagagcaccggaaacgct

SEQ ID NO: 6287 - DNA, 595 bp, Zea mays
  Intron number 2 from transcript GRMZM2G134313_T03 (locus G RMZM2G134313) derived from phytozome v7.0 (chr-ID 4; pos 1 90969078 to 190969672 reverse strand)
ctggtaccaaatctttcccttcttatttcatatgttttcttccacattgtctattatcagaactttggcatggatcttcctagccaatggaagaaaagccatgtctaagtaattgaaagctgcatgcattaacatttaactgggggacaaatgggagcaatcacatctcctatttcatgtaacgaaaaccaatttaccataagattatcatgcatctcagcaaaatgtatattttgtattgcctcgaggacaaaaattcccttggaagtagatgatattattttactagcacttttcagagtcaagtttagccatctacatctgttgctagatacatcaggcttaagaagcaaagcagggattactggtcattcacaacatttattgacattttattctatataacttcaattagctttggttttcctatcgatgctttgaatgaatttgatgttctttttataaacttggaccttatgaatcttattattccacatactgtgtccttccattatctactattctactatatataatttgttttttccattttcatgtaggagcctgttgaaatttctggatttcacgaaagagt

SEQ ID NO: 6288 - DNA, 630 bp, Zea mays
  Intron number 1 from transcript GRMZM5G820696_T01 (locus G RMZM5G820696) derived from phytozome v7.0 (chr-ID 8; pos 1 06628444 to 106629073 reverse strand)
tgtggatcggcaccgccccctgcacaaccacaccacacaacaacaacaaggaacaaacatcagcagcaacagacagttcctcagcaacactcaaacctcctcctcatcacacacacacacacacgccaccctactcttttgcagtttcgtgagaacggcaatgcgagcggccaccggaccttcggccgccgcctgccactgccagcagaaaagatggaagctttggcaatgatttggtcgcttccgtcttgttgggtagccatttccgtgacacccctcgccactccctcccaaactccaaaaaaaaaacaacgggggcaagcgagaagaggataaatttgggattgagcccaaaggggaaaggagcgagcgattgacccgcgaaatcaccggccggcgctggccccgacccaccaccgccccaccgaaccatgcataaagcggcggcacaaatcgggaggcgcgccgccctggcgcatcccaacagaagaaacgcgcaaggacggcggcgcgcatgcccgcgcgaagaaactagtacgtacaggccccaggggacaggaggaagcagcagcggtagccgcttgcgcgcgcgcaccttgcactcgttgcggttgacctcgtcgctgccgg

SEQ ID NO: 6289 - DNA, 967 bp, Zea mays; identical to SEQ ID NO: 6020
  Intron number 1 from transcript GRMZM2G399873_T01 (locus G RMZM2G399873) derived from phytozome v7.0 (chr-ID 8; pos 1 03833146 to 103834112)

SEQ ID NO: 6290 - DNA, 1032 bp, Zea mays
  Intron number 3 from transcript GRMZM2G084513_T02 (locus G RMZM2G084513) derived from phytozome v7.0 (chr-ID 1; pos 2 41784644 to 241785675)
ttcaatcaaggactacatataggattagaaataaggtagcatgtgctccccagatcattgcctttttcatagctttgtacctggtaagtatgcatgctgagcttggtgctccttggtaggatactatattttttttttatccttgtttgtttgccaggttaaccttttcctggtagtattctatctttatctttagagtttgtttctgtctccaattttctctaaccatacatacacataccttttgactctggtgttggctgttatgtggcttagatgggattgggttgtagtggcttatcatatgatcccttgtcgtcacaatatagtatatactaaccagtgattgtgttggctggatattgttgattcatgagtttggaatttgtttttgtatctagaacttgcggaatatctatactggttgttgccacaaccaatatatctgtcaaaccattactgcagatgttatgtatggccaagcctatgttaggcgcagcagggccaaggctgcctaagggggcgcgccaggtggggcccaatgcccattagctaatagatcagctctatctagatagttatacttatccaaagctagtagatagacttgagatagctctatatatagatctgtaaacacttgaataaatgcaagcagaataccaatttattctggcttcccagaggaagccagagtctcctgggatcttctccctgcgcgcgacccagccagggtcacgacggcgccccagcgccgccacccttctcgctcccaatccccaccctacaacctacgcaatctgcccggtaggatccgtcattctaccagcagacctccagcttcgttagtccagctgaaatatggctatgatgcctatgaattagcataagtgcattgttttggggcaccatcatgctattattgttttccagaatgagtctagtctaaagactatctatggtagattttgtttttcttaatctgtcaattaaactaaatttcttctctttattaggttatatattgcttgg

SEQ ID NO: 6291 - DNA, 689 bp, Zea mays
  Intron number 2 from transcript GRMZM2G070239_T01 (locus G RMZM2G070239) derived from phytozome v7.0 (chr-ID 4; pos 1 75135094 to 175135782)
agttccgtgtgtttggagttctgcgaaggtcactcacttctgtcaaacttatcccggttttgtagaaacttctttttgtagttttttccatgttttcccttgagccttgaaggcttggcaagccaatgtaagaaccttgtcattcatatggtgatgaaactcaagagaatagctttatattgttttattgatttatttatgtgctcactaacttattgtggagggtgatagttcaaaaccaactttaatttcgcttcactaatattcttcatcaaatgtttgtgtggccaacttcctttcccaatttgttaaacttgtttttttcactgtggtatttgacttttcaagggctttggctgcgtataaaaattattgattggagtggtgtaaaactttgaattttgaaacatgattgtccaactattttgaccgcaaaggtggtttgtaatgtttatattcattatgcattctcttccaattatgtcttagtttcagaaaaaaaatgttttggatattttagatgaaggtgtgcatgtgtatcttcatgttggatctagcgagatggagaggttttatctgttatatttctttacgacttctttcgttatcagatgaacacctggtgcagtccactaactgttgttctcaatgcagtgtttgggtcgcacgcaaaccacctggttttgcat

SEQ ID NO: 6292 - DNA, 705 bp, Zea mays
  Intron number 2 from transcript GRMZM2G035040_T01 (locus G RMZM2G035040) derived from phytozome v7.0 (chr-ID 4; pos 1 49528236 to 149528940)
caaaaggtttgataaaggaactattttactttagattttgttcttacgtttatcatgtcagtaatttacactagatttgttcctacgtttacacctttttagccctcagatgcatgcatgaaccttaagaggtagatatattgacaagacatcattttccataggctctaaatgctttagtagtttctgctaatgattttgctttcttactagttatgatatttcaacagaccattttatttgtgctgactgcacaaaagataagatggtatctgccagctcaagacattgtttgctagtagacttcatattagttgctgactatcttgatacaactcaaggcatttttcataacaccattgttggtctatgtgaaataaagaaaacactttaggttgctacaattttcatcgacttgggcacatgtgattattacacttgttttggttttattataatatatttttaagcgttaacctcttctattacatcacgtagttgctagacaagcgatagagcatgaacatatggcgctttgtacaaacaatgaataagtatgtaactatgtacacatttcacttctatatattaggatgattatgcaataccatacttaattgctttgaattgatttttctggagatatgacttgactaaacatctaaagcagctccagtgtagaaccctgatttttatcagtgagaa

SEQ ID NO: 6293 - DNA, 1036 bp, Zea mays
  Intron number 1 from transcript GRMZM2G108032_T03 (locus G RMZM2G108032) derived from phytozome v7.0 (chr-ID 1; pos 3 3121976 to 33123011)
ttgcggaagcgagctcgccgcggcggtgcctccaggtcagtggctcgcacagtcgcactccccctttctacctctctctcgtacttcgttttttttcctgcgagttatcatatccatcgtttgagcttcctggtgacatgcagatggctggtacgattactccgcctacaccgacgtaagtctccatgcaccgaatgaagcattcttttttcttccagaatcgccaagcttttatctgcacacgtcatgcatgagtaacacccagcagcaaatgcaagttcgtttcgttcattattaaccgttcaaactatatgcgtgtatctctgatggttcttgcatctttatcaaacacaccatttcacccgggtgaccactaaataaccaatgcggtcggcagcagagagagccggggaagatggcgaagctcaaagccgccattgttgggaccacaaaacaaatgcttcctcttccccacaaggccacaaatccacaatgcacatgatcctccctcactctctccggtccgtccggccggccactccagttttgttcccatgcgtgcgctgggacacctcagcgcccccaccagtacagtacctaccacactaccagagatgctagcagccaatagacattatcacacggagcgagcaagtgacaagtactatactactacacttctcgtcttctcgatagtattctaagctccatctggaatggttgcaagcatcgtgatcatcatgtccctctttaatttatcaagccctgcacgcgcgcggctaacatgcggttctgggccgaccaagtgaccaactaacgcagcgcaagcaacagtgagccttcgcgtcgcgcgcgtgtcatctgtcgctgtcacgtccacacctatcatacgcttgagctttgatagaataaaataaactatgcgcggcgcagaacatgaacaacagagtagagcgcggcgtgcgctaactccaggtttatttgcgtggcgtccagtgcaggggccagccggagccggcgctgtacaacggaggca

SEQ ID NO: 6294 - DNA, 851 bp, Zea mays
  Intron number 2 from transcript GRMZM2G379005_T04 (locus G RMZM2G379005) derived from phytozome v7.0 (chr-ID 4; pos 1 72761934 to 172762784 reverse strand)
tcgaccccagggacgtcggcgctcacctcggctcggtgggtgcctccttcctcgcattgcccgtgccagtcgtgcaaccgcgacgcgtttttcttcttcttttttccccccttttctctaaccctgctcgtgctgtgcgggcgattcctcgtggaatggagcggagttcaaaatagctggacgccaacgccgcgggcaccacgggacacgccacgcgcgtcggccacggccacgacctggtgcctgccttgcgtcgcgcgcgggacgtgatgacttgttgtcttgtccgtgcgctgcgcggcgcggtgcggtgcggttggtggttgctggttgggacaggaggaggagcgggcggtgtcggtggccggtgggagtcgtgaccggagttaccaccgcccggccgctgtttggtttgttggttggacttggatattacggccgggcccgtgttacgtcggtcggggggcccgtcgcttttcttggtagttcgccagcccagtaactaattcactagtgctgtactagtatttttatttcctgctctacacaaacctgggccccggcctggcccgttcgttcatgattgctttgctgcagtgcaaacgtgggccccggcctggcacgtaatgtgtgcagtgactgaagtagtggggaaagacgatgacgtcattcatggcagatacacaggtagtaagtagtaactgcagctgcaaagctggcagtgtcggtgtcggtgtcgtcgtcggcgtcggtgctggggagcgggcgagcggcgcgtcgcatgattctgtcctcctgacgtggcagctaacgattccgattccctttggttgcagtgcgacgacattgac

SEQ ID NO: 6295 - DNA, 253 bp, Zea mays
  Intron number 4 from transcript GRMZM2G020801_T03 (locus G RMZM2G020801) derived from phytozome v7.0 (chr-ID 4; pos 2 8120515 to 28120767)
cttggtcaggtaaatctcatgtggggccactcatcctttaatgacagatttctaatcattacctttttttttgttttaaggagaaaattgctcttctgacatttttcccacaccccaaatttttgaatggcttatttactttgtgcccttttatttgtttgattatacatgggatttagctaaacatcaaactcattattaattggttttaggctggttcacctgacctgtttgttattgccttatgcagcca

SEQ ID NO: 6296 - DNA, 516 bp, Zea mays
  Intron number 2 from transcript GRMZM2G134563_T02 (locus G RMZM2G134563) derived from phytozome v7.0 (chr-ID 4; pos 1 16133333 to 116133848)
agttgctccagagtcagggagacaagctagccgaggtatctctatttattggagatcaaatccccacaaatctgtagttgaatgtctgatatgtgtttctggggctttgtgctgttcctgtgtcccactttttgggagttcaattttctcttggtttccttggtcaaagaatattcagtaactgcatacttcatgaagtgattgttaattatcgtaaaatgaattaaagagttagtcttcgaaataaggaattaaaacacaaaatgtattagtctgtctcagaaatccaccttgtatgggtatacactctccacatgaaagctgctgaaatacccagttttgacagtccatgtacttttgcatttgctgctgcctataaaactttctgggcaactagtgaggtataaatttttatgtgggttctgtgggcctacaaaaaatcagcagtccagtcatactcagcttctatatgatagagatatgtctttttttgttatttttaggaagggaagtacc

SEQ ID NO: 6297 - DNA, 742 bp, Zea mays
  Intron number 2 from transcript GRMZM2G083755_T04 (locus G RMZM2G083755) derived from phytozome v7.0 (chr-ID 1; pos 1 87342882 to 187343623)
gtgtctggctctagcccatctgcagtggatcacaagtttgtttcttgaccttgcagtcttagcacgttgatccattaatgcattctttgtgtaattttgattgctttcaagtatgaatggaaagggcaggcccgatgtagtggtgagagttgtctcaccgagtcaccagttcgcgggttcgaagtagcctctctgcatttgtgggggaaaggcttgcctcggtttatctcttcctcagagcccactcatgtggagcttatggcactgggctgggtctgtcttttttttcaagtatgaatggtaggaatagagcaaattagaaaaccaatcgagcatacgtgtaggatgtttgatagagcaatttttgtttagatttgagtcattttgacattctttacaagtcccaacttgcttgggactaagaacctttgttgtctccccctgtgtcaaccaggcaaccctaaattaggtactccaaacattctgtaatttgccaaatagtggcactggataataggtctttagaagagactacacttgcttgaatcaacaaactgaaatgtagaaagtttggctaactactgatattagttgattgcaacaatgcatagaataaaatttgatcttcagtatgtttaactgtttttttgctttatagtttggttatttgaacttttgttatatagtttttgctgcatggggtagtcggtgattatgattgtatacattgaacaggttagca

SEQ ID NO: 6298 - DNA, 565 bp, Zea mays
  Intron number 7 from transcript GRMZM2G146553_T05 (locus G RMZM2G146553) derived from phytozome v7.0 (chr-ID 4; pos 1 86041521 to 186042085 reverse strand)
gacatcttttcctgccaagaggttgttaacaagaatccttgatccaaatccaatgacggtatgccagagcacaaaagctacatgaaaataaaaatactagtcaagcaatcctaagataatgggatagaatagatctgcattcgccatataatgtatcctacagtaggctcatagatcacctgatgctgccaatatccattaattaattggtattcccatcgatccagcacttgtcatgtaactcaaattaacacaaattttagaagttcctaatttacttacgattatgcagccactgttagatgcagttgaggaaaaaacatcagctttctattagagaagaggtataggcaatttggcaatgcacatatctcaaaatgaaacccattgtgtcagtaaaaaaatgcaaaatttgtaacttccagtggaggatggttcagaatgtgctgagcctgagtctggtttcaaaatgaatgagcctccatacttttatcttactccattggattagacttacattttggtaaatcatggcagagaataacaatcccagaaatattagagg

SEQ ID NO: 6299 - DNA, 659 bp, Zea mays
  Intron number 1 from transcript GRMZM2G025171_T01 (locus G RMZM2G025171) derived from phytozome v7.0 (chr-ID 4; pos 1 81429644 to 181430302 reverse strand)
ctttggtgcttcctgctgcctctctctccctgctcttcatgtgtaccattctctgattgaatatttgagtgaatggtgaatactgcatacctggatttcaggattcatatttgaatgaatggtggatacaccgcatacctggattccaggatcgtattgagtggctgtcttggcttatttcacgttattcccatggtttacagaggtttttttttgaagttgaaagttgaaactcgctggagcgtcccactgtcccagaaagaaaccatgtaggaatttcaagtagagaaactagtgtccaattctcaaaataaatagtctactataactgcagttctccttcgtaaatcgtaactcagatatttcatatcaaacctgtaagaatttcacacaaaaaaaccatattccaaagagggcattcgatggttggacttgacgtgttacatatttgagcagcaagaggaatgtacagaaatcagaatgcccacacaagttatccgatccaatatatcaagcgaaacgcccaggattcttacttggatattacaggcttgcactcaaaattttcaaacttctttggggctgcagagttgccaatttgattagttaatctaattgaaacggtttatcatatttgcagttgctactgtctgaaaggt

SEQ ID NO: 6300 - DNA, 377 bp, Zea mays
  Intron number 1 from transcript GRMZM5G833774_T02 (locus G RMZM5G833774) derived from phytozome v7.0 (chr-ID 1; pos 8 274554 to 8274930 reverse strand)
agcacgaagttgacaggggagttctcagggaaaaggtgagccctttttcttctccctccccatccgtccaccgttgctaaactgtccgaccgccactggagtaatcgtgtagtcttaggtccgactgttaagcttcaaattcaactgtcgcctcttgtcccttgatctgtttctgccgcctacactggacgacgcttgatgcatacgagatgatgagttggccgcaagttttcttggatcccagcatacgatacgatccaccagcttaaccgcatacaaaaattattgcctttttttaaaactcgttttgatttgattgcatctgttgttttagttgcgcaggggaggaaggaagagcctgaaagggcggtgcggag

SEQ ID NO: 6301 - DNA, 326 bp, Zea mays
  Intron number 1 from transcript GRMZM2G479744_T01 (locus G RMZM2G479744) derived from phytozome v7.0 (chr-ID 1; pos 2 94703014 to 294703339)
aaactcccctaatagatcagaataaatcaggtatccaataatcttctatgggagtgcagtcttatatgttactttattgatagaaatgtcttgtttttgaatctcatgataaagcttaccttggtttgatggtttcagttagcagaactctctgattccatcgacttgctttaaggaaaaaagaattgcatgcatgtttcagcagtaccaactatactaagttactaacttatgtggatatgaaccttctatgcatttgtttttgtagaatttgtaagaaatatccgttttgttgttatttacttttgcttattattgtaggaagt

SEQ ID NO: 6302 - DNA, 621 bp, Zea mays
  Intron number 2 from transcript GRMZM2G377311_T02 (locus G RMZM2G377311) derived from phytozome v7.0 (chr-ID 1; pos 1 3359221 to 13359841)
gcgcttaaaatgtaagattgggacatttattttcttatcttatatattgttggctgttctttgtgttccactttctacaaattctaataacactatttaaaatgaagtgctactttgacgtttccgtgatgctgattattttcaaaatatgtgttctatatcagcttatgtttgctcatttttatatagttacttgtgtggtgagatgaacatatctacaattatttgtggtaacgatgtataaatatctttttcccaataaatagctgtgtaagtttgactaaggatgttcatactataatcaagaagagaaatttgtatagttgttattgcataatttaaattttggcatacttgagattttgctggtgtttatttgtgtgtgtgtggttgatcttggttgttattgctaaagtatgccatttcctcagtggttatataaccttaatgcaacttgcattccttgtgtgaatccttcagttttttaagttttattatatttaatggatcctgcattcacaccaagtttgtcaaagtaaatacttttcgctcatccttttatctcgtaaaatctaccttacctgtgctgtttttaggccccaagtgacgattgccacagca

SEQ ID NO: 6303 - DNA, 441 bp, Zea mays
  Intron number 3 from transcript GRMZM2G377311_T02 (locus G RMZM2G377311) derived from phytozome v7.0 (chr-ID 1; pos 1 3359891 to 13360331)
atagacgagtaagtctaattcgatgattgtctctagttttggttgtccatggttgccaacatttcctttaagctttataagttataactgcattgccatagaaacttttatattttgatataatttcatttttgccaagttttcaattatttggcttttccattttgtatcccagactactaacaggatcttagtaattgataagagaaactacaggttcatttttcacattttctcttgcattcgtgttagaaaccaaattcttctagtatctactatgatgtgaactctttgatagtgagatacttagatatagatttactccttcaagctaggtatcaccatgtggaatgtattttgtttctaaagaaaggtaccaatacttttgaatctaatatccacacagataatcgctactgtttgtatattcttggctggaaa

SEQ ID NO: 6304 - DNA, 964 bp, Zea mays
  Intron number 2 from transcript GRMZM2G011753_T01 (locus G RMZM2G011753) derived from phytozome v7.0 (chr-ID 4; pos 6 1716992 to 61717955)
tggaggtatgtgtcgcttcctaccaaagtggttttccgagttttgtaggcttgagtatagtgtggataaagatgttgcatattgtttcgtttgctatctgttcaaagataacaacaaattccctggtggagatgctttcgttaatgaggggtttagaaattggaatgttaaagctagattgcttaagggttggtgttgttgatagtgctcattgtgaagctgaggagaaatataatttatttttgacacctaaaacatcaatccgtgagtcagttacctcaaatattttattgtataaggctcaaaaataaatttgagaagcctagagaagagatgaaaacttcaaaaatttgagaagcctagcagagttatctatgatgcttgtcaaaacagataagattctttggtatgacattgtttacaagcttctcaaattggtgctagttcttcatgttacaactgccggtgttgaaagaatcttttcttcaatgaactttataaaaaataagctaagaagcaagatgagacaaaaaaatttaaatggatgcttggttatttttattgaaagacaattcttcttgcaagtcaaaaatgaggacattatcagtcaatttcaaagcttgaaggatcataaagttgtctagtaagcatccttatactatttaatgttctcctgacctattatttttacgtgagttatgatttagcttactacttttgtaatgtgtatattctattatatgctataactatctatacgtgaatcaattagaccatctaattttttttcctttagtacaatttggaatacccattctatcctggtcccgtccctggaagccacggacaagccacagtccacagatttcagaacaagcagcttgcttcactcgcactgacacgagtccagcatctctccgtttcatttgaactacaactaatctttgccaactaaccaatcagg

SEQ ID NO: 6305 - DNA, 880 bp, Zea mays
  Intron number 1 from transcript GRMZM2G164152_T01 (locus G RMZM2G164152) derived from phytozome v7.0 (chr-ID 4; pos 1 88713716 to 188714595)
ctacgacagattgttgggtgaaatacaactccgtactatttagatgtcaaaaattaaatgcacccggattaagaccaaacactatgttgtgcatcttgtagacatgcttttcatggagcaaactgttgaagtatttgactatctcataccgagttgcaatggcctcgatcttggctccctaatttgatttcagcacaaaagagagtgtggtacgaatattatatatagttatataaatgaaacttaaagagatgttgtcttacattgatgtcagacaaaatgtaatgttgcatgtcacgataacgtggttccatcgggaatttaacttcaactcgagcgacaatactatacttccgttgtagcccataaaaatcttcatcgctatagtcgtcgaacaacctgaagctatattaaacatgcgactaaataacgttcataaatgtgatagcgaagtcttgtgttaactattgtttataatataacttacataggcatctttttttttcttgtccaatgcaactctttcacggttcaatacggctggctccatcaaaaccttttatcatttgaaaatatttaaaactaaattgtaaaatggtccagtgcattgatatagcacgacgtaggagcagtgtgggttggttggttgagcacttattttggactataggtgtgactgtgattaaggcttgtagttcacgagtctgcagctcatgcagaggtggatggcatgcatgattgcgtctgaaggatttgtattgcccagttggtgcacaagtacggcgtctaccggactcttttaagttgcaagtttttttcctaggcacctaggactttctttttacgagaattcgacaattttttgcactgtctaggtggc

SEQ ID NO: 6306 - DNA, 593 bp, Zea mays
  Intron number 1 from transcript GRMZM2G077780_T02 (locus G RMZM2G077780) derived from phytozome v7.0 (chr-ID 1; pos 3 284856 to 3285448 reverse strand)
acttgtaacaaagaggcaagctaccatttccagcattgtgagctataacatttgacatacattattaatttcctttctcatagtttctgagatgcttttggatgttgcaaacaggtgaattcatttcttttgaaacctgctcgctaaattaagaaaacatgattattctgcaaaaaaaaaaactgatgtgcaggatgctcctgattgtacattctgaatagccttctaacccgtaacccttaatctgtaatttgatatcaacactatgtttcagtttctactttgatgtatgctagtaactaaaccagttatgtggtagaaactgaatatatattcttgatcatacagttcttctatccttaagaaatcctagtattcactatttgttccatgttgaaagtggatttacagaactccattgatcaatcttctagtaacatgtataatttagatttgaaatgtcaaatgtgttctaaactctactccttaggcttccttgcttcctgttaggcatatttctctaattgcagatgcaccttttgagatttcggtttgtgtgatcatgcttgccaatatattgcagctaagcttat

SEQ ID NO: 6307 - DNA, 745 bp, Zea mays
  Intron number 1 from transcript GRMZM2G011518_T04 (locus G RMZM2G011518) derived from phytozome v7.0 (chr-ID 1; pos 1 06903767 to 106904511)
cgggtacgctgtctccttccttcctgtttcccctcgctcccttcccatctcgacaggatactgcaatgaatcgggctcctcgataaaccgatccgttcacaaatcacaagggcggtggtggctggtggccttgtcgcactcctatctccatttctcttggcattgatttcagttactactgaatggttagagtcatgtgatccgtcaacaatctgccagcactgttttggctaccaatcactaacatccaagagcagggaaataatgagtcatgatgctagccagacatacagctatagtgccctgtggtaaccttacctgtttcagacggttatagatttgatttcttgtaatctactagtagtggatcatttataacgacaacaatctctgcatcgtgctgccagtcatccaaagagagttaaataatgtgttaccaaccacagcgtgctggatctttcatacacaagatcaaattgtacctgggtaaaatgatatattgatgtattattacttcactcattttctggactaggtgttgccatagtgtgtacagcatgatgccaattcaagtgcagggcaggctgtgttccaatcatgtctcatgtcttcttaacgatgatttttggttgtccttacatgtttagtcttctttttttatatcatcggagattagaaccagtatccgttttaagctgaacatgcctctaatagattggcctcttatttttttcctcaggtggtg

SEQ ID NO: 6308 - DNA, 793 bp, Zea mays
  Intron number 1 from transcript GRMZM2G447504_T01 (locus G RMZM2G447504) derived from phytozome v7.0 (chr-ID 1; pos 2 9103327 to 29104119)
cgtccgccaacgccacctcctcctccgggtaattcctaattacagcctctgcccacccatttcagcttatgttcattgcgtccacttctcctgatcgttcagttctggttgaaatggaaaaacttcctgacgtatcttccttaatgccaacaactaatgctaagtacaagtctgtcgcttgaagtagtgcttttgtttgcatgaatctgtgttttctgaaatgacaacagcattaaactgtgtagttttgacctacctacgggctacggcaatacgacatagaacagaagacatggagcagtcctctgtgttctgtagtggttttaggtactcaataaattgcgagaatgcctcagcatgcagtgtgctacacaagtgtattaaactcctgccactttatagtaggtaaagtaaaaagtagtataacagtacgcactacgtgctgctgaatttgccgtactgccttatgtaccgataactcatgtgtagtgtgccagtgtcaattaaaggatcatatggtgtattttggtttgtgcagtcaaccaatgcttcataaggtgacatatcatgagttagcagtgcaaaatcctattgtttctcttgtattttggtttgactttcccgttagcagtgcaaaatcctattgtttctcttgtatgtcataaagcaatctctattttaagccctgttgcgtcgcgcattaactatcagggcctgcgatggtagtaatttggggtaatatatttccactattgcaggaactccttacaccaagaaatcatacaaggttagt

SEQ ID NO: 6309 - DNA, 910 bp, Zea mays
  Intron number 2 from transcript GRMZM5G869967_T01 (locus G RMZM5G869967) derived from phytozome v7.0 (chr-ID 8; pos 8 1650577 to 81651486)
tggcttatcagcaattacgcctggaggtcccggtggtaagtagcccaccaccaccaccatccgtttacacactgattatattatgttcatggcctggtattttctcgccgtctccatcgcagatcctcccgtacaggggagcccttcttgctgtcagaaaaatgtctgctgttaatagacgtatcgtgcaacgcatggaagagtccaacagcatgtgtgtgtgtgggcaacgagtcagctggatctccgctctccaaatttttcgtttgctttccgtttaatccctatatatggtcactgtatttgtacagcttatttcttccaaagagtttgattcccctcatagatatttcaacatatatctcttgcatattaaagaaccagtttccacgatatccgccgtcgtcatcgtgctcccctaaagttaaatagtaaaaacgctaaaattacacgtaaacgatgacttgaaccacgattgtttggatctaataacccaccgttggtcaattgtttttaattgctgcgtgtcataaaaaacaaggcaacacaaaaattgagaaacaaggactttcgtcctcaaggtaatacaccttcggtgtcatagtttgaagacgaaggtttagatgtataacaaaacacggaattctcgtatacttgattccaatcctccactgagaaccaagtcagtatgtgttatgaaaatcttcatccagagtttggtactccttcagagtatgaatacgaaggacgaaggcctttgaacaagaatgtatatcagaagtgaattgtaatgtaaagacacaaataaaaaaacaacacacgagagctatctttctgttgtcttatcattttcagtatgtctctcattacattaggcgaatttacaagcatacattcggcttctgaacaa

SEQ ID NO: 6310 - DNA, 823 bp, Zea mays
  Intron number 1 from transcript GRMZM2G472023_T01 (locus G RMZM2G472023) derived from phytozome v7.0 (chr-ID 4; pos 1 75981923 to 175982745 reverse strand)
gcctcggccgcttctcggaggcgctcacctaccaggtcactactcactcctcagattccaccatccatctcgcttacttgcctaccgaataccgaccatggtttcagatgttttaaacgacaggaggtgtgctatgcagtataacgctaatgcattcccactcgcagttgtaatttcggtgctgaatttatgaatttttaaccatttggtggactattgatctgggcatgcatttggactgcagtgtagggttcgattattctcaaattatgttattaggcactgtatatatatacaattgaataccagctgtggtgtggactttctggtagtgcatctgtcttatatgataatatattctttcaaaggtctgatatttagtgatgtatatgtgacccttggcttgcagtgttgggtttaggcacatgttaattgttttagttttttcacacgcttattgaccttggatagttggattacattacattatctacctccgatcttttttattcgtcgtttgttagtgtaaaattcaactatccagcgacaaataaaaaaaatggagggagtattactgatcatgctgtatctaccctgtcacagtgcatgtacatttatcaagatatggtcattaggtgatttggtcactgcctccggtgttaaatgctaacctcttgttataattgagatgctaagaattagaataatactcagacctcatttcatacattttgctgattctgctacatgaactcaaacttccatttaccttgatgtttgttggcttgacagaagaagcatctacagctcgcaaaggagtctg

SEQ ID NO: 6311 - DNA, 1052 bp, Zea mays
  Intron number 3 from transcript GRMZM2G088648_T01 (locus G RMZM2G088648) derived from phytozome v7.0 (chr-ID 4; pos 3 4014021 to 34015072)
agctcaaggtgaaggaggagtacaatagctacagggtatgtgtcaaactgtactattcatggtattctaggtgtcaagttgtgtgttttcaaattaggactttggatgattcatataatcacgctggaggcactagttgatttagggttttgaaatttggcttgttctttgatccaagtattttgggaacaatgatacttttagttcgttcatcaaagcttccacgaagtgaaaacatgctctgtcacaatgtgtaattgatctttaccatgacacttcaatagtattggaactaacatgggaagcgcacaaggttgttagacttaggttacaggtctgcgctgctcagctgaccaaatgcttataataattctgtttgtatctaatgcttttcagtcaacatagtggtctaacttgtgggagttttatccactaattaatataaaattttgaagtaaataaatttaaactaatgtaactctgatttcctctgaaactataatagtcacataaaacgggttcgaaggcatcgaccctcgacccatgttcacgggttcatttttgaaccgaagtgtaaaaatcgttcacaagtagcataccacgttctgcgaccttataccttgactccaacctataaattttgtgactaggaaaacattgtaactttgagttatgcaagtttatgaagatgacttacacaacatcccacttgatctcctcactccgctgtcttggtttatcctgtcgagtttgtactgaaattaacatctttctgtggaaagggaaaagtaacattttaggagaatttcagccatattattccatcaacaatatctggatcgttctacatttgaccatctttaagtatacaaataagaaactatatgcatccttttactctctgcttttgcagaaggaatcttagtttaactatcattgttagatccttggataatagatccagactagctagaaagtctattttgtttataatcgacctttttcccctattcccaggacagaactgccttgctgtttcttggttttccagt

SEQ ID NO: 6312 - DNA, 468 bp, Zea mays
  Intron number 1 from transcript GRMZM5G876146_T01 (locus G RMZM5G876146) derived from phytozome v7.0 (chr-ID 1; pos 2 98735283 to 298735750)
aggattatcagcagtggcgcgtcatttgtcgggtaactaccttggcaggcatcgatacacagacataatttcttccgtttattattggcagttgtcaattttcaacagtccaagtacatatctgcagaaaaagagagccatggcaaattgaaaccaaatagaccttaggccatcgacatcgagtgataggcaatgacttctgttctagacctccggtttattgctgttttcactaagctggaatcctgacaccagaccaccagtccccctaaaagaaaacaaaaattggcacaggatgtctctttagaagccaactttgcttcttttctgttttcatgttgacttgaactctagccccatataatgtgtcttagctgttcatatcaagcttgtttgatttgtgttactgatacaagccttttgctgttttcaggttcgtgatcttgattttgccatacagatagttgg

SEQ ID NO: 6313 - DNA, 811 bp, Zea mays
  Intron number 3 from transcript GRMZM2G126218_T01 (locus G RMZM2G126218) derived from phytozome v7.0 (chr-ID 1; pos 3 362513 to 3363323 reverse strand)
caagctgccaaagatgtaagtaagagcgttacttgattcttcgctcgaatttttttttacttgtaaattgttcgattaacaatgacccaacagagaggtggcaagtgaacaatcaaaagctaggaagactgcgaaatgaagtgttttttttttggaaaagaaatattttgttttatcctcagattgacaaaacgagttggtacataaacttagcccttagaacaacatccaagaatttgtctaagtgacagaaacgagttggtacataaacttaatatttaaaatgttttgagcgggacattcaacttaggttgccatttacgtggccgactaaagatacccttccccgtatattcatttggtaggaaggttttcaatactacagtttttggaatttgcaattgcagatcacataaatatcatggtttcactactcgagttaaatcgtggtgttttctaaaactgtatgttgtttggctgtccggttctattaaaactttacgccagggaggagaagacgctaccgagccaaaaacttccaaaactctaaaaatactgcagttttgaagatactatatctattttttagtattattctgaccagagagtattattctatatatcatgcgaggttaagctacctgctgcaggcttgaaccactggtctgtggccccacagaggttgcctatcactgacgcgtggcccacatgggagtctagcgaatcgggtccgttaatctgcaccggcctctccctcccatccggcgttggcgaagccgcgcgtcgacgagaggggcggagtcggcgacga

SEQ ID NO: 6314 - DNA, 647 bp, Zea mays
  Intron number 2 from transcript GRMZM2G144742_T03 (locus G RMZM2G144742) derived from phytozome v7.0 (chr-ID 4; pos 1 35909473 to 135910119 reverse strand)
caagaaattagggccaaagaaaagctgaaggtgcattgttgctgtattggagtgtatcattccttagactaaatcaaataatcaatcatatatgctaatagatggaaccttcgtagtaaggaaaagtggaaaacatataccttttgtttgggccaattgttggtgctgaatcgttgtttcagaaaactggaaacagaactaggcttttccctgttcatgctgtcctgcaatatgagaacgagaaacaccattgtagtatttgtttggtcgtaattttgtgttccggagctgaatcggaacggttcctaggtgtcaaatgcaccctaaattaaaaaaatctacctgtggtggaaattatagctcataagagagatgctgaaattcatttagtgaaacatatatgtttattttattatttcactaatgtatggtctccactttctgttaacaaatagttatttaatcatccattaattggtgtctgtttgtcctggagaacatcatctgctgcactcccctctgaatcccaatatcagtctatattatatattgatgcttcattgtgttttcttactcttcaaatttgatccgaatcactggtctgttgtgtagaggcgccgtcaagcagaagcgatcaacggggcatt

SEQ ID NO: 6315 - DNA, 869 bp, Zea mays
  Intron number 1 from transcript GRMZM2G385931_T02 (locus G RMZM2G385931) derived from phytozome v7.0 (chr-ID 1; pos 5 1285973 to 51286841)
tcgtcggcgaaactggaagcgggaagacaactcaggtatcgcacacactacaatacccatacgccttctcctagtcggctataccctgcagattaggttactgtaatgtttgattttcttatttatatcgtttgtagctaagggttaggacttaggagatagtgctatatcgtttgtagctaatgttaggagatagtgctatatagattgcccagtcgttcctttggtggagtggtcagacatatttatgcacttgtttgcataactgaggccagattatttttttagggaacgaatcctgtgctcatggagctcttgtgctcatatgagcactttaaatctggtgccttcatctcatccagggggtgagggcagcagtggcacacagaagaaactagaaaatgtctattcacacttggatgagaaatgaaggcaccagatttaaagtgctcatatgagcacaagagctccatgagcacacgatacgttcccatttttttataggactgaggccaggctatagatgattttgtttgtgtgaaaggttgatggccgctattcttgctcgacacttgtgatggtttatttgggttactggatggtttgattttcttaattttatctattgtttatggccatggttaggggataggtgttttaggggctaccacttatggacaaggaaaattggtcaagtttgtttgtgtaacgaaggaaagactatgcttattatgttcttattagttcttctatagattgatttgaacctgttattcttgtatgtcattctcgctcaattaagttgtgatgattgatttgtgttatgttgaacagatcccccaatttgttcttgagacggaaggcttggg

SEQ ID NO: 6316 - DNA, 613 bp, Zea mays
  Intron number 1 from transcript GRMZM2G141784_T02 (locus G RMZM2G141784) derived from phytozome v7.0 (chr-ID 1; pos 1 89638562 to 189639174 reverse strand)
caggttttagccattactaatcagcccttctgtccctcgatgctaaatatgttttttcttttgattctatgttgtctgtgttcttagttggcatatggtgttgaataagtttttcttgtctcttttatttattatatggttcaatatatagttaaatatcttgacaagtattactgcattatatgtcactcttaaaactgctaactttagttgaacgttgaaacatagctggatatctgattttttttacaaccacttattgagtttcttcgcctaaatgctgcagaaaatacaagcacaagaagcacattcgagtttcttaatgccctcttaactaagaactgaaaacaaagtttgaaaccgacctcttatctgatgtaaaaaacataatatcacagctggcagatatgccattctcccttgtccctgaagttatgacagtgtcataatcctatgggatttttttgccaaacctgttgtttagtgttatcagtatgcactctttgtgcgtttcgggctattcttctcatctgttcatttccaggtaagaagttgtgctctgttaactgaagttttcccctcttttggttgtgttttgcttatatggcagcat

SEQ ID NO: 6317 - DNA, 533 bp, Zea mays
  Intron number 2 from transcript GRMZM2G502191_T01 (locus G RMZM2G502191) derived from phytozome v7.0 (chr-ID 1; pos 3 5240825 to 35241357)
aacgctcggactacaaaagaaagaaattaaagcaaccatcagcaatttattcaaatttgaacacagatgcatacgagtttcttattacagaaacaattcaaagaataaaagactcacacagaatgtataagaagcaaacaaacatgctgcagacaatcaagtggcagtatgtggcttcagcgaatcccaatgtttgtgtttaaatttcttccccccaagaccttttacaggtcatttcaatccactcactatacctttttcaattagtataataaaattctaacccccacggccccactccacccctgcgtgcagaacatgcaggagtcttggcacacagtcctagacacaaacaaggtgatgtggcaactagaacaggcatgccttaccaggatgtacgctcaacttgatcttaattttataaactcaacaagaatgccaattcaatctagacagacatcattcctaacaacaatgctaaaaactttttttttatagaatacctgatatttggaggaagatacgaagctgga

SEQ ID NO: 6318 - DNA, 799 bp, Zea mays
  Intron number 3 from transcript GRMZM2G099048_T03 (locus G RMZM2G099048) derived from phytozome v7.0 (chr-ID 4; pos 8 3295271 to 83296069 reverse strand)
ctttcacgagcaggagcaaaaggggttagtgactattaagttttcaaaaatagttttcaatgcatatgcctgcttcttacttgtacaattcagggggtgtagtaccacaatgaggcaaactgactttataaaatgttaaatctgtgatatgttccttatactgcagggatcatcttgtcaatatatccgtgctactctaccttatattcgtcgaacttaccgtaagaacctaggggacaaactgcacttattaatgttagtgacaaaacctgaagcatctccaaaaattcacagaatttatggcttcaaacatccttgctctatttttaggcgtaccgtctagcattggcagcactaatcacctgagaacttcttcatgacattctttctttgtctcacttctagcggagtaacattctgctatgtttcttatgtaaaaaagccccctttttataacaggaatgattttttgtgttttagaaaatggtaaagaacaattggcttgtctatcgtgtactggatacgtacttcgagatcagaattcacaaaaaacaatagtcaaatctgttacacatagttgtactcatcatggagatgtgcaggaaatcccttatatggtaggaaagatgcagtctgtttaagaagattataggaatatatatagcaaaatcattatcttggttacccacttttattgattggctgattgctttttcaagatgcagatatttctcaattaagtttatatacaatgcagtatttttattttattttttgtagtgcgttggagaagacattg

SEQ ID NO: 6319 - DNA, 671 bp, Zea mays
  Intron number 1 from transcript GRMZM2G060727_T03 (locus G RMZM2G060727) derived from phytozome v7.0 (chr-ID 4; pos 2 05394226 to 205394896 reverse strand)
gcagaatcaccctacatctgaaggtatggcctgattgatgcatctttctctatactattaacttgaaatatacctttgagccacgattactgctaatgcatcggatatagtattaaccgattgtcgtgtttaacattaaatgattttttaataaattggatatactattaacttgaaattaactgattgtcgtctttaacttgaaatacctttctctatactattaacttgaaatatacttttcacctcacattctaattgtgaatttaattatctaattgtcgtgtttaacattaaatgattttttaataaaaaagttttttttgaacacttgcttgctgctacattagtttcattaggaatgaatgttcttgtacaaatagacaaagtactgattactgaaactagttgacatgattagacgattagtgttcacatacaagtagacaaacatctaaagaatgtggccttgatgtcctgcatcggatatagtattaactgaaagaactacggttgattcttcacatgttgctttgttcaaatgttgaattatttgattaggaactatattatcacgtcttttgactagtgtgtcctgtttcagattttaaatttgactgagctagaactcaacagggtggacattcgtgttggcctctctggagcactgt

SEQ ID NO: 6320 - DNA, 574 bp, Zea mays
  Intron number 1 from transcript GRMZM2G062394_T01 (locus G RMZM2G062394) derived from phytozome v7.0 (chr-ID 1; pos 2 90103971 to 290104544)
cagtgcaagccgctcgctgagcccgaggtaacgccttctccgtcgccctcttctcggttcgaggtgccttttcaccagatctggcggaattgcggggccggggacgggtcccggggagatcgggtttccggacgctctttgatgctggttggcgcggaaatggctggcgggagcgtttggtttgctcgggcgggtgctgggcctcggcgtttggaagctggggattctgctcttttttttaggctgaagaaacttgataaaaacagaatttttagcctcctctggcgtttcgacgttgagttaatttctctgcgtcaactgaaaacaattgtatcttctcatttcaccatgatttttggtagccacataactttttttctccccttattttatcctaaaaggataatgctagggggcctagacctgcttcgatgtgtacaaatcctaccctgtgattaatggatctgttgaattaatatccacatttgatttgatctgttgggaagggaggttttgatccattgcaatttatggtacaggtaagggctctgtgtgagaaggcaaaggagattct

SEQ ID NO: 6321 - DNA, 848 bp, Zea mays
  Intron number 1 from transcript GRMZM5G857450_T01 (locus G RMZM5G857450) derived from phytozome v7.0 (chr-ID 8; pos 1 8203507 to 18204354)
aaggtaagtaaatatgtatgaatagtcactcatactcttgtggacacatcatgtattaatatgttgcaattattagcatctttcggaacacgttttttaaattgattgctgaattaacattttcttgaaaagatttaagttattagtctaggtctctaggacaaataacatcagcccaaattttttcaaggataaattcaatatcgtctaggaaaaacaaaaagaaataaacttttgacctttccttaaggtgatgataacgttggacctttccttgttattcccaccattccaaactgtaagatgttttgttttttctaatgtgtctagaaaagccaaaatgccaaggatttttttaagctaagccaaatcgaatctatgcattgaaaaaatatgtatctctttaagttaaggcttatattattaaatgttttattttcttatgtttatcttgttctcaaaatattaagattttgaagtctccaaaaagatgcatgtttcacctgatgattccttttttatgtatatcaatgtaaatggggtgagcattagtgaacagtaatcaaattccattgaaattttcttgatcaatgtcatggtctaacatgaatccgaactaatatcccagtcccaataaaataaccaaaattctcatcttttcctaacagttatataatgcattgcattggttgtcaaccatattattgaaagaaaagacaatgctggttatgcccatgtgaaagccaccattggggaaataaatccttcatatttttagttaagtcttactacatcttctgtcttgtatagaagatagctgctctacagcaacaacagccgagtaacaa

SEQ ID NO: 6322 - DNA, 722 bp, Zea mays
  Intron number 1 from transcript GRMZM2G131595_T02 (locus G RMZM2G131595) derived from phytozome v7.0 (chr-ID 4; pos 3 6414702 to 36415423)
agttgaccccttgccaactggctcctggactcctggtgagtgcctgcctacttccgtcttaaggttagggattttgaatgtagctttcaaaattattgttaatatgacgtggcagcattgcatgattcttcacctgaaatgtcaacagatttgtgtgtgaaggactgaaacgtctgtttctgaatgatatgaaaatgtgctgttcccgttccttgcgtaaatactggattctggccttctgtagtgagcagtgacttattagtgattagctgatgaaagttctaccgaacaaattcagcccctagttttctcaacaataaaaagtactagtgtccaattgaattgcattccttccttcctaaattctgttttcgtagaatgtcacaagtactaccagaaatagaaacaacgttatagtcaaatttcaaggagtttgtaagtgtaaaaatatattttttgaagctgtgtaagtgtaaaaatattatagtataatttatgcaagtttgacatttctttgttgattgttgaatctaaggtattatattgaaccatctgtaggatttatggttgttacattgtattctatattatgctaggcatatacataccctaggttaaaatcatgggtccaaccaatggttggatgcatgctccccccccccccccaagttttactgacttaactttttttgcccacaagttttgctgggttgaggagaacc

SEQ ID NO: 6323 - DNA, 976 bp, Zea mays
  Intron number 6 from transcript GRMZM2G082174_T05 (locus G RMZM2G082174) derived from phytozome v7.0 (chr-ID 1; pos 2 13656343 to 213657318 reverse strand)
caggctctaatccaatatccaggtatgtgctcaccaatgcacccaacaggatatgctcttgaccttggtgcactgtgatacatcgacaatttattgcattggcatgtcaccgtaacttgcctacacagttgagcacactttatgtcttgctcccactgtttgaaagtattgaagtctgtagttcttcttttaagacttggttcagaatgtaccatgtttatgctctatgttcttgatttatatcctccagctctcaccctcttcctcccatcctccctccctctcaccatttatgagtgaacctgccacactgttattctctccctttttgcatcataagtttctaagtttgggaacttcagcagagaggtgtcggagttcgtgaaggcttaaaatggacatctgcaactttccacagctataaagttgtttttagtaatactctctttcttactagaggcttgctttaaactttcattttgtcatcattgaacttcccttgtgacatgcgagtcctaatttaggtacctttacctgtttaatgtgttgggcattagaatatagtcagcacctctatatcattggttcttctgttgaaaaaacattttgacatctaatttgtgggccttatctagcttattgaaataaatatctttgaaaagtatggcaattcaaatgacatcaatcttgttggtgctcaatactgtttgtactggttagtggtagttgtaattgaactgctttgatgaaacaagaatctctaaatacctttgcacccacacttatcacattatgaccctggaatccagagtatcttaaaatttattctttatggtcaagtggaattgctagttctgtttcccccttagccatggaaatatatcattaatatttgatgtacaaatacataggttcatctgactaacaaaatctttttttagatataactaccgcagccgttgctaaacaagctttg

SEQ ID NO: 6324 - DNA, 985 bp, Zea mays
  Intron number 5 from transcript GRMZM2G074024_T01 (locus G RMZM2G074024) derived from phytozome v7.0 (chr-ID 1; pos 2 48858406 to 248859390)
gggtactgtgcaaccttattcatgatttttaaagcaatgtactggcctgttgttctttactgacttggtgcaaaccttgtcaatcagaagtggtagaacttattgtttgggtatgaagatagcttgttgagagttgtgactgaaaatccttcttttttaaaaaaaccaacaacaggatgcacggccacttgatttcaaaatttatatttctgactattgatgggacgtgctattttcttactaaccaggctacaatgagtatggtcagcttggcagaggtcgcacttctcaaggacttcagggagctcgtgtgttaaatgcttatgcaaggttccttgatgacgcccccgagcaagtgaagattgttagagtgtcatgtggagagtaccatacagcagctatatctgaaaatggggaggtgtaagtccattagtcatcccaagggagctgttctctgctgccagtgactgttgtatggtttctcacatgacaacatagaagcatttggaatattgaagactaaccacgactaactatagggctaactgcaaagaaaggaagtaaatacatttatattatagatctcatattgatcaactaatctcaatatggcgtcagggttactctaaatagctttctgctatttaagatctttgtgcacatagatcgaagtgggccttctcttgagcatcctagtgtcttagtgaatgcaaagaaatgtgaagaattaaatggatgttgttatatcattattatagttgaataacttgtcaatcatttgctgaatctatcgatttgctagcttatatacgacaggaaaaaaaaaagattgttataatttcactttcaacatttgtagtcaaaatcattccgatttcatacttttcgcttttttgatgattgaaaacctattccaagtagggacttgattatttgtaattataatatctttggtttttgcaggtatacttggggactgggaagc

SEQ ID NO: 6325 - DNA, 621 bp, Zea mays
  Intron number 2 from transcript GRMZM2G564557_T01 (locus G RMZM2G564557) derived from phytozome v7.0 (chr-ID 4; pos 1 99713298 to 199713918 reverse strand)
gccaaaataagcagacagacgattctggcggccaggtatgctggctctaaatggttcttttgatcctgctttatgtttgcatcgcactcacgttgtcgaaataatattcaacttaataaaaaaaactcaacacccgcatgtgtaagacagcctccgtgcatatagaagaaacacatgtgaataaaactcccatacatagcgacatagttaagcaagtgagatttaggctggttttgaacatgtcctttggcatgagacaaagaagggatgtttttaaacaacacacaatattattcaattatgttctattattcttaattatcttgaagcgtgactatatgcatagatgttattccctccgttgtgaatacatagcacatttttttctgcattaaattacatgacactttatttttgtcctaaatcaatcttctaaaactgaccaagttattaggaatgtgcattctcctatacatttcatcaaagatataaaaatttaaagtaagacaaagctaactataatttggtccagggagtattatgtttgtgttctataaatggtaggttgttttcttactttttttgtttgcactgactgatgactgtccttgtgctttaggg

SEQ ID NO: 6326 - DNA, 473 bp, Zea mays
  Intron number 1 from transcript GRMZM2G014323_T01 (locus G RMZM2G014323) derived from phytozome v7.0 (chr-ID 1; pos 3 7685249 to 37685721 reverse strand)
tccattaagagaattgtctagcaacacccttgaaggtatatctactaatgaaatgcaatatttgatctctcaccaaggttttaaaaaggaaaataacgatgttcatattgtgtagatgaatgtccagaggtacctctcagcgacagaagcataattgatttaactaaatcgtgtgataacactcaaggtgaatatgtttgtttaccatgtattaacaatggagattattgatgggtaatatatgatggttcaaaaggtcgaactgatgcgagacaatgtaagagagaaagagaaagagcacgatatgtggcgatgagtgttgaaaaaaaacgaattgaagaaccatcgtcagtcacgcaaaaaaagagaatgttgttcaccatgagtattcaaaaggtaaattacggctgcttgtgcgtcactcatctttaaaataatgcttttcttatgtgttatcgggttactttgtgtag

SEQ ID NO: 6327 - DNA, 905 bp, Zea mays
  Intron number 1 from transcript GRMZM2G165341_T01 (locus G RMZM2G165341) derived from phytozome v7.0 (chr-ID 4; pos 4 833876 to 4834780)
ccccgcccacggtcggctgctcccacaccacctgatggtggctaccctatccctgcccacggcctcgctcgacatcgaccgtcctagccccacccgacgttgaccgcctcgtcctcgcccacatcctcgtctgtcgttggcttcctgtgagttcctgtgagctagcttaaggataaaaattctatttttatattattattgtctctagacatgattgtgaaaaatgattgagaattcgatgttacaataaatcaatactataagggaaaattgtagtacttacatcgtttatcacgtgttacttcaaatcctctaaagctctagttcgactttagttaggggaaatggtatgctattatattgtttattgttattttggattttaatgatgcttattgtgtagctactctttctttcttttttgtttattgtaatatatttctttatttttagcttgtagggttcatctctagttaatgctagtcagagttttaggtttaatgtttaaagtacttggagtataaagattaacttttcttctacacttttgtttccttttaaatcacataatcgcatatagcatttattgaaagccacatttagtccatgttctattaatagtttgactatggcattctctattgttgacatatcatatctaattgaaaatcatttcttatgctcatgctcaccgtctatgttttgcactgtagttatttttcgaatactttttgcctcaagtgcctgttttttattgcttggaaaaatcggccatatagtgcaacaacttcttatttatgtctagtgcaatgactgatgaactacgaattgatgctacctaactaattgtgaccatttccttgtttgaaggcctgaccacaaccttcaagatatccgaaaagaga

SEQ ID NO: 6328 - DNA, 1045 bp, Zea mays
  Intron number 1 from transcript GRMZM2G384888_T01 (locus G RMZM2G384888) derived from phytozome v7.0 (chr-ID 4; pos 5 1741080 to 51742124 reverse strand)
gccctgcaatacatctggcaggtacgcaaacaccatctcgataactctaccattcgcctcgtggtgtaggacagattagattagattaaaccacccccaaaccccttgtttctgtcacttctcagctcatggccaagccaaggctgctagaggcactgcacttagtggagatttaggcttcaaaaaattcacttggtagtacctacggtggtgttctaactccacggttctagatctgtggagaacaaaccatggatctgatccgagcacaaaaaatgcacttagtggagaacaaaccccttgtttctgtcacttctcagctcatggccaggccaaagctgctaggggcactgcacttagtggagatttaggcttcggaaaattcacttggtagtacctacggtggtgttctaactccacgactctagatctatggagaacaaaccatggatctgatccgagcacaaaccatggatctgatccgagcacaaaaaatgcacttagtggagaacaaaccatttcacttaccgatgccaactccacgactctagatctgctcttggatttttgaagcatctttaagtgattccaaaaatccatggatatgatccgagcacaattttttcctttcaggtgctactgacataactgagacatgaatgtagcgtcaacgcgcttccctgctgtcagatttaatctcaatttatttgttcttttatttagtagcctttcgttcttttaggcaatgtcttgtttgataagaatcacctgattgtagtatggatgggcctatatttatttagtagaaaaatatgatcgtagatcaaaaattgctgggtgcctgggttacatagaagttggacttctcagctttttccagtttgttttattttattatttagtagcatttcgttaattctagttctgttaaaaagctttttccctactcatgttgagtgatatagttaaatattttttggtgaaactctgatgcattcaacaatgtatagctgctgactcttaattcggtggtcgccctggtttt

SEQ ID NO: 6329 - DNA, 1001 bp, Zea mays
  Intron number 1 from transcript GRMZM2G157018_T01 (locus G RMZM2G157018) derived from phytozome v7.0 (chr-ID 1; pos 2 00482328 to 200483328 reverse strand)
acgtcaaccaccagctccagaccaagttctcccaggtgtccgatctcgcttttcttctccttcccccttgggctgatctgacctagggtttccagatctgtcgctgctctttctgcgctgacccagatcgatccgtttgactagtctatgtacaaatggtgtcatgcggggtactcgagggaatcagctgtgttcgctttttttatgtatggttacattttttcttgagcgctagtggtctcatgttgacgtaacgttgtttgattctagttatatttgtacaaattaggataggtatcctgcattttcactttgtggtcattattagcgctttactttttattattgatccgtaatgaacacagcaaccggacactgttagaaccattacagtttatcctgtatttagtcaactttgaaactgtgctcaagccctccattacctgggatctgggaaactcttctgttatgagaatgtttggttcaatctctgatgaaagacgatggatgcattacatttgaataaccgagtgatttcagagaaaatacatgttctatcaatagagaaggacagcttttgttttttgagaccagagagggccaatcttggcttcatatgtgaacaaggtgttttgttttctgctcgaaaaggtttgttttaccctcgtaagttgtaaggtttatattattcaaactgcagtcacatattgggttcttttatactcttggtaggctgcaagcttcctttgatttagcttagtacggagttgatcgagtgatctctcctgtcatgttgggtgcttttattcttgttcatttgctacgttatcttgaaagttcctgggaggcagctgaggcatgcactattcctcaaatttgcagtactgtgtcttccacatgtgttagttatgtatcctagatcaatgggtctttgttctctaaaccttttacttattttgtttgcaggaaccccagccgattgattgggagtactacagaaa

SEQ ID NO: 6330 - DNA, 699 bp, Zea mays
  Intron number 4 from transcript GRMZM2G157858_T01 (locus G RMZM2G157858) derived from phytozome v7.0 (chr-ID 8; pos 6 8623629 to 68624327 reverse strand)
gatttattcagaggtatctatatcgcaatgtcatgtaacttaatttattagtagcctacttgttgtaaatcatttggcagacatgctttaaagagagcagagctttttggcatttctggtgttacatatactttggcacatgtttgttttttgtttattaacaacattttgcccatgatttaaggcattacatattttttccatgtaaatatgttaaaaaatacaacactgttctatttatttttatgttataagaggctagcaatttgggcttgggtataaaaaatggattgctaagatagctcatcatcttcttgtatgactgctcgagttatataaaatgctaatgtctgagtataagaatggttctaaattaggggtatatcttctttaggtaccattaagtagtggagttgcttatgtttttaatagttgtcttgtaatatggtaactggttaactggataagctctaccccggttcaaatgaaatctcactcgtttattagtttatctttggttttagtgctactgcatatatgcttatttgttgctttgtgcacaaaaaagatgtccatcatcatttttttcttgtcttctttattattcaaattcacctcaattgtatgtatatgtctgtctgtcaaaaccggttttttgtttctttacgcacaccttaccctgtagcaagcaatccacgg

SEQ ID NO: 6331 - DNA, 979 bp, Zea mays
  Intron number 3 from transcript GRMZM2G023970_T02 (locus G RMZM2G023970) derived from phytozome v7.0 (chr-ID 1; pos 2 34219804 to 234220782)
gttatacaattgattggaagctacaagcaagataggtgatatcactatctggaatatgtaaatggtgtggacaaataaaatatgagaactatgattgaaaacataatattattaattatccactatatgcaccacatcaattttgtaaacatatttatacaccgattagaatgttttgaattttttttgtattttattggacaccttttttttgtttatttccactgttgctcgccctctctaattgtcttctgtttgagtgtttaccaacactggtcggctcgagaaaaaattctgggagaagaaaagaaaagggagagggcagtagtgtggactgtggaggacggtgtggtgcttcagctttcatcatgctagatgctggtgtttgccaatcttaagcctcagtctgatttctgggcagttgtgtgttcgcctctgtggcagtttgttgttgttgttgtatcggaccagattgagagttgaattgtagttcatggcatcatgatatatagaaaccatagcaacacacgtgcatctaactagttaatgtattaagcaccagtaaaagaacacaggcagttataattttcttgttatctttgtattatcctttcttgactttttgtcattttagtttccagttatggtgtttttggtctgttcagtttaattcaattccatttgtgtttcgtgtaatgcaatgcctgcttatttggtgctgtttgattcacatatttgtaacgtgaacggtaaccggttaaaccatgtttgtttaagtccaaccgtaatcagatactacactaaaaaccgataccgtcctacactaagaactgatactgtcctattcaaacatgtcaccgctggtaatcgagtgtgtttcaattggtggttagtgggtagtataagactaagtttcacctatgacatcttatattgttttgtaggtctctcgtttgcataccagctcttgtatctgttg

SEQ ID NO: 6332 - DNA, 902 bp, Zea mays
  Intron number 2 from transcript GRMZM2G169154_T01 (locus G RMZM2G169154) derived from phytozome v7.0 (chr-ID 8; pos 1 40395511 to 140396412 reverse strand)
gacatcgctgcgcaagtgcctcaaggagtggagtgagcccctgtccatctactgaacagagaaaataccaggagcaaatgactgcatttttagttaatccttttattcctaaattaattgtgtttgttaatgcttttattcctaaaataagtaaccgagctcgggattcttcgcaatttgatttgcgagatcacccccataaaggcatcatgaatctttatgcctgtaaagacatcccactgtctctttcgttttcgataagatgttttggccgttacataatgcctgtaaggtagaatgccattgcagttgttgcatcagaaagcagccatttaacgccattgtaaagtgagtgatgattaaatacaaccacacttctgtctctcaggtttctgtacatggagtttttattgcacctcttcttccccagcaattagtacttgcagttagactaaatgaatcttgaatgccccttaactgttggctttacatggaactacttttgcatataccagacaactattttgaacttcaatatgtttttcaattccagcaattgatcgaaacatgatatatttgacatattcatgatggatttttgtatttgatgtgtcgctttttcatctatcaatgtaattcttggacataacattgcgcacaggtaccaaattcacacccttgttattgcgagttctgtaaatcatgatgttcacatgtgatggtttgattcagttcaatggttagcaagctatttgaacatgatactatagtagtgcatatttgctgtacaaatggccactgcccagctatttgcataagatattatgtttctcctgtgacattttctatgccacatacatttatatggcatttttgtgcaatttagtaccggtttttggttg

SEQ ID NO: 6333 - DNA, 616 bp, Zea mays
  Intron number 1 from transcript GRMZM2G133998_T01 (locus G RMZM2G133998) derived from phytozome v7.0 (chr-ID 1; pos 9 5894080 to 95894695 reverse strand)
agatatttgttgttgaaacgaataagggagctgatgtaagcaagttaatgtcagaggatgctttctttcgcttgaagagtttgggagctggtcttcatgaaaaggtggtttgattatgccattcgctcccttagaatttttttaatatggttagaagtacacttgttattggcttgtaaattctctctaacaatgcatgtacaatatttctcttctactactattaatatctagaacaataggggctgcccatactgtagtgctttaaaaagaaccgatttcagagttattttagaattttgaaaaccatttcattattatgaaagcaagttattttagaacattcaaacacaatcaatgattttttctgacataaaaagttcattcatgttttgatgagttttttaatgcaaattaacttttgatcaacatagcaacttagcaagcaatttattctacaacttttctctctcttttatctgaactctgaagtcttgtgttaaagtctgtgatgtgggaatagaagagctcaccaagaacatattggttaacctttattatatagtttcctcagtttattatttcttgatcccagtccctcgaagagctcacaaag

SEQ ID NO: 6334 - DNA, 765 bp, Zea mays
  Intron number 1 from transcript GRMZM2G150532_T01 (locus G RMZM2G150532) derived from phytozome v7.0 (chr-ID 1; pos 1 59435140 to 159435904)
aggtcagtgagcccgcccacactctacttgcttgctccttgttctacgagcttcggctgcgctgaggcggtcatggtcgctgttcatgtggaattagatgtgagagaaggagcgtgcagcgccgcctcagctgtggactcccatcataaaattcgaacatggagaaacttgaaccttttctaatgcaacattcatgtgttggtattctattttggtatattatagattttgcaggacaagatggagttggaaattgaggcatatattaggcgacattatgaaggggaaatttctgacatagaaataattgagaaagaggatttagatctagttttttcacttgctctgcatactgaatctaatattctgtttgacgtccataatgaaatgatgtcatggcgataagtttggctctgtttaattgtttatgtctaagatttttctacaggaattttgatcttcttaggtttgtgtcgttctacttgtttatccattgatggccatccttgtgttatagccatagtgatgttcatatatctctagaatttagctgaagttgaatgctttatatgtttagactgaatttttgatattaaacatgtagattatcgttatttaaatatgagtaagggagatgccaatgtgctaattgtttgtttcttttttctgccattttgatgtgcctgggccaggtgtagaatataacttttaacatcccactcttgttgcagaaaaatcatctttttggctcgaacagaaaatacc

SEQ ID NO: 6335 - DNA, 863 bp, Zea mays
  Intron number 3 from transcript GRMZM2G100707_T01 (locus G RMZM2G100707) derived from phytozome v7.0 (chr-ID 1; pos 1 1243862 to 11244724 reverse strand)
atttgcctgccaggtatgtcattttatttgattggtggctggtggctttagatgttgcatcagattacatactactgatggctttgtagtgtccaccaacaacattgttttctggtaattgtaatttgtaatgctgaataagcatgagcccctttaggtgatacaggacccccccacccacaggcaaaggtcatgatattgctgatttcaaatagtatggattttgggcacttctgtaataagttacaaattacaacttgccagtgaaaatcttaattgtcacggttagctagattaattcgctttaccaaaattttgacatgagatctagtcttgcttacaaaacacacaaggcacacttgtcgcagacagagtgagggaagtttgcgagtcatttccccctacttcgatcattagcttttggttgtaaaagaaccatgcatatgcgatgcgcatatttcattataggtatatctgtggtgattatataggagtgaaataagtgattatagtgttatagcctctaatttaggtgatgtgatggtaatttcagagcatgtttatttcttactaattgtctgaggaagatatgaaccattatgtgcttctggattgaccttcatacaataaggctattattttcttctggcatatgcttaagtagttaagtttattcctgaaagacctattgcaggtaactatgggtgactagtttaaacttataaaattcatttgtttgaaccttgatatttgagaatcatttgcttgaaacatatcacatcagaactttaatgctcaacgttaagctcaaaagttaattatctggttatgtaggaaggtcatccatactgtgggcccaaaat

SEQ ID NO: 6336 - DNA, 830 bp, Zea mays
  Intron number 1 from transcript GRMZM2G161983_T01 (locus G RMZM2G161983) derived from phytozome v7.0 (chr-ID 4; pos 3 8267078 to 38267907)
tgccaaggcagacatctcctcgtgacgtggctctggttcacaatggtggacgacggtggtgatagggaacaccagcaatagctggttgtggcagccgccgccgcgtcacatagcgctgagttggaggggcacatcacatgaatagatctgcgcagtctcgcatcatggcagtgccggtggcctcccgggcatggcgactctcccctagtcgaccagacacctctttgccctttaggcccgtacgcctcctcttcctcgggcgtgtccgcggccatttggacgccgtcaaaccggttggccgtgtccgggtcatctccgcccctcctccaaatggccaaaccctaccttgttgtagctagcctacccctccagacgccattattgtcttcttggtcactcccgccgactactcctctcatcaggtaacgctttgtgcctccacgtttgtgtctcgctcgtcgagttgaggtgcccagggagaggacactctctaggaggcggatggggaattcacaaactggcctggattgctcattgcacgagcaggaactactcactgtggagtgtggaattcagagcaattttagatcagtcgtagtcataggttcttcactcgtaggttagaaaagcctagtttttattcttgaatggcagttcaaatttgaatgcagagaatgatgggttgaagtaatatgtttgtgatactctggttctagttaatgaatttgtaagacttcatatttgtagttcctggaaattttattcagcaatccctagtccttgtcattctcatgtagaacttttgattttttttgcatattgtttcagaa

SEQ ID NO: 6337 - DNA, 797 bp, Zea mays
  Intron number 2 from transcript GRMZM2G116714_T03 (locus G RMZM2G116714) derived from phytozome v7.0 (chr-ID 1; pos 1 72283380 to 172284176 reverse strand)
tcccgcagtgggagtcgctgcgggattcctccaaggtacagtctacagatgcccctgttttctcccatcctagggtttgttctgctgtatggtagcgctttgagatgccacataatttctaagttctacgtgatgtgaggtgctggagatggagactcgaaatccctcgcaagcatatgggattttagtttccccgagggcgaggtcaactaatttgattattgctaattgtcgctagattttctgttctgggtatggttttgcttatgtagataggtatggaatgtctcaagcactcggaggcattatttagttgtgaattatgatggttgttaattctggtgttgctgctggctcctggttcttcattttactaacatgaaaaggcttagaggttcttaagtaaaacaagttttgcgattgtctgtcagaacaggcagtggcggacccaggatttcttcaagtctaggcaaatcgagaactaggcaagacaatgatgcttgcagttgcaggccctgagaacaagcatgatgcttgcagttgcaggcacctagcgcacttagggggtgtttggttcccaactactaaactttagaacttttagtccctaaaataggcaaatagcaaacagggtgagtaaaatagctcttccaaataggatttatagggactatagtttagtccctaaagtttagtagggtgactaaaggaaccaaacacccccttaatttgggatgtaatgccattttttttcttacgcaggtcattatcccgatttcaatatctagggtgaacca

SEQ ID NO: 6338 - DNA, 546 bp, Zea mays
  Intron number 5 from transcript GRMZM5G878944_T01 (locus G RMZM5G878944) derived from phytozome v7.0 (chr-ID 4; pos 7 9691745 to 79692290 reverse strand)
aggtacttgtcaaataaaatttaaagattcacttgcctttgcataacacatgaagtcacaagtcctgggcaacccatgcagaaaatagaagagttatatgagttttgaatttttacttatttcatttccagaatttttggatttggtaaatgaagttatatgaaaaatccagttattaggattggcttggttgacattgttatgtagcctatattataatgttaaatatcaagccttcagttatctgttttctttctagttaataagtaagcttaggagttgttgcactttgagtcaactatgtcataaaaataatgctttcctcaggttacactcctacaaaagaatcttttaccaaataatgtgtgatatatataagtagtttcttatcaagatttctacactgattcatgcaacaaatgctcaggtttagcaacattgtgctatttctgtgtacacatgattaaaacagatgtcattttcatgcttaacgctgcaaattttgttttagaaaatttaccgcataaagcttcctggcaatccaac

SEQ ID NO: 6339 - DNA, 1006 bp, Zea mays
  Intron number 1 from transcript GRMZM2G407969_T01 (locus G RMZM2G407969) derived from phytozome v7.0 (chr-ID 1; pos 2 58699164 to 258700169 reverse strand)
ggcggcggcggtgggctagacgggcggcggctgcggtgggcaagacgggccgaggcggctgcgaggaagaagatgggcggcggcagcggtagaaagccagaagaaatgaagattgaacgctcggacgcgtcctataattagtaactcccgtcggcttggtacagaggccgacggggattattaactcccgtcggcctggtcaagcgaccgacggggattataagtttgaacactcggggcgcgtcctaacaatggtaactcctgtcggttggtttagaggccgacggggtttatttactcccgttggcctggtcaagcggccgacaagtattatttaattgccgtcggctaccccatagccgacggggattatactagccgacagggatcgtaagtattcttgtagtgtcgtgagctaccgccgagccgagccaagcctggttctccagctcgtgagttagataatgcttcacacaaaggacccatgataggacaagcatcctatgagtgtgttactgcatggaaaatagaggataagattatttctatcactttggataatgcttcaaacaatgatggtgctatttgtggtttgagggctagatttgcaactagacatggcaataatttcaatgcaaaatattttcatattcgttgttgtgcacacaatattaatttggttgtcaatgatggaactactgctttgggttctttgatagacaacctaagatcaacggtcaagtacattaagaaatccccatctcgtatgattatagttcatttgtcattttttagattttgattgaagtttttattgttttcaacatgtacaagatgaggatgatatggagactaattttcatttcctaaaagttttgtggagagcaactagtaatactaatatatattgcaattacttttatttaatacttatttaaggttagtaagatgcttatcagcttatgtgtgcttttacttttattgttcaggtggtgcaagtgcaact

SEQ ID NO: 6340 - DNA, 656 bp, Zea mays
  Intron number 1 from transcript GRMZM2G366392_T02 (locus G RMZM2G366392) derived from phytozome v7.0 (chr-ID 4; pos 1 36067000 to 136067655)
ggttgctgcgagaggtccgggccttcgtgggatctgtaagaatctcttgctctccatacatgttcttgttgtgcgatctgatccagtttgatgttcgttttttgtctggtattcgattatgctgggatttctaagaaaccctaatcccagtttgatggttagggaagtaataattacttgatttgtgaaaggggattaatttgtgaaggagaatggggtgcctatattccttcactaggactcgatttttcgtttcgttgagaatcttggatagccctctggcgtctgggtttctagtttcttcggttgcgtatcgaattctttgtccagcccataactttgatatgggttgtctgcgtagtatggattattgatttctcaattatgcctagtattagtttataagaaattctttttttcgtccgttgtgtgattattaattttcttctacaatatatgcactctcttaaatccctactatctggggaaaatcttaactgtaatctaaatcaatctaaatcattagttcttttgagatactagtggaatcgttctctgaattttatggatcatgacgtttcttggaatggatatgtcatcataataactctgcagttttcatcggttctttggttcttctctgcagtgaaaattga

SEQ ID NO: 6341 - DNA, 530 bp, Zea mays
  Intron number 1 from transcript AC205522.3_FGT002 (locus A C205522.3_FG002) derived from phytozome v7.0 (chr-ID 4; po s 108593519 to 108594048)
ggaagcggcggcagcaggtaaggcggctggagatttttctccaagtacgagcggcacagaccaggggataagggcgatggggataaggatgagaccggacgcggggaagaccacagggagccgacgtatggaaactaggaggccagcaacgtttgtcctagaagctagcgatagcagggaatttctagaaattgaacgtgatgcttgagaaaggaggtggcgtggagttagaagatagagatggctagggaattctccaggagatgacgtgggaggataatagagatagggatggtggagaggataagtacatgagtgtagatttttgatcactacggctgagcagataaggaacgacagctgtatgggctgatgacgtgtgatgggggaggattttctagagataatcgtattttggataagatacaaacagaatgaactcaaacgagatcgagactaatattttaaactatatttaatttgacttaaaatcagataacttcacctaccaatcgaacacttgatcgctc

SEQ ID NO: 6342 - DNA, 535 bp, Zea mays
  Intron number 1 from transcript AC202041.4_FGT003 (locus A C202041.4_FG003) derived from phytozome v7.0 (chr-ID 1; po s 43508332 to 43508866 reverse strand)
aggaaagaagggtatgtggctagaagaattgtttcttttataccttttaagtcagaacaagtgcttttgactcaacagctctactcgttccatattataagattgctgctttgcagtaactcgtgattgtattaaataaacaagtgtttatctgatacaaatgtcccaatgtaaaattcatggaatacaccatagataatggaaaactagaagtgcttcagactacaattattttgacaacagacaggtatcaccagagcatgtaatccactgaagctttagttgttatctcatgaggtatctaccgcttctaattccactgttccattgtaggaaacatactgacagcctattttctgatagactgacattgtgagaatgactaggatttccctttgtttttgaattttaaaagatttcccactccaggtatcagacaaatgatcattatctcaaggaattttaatagtggaattgcgtgacgagttgtctaatggcagtgataatcaagatttttacaatttggatctacaac

SEQ ID NO: 6343 - DNA, 916 bp, Zea mays
  Intron number 3 from transcript GRMZM5G877077_T01 (locus G RMZM5G877077) derived from phytozome v7.0 (chr-ID 4; pos 1 99080996 to 199081911)
ctcaatcaggtaatccttatattcatcacacttgttggtggagcaaaaacttgctcacgtgataatttcacagaacatttttcatcttgattatttatactcttaatggatatccaatgtggaaatttataccattcttggagtagttttatattgtggaacaaattggtacttactattacctttttttttccttctgaaacttaatctggacataccatgattatcttgcaattgcaacctagttccttttattatatcatactccctccgttcttttttatttgtcgcgttttagttcaaaaatgaactagcggacgacaaatatcgagaacggaggtagtacttatgtatttccttaagtggaaatttggttggattacttatggactatctgaaaaccaaggaaagaagactatcaaattttgatgcactaccttcatcaagattgataattttatttacatggaaaattgctttcctgcaagtgttaaacaaactgttaaaatactacaaggagcaaaattgttaaaataactaagattttatcatatctcctgatccttttccccctgtttcaaaactgcttgctttaactttacaaagatgattgatgtactgaatatgtttattctagacaatggcaactgatacatatggcccttttcattctatagaaacttttgccacagaattgtagatcagattgaaggattcattatctaagatgattcttggtatatattttaaaaaaagcaaaagatctattgagtttgtcttttgatttcatgatttgcacatagaactattctttgtatcaagattgtttgtgtggcaaatttccaaagatatattcagcttccttgatctgtcttatctagtgatatgcttattctagtgaaaattatagggctta

SEQ ID NO: 6344 - DNA, 763 bp, Zea mays
  Intron number 1 from transcript GRMZM2G379366_T01 (locus G RMZM2G379366) derived from phytozome v7.0 (chr-ID 4; pos 2 23839831 to 223840593)
tagccgggtcggtttgtttcggcttttcgcagcttctggtcactaaaagctgctgcggactgccaaagactcagattttcagccagcttctataaaattcgtttgataaaacattcaaaatcaacataaacatataatcggttgagtcgttgcaatattagtaatccgtcactttatagatcctgagccctatgaacaactttatcttcctccgcacgtaatcctaatgatactcaaattctctatacagccagattcttttcacagctagattctcggagaagctggtcagaaaaaaactgaagcaaacaggcccgtaggcgtacagtttcagtgtttcactttcacgtaaatgttctggtcatatgccttctctgtctctactctctgctcctttaaagcacgatgcgttatacgtcccatgtagattcttgtgcaccacccatgacccatcgacaaacgcattgaaccgcttccgccactctcggccgtcgtgtgcctccatagatgcagcacggcaagaacagctaagggagaggagaaggaggtgacacatgcgtggctaaacactagaggaagagacgtcgctgccggcgatacgtgactaagcaaccaaggaagaggaggaggtgctctcgattatagttttaaattttgtattgattggtgacaaagaatttataagatattgaaaccaatgaaaatatatacattatttgttttcatatagtcagcattagcactaatattttatcgaatattt

SEQ ID NO: 6345 - DNA, 776 bp, Zea mays
  Intron number 3 from transcript GRMZM2G433557_T02 (locus G RMZM2G433557) derived from phytozome v7.0 (chr-ID 1; pos 2 85813912 to 285814687 reverse strand)
ctacaattattcagacagcatttagagctttcctggtatgcattcatgtcatgtggattccattttctgattcaattctcagctctaatatcccaacaaaccctaatacacattcttatgctcatagcctcttttttaatgtggaagcatcgcaatgcctgtgtcttcgagggggcctcgccttgcgatcacaacatcctcacgtgcatcaaggaggatgtggggttgtggtgcttagctggggcctcaaggcttagaaggatttggccttaatctgtcagtgggtcaggttttgtttgatgtcttgtaattgtggtttataaccttttgccccttaaagggggtttgtactgacctattttggattccatttcttaatataatgatgtgcagctctcctgcgcgtccgagaaaaaaatagcctcttttttaattaaaactcagttctgtttgtagctaatgccaatgcaattttgatttcctagtgtaaaagtagatcagctaatttatgttctatacctctatgtccattcttgtgggtacccagtgctcctgtagtgatgcttgaaattgtttgttcacaatctgattgtacattaccctttgcaactgcagaagttggcaaaacaagttttctctaccaagaaaaaaatgtagaaaatgtggaaagaaaacgaatataccatcattctcacttaatgctttaattccttatagttcccacttgggtttcttcttcaggcaaggagagcccgccgagctttaaaagggttggt

SEQ ID NO: 6346 - DNA, 851 bp, Zea mays
  Intron number 1 from transcript GRMZM2G122076_T02 (locus G RMZM2G122076) derived from phytozome v7.0 (chr-ID 4; pos 7 7612302 to 77613152 reverse strand)
gcctcctggccgacaacgataacctccgggcacaggtagctgactcatcacctcgcttcgtctcctcggctgatcgattgttacttgatttcattgattaacacatgcgttgtccagccatcttcgcaccacagttagttacggaacgtttggtttccagttactaatttccagtcactccattttattttattttagttactaaattattaaatataaaaactaaaactctattttagtttatatatttagcaatttaggagatgaaatagaataaaatggagcgactaaaaattagtccctacaaaccaaacaccctcaggctcgtcgccgcactgctgcctcgagtgaataggaaatgccatccggattcttgaacttgtttctattgccgatttaatgatttagctttttttttcaaacggtactttagggtgattttggttgggctatggctatgaaaaaagatgttgtgactgaaaaaaatctggtgtgggttgtgacaactaaaaaactaaaagtcgtctgatgaaagctgttaaaagccactaaacgtttttccatatatatttgcaaagttttcatccaaaagccgcaggtttagagttgctttcaactttgcactgccatgccagaaagtcagcttttggaaaaagctaattgatgaattggaccatttggtttggattttgacttttggggtcaaaagccacaacaaaaaactaaaccaagcacactcttaagcttcatgttaactttaaactggcatttggtaacattgggtatcttttccagtttatgttatttatttgcctctcctctcttaaataaaggtcatcgtctgaagttcg

SEQ ID NO: 6347 - DNA, 243 bp, Zea mays
  Intron number 2 from transcript GRMZM2G051567_T01 (locus G RMZM2G051567) derived from phytozome v7.0 (chr-ID 8; pos 1 13302420 to 113302662)
gggtgcagactgcctcaaaggatcagattattaaggtccgtggcttgtgctttttatttttctatcttcttcaaagaattttcggattacagtgtgcactctataaccagaattctatactatctatggagatggcctaatccatcctataaccaggatcgataagtttgttttttgatgccagtaaattattgattttggtccatttgctaattcattttgcaactgtatgacattagatcc

SEQ ID NO: 6348 - DNA, 651 bp, Zea mays
  Intron number 2 from transcript GRMZM2G057652_T01 (locus G RMZM2G057652) derived from phytozome v7.0 (chr-ID 1; pos 6 2331573 to 62332223 reverse strand)
tcagccgccacctatctcacgctgataccagccaggtacccactgtgattcctgaaccctcagggttagccgagctacctgctcttcactatttgcctgagccgcgatcagtcatatctaatctgtacccacattcacttactgttcagtttgtttaattggaaaatcattttactcacgtttcccttccgttgttgctcagttgtgtttaactgaaatcagaaaaaatagttttctgaacgtaatctgcactcccgttcagttattgccaatgctgggcaactgcaatttcatgcagtgtacacaccgattcgattattggccagttgcgtttaatttgaatttttactaatttgcatttctcttttggttactgctcagtcgccttgaactgaaattagaaatgaaaaaggtttctaaacggcagtagttaatgcttaattcaaatatgatgtaagtttcactttccatttccatttccacctatgttacactgttggaaatgaccatatataactacctcaatctacatactacgatcctgactgtaccatttcttcatagtagattacatgaataactctttcccaattaactagaggtgttctctgtacaggacaatcccttttgcttggaacctgattaccgctt

SEQ ID NO: 6349 - DNA, 610 bp, Zea mays
  Intron number 1 from transcript GRMZM2G518714_T01 (locus G RMZM2G518714) derived from phytozome v7.0 (chr-ID 1; pos 3 6214182 to 36214791 reverse strand)
ttttagtttttggttttttatgtatatattcaaatggataatgataaatctagacccatatataaaacacatacatcaaatattgtatgaatccattaatttaggacagagggagtaaaatattagcaacatttgagactccaaatatatatatactatgaaaatatatttcatgatgattcaaacaataactatttggtatctgaaataatatttttacatatatgtatttggtcaaagttgagatagattgacttggtagaaagctagaattgcatctttttgggaattgggacagagagagtaactgagatctgcgtgttagtgggggaaatttcatcaaatagctgatgagcactacaatttaggctcagtgccccacttcaaccgtgccaattcggtactgtgctaacatagtcgcgtccagggtgcaatcaaacaaccacaacaaataaacagagccggcagaagagtaccagcgcaaggcaaaaatcgcaatcactcaagcagattgcgttgcagacgattgtcagagataatagcaataaaatttagtaatttattgcacagtaagaagctatatcatgacaatcatccagcaaacgtgata

SEQ ID NO: 6350 - DNA, 1013 bp, Zea mays
  Intron number 1 from transcript GRMZM2G538912_T01 (locus G RMZM2G538912) derived from phytozome v7.0 (chr-ID 1; pos 1 53151157 to 153152169 reverse strand)
cacacgccccagggccatccactatacctccgacggtttcaatttctggttagtacagagcaaagataggtagcagtactcagatagatgtctccatgttttttgttctctgatagcattttcctatatagaagcacactcaggctctagacgcttcataatgcactctgttcattcttctcaagcactggcctcttttttgtttgactataaaatgttattagtttatctaccttttgtccatcagacgtaatacttgacaactgtgttcttaccattttattcaaatctccaaggagccatcaacttcctttatctgctttacagatttactaccttgtcatttgcatagtggcaaagttgagcgttgattgttaatatagattatttattcatgaacttcaatggttaaagtctaaatccaaacttctaattcttaacatcatttcacagtaatgatcatttactaccttgtcatgttttttgttgaaggttgtgtggtttagatatgcttgtttgctcgtgtgtggactaataatggactgaaatactaacaactacactagctgataggtagttatgaatttgtggataatctgtttgttttgttaatatgttattaccgccaaactgtttaatgatttcagtgttctctgcattgtcatatgtcaaaaattgattggtgtctgtaatagggtagtcaggtggtggctataatttatttttttgctataattttttttcttgctatatcttcctttctatttattaaccagaaaatttaaaagccgacaaatatgtatcctaattaatctaaatttaaacctcacttgtcggcatatctcgatgtgagcattcaagattacccttttcagaatcatagttggcagtaccatttctgttataatatcctttgtgtggaaattaaagtatgctcccgaaattcccaaatttgagcgcagttgttataatctgcaggtggccgtgtgcgtctgggttgtgctctgtcggcc

SEQ ID NO: 6351 - DNA, 566 bp, Zea mays
  Intron number 2 from transcript GRMZM2G031501_T06 (locus G RMZM2G031501) derived from phytozome v7.0 (chr-ID 1; pos 2 61488614 to 261489179)
ccgtgctgcttcactgaggaacccgccacagccaggtactcaagtgattcacataggcgataagtatctttagaactgacattggcatggttagcatgtgtcttttgactctgcagtattatattgtggatgtgttacaattatgtaacttcagttatgtttttttgtatatctgtgtctgttcagttcaaaatgtcttcaatttgttactatagcaatgttgatgacataaatataccgaagttggggtgctagtatgaagctgttcttaaacattgttgattacgttggaaacatagataattatagaaattacagttccttgtttagttggaattagaatttgtttcacttctgttactaatgctgatacatggatttgtggtacaagtgttgttgagtgttttggaatcagaatcaattagatttcagttcgtattaggattacagtccattatgcatatattggagttataatttgctttatttctgttactaatgtgtcatctgatttttttttctttttggcagcacgccaggctcctcctccagctcctgttcgagat

SEQ ID NO: 6352 - DNA, 685 bp, Zea mays
  Intron number 2 from transcript GRMZM2G098884_T01 (locus G RMZM2G098884) derived from phytozome v7.0 (chr-ID 4; pos 3 0933770 to 30934454)
cagaggtttcttctcttgctttatagtttatatattgctgggtttcacaaattatatgcattctatttagtacctttgcttgctaataagtgtatggtaatgtattagcatgctaattgataggaagctatgtagacatggaagtttgagacaatggttactattatttgttactaagtgatgtggattattattctttaatttacaaagatggatctcaacaattctttatccaattttaatttgcctactacccgattgttgtcagttatatgctgaaatgctgaacatattgatggaatgaacttgtcattttgtacttatattttcatatactgttgtttgtataaggtagttcaactcagtgttcagcattcatgtaaatcactcttgttatgcttattttttttgcattaactttaatgggggagttcagaatgttcttcacataagcttaaccgatatgttttggtattctcatgttctatgtttgattagtaaccagtattacatatattaattgttctgtagtttcggggctatatcatgtttctacttgttctgtttatcaaataaataaataggtgggtggtggctatagtttatgtgctcaccatgattcatacttcaattttgtaatgtttcatcaatatagttgaagcaattaggagagaaagggttacag

SEQ ID NO: 6353 - DNA, 726 bp, Zea mays
  Intron number 1 from transcript GRMZM2G471119_T01 (locus G RMZM2G471119) derived from phytozome v7.0 (chr-ID 4; pos 2 15265750 to 215266475)
gccgcctctcaagcgtgcgcgccccgacttcggtggttcgtgccccccccctcccctctttttttttgtacgggacgatcaccagatcttgttttttttgtggctatttcccccctccgactccgatctcctcgttgcctgtgctttgcgggatttaggagtatcttgctggttgttaggttcgtaattttagatccagcgtttagatctgcagagcagttttggttgggagattctccatgcatctgggctgtctgccatagtttaggtgacaagctacgttcgttgcactatattgagaattgtgtccttgttgactattcttgagctacagttgttgggattgttgatttggggagaaaattatgtaatgatattgcttagccatatgctgatttggcttagggtggaaaaggatgcttgccgacttgccgtatcacagggcttttacagaaacaaaatcatcgttgatcttgcacttttcatgtattcctggatcggtcggcctattgattggtcgattttggtgctcagggattttttcactattcaaacttattaaaatagtcatcagtaaaaaagtgaagctgagaccgggagttttttttgtagttgtcttctgtaacaaaatcctgaactttctggtgaaatcgttatcttggttacacgcgatagttggaggtgaggcttgggggtgatctttgatttcttcttccattttcgcag

SEQ ID NO: 6354 - DNA, 484 bp, Zea mays
  Intron number 1 from transcript GRMZM2G137556_T01 (locus G RMZM2G137556) derived from phytozome v7.0 (chr-ID 4; pos 8 897494 to 8897977 reverse strand)
ggaggtgcgacttgcgacaaggatagcttgaaaaaagaggaagaacacactccacctattccaaatcatacttcactttagttctattgcaagttaaacttattttcgcttagtttttataaaaactatattattatctacaaattcaatggaactaatttgatttcatagatgttgatgtgttttttctataaacttggacaaaggtagataagtttgacttaggacaaagctgaagtaaatgataatttggaacatagatatcatatgaaggttgaatgccatttgttcaatattgcatacttgcattaatgggaattttcatcaacgtttaaaagttcactaatagaattgatgtttgatagatctgttttcatgtttcttttttaacagactgtttgtttcttcaccctgcactaactaatgactatgtgcattttatggttcagctcaaacaatcgtattccttaatctagaagggtaa

SEQ ID NO: 6355 - DNA, 543 bp, Zea mays
  Intron number 3 from transcript GRMZM2G148220_T02 (locus G RMZM2G148220) derived from phytozome v7.0 (chr-ID 1; pos 1 93259755 to 193260297 reverse strand)
tcgagttctcgctgtacaaagttcgcctcaggaaggtaactatgcactaactataactagcgcgccgacatattgattgatggagtagccttgtagattcttgtagttctttatcctaaaaagaagacgaaaaaaacagtcttgggagatccctcaccctcagtgctaatgctgagcacacaatttgttttgtttctggcagcaagagctactcgactagcagctgctcgagatccgccaaagggtacacaacattccaacctccgatccatcgcttggtagcctgtacacatctctctttcaaaaggcccgagttgttgtgacacacaagagttctgttgtatttgatgcaaatcaaggagcggatacgccttcttctgagaactctttgatgtaatagtaagatataaacatcaatgtaatagtaatttatttggtaatttatccaatgctcaatgtttatatgtgggggctggtttggaatcgcgttcatggggttttgatgcagatcaaggagcggataagccttcttccgccacggcc

SEQ ID NO: 6356 - DNA, 922 bp, Zea mays
  Intron number 2 from transcript GRMZM2G149975_T02 (locus G RMZM2G149975) derived from phytozome v7.0 (chr-ID 8; pos 9 4325835 to 94326756)
agcccaagcgccaccgccagacctccaccaagggggtacgtgcttccctttcattgcagttgttcgcctctcaacatgctagtagatttgaattcgaaagctaccctttcgctgaaacatgatcatatttattatgtggcctgtggcctgtgcccgagtgcaaatgcagtagttttgtttgtagcatgccttgatgctatcattactagatgctcctatttatactagttttctgttgttccttcgaaattgccttgctgactgccgtgttatttttgacgaaatatgctgcaaatgtatttgttttatgtgtctaagattcattatcatccatttaagcatagacataaaaatcaagagctaaaacgactaatatttttggatgtgagtattttattgtattggcgtcttatttttaaaatattaccatgacatgaatgtctttatatattaatcttgttgcataccttctggtatcatcgaagttttgccagctacttagctattttagttgatatttgactgaattcttatgctacaactgatgtttgcctacagaatgagtgctattgacactttaaatctcaggctatgtactttgtttgaccaaaaaaattgtttgcacaacaaattagtatgtatgatgatctctagtattattggtgtttcatcttctgatttcaattgtgtgtttttttaataattttttacttattctttatctgctgaaacattataattgttttctgaggaaggtttaggtagtttaatattgactatttttacttgcatttttttgacataaatattgtactctgctgaaatttcatttttatttcctgtttgctgtgtctgtttgcttaatatgccgttttggactgggttttatgatctattaatgatctcttttgtgtgcttttag

SEQ ID NO: 6357 - DNA, 792 bp, Zea mays
  Intron number 1 from transcript GRMZM2G471904_T04 (locus G RMZM2G471904) derived from phytozome v7.0 (chr-ID 1; pos 4 2170039 to 42170830)
ctgcggtgcaggtgagttactcgagactgtggaggaagggttttcctgctaccgctaattggatgccgaaaaggaagaaatccaacgagtcgcttgcttttcttcagctcgagtttctagtttatgtaaatgttcaaaggacctggattctaagtaggatcgtttttgtccttgtattatcagattgtagcatcgggatgctatcgaattttataaaatataattcttatattatgtttgtagcatgtaatatgttataaagtttgagacctataatcttgattttgactgttttagaataataccccccctccgttctgataagacgttttgttttttaaaaaaaatatgatttttgttatgcacttacatatgtgcatggtgaaagcaataaatctaaaaaataaaaatcaaaacgttttatgagttaggatgggagggagtatttcgttacaaccgaatggtttaaaaatcatttatatcaattattacgtggtatcatgagatctatgggattacaaatttaacgtaggatcatatggagtcttcacgtagtatcgaagtactattgaatttaggatacactttaggattgatatcgtttggtttggtaggattatattatggtaaaattctaggatatggatcttgacaaccttgaagaccaactggtgcttcattgcggctgtgagaaaacctgctaccgttgcataactgcgcctgactgcggctaccggtactaacgtgtccgtctatcttttaggccactcagtgaggaggagcagagagtga

SEQ ID NO: 6358 - DNA, 640 bp, Zea mays
  Intron number 1 from transcript GRMZM2G180488_T01 (locus G RMZM2G180488) derived from phytozome v7.0 (chr-ID 8; pos 5 4960311 to 54960950)
gatcccaatcatatattgcaaaagcttatttactggtaagaaaatcatcattggttactgaactgcatagttgacaaatctttgattgtttaatgctaccagtaaattcaattttaccatctctatttactcataaagttgtcccctaatttattagtaagaaaatgatcattggatgtcagagctgtttcctaggccttcaaagaagtttgactagctttcagtcaatatatccacaattctatgttgtaaattatagaccattttgataacagtacaaaatatgtcttctagtttatttattggagtttgcttcctcttttcattgtggctgcattgcaactactactgcagggaaagcagcccaatgccaagatgtagagaaagcagcctgctgccatctctgtcttttatctttttagatgatgaattagcactgctcatatctactagaaatattatttcattcaaccgatttagaactgtccatatctaaaatgtattgtaaatcttttaacaaatgttcaatcttcaatatatgtcatattgaaatttataaatccgacttgtacattatgtgtcaaggtctctattctcaccagattcattttctcactttagaaacaagagaaatataagg

SEQ ID NO: 6359 - DNA, 740 bp, Zea mays
  Intron number 1 from transcript GRMZM2G060999_T01 (locus G RMZM2G060999) derived from phytozome v7.0 (chr-ID 8; pos 1 13657912 to 113658651)
attgcgacgtttccgcagtggcggtggacgtcgaggtaagggtgtttcctttccctcgcggtgctttcgaatctgtgcgtgttggaatgcggcgaatcaggcgaaggaagggtgttttcacaaatggagcgcggatacgtgttagatcttgtcgctgtgagtttgctagcctcggtttctgagcgagcatttctggggattcgagattgttcaatggctccataatttggtttcaaattgcagtaactgaattctgaaccatattttttttttggaaactgagttctgaacttctgtttgattggatgtgctacaaaaatttctttccgtaaattatcttctttctctttgattgcctgtttagtttcgatcatgtcaaatatttttgaactccttgcgtatgaactgtggtgcactacccctcaaaaaaatggagtactaaaatgtactattatgatttatgaatgaatagtacaacttgttggaactagatatgttgctttgttggaattctaaacttcatttatctgtagttttttaattgagttgccgttacagttttggatcaaagtcttcatttctgctataattagactgcccatccccgtacctatatccaaactccactatgtgaacagcgcagtctaggtaaactatggtaaactgttggattcagtcttaaatgatgcatttgtatgtttctagtgtaacaagggaggggagactgcaagcctaccttc

SEQ ID NO: 6360 - DNA, 839 bp, Zea mays
  Intron number 3 from transcript GRMZM2G053600_T01 (locus G RMZM2G053600) derived from phytozome v7.0 (chr-ID 4; pos 3 0197582 to 30198420)
atcgctgtgcgcctgcccatcatcgagacccaaaggttcgcccctctggccctctatctgacttcaattttacagcctgtaattgcgatcactgtttgcttgttcatgaggccacggcccacgggtgtgctttgttgcccctggatatggcaaactgtgctggaccaccagctcccttgaggccttgagatttccagtaactggtttttatagcgaacataaccttgcttgactgctatagtggactatggctgtgtttgttccattccaatgtgttcttagcagagacttggaccctaaagataaccattactttaagggtgtttcgttccagcgactaaagttcagtatatgtcatatcgaatgttaaatatgagtattaaatatagtctaattataaaaataactatatagatgaagactaaataataagacacaaattttaatcctaattaatctatgattagcaaatgtttactgtagcatcacattagcgaatcattgactaattaggtttaatagatttgtcttgtcgttaagtttttatctatataattagttttttgattaaattatatttaatacttataactagcatctaaacattcgatgtgataggtgctaaaatttagcatagggaaacgaacgggcccaatatgtccatttggcaacagggacaagttatcttcgttcttataccctctgcattcttacattccttatttgtttgaagacataaccattgtaatcccaactccaaggatgttactgatgatattttctttgctgctgccttttttatagggcgtattatcttgaagtataaagcagggatcctg

SEQ ID NO: 6361 - DNA, 651 bp, Zea mays
  Intron number 3 from transcript GRMZM2G107336_T01 (locus G RMZM2G107336) derived from phytozome v7.0 (chr-ID 1; pos 1 96535115 to 196535765)
ctttccctcttaccagtaacgatctaattgagaaggtatgctttggcagcatatgccatagatgtaagcaagttattatgtactgtcagccaccggtcagtgaggatttttgttttgaaaatcatgtagcatgaatctcctgagccaccagttttgagttctagtgtttgttaagttaagaagattggattgtagcattcaccggttctgatttctgagtagtagtaattgttaggttgagaagatccagtggcaacaaactgaaataatctaaactgcaggctactcatcattttgtcagtaaggaactaggtaccagatgttatgagtactagtaatttgttaggttacgaagagccaataatacaaaataacaaaagttcaattcggacgattgagtcctgctcacctatcaccgacatatttttcttgtaaatccagtgatcagcgaaaagcaaactacccatgattaagcgttttttttctcatgatacgttttttgggtttaacgttttcttctggagtgagaaaacagagagttggttaaatcggcttatggagattttggactcagtttcaacttgtgcactgcactgaaaatctccttttgtgcccttgcctaaaacaggctcttggagatcacggcatcat

SEQ ID NO: 6362 - DNA, 576 bp, Zea mays
  Intron number 2 from transcript GRMZM2G442658_T04 (locus G RMZM2G442658) derived from phytozome v7.0 (chr-ID 1; pos 2 73986060 to 273986635 reverse strand)
gcgaccgcggggaaggtgatcaagtgcaaaggtccgccttgtttctcctctgtctcttgatctgactaatcttggtttatgattcgttgagtaattttggggaaagcttcgtccacagttttttttcgatgaacagtgccgcagtggcgctgatcttgtatgctatcctgcaatcgtggtgaacttatttcttttatatcctttactcccatgaaaaggctagtaatctttctcgatgtaacatcgtccagcactgctattaccgtgtggtccatccgacagtctggctgaacacatcatacgatctatggagcaaaaatctatcttccctgttctttaatgaaggacgtcattttcattagtatgatctaggaatgttgcaacttgcaaggaggcgtttctttctttgaatttaactaactcgttgagtggccctgtttctcggacgtaaggcctttgctgctccacacatgtccattcgaattttaccgtgtttagcaagggcgaaaagtttgcatcttgatgatttagcttgactatgcgattgctttcctggacccgtgcagctgcggtggc

SEQ ID NO: 6363 - DNA, 750 bp, Zea mays
  Intron number 3 from transcript GRMZM2G167767_T04 (locus G RMZM2G167767) derived from phytozome v7.0 (chr-ID 8; pos 1 56878497 to 156879246 reverse strand)
acaacactggcctctttggtatctacttgaccacggtgagctaatcttttctacatgttctgtgtctcgtatgttttcttgattcaatttgtttcttctttcgactgaagtttgtaaatttgatattttttgtgtggtcgtgttcaatgattatgattttttgagtgggattaaggttagggatgaaattagaaatggggcatttcatttatcaggaatcgttcccataaaaatgatattgtttatgactgttgagaccataaccgtaattaaacttttgatcttctaatttcttttagcactgtatatagttaaattgaaaatgtggtgagggaatcatttctgtatagaaatatctttaccggccattttcatccctaattaaggccagctctttcgtcctgtttttatccctacacaacttccagtgggcactagttggtcttgatgtagaaaatgcacagtatgactatgaataagaacagtagtgattgaactttttcgacatgaccatcatatgttgccctactatttaacatggtgggtatacttgtttagctttctcactgaaatgtatcgttggagatacgtttcacattttagagcagtcaacaacagcggtttggttcatgttgcagctattcttttgttgaacatgacagaatattaccttttcgtctttgtatggggctctgatatgtgtattattatgatttttttgcctgttttgactagtctagtcaccatatc

SEQ ID NO: 6364 - DNA, 990 bp, Zea mays
  Intron number 1 from transcript GRMZM2G702476_T01 (locus G RMZM2G702476) derived from phytozome v7.0 (chr-ID 4; pos 7 5388972 to 75389961 reverse strand)
gcgccgtgggcagggaaagacactacgtaatcattgtaagaactccccttcccagatccgccatcatttcaatttcatttagcgatcaacaaaactagtggtcgtgcaccgcggggcggtgcgggtcttcctgccatggcgtcgccaccacggcatctctgttggtcgccggagttcggccgggaggggaagacacgacctagccatcgatcttcttctgaacggtcctgactagatgaggataccccttcgggtgcattacgttcggaccgttgagattgaatcctaaggccagatgcggatcgcgtttcataaatccctagccgtcgatctcagatcctgtggcccttaacccgtaccggttcagtttaggttagtcgtaatcatgtccgttcgggtctgatcagacggttgggatcacatgtggtcacgacaccgaggtagaattgtaaaagagcccccgtattttcacagaatcaacccgccatcctagcacagttagagaacattaatttaggtcatgtttttagcagttgggtccctgcgctttcacaaaataatggccgcagtacagaactaaataaaataggataaaacaatacagaaaatagtttttttagtatgaatataattccaaaaacttgtgtaaatcataataaatccattttaattcctttttgacccattccagttgcattaattttgttttaatattgtttatcacctggtaactctgttttatcactaaacatagactagaattatgcacttaatctattctatagcaaccacttaaaactttgaaaaatcgtaactcatcaaccataactccgaatttagtagttctcaaacgtacgatctcgtttcgatacgtagaatattatcatgcattctgttctgatgtttgatgtgatgttaatttctcctatactatgtttgtttgtattgcatcgagtatacgagcaagcgaccgaggaccccggtacccag

SEQ ID NO: 6365 - DNA, 587 bp, Zea mays
  Intron number 1 from transcript GRMZM5G885923_T01 (locus G RMZM5G885923) derived from phytozome v7.0 (chr-ID 4; pos 5 5918401 to 55918987 reverse strand)
cgctcaatagatatatctggtgtcctgctttgggggtaaggaacatgtcctggtttttttagttactcaaccattgctatacacctaaatgtgtactgattactgtgttcttggatggctatatataatataataggcaacctttctttggtagcgttgttgttttcttggttgcatctttgccttattctttaatgctaaatcacgtggcatccatttgcgtttttcttcggcctatgctatcactttggaactgtaattaaccagtgcttactgctttgatcgcacttaatgaaactaagcattgaaagtctgattaaaaagatttgatattgttaaatattgttatgagaaggtctacaacaacgcttaactgctggaatttcttttggcttcttatttaaggtctatttgcaaacaggtcatgtaaataactgtagatgggacaaaagtctgaactgttctaaatgtgtcacgtattgctttcaggttctctttccagatcacaatttaattatttaattttttgtttattttttttatcatttgaagattctaggagttgagaagactacttctcaacaaga

SEQ ID NO: 6366 - DNA, 1007 bp, Zea mays
  Intron number 1 from transcript GRMZM2G133444_T01 (locus G RMZM2G133444) derived from phytozome v7.0 (chr-ID 4; pos 1 45924692 to 145925698 reverse strand)
tccgttgccaactccgtcgtgtcccgctgctcaaggtagcgtcttcgtctgacgcgaatatactccgctaggggttggctatagaagttcgatgtgagctatccactgcttattcagagaatacacacgaatgtttttttttttgtgatcgtgattggtgtgtttaccacggctccaaaggatcgcactagaactataccccaatgcagcagattgctgctgtccccaaacttagattggtactagaagtatagaattacagtacagagaaccccattgggctattgctggaaaagatagaccaatctcaacattttgctagcctcagcatcaaggggggtgtttatttgggataataatctgcccagattatataatccaatatattttgaactaagtgctagttcaaaataagctgtgaactaagtgctagttcaaaataagttggactatataatctggacagattataatctcaaacaaacaccccctaaattggtatattcatcctgtgccaaggtgtgccaaggtttattcttcatatcaattagtgaaaggaatggagaaaccaacatattctactcgtcaacaattattccttacagaaatccaatagggttgaaattacctattgctggatatgtgcacttcacatttaaacttgccaagttcacactaaatttcagcatggagtttctcattaagtttgggcatgttgcgagcggaggtagaggtacttaaagtgggtacaattagaccaacttaagctgaattcattttttaatataaaccaattctattccaagaagtatggcatagttagcactaatattaaaatcggctcatgatcctatatcctctcaagttcatatctaatcataactttgttgttgatgtgatttttcttggttcctgccaagatgctctgttatgaagtgaaagtgctttgttttttaactttaacaatttcaggattcttgctctttcaattgagaacttacagcgaa

SEQ ID NO: 6367 - DNA, 768 bp, Zea mays
  Intron number 2 from transcript GRMZM2G033828_T01 (locus G RMZM2G033828) derived from phytozome v7.0 (chr-ID 1; pos 1 96131356 to 196132123 reverse strand)
cctccatagaggagaggttcgccgatctgtgcaaggtacgggttctcacatgccccggcgtttgcgccgctccgtttctgacctttcgttgggtgctggatttttgtttttctctgcgcaaggcgtgtccttttctcactggcgatgtcttccagctgcttcgcgtgtgtttgctcagtggggaaaaacatgggaggctgaaggtttaggcggtttttcttgtttggaaattaatttgtgctagatctggcgctcctctttcgtttatttaggttatcccaaccgattttgtcgcccttgactccttcgaatttgttttcgaagatgaaccattctgatccatttcttcggtttccgtgcgctgtgtggaaatctatgttttccaccgtctgctgcaaactctttgtgtggtctgctggggataaattttattatttgtggctggccctttcaaaaacgaataataaatggagcgacttttgatggttccttttgatttatacactttctgtttgaagtcacactgtccttcgtatgtcttatcattattattagtgattcactggttttgtacctgtgagtttatttactactcgtacttgtcctatttttaggagaaatctatatgcatgatcatgtgacgttccattttacccctgctgttcacttgtgagttgtgactgattctcgtataccctgattttttatttgctcttttgtttgtggcgagcaggccaagctgggactggacgagagcacgacgaggca

SEQ ID NO: 6368 - DNA, 992 bp, Zea mays
  Intron number 2 from transcript GRMZM2G344193_T01 (locus G RMZM2G344193) derived from phytozome v7.0 (chr-ID 1; pos 2 41290539 to 241291530 reverse strand)
ctgagctacgcttctcgttccagcgcaacaacaaggtacaatcctccccctccccacccaaccgaccattctttaggtcgcaacgggtgtgtatgtttttttactgttatcccgtaattggaattgtagtccattcagcaaaccttggcactcctcacctatcgcagcctcttcggcatcgccatcagacctcctgtcatgctgctccgagataggcgtgcctgattttccgacaggtcagtcgatcatcaatcccctaccgatacaacataccgaactactccatcatcctgcacaaactaaactagattcattttccgtttctgatatatacacattctgtgttaattttgatcttggttcataagaaaagaacagaaaataaacacatatctaatgactataattatacatacaccatctcttgtgattttagatacttttcaattataccttttttttctaaaatcacacgaaaataccaatttgtgtcccggtagcgatgtagagcaccgcattggctattgagtgatgaagcgtcgtaccgaacttgggaaactacacgcgaatagatttttcgaaacctttttccctttttctgaggtttaaatggtggtggatactgattgaaggtgactaatgtttgtttgttatcaacctttctcccgacagacttgctacggatttgggagggaggcatgtgcaggtggagctgtagtggtagttcagatccgctgtcatgagctgctactgatcctgatgcgtgaagacttgcaacaaatgacggcaaaaaagatatagcaggagtgtggagaataatggcgcttggggattcaggtgtatgtacagttctgccctaggctgctagctagccgatttgtttatagcttacatgctccagttattcacaaatattatatctgttttcttattaatttcatactgtttgctttataggtttgtggagtggacttgactgacaaagtagtgga

SEQ ID NO: 6369 - DNA, 898 bp, Zea mays
  Intron number 1 from transcript GRMZM2G027542_T01 (locus G RMZM2G027542) derived from phytozome v7.0 (chr-ID 8; pos 6 7379057 to 67379954 reverse strand)
tccgcaaggtccgcgcctcccccttcctctcccgtccgcatcgcttgcgcctagatcccgctgctcggtttcacgcggtctatagtgggcgtgggctgcacgcctgcacggcaccgtgtatgggtcgtcggcttctggcgtgctcggatcgagctaaattgctgtcagatttggttacctgcgggttctaggcatgggatttgggtgatgttggcggttactgtcgtggatctcttaagatctagccagcattggtgatcaggtgggggtggcttggtgcagtggttttggagatttgcggggtggtgttttgattgcaatgttgtgatttgactacctcgattctcgagagttattggggtctttggttcacgctgccatgtaattagttgaattagtgaaagatgtgcataagtttaccattttgtagaagctagattcattttttgagcttggtattgatcgatcatggccattttcaggtgagttttactacactaataatgtgtgtgatttaggtggggcaagtgcgtggacctgcagagtgctttgtgttgcattttgtttgtagaagtattaacattgtttttctttgcataatcaaagagaatgaagtcccatagtgcacatacaacgccagaggttggcagtggttgcaacgccgaaagcagaagttgttggctaactggccattgaatactttgtagtacaaccattgatcaacctgttagtagagccttggcttaccaagttcatgtgttgtgatcctcttttccttagtttcaatataatgcagacatgctggttagatttgttctgctactgtcacccacatcttgtttgcaccatttgcatccgtccagtgatccctatgctgttcgtgtatcttgtgtaggac

SEQ ID NO: 6370 - DNA, 698 bp, Zea mays
  Intron number 2 from transcript GRMZM2G071630_T02 (locus G RMZM2G071630) derived from phytozome v7.0 (chr-ID 4; pos 1 33104370 to 133105067)
ccgtgaacgaccccttcatcagcaccgattacgtatagccccttgtatcgcttatcgcttgatctggtacttagggagtgtgctgtaacatggtaatatgccccctcgtatcgctaatcccttgatctgctaattaaggtagtgattggctgaacgtgcttgttcaatggtagcagatctgtattttgtccttgttcaatgtggaacagctgcattatatgagaatattagtaaacggggatgcgtagatctgacgtggatgccattttttatatggattggtgttacccattctgtcataaaacacatgattgtaatttactgatctatcgtagaaactctttagtggttatatttaggttgttgatctgtggatgcacgtgtatctgtgccttgctctgactgtcatgtgctttggattattatataggcaatctgtttttttcttgggaatcctatgctaaggttaattcaaatcttatgatctggattacattctattttattgttgttgatctaaatagtgtttgaagtatccaaatctgtattctctacagaatttaattctctggttaatctcttcttgcatttggcaaattgattagttaaattacaccaattaggtctcctgtaacttggttacgccaactgggtcttctcttatatgactgaatttgactttgctattgcagacctac

SEQ ID NO: 6371 - DNA, 504 bp, Zea mays
  Intron number 1 from transcript GRMZM2G374725_T01 (locus G RMZM2G374725) derived from phytozome v7.0 (chr-ID 4; pos 2 18559873 to 218560376)
tactggagtctcctgtttttctttacaataaagtatgtgatatttccttaaggtcccgtttgtttcttttcattttgaggaattggaatcttactaatggaatagactatctcgaattcatgggatgagagatggaaattgattatatagatttacatgttatttttctgatgtacaacttatagcacactcttctacttgcttcgctataacataaatgtagtatgtaactatagaacacggtttcctgcagtatacttatgcatgtgaccacaacactgattgttgtctactgtgcaaaatattattatactagaaatatagttctctgattggtgtcttacaagtttggattctgttttgattttatagctgctaattttggaccaacacttacaaattcatctttgttcccgccctttaatatttgccatacggacttagctgaattggttgtgatatatttcaggcacagccttctccaaccactggcacgttgccatt

SEQ ID NO: 6372 - DNA, 807 bp, Zea mays
  Intron number 1 from transcript GRMZM2G170232_T01 (locus G RMZM2G170232) derived from phytozome v7.0 (chr-ID 4; pos 3 6927873 to 36928679 reverse strand)
agcaactcaagcatttgctgtttgacagactcgaggtaggagctagccacggaaagggaagaagcagaggcagtgatgacggttttgattggccaccgcctcttattgaagaacacagctgggacttcgcgcagggctggagtgctacttccagtattgcttgcaggtcgaggagttgatgagatgcaacggcggaatgccaaggtgattacttgtatgctatgcaaacatgcataaaacattgtatataggtgattcccattacgtaattaggctatatggttggttgctagctatacagtacaaataaatcaactgggttctctataaatcaatagtcatgagcctggggttgtgttatccacttttggttaatggcaagtaataatcttatcataattagctagtgttgtttgtcaatttttcatatatatactcgtgctaatgatatttgttgcttcattctgtacaattatgagacattttatatttttatatatatatattttttggttatgcatatatattggtttttagtgtatatatattatttaagtacataacattaaaaaaccaaaacatctttgagtttttctttggcatatgctatcactttggaactgtaattaaccagtgcttactgctttgatcgcacttaatgaaactaagcatttaaagtctggttaagaagatttgatattgttaaatattgttatgagaaggtctgcaacaacgcttaactgctggaatttcttctggcttcttatttaaggtctatttgtaaacaggtcatgtaaataattgtag

SEQ ID NO: 6373 - DNA, 528 bp, Zea mays
  Intron number 1 from transcript GRMZM2G396494_T02 (locus G RMZM2G396494) derived from phytozome v7.0 (chr-ID 1; pos 1 72851211 to 172851738)
gtaaccgtctattccataatttctgcttcctgttacttttacagtgtttgaattaataattagtgggctgagtcggtttcttaatggtaggggttgtatgtgctgggagggattaccccccccctcctttatggatcttttcttcttagtgaaatgacacacaactttcctgcgttgcttgagaaaaacaatatccacatttcatataatccttcattgagtgtctttgctttcgattggtaacatgataagcttactactcttcagaattagagagttgttcagatgactggagttcacattcatcttctgctggcaacccagacataccatatgtggttgtctccaagtcatcaattatgactgttgtatgcaaggagattcttggctgctacaggaaggttgttctattgatgtattttcttttatctgaaaatagacgagatctagaaactgaagctgctaatgctaacaagtctggtgccttttgcagttacttggcattcctgatctgttgaatcaaccaaa

SEQ ID NO: 6374 - DNA, 820 bp, Zea mays
  Intron number 2 from transcript GRMZM2G472226_T01 (locus G RMZM2G472226) derived from phytozome v7.0 (chr-ID 1; pos 2 75767962 to 275768781)
tgctacgcgccctctaggacggcaccggctggccggtacgtaccggcattcttgcctactagctagatcgccgtgtgggtcttcgcagcttgtatgtaactttttgtttttgatccattccagtgtatatgtatatcggaccaatcaaaagcctttgatatgatggcttagtttgattaatcgaggaatcaaaaagcctttatgcatcggattcggatatatatatcaaaccaactggtggttcttggattaaactcgagcaccaccgtcgtagatcctctacgcggcgatgccatcattacagcgcgcgcggttttccttttgggactttggacggcggcggcgaacagtaggcgccgctgcgtagcgcacccgatccggcgttctcgatagtaggctggactgctggtggccatggcatgcggcgtgcgacgtcgtgagcacgtccagtattcacatttcacactcgatcttcttcttttttggctgggcgtttcgcggcaccaataatccgcaagcacacgctcctcctgaatctggaccgttggatgacgacctagcggccggcccagatcggcgcttgggctgctgctccggtgctgtccctgtcgctcccatggccgcttcttcctgcctacctcgtcgtctttgaatgcaacgtgcttcgttcccttgcggactttcttccacgattcctgcactgctcaaccaatggtatgtttgagcagaaccccttcctggcgtcgcgtctggtttcgtttcttcgttccggaggatttcgtcggttgttttccatgcagaaatccggtgacccctcgtt

SEQ ID NO: 6375 - DNA, 652 bp, Zea mays
  Intron number 2 from transcript AC209971.4_FGT001 (locus A C209971.4_FG001) derived from phytozome v7.0 (chr-ID 4; po s 201858973 to 201859624)
agggttcctccaagcctgccctaacggaggacaaagtaaatgggcctgcttaatttgacgaggccaagaaagtgatcgaagatgatacgtcgcttggtgagggaccttttgaccaagacctgggtggtcaaaggtatcgggtccaccatgctacaggaaaggtgatgggcgcgaaacagctggctgaggctatcggtttcaccgaacaacttggatacccttcgaagtctaccatttttgggggcgagctagatgattattttatactgctgccccgacaatatggaaataaaggtatgccgctacatggcggacaatgttggtttcccgaagctggaggccatggtttcgactatgtcttctgaagacttttcagattgtctggcttatactcatcttaaggtattttctatcggtttttgtttttagcttcaggttgctttaatggattggcttatttttcactgtttatatctttgcgaggtcagttcctaagcaaggccttacaaaacaagaagaatgttgagggcgaagcttcccagaaagaaataataaaactcagatctcaagtgtctggacttcggtttgattatgaagaaaagtaaaaatctttcaagatcctggaaaaggattttattgatagtcggaccga

SEQ ID NO: 6376 - DNA, 1002 bp, Zea mays
  Intron number 1 from transcript GRMZM2G181218_T01 (locus G RMZM2G181218) derived from phytozome v7.0 (chr-ID 1; pos 7 4607430 to 74608431 reverse strand)
aaagcttcgataaaaacggatacacgttcctgacttttcaggggcccagtgcgaaatccgatatggagggcccatctacacacaaatatatataattatacatacaatatcgaatatttggcgtataaaaattattatgcactttttgatgtttataaaataacaaatgtaaaatatagccaaaacacttacttctcatctgataccattaaaaatatcttctaacattttgtgatacgaagtcatcacttatatcgttgagatcaatttcatacaacaacttttttcgatatatagaatcgctaagccatttaacctctcttaagttattgttgaccataaatagtccacaaaaacatttcaattttaaaaagtttctctctgacgatgcaaccatcgtgtgtatagtaaataatactctctctatatcaaattaaattcgttttgcttctttagtggattcatcatcatctagttgaatataaacataaaaattaagagttaaaacaaatactattttgaaacgaatggagtattcgataagccattttgacattaatttaacaatccaaacgagactgattgatactgcatcgctcattgcgtatttgtgtttaaaatagataggtttaacagaaaaaaatgctagcgtctagtggctaggggggcctctaattttgggggcccggtgcggccgcaccttcggcacccctacaggaacggccctgctgatacattgtgatccaacttgggtctatacaaaccttacggtagctgatgcaaactgagatgaaccagcaataaactactactaatttagagtatgagcaacagttgcaaaacatatcaatgtgactcccatatagcaagcatactgatctatggcagattacaactggttttagttttacagaatagaaattgatgagttagaatggcgttccaaaaagttcatctagcatggaaggcatacattaaacatttgtcacccagggtagcata

SEQ ID NO: 6377 - DNA, 928 bp, Zea mays
  Intron number 1 from transcript GRMZM2G153819_T01 (locus G RMZM2G153819) derived from phytozome v7.0 (chr-ID 1; pos 1 96241134 to 196242061)
agtggggcatccacagacacagagtggcacctcatgtccacacccccagtttctatctgctctccctcttttcacgcctccagaatttgtcacctatcacaacagcttctcaggtaattgtgttgaatttgtgatctattttatgtttcttgtgatttttattcccttgactatgcgaggcaccatttatattcccttgactattcgctggatgataggcgatgtgtgccttccgttccgcccgcccaccacgctgtggtcgcgtggtcgtggacgtgtcggtgctattccatcgtcgtcatgctggttttcatgcgctgctacaagcagagtacaattcacgtttgcttttttcctgcgcctcggtcgcgggggcaccacggtcatgaacgcacgagcacgacgaagagagatagatagacattttcttgtatagatgctcgatcgaattttcctccgttctgtatatatttctgcttgcttgctattgtgtcatctcgataagtcaattgagcttgcgcgcgcgtgtttcacgatttcgttatgggcacgtggtcgagcgagcaacaatatttgagttgagaagaatataggatatccgtgtcaactaaccacaccatttttgagctaatggtacattctccccgaatattttttggatcacacaccgcttacctactctactcttgtccgtccgtacctatttgttctcgtaaagattgaagcaatcatgtgtcatttttttatttgtccactgttagttcagagatggctccatgatttattttattaatttattatgcatctaacaattttttatgcatgttggcttactcttttaaatcgtcatttatttttttcactaacatggcacagcatggacactaacctatcttaccttatgaatgtagacttttgtcccgcgaga

SEQ ID NO: 6378 - DNA, 536 bp, Zea mays
  Intron number 2 from transcript GRMZM2G013639_T01 (locus G RMZM2G013639) derived from phytozome v7.0 (chr-ID 1; pos 4 9817704 to 49818239 reverse strand)
gggcttacgcttacactaaagggtactttcgccttctttctgtgtcactacatctgcaccagtgcggatagaacgatagtggaggttgtagtgctctttatggccactcttttagttcagagacgttggataaccaatcagctactcctatattgttttaatgcacaaatccatcacgatctgtttgtcctttagcttcgacattgtcagttgatgaggcctatagatttatacatggttcttgactgctctgttaaatagtactaggatcaatgtagcttttcttattatgttggtattctttaaggcatgatggtgttttaactggattgactataccttggcatgacaaccccactcattgcctttgtcttctttacgacatgttgctggtttaatttgattgatcatgccttatgagaacgatttcattctcaaatggattttagccttccaccattaatttaaacatatagctctgtatctagtaacctgtgttttggttcacctgttcatcaacacagggaaagtaacaa

SEQ ID NO: 6379 - DNA, 935 bp, Zea mays
  Intron number 2 from transcript GRMZM2G384762_T01 (locus G RMZM2G384762) derived from phytozome v7.0 (chr-ID 4; pos 3 5263358 to 35264292 reverse strand)
gtatactggatcctgcgggggctcagtcgcaagtggtcagaccactcgtacaatcacctctcacctctctaggaattgtaaccatttttgcaattttactctgcgagagactcagcgtccccaagctcacaggtaaggaccacagaggggcattacatggttttcttcttttgaatagagacaacctgtgcaatatgtatcttagcattatgtacaattcttgagttcaaaacacactatgtcctcaaattggtaggaatattgcagtaggaataatatttggtgattatctagcagccgaactggtgaacataatatctgatttgcgagtagcagtattatacaaatggctgaatcaaataaaaaagcgatagcttacatataaagtaaactaaattcactatacttgaatctcataattcaactactttcaaggtcttatgccaatataacttatgtgtaacagtgtttagtcaatttcaaattattaagcgctcgtcacttgatagcactatttgctttcatttgtacaaaatacaataatagcttagagagtagatgagctaaaatcatggtaaccattatcctgtttgataaactcatctaatcaatgatcctgtaagtgtcatgtatcagttataaaattaaaactggtgttaggagtaacacctcacatcatctgttgcagtctgttatttctaaagcatagttgtcacctgcaataatttattgatattctttttcttttgtcgaagataatgcaagaccctaaaattggaaaggctttggctttgtgagctatgagtcctttgaatcatctgatcaagcaatagaaataatggaatcatcacaccgatttcctgtatttcaatttgcaatggttctgactgtctggcatttgtttcatgctactttctctgctatattttcaggtc

SEQ ID NO: 6380 - DNA, 413 bp, Zea mays
  Intron number 3 from transcript GRMZM2G161553_T01 (locus G RMZM2G161553) derived from phytozome v7.0 (chr-ID 4; pos 1 81722402 to 181722814)
ttgatcatctcctttcccaggtttacagattacgcttagtattcaagttagttaaatccatatctgatagtgtccaaattagttcaaacctgttatactgtaccctaaacgtccatatctggagggactttaagtaacatatactatatattaacactctaacatgaagagatgcaatgttccctagaaatgattctgtacagaatagtcactgctgtacactgggttcataccaatttgatacaacattcacctccaaaaagaaaattcacatggacatgtaagattatgtctgagaagaacattcaaaaactaatctcacactgctgtttgacatgtccttccaatagttaatatgtatttcctttgcgtctgtagaaaaactacataaaagaggaaacaatagagaggat

SEQ ID NO: 6381 - DNA, 495 bp, Zea mays
  Intron number 1 from transcript GRMZM2G124532_T01 (locus G RMZM2G124532) derived from phytozome v7.0 (chr-ID 1; pos 5 0032626 to 50033120)
ctcttcttgaggccccccccctcctttgatctttagtgggtttgtttgagtgttgtctgtatggatccttttatttatgcgtgttttggcctccatagggaggtctttctgtaccccaggtcttctttagaccttctacttcttaatatattctaaagcgcagttctcctgcgcttccgagaaaaaaaaagtgtctaaaggcatgttcaacagaatagttgcttctcatttggctaagtctaaacacaaacttactaagccatcacttggaatagctacttacacaatcttattgtattactgtcacattatttgcttgacctaatttgatttaggctgagtgcttagacagtagcattttatcacttttttgtaacctaagacataagtttgaatgcttctgttatttccacaattgattaactgaaaatttcttgatttgtctctctttatgtaacagctctttggtgcttgagcaaagtgagttttctcttg

SEQ ID NO: 6382 - DNA, 836 bp, Zea mays
  Intron number 2 from transcript GRMZM2G130739_T01 (locus G RMZM2G130739) derived from phytozome v7.0 (chr-ID 1; pos 2 35196262 to 235197097 reverse strand)
aacaagcttcagcatctgaggaaggcactgaggtgtgtgaatcctataaactattttgatatctattgtggcctacttaagttttgtgcagtcctgttggtattaataaatcatatattttcattgaaagtaacaatattattatgtaccgtaaacacccatagagaaaatatgacaacttggtttggaattttgggaactcttattgatggccatctttatttatttcatttttgattgaaatgctgctctatatcattgatgctccatttgttctaaattatatgttgttttggcttttctgtgcacatagtttttgttccgtatctagacataccatatatctagatgcctagcaaaatctatgtgtacctagaaaagccaaaacgacctataatttgggatggagtacctttttgtgttattcacacttaaatatccattagaatatagaaggattaattatttaggcctgcatgccttgttctgtacagatagagatgtattctaattatagattgtagtcggacaggactagatgtagaatcctgattggttactactattgtaactaaggtagactccaacttgttggcagtttctgccgatataaatatacatcatgcttcctgtggaggatatacacttaaccaatctggtggttttttctcaatatcaattacattgtagttttttcttagcagtttaaaatcttgatgggcagaaatttagtactttctatttcaaggtaaaatagtatttgacaaatctttttttttttcaaatttgactgtctaacaggtacctctgactgaggaagaagttgaagaattggt

SEQ ID NO: 6383 - DNA, 612 bp, Zea mays
  Intron number 1 from transcript GRMZM2G100282_T01 (locus G RMZM2G100282) derived from phytozome v7.0 (chr-ID 4; pos 4 5120042 to 45120653 reverse strand)
agactcttaccttagcttctccacgctcccagcaggtctattccattcctccctcggattacacgctggcgagctgtgcctgggtttttttggggaatctaatagcctgtagttaccttcgtgcatatgaccttggcgatttcttctcagaaccaaacctttctttttctagctggggataagtcatcaaatttcagcatctattgtcatgcaggtttgataattcttatcctttggtttgtgatgagcttatatttgttagtgaaaaatcggtgaataacagtctataattatttgattttgttatataaacaacagcctaggattagaggagattattgtgtttatttccatcaggtttcaatctactgcaatatgattatttgattttgtgacaataacgaagtacaaggtgtcaagcactctatcagttgtcttcccacataactgatccatgaatagataaaagattgatgtcacccatttaggtagcattgttgtgtaaccattttgcatgtgtacaacagagagttgtgtccttgtggtgtatagcataatgtgtttgttcatgtacagtaaacatttcttctttgtctctatcatcaggaagca

SEQ ID NO: 6384 - DNA, 740 bp, Zea mays
  Intron number 5 from transcript GRMZM5G830747_T01 (locus G RMZM5G830747) derived from phytozome v7.0 (chr-ID 4; pos 1 97376641 to 197377380)
tagcagttgaggagtgcctctttggctcttttcgtgtaagcattagatcttttactacctacattcttcttgtgttttcttggcttactcgatcgcgaagtattaatctctatttgtgacagatggcttggcaagattatactagagacttgtatttctcatatccatatttggcttaggtatgattcttgtgtcactgctacatatatttttcctaattattggaggtacttccatttagccttgcagtaatatattcctatataactgtatagcatgctggatataaggtcaactctgatatttttttctcatatatcaatagttaattcaactgaactaaaaatgctgctcaaatacctttgcttttctacagtgtgaccaagcttttttaggtctagcatgccaaatggacagccaaaatggctttgtttcataccagattatcctatgcttatcttcatgcttactatagcgatctatcttcttgtaagttgccaacttcaaacccatctcattacttattgggaaagaaaattgtttcattgaacagtcataaaaaggatactcatttcattatctaaggggtgtttggtttaaagaataaatccattcgagaatgatgtggtgcatcatcatgagtccattccacaaatttggtggaatgaactcattccccccatatcaaaaacagtaacaatttccttatcgattttttcttagcagctaaccactaggtc

SEQ ID NO: 6385 - DNA, 953 bp, Zea mays
  Intron number 2 from transcript GRMZM2G104041_T01 (locus G RMZM2G104041) derived from phytozome v7.0 (chr-ID 4; pos 1 95755291 to 195756243)
catcttctcctccaaaagtttctgcttttaagaaaacactactccctcctcgattgtcgttttatcccttaatttttatatctatatttaaataaatgataataaatctagacacatatataaaataaatacattaattattgtatgaattatttaaaaagtaaaactaattttattttaagacggagggagagtatttattatagcaaccgtgacatctaacataatcgaaactcgcgcaaagtcttagttactcttggtggttgtcatcacatcacaagtaaggcagtcgtgaacatatttgtactaacgtctttcagaaccactgatactagggactagtagaacaaaatatttgtatagacgggtaactgagaaccgtcggtggaaatcgatttttattggtggtcgggctaagaaaaccgtcagagaaatcgattttccgctagcggtcgagataataaaaccgccagtaaaaatcttttccaggaaacataaaatttgttttaaaaatagcaaaaaaatattgatcgaaattgcaagggtctcgcacaaaattcatttctacgtgattgttgggaatcaaacccacatcctcacccctatgtgtagtcccctctactacttcacttatcacttacttcatgcatatgttgcagtttcgttgctcacatattagaacaattcaagtataaattgactatttgaagatgtaaacgaattcgaataaaaaagatgtcaactacaaagtttcataacttttgaagttgttcaacttttattttggtacttttcccatccgagttcgtttgcaaaatttgcattctaaatttgacaaatttaaatgcaatttttaagagccaaaatgatttcaaataaaaaggttttaaagatctacaacttttatgttggtggtttttttcttacgagatcatttgaaaaaactcaaaaaa

SEQ ID NO: 6386 - DNA, 606 bp, Zea mays
  Intron number 3 from transcript GRMZM5G833389_T02 (locus G RMZM5G833389) derived from phytozome v7.0 (chr-ID 8; pos 1 70765758 to 170766363 reverse strand)
cacttggtgctggtcgaattttcgcccaagggtatgttagatgtttattttgttttttggaaatatgttttctgttgtaacaatgtgatgtactgatgtggtttcaatattgcatttgaacatgatgcccacagctatattttttctatacaggccaagcctccacgtgatgtaggcatgcagctgctaacaaatataacacataattttgtccatataagattcaaaaactttgaagcttgaaacagtacaaagtttgcttcatgacaagaatatagactaactgtgcattcttattgtcatcagttactagtttcattgacacgtcaatgattttattaattttattgctttgtgcaaatgctgttaactaggacacgttgcatatgctgatttgtttctcactactgcagtgtagtttttggctcaacatttgaattcatatgcaatcaagaactttatcttagtgtgctattttgtctgtcatgttagtcttaaataatacctttagttcttaagagttcatactagatgttctctgatctgagtgctgcattctttctaactatagtgctaagcttgtcgatcaagctcttgcctccggaa

SEQ ID NO: 6387 - DNA, 645 bp, Zea mays
  Intron number 2 from transcript GRMZM5G833389_T02 (locus G RMZM5G833389) derived from phytozome v7.0 (chr-ID 8; pos 1 70766447 to 170767091 reverse strand)
gactcgctaaagaatgtgtgtatgctttcgtttacaccctttcttctgcttaactctcaattgcagtcattgtgggattgtgtagatgagttttttttttttttgtatttgatatcttagttctgattgtttctaagtatgcactggccatattattatcgggagcctaattcttagctccgattatatgacgagggatctaatttgaattaatactggtatgtaatggtttttttagatttttttaacataatctcgattaaggttaagttctacagattaagtttaaatgccttttacattccaatactcattgttatgcattggggctctgggccaagctgtgaatgctgagttactatcgcacaaatattatgcacaaaaaaaatcatctaggtaggaccgtctgaaaatggctacgcccttaggttattaatgctttggaagtgtatccgttcgattgcttgttagactgttgtctcataattggtgttaatgaaaaataacaaggtgttgcacgtaatccctgcttctttctcttgtaagaaagattgttctgtcagcataatttgttttgcaggtatactgtctatatgcttttacttacccttcagtgaaatatgtatattagggcgctcctgagaa

SEQ ID NO: 6388 - DNA, 873 bp, Zea mays
  Intron number 1 from transcript GRMZM2G063679_T03 (locus G RMZM2G063679) derived from phytozome v7.0 (chr-ID 1; pos 2 24522572 to 224523444 reverse strand)
ctattctgcctcggcttgcaccttcgacctcgctggtaagttccatcgcttttaatcgacataggccttttagtcgcgaatattttgggtccgagcaacgaagatgctccgtcttgaatttggtttagctagatgttgttaatcttatcgttcggtcatgttttatcgtggatttggacgttgaaatgccgctatatgaagaattaatttgattttattgcggatgataggggtgattgtcggttagaggggttttaccgttcagatctagtaaaattgcactggtgaaaggaggagaggagtggggcagttaggtttctgggtccacgtttgtttaattatggtgagggtggtttctggttcacctacccggttgaaagggatgcgtgctgacttgggaaggtcctccagtttttgtttgtatctgcgagattctatatatatctacttggctaattttaaaatcgttcaaggttcaatgccagctgttctatctgcaacttagatttaggtttggtaccatgaattttttatagatttgggcaaactgcatgaaatccagtggattatgtcattattatagtgttaggcgtgagtgaactttttcagatttatgacgttggcagttgggtaaaaattggcgcgaaatcattgtgctataatttgttttgtattatgctagattacacactgtcggttaatctgttcttatcacaatgcagttgtcaatgcacagtggtctacctttcttacgcatattacttagatgagtctgctcagcagtagcataatagttcacagacaggactctgaagcaaatttttgttttgagttgcagaaagttctgacctcaaactgaaaggggcctgtgaa

SEQ ID NO: 6389 - DNA, 750 bp, Zea mays
  Intron number 1 from transcript GRMZM2G010152_T01 (locus G RMZM2G010152) derived from phytozome v7.0 (chr-ID 4; pos 2 35734531 to 235735280)
gcgcccacgtcgttttcgaccccgcgctcgccaaggtccgtcggctggccccgtgatccctccgctctcctttctccgtccatcccgcgcgccctctcgacggatagtttttttttcttcctagcgctgtgggctacaaattgtgtggagtcgtggcgctgtgttgcgttgcgctggggaaattgaggggtttggtggcgggaaatcgaactccggcctgttggtggataggagatgtacgtgtctgcttcgcttcgtttcatcttagaggaggttcagaagcacgtaactcggtaaccgtttgaatttcttctctcttttcttctggttgaagctggtggtttgaattcgttggacctgcagatagttgatgctgttggataaatgtttcctgtgtttggaagctttatcactgggatccatgcccttgtaaatcacagccgctcttaacaggatgctgagtgattgttgaaatttcgattgacaattccctaggagagtttaatgtgattaactaatattatagcaggctgcaagcaatctccagctaaaatacacgttcgtcatttaaaatagcaccataatttgacacgttgctagtctccaaccattatctagcaactaatttccttttactttaagtctctgcaatgacccaacaggaagttctctactcaatatttatttgtcgttttttaatgtttaaagcttgttgtatgcaggaagacgacattgtagaagcaatagaag

SEQ ID NO: 6390 - DNA, 935 bp, Zea mays
  Intron number 2 from transcript AC209845.4_FGT002 (locus A C209845.4_FG002) derived from phytozome v7.0 (chr-ID 1; po s 200632695 to 200633629)
caacttcacggtaaagattgcatgctaagaagctaggtggaatgcacaaatggggaactttatcaggtgattagcgtgttaacatgcccgttgcccactaacgtcctgcacaaagcatcagaaagcagcagctctgagtgaacctggataataggcaaagcacctgtactgtattgtacgcctgagaacttgaggaagtggtgaagacagctgaagggggattcagaagtaccaggcatctgaattttttttttctctacaagccggctaaggtcccccggctagggagggtggccacgatagcatgttactctatccgttattttttatttatctgacaaatattggagaacaaaggtaaccgtttgattattgatccattaccacgtgcatccatggtgtatccgtgggtcgtagaccggtggaaatatgttcctcaactcctgaccccagcatgtatctttagccattgactacatagtgtaagataaaattatagagtaaaatgaattagcggtcctcgaacttatcacattgtgctatttaggacatcgaattcagaaaaccagcaaaatggatcccctaacttagtcgaaccatacaaaatcgtctaaaaccggatttgttcaaacgagatatcgatgtgtcgtgccactacgaagttatttggttcccgaacctgatatcctgtgttacttgggttacggtttgattagcgtgctacaacttggcatgtcatatcggcatctggtttaagtaaacctgttttttaatgattttgcatggtctgactaagttagagtgacataatgtgtcaagtttgaggaccaccactgtattttactctaaattataggtcaaaatatatttggtataataaaaaacgtttattatttttagaccgagagagcagatttcagaaataatcttgaaag

SEQ ID NO: 6391 - DNA, 539 bp, Zea mays
  Intron number 1 from transcript GRMZM2G002034_T02 (locus G RMZM2G002034) derived from phytozome v7.0 (chr-ID 8; pos 7 3852983 to 73853521 reverse strand)
ctgggccttactgtaaaccgaacatcctgttccaggtaaaaaaaataatatctacttcttccaactctattgtaatgcgtgtcgttacatgggcagagcacaaggcatgctggctagatcctcgttaggtctgtttggtttatagagactaatttttagttcttttattttatagtctctaaattgtcaaatataaaaattaaaattaacttttttgtcaactacggcatcggtagcaatctgtttttagtgtgtgttctattaaacaccatgataccaactgcagaaaaatggatgaatatttgtttgacacacacatacacgaaaaaataataataattcctggtactgttgtggcctgccagcaaacaatgcaacaaaagatatagtgcatgtttggtttgtggctaacactttgcctaacattagtccttcgaattgaaaaactaactttagatagaaaagttagacaaagtatggtaaattagacagcgaaccaaacaaagcctataatcaaactggaactgttctgcagctag

SEQ ID NO: 6392 - DNA, 644 bp, Zea mays
  Intron number 2 from transcript GRMZM2G147629_T03 (locus G RMZM2G147629) derived from phytozome v7.0 (chr-ID 1; pos 2 21278949 to 221279592)
ggacgaacgccgtcggattcgacctctcacccggggtaagcttggtgttcttccttttttattagcttcgaatcaaattaaacatgtcaaaaaaaaagagatgacggttgttacgaacctggagatgtgatctgcgtgtgtctagctaaatgtttggaatatgatttgtactaattcttctctctctctgtgtttaatcaagtgttcatttagttttagattggagttctgagggtctagggacttcaggatctatttgtttgtaaaccggatcaaagaaaatcatggatttcgtttctttgtggttccttaagtttttctttatcctaaatttagtaattaaatgcattgttataactggctggtgagtctggtaatgtcttctatttttcatcaattcatgttaaaaaccatcaagctgcaactgcaaaaattgcctcaaggcctaccatcactcttcttttgttccacctgtcccccatcatttgccaaattaattataaacttactactctaccctttaaattcaacgcttgagagtaatgacattgtattcttctaacaagttatctagactagtcttgtctatcttaccttttattttgcctttgtaattttaccttcaggcttcgtttgcccgtcac

SEQ ID NO: 6393 - DNA, 553 bp, Zea mays
  Intron number 4 from transcript GRMZM2G150024_T03 (locus G RMZM2G150024) derived from phytozome v7.0 (chr-ID 4; pos 1 24638471 to 124639023 reverse strand)
gaccgcctagggaatctattgaagctgcgtttcctgtaagattcattttgtttaccagttactagcaccctcatatattgttttactagctgtttttaatgcttagacagttttcagtttttttttaaatttgtttgtttttttacttttgatatctatgtcaagaatggtctatgtactttgtaaccagaaaaataagaggaacttgtgatgctgcatttgttaatttctgtgacacgttggtatttgattaagtttgttgttttcctttttgatagatggagttgggtgtttgtttggcctcctttctcttactcttaccttgcttattctatatttttggcagttgtagtgttgaattgtaatttatcagcaaaactcatggtgtctgtggaaaaagaaaatcattgccatttttctttttattagtgtcttctgtgcccttatattttggtaaagtcacaaatatctatttgttctgtgcctatttgcaatgatagacgtcttaacaacaacagcttggttggtcccattcctgtagccttgaccaata

SEQ ID NO: 6394 - DNA, 967 bp, Zea mays
  Intron number 5 from transcript GRMZM2G005887_T02 (locus G RMZM2G005887) derived from phytozome v7.0 (chr-ID 1; pos 1 77028410 to 177029376)
acgcagaggagaaagggctgattactccaggcgtggtgggtaactgaacctttaggagcatattctttgtcgttcctgtcctagggaaatagattgggctctcgatttgcccaatgcccactgccttatattatattcaactggaacgctaattttgtatagcctaatccagaagcatgagctggctgccattttcatcctcaagcatcacgcttgcatgagaaagttatctaatgtggttgtctgggtctccatatcaggcggttgtttcgggattattagtttattctgcattgctttgtacctagtagtgtcttcatggagcagatgcttcatttaaaagtgtttgctctgatctgttcaactgttagatagagtacaacggacatcactaacatagtgctttgaacctttgtttaatggagtatatatattttaatttttaagtacaagaagcaagcttgctttatatattttcttagaggaaggcaaatcgatttcttccttctccatttcggttgcaattataacctacagttgttggatagctcttcccccatcctacagcagcatacagctcctagttctcgatgaagaatccaattgttattattatcctgcatcggaaatgacctagcggccattgtgcctaacctggtattgttaactcccatcttagaaaaaaaacattttgaattgttctggcacaaaacagaagcctttttgtttggcttgataggtggtggtagaatgacctgctagagtgtcttatctagttttgaccatctatgagattaaaaattattgtttttctatacatggtgtaaccaagtctctatagcagtttcagcaagggagttaagtaataaatttcagaatgttcatattagagagtagtactaatatttcgttttccatttcaattttgccagagtgttctgattgaaccaactagcggcaacacagg

SEQ ID NO: 6395 - DNA, 772 bp, Zea mays
  Intron number 2 from transcript GRMZM2G566688_T01 (locus G RMZM2G566688) derived from phytozome v7.0 (chr-ID 1; pos 6 0597641 to 60598412 reverse strand)
tgacagaattgtgagcttgaaggacaaggtaggttttcccgtgtatgactgacctcatgtagtgattaattcttatttacaaatggtagtattgattcaggatttttttataactataagctcaattggatattattagtctgccttattgatctcccatatatcatagtgtcttggtcattgtactgtggtataacattaaagtgaggctcaattgtctcactgctttaaactttttgtcccatttgacttggtttggaataccctgtgcccttgttttatttggcttaatacaatacaacttggaagcaaagaactaaaggcatccaactaaagttcagtttcttaaatatatcatccctaggttctggtgttgaatatttgtcagaacatctgttccctgtgccaatacaatcaactggactgctataagagctgttcctgtagcagtagtgcccttgtctcatgttttcagtatctcactaggattagtcagatataatggtggatttagttaccaaatcttttctgtgttaatttgttcagaggtagctgtattcatgtgcagtttttgtggtctttgttctttaaatctgaattttgcaaagtattgttttcactatattgtgttatctgaacatcaaatatacatgattgcttgtggttcaagttactcaaatactttagtagcgtgtgttttgtctgaatcctatggaccggcctccctcccggccgcgcggggctcgtcctggtggagcccaaggcgcgcgtc

SEQ ID NO: 6396 - DNA, 866 bp, Zea mays
  Intron number 3 from transcript GRMZM2G150251_T03 (locus G RMZM2G150251) derived from phytozome v7.0 (chr-ID 4; pos 2 39794672 to 239795537 reverse strand)
cattgggatcatttaaaaccggagccattctcttggtaagtgttttctcaatgattgcttgatttggcctgaacactatatacttctattttctgctataacttctaagaacacatcatcactatttcaatcacaaacctgtccttattttattatctctgcactatcataatcaccactgaaacattataatattatatctatggtttattacggatcatctggtcttaatatatctttacttcatttgtctatgaaaggagctatctcttatgcactatagctaaaagtattgcttgttgtttgtatgtggatttaaatgtgtacaatttcttattcttgtcaaattgtattgagcaacaagtattgcttgatgtgggtttttttagcatgcactttgtcatatacttctttagcaagcattgaattgtgatcatattatatcatgaatattataatatggaacctgtgtctcatgtataattgattaatactccctccgtcccaaaatagtagtcgttttagctctagatttttatgtccatattcatatggatgattatgaatctagacatatatatagaacacacacattaattattgtattaatccagtaaaaaggtaaaacaaattttaatttgggacggagggagtagttctgaagtaattggggctgggtccttgcactttgactgcagtatttgactatttctgaaaataatggttacaaccatttcatcagttatgactgagttgatttcttctacttgtttcaacattgtgccagtgaatcattctctgttcattattacatgcatatgtgaatgcaattgtccttttccatttccagggtggactttttgtgt

SEQ ID NO: 6397 - DNA, 610 bp, Zea mays
  Intron number 1 from transcript GRMZM2G150251_T03 (locus G RMZM2G150251) derived from phytozome v7.0 (chr-ID 4; pos 2 39795772 to 239796381 reverse strand)
taatctcattgtctggcgtgctccacttttccactgtatgatcccaactcccctttctttggtgcttagtcttgttgattcagttatgcagatcttgaaatattactacacatgtttttaagtactgttgtacattcaaaaaacatgtggtgactggtgactaagagtcgatatattattttgtgtactgaatgaactcgatttttccaccattgattctttcaatgctactgacaaagtgatatttctccttgtggatatggaagcttccattttttgtgaaattagaaaatctaaatactgcatgaaagtatattctttgtttacagcatatatatggacatggaagcttccatttctccttctgaaatagatgtattgcaacatttcgagtacaatggctgtcattgtgttaactgttcatacgacctttgcatttgatattgacttcttatgagtcttagactcttaatttataacaagtacaaggagtattggatctaactatcccagtagcttccctttacaatctttattcttgaagatggtttaagtccatgggttttttatttcagcactctcggtggagttcacaaagtcccagattgtt

SEQ ID NO: 6398 - DNA, 544 bp, Zea mays
  Intron number 1 from transcript GRMZM2G383408_T02 (locus G RMZM2G383408) derived from phytozome v7.0 (chr-ID 1; pos 2 48733417 to 248733960)
ggtacctctctctccttccctccctccctctctcttgatggaatgtcccctggagtatttctaccttcctgtggtgccgtactgccgtgcctatgccggctgctgcttcgtcttccctgccgccgtccgtgaacggttgcggcgccacacctcgtcgccgtctcctcctccgtgacctttcttctcggcgatgctgctgtagggctcggttcggttctgtgactctgaccccttcttggcccttggaaccaacaacggccgcttgcaaaacccatgatggtttcattccagttccactccttttccttaactaatcccttcacacctttctcccctttattaattattattattacatgtacttcttttggctaaaaaaagatgagattttgattaatccccgcgcatgtttttttttttgtttttcatctctgtttcttgctgtatttacgccgtaccatggcgctgatgaattggtttccatgtgattgtgccggctgtgggcgcagacgaaggctacgggcctacttgggacagcgacgac

SEQ ID NO: 6399 - DNA, 739 bp, Zea mays
  Intron number 1 from transcript GRMZM2G453424_T03 (locus G RMZM2G453424) derived from phytozome v7.0 (chr-ID 4; pos 1 62904461 to 162905199)
agttgtgctttcagattctgactctgactctgaaggtaacagcacattcagttctcatgatacactgcctgtcattctataactcttgagacgctccagtatccgtttattgcatatatttatgattgaactcttgacattttgggcatgtcatgtaagacatgttcgcttttctcttgcatggcatttgttacatgaaaaaaggcctctaggacattcaggataggaaaacgtacctcatgttatcataacgaacatttatttttggtgttagtcatttctttgcaatgcctattggcttttcttggcaggcttcatacacttgatatattaatagagaaaaatcgttggcagatgaatatataacatttttcatttttaactgtcattgttttatctaattgcattgtactgcatttccactgtctaagttgaacactgatatcactttgattgcaaattctgctacaaactacttttgaatcatgattggcaggtgtgctgtgtgcatcagcttccaggtggtaataactggactggacatatgatgtacttgatcttcagtattttgttaagagcaaactaagggactcattgcatgaataaaatcctaaactctataatatagccgaatgtaactgcacatgaatagcttgatacatgcttgaaacctgcagtactcatgttgcgctgcctgtttctaggttttgtagaagagctaactcctgttcactcaaag

SEQ ID NO: 6400 - DNA, 767 bp, Zea mays
  Intron number 2 from transcript GRMZM5G837626_T01 (locus G RMZM5G837626) derived from phytozome v7.0 (chr-ID 4; pos 2 15267127 to 215267893)
tgctcaggctacaattgctctggaagcattacaaggtgaaacttcttatatatgtggatatggactgtgtagttgtgttgatttcctgattctttgctttgttgactttaaattttgcatgtatatgtttgttaaattctatcatgcatgttgcatgtctatagtttgtcgtgaagcttgttttggaattggtaaattcttgttcattccgcatctaacttaatgcgtgtggtaatagtttttgaattagttcatatattagttatagcaggaagctgggtaaacccatctattattcaaagcactgaggcaagtggcaacaccactcagcatttcctaacaagctaatattttcgtgcatttaataggactggtgagtcatgaatttttgcgctttgcttcctattcaagtgcacattatgccctttctaatacattacatctaggaattgttaccaagttgagaaactcatgaccagagtatggaacctaggcgttcttaggttctacactttgagcttgctttgtgtcagcatccctgccaatttaagaagatttgcattagcattctgatctactggatctaagatttgtatttccatcttgatctgcatgggggagtaggcctttggttgaaggcaaaaaacacaactcttcctattcttattacggtccgatctcttgttcacgcgacgacctgagcaatataaaccatcacgattcgttttgcaggttataagtttgacgaacacgagcgtgattcagcc

SEQ ID NO: 6401 - DNA, 932 bp, Zea mays
  Intron number 4 from transcript GRMZM2G380897_T01 (locus G RMZM2G380897) derived from phytozome v7.0 (chr-ID 4; pos 1 42876278 to 142877209)
tggagcgaaaagatacttgcccagtttgtgaccaggttagtactgaaatcagtatcgcctctaatatattgtattagacatgggtgttttttccctttgctatcatttactgtatatacaaggagatccattctttctttttaaaaggtaacctttttatcaagcattcaagcttaataaaaacttagtaaactcatgtagaatgagaacacacggacttcatctatgtggctctgttatgggaggtgtttaattacaacatgtatattgttttttttcagttcaaatcactaggttagatactgttgcttttgcgcaaattattgcttgaagacatggtttcccttttttgctgtaagtagcctgtattattgcagattactttggtggatgagatgtttgaataggcttggtaaccctggtggatcatcactcgaagctgttcgttactgagaaagtgcaggcagcaactaatttacttttgatattggtctattccgggtggctcgcatggtaatgaattgagggggcaaaaattgaaaggatgaatgtaatgaattgagggggcatttcatttcgtgatgcttatgcagtcatgcagctaataaggctattcacaatgagagtttgtttttagtcgagctttatataatgatgatgatggacatcttccagcaaaaaaatagtagttcatctaaaccaagaactagtcaatctataccagcggcattgtgctatagggtgtggataagagtgggtggattccatcaaatgcacacctgtgtttttttcatttcaactcagatcttactatatatttttacaccctaggatgaacagaaacgttgttgattgatttctcctttattgtgcaattgtgctaaggtttactaattttacatgttgttcatgcctgctttggtacgcagaat

SEQ ID NO: 6402 - DNA, 367 bp, Zea mays
  Intron number 4 from transcript GRMZM2G312301_T01 (locus G RMZM2G312301) derived from phytozome v7.0 (chr-ID 4; pos 2 40751949 to 240752315 reverse strand)
gaaaaagaagatagaactcatcattgatcaggtgtagtataagtctaggatttacttgtttttaaaattttacagaattttctcaaatttgtttttacaaattttatgcagtagctataaacataaataatctgaataaagctagactttcaacaccaataatatttcttttcaaccacagagttaggatgtgcttaattagatcctctgcctatctcatattcttaaaacaaaaacaatcgagcaataacaatgaaccactatccattaccgtatctgaactaatttgattaaaacaaattgcaatgtgctagttactttttattgaacttttttcctttttgcatttttgcagcaacaagactct

SEQ ID NO: 6403 - DNA, 918 bp, Zea mays
  Intron number 1 from transcript GRMZM2G113373_T01 (locus G RMZM2G113373) derived from phytozome v7.0 (chr-ID 4; pos 9 850523 to 9851440)
ctcttgttcttgctcccgcgtcccctgcatttcaggtcagaagcgcaaaatttcttgctgcatttgaattatgaacttcgtttctcccctgcgctattttggttccacatgactgtgtgccttctctgctctgtactacggtgtgattctgtttgcagacactctttttttttctttctaatttcccttctttttccgccttgtttttaagttcatatgctctgagagtcttctcgctgcaaatctgagttgcttccgttttcgggcactcatagtttcctatatctccaaaggtgctttaaatcagtgtcctaaataggacgcaattcataaaaaacagctctaatagtaccttattttacaaaattttataaaaaataatacggtataccatgaaataactcaaatatattacacctagattagtgtcatatccatgttttctaggtcattctcaaacttttctttctaataatgtaatttatttcctaaactctattttttccccgtttagctgcatttctttcgttttgaagcctgctgcgtttcatggcaggtttcactgcaatccttgcttgcaagctcagatttgtttttatttgttgccaatttcttttgccaagtccctcgcatgggtttttgcaaaccacaggtttcaaacttgaaatttgcagtacaatctgccctgccacacctgctgtttccttgtttcatcctacgttcgatctgaagcactggttctgccgtccagcatccaatgtgttttttttctaataataagacaaggacacgagtcagttcactgacatattttattgtacttctattgttattatacgttttgctacatccaaattgggctgaaaattgtaatctttagcaggaaactgatatcggggagcaagcaaggcaaggttt

SEQ ID NO: 6404 - DNA, 918 bp, Zea mays
  Intron number 2 from transcript GRMZM2G027595_T01 (locus G RMZM2G027595) derived from phytozome v7.0 (chr-ID 1; pos 5 6597278 to 56598195)
cgttcagtgacccagttataatcgagctgattctggttagcatttccttcgtgtccaccatacgttataagtacttgattgtgtatatggaaagctaccatgaccatatggatcggtataaagcttactgtcttgtgaggttttggattagacttttgactgcattatgatagaaaacaaaaacaaatttcagttttggggattgaaatttgttgctatttttaactacatttccttgctactgataagggtgtagcatcagagtttgtgaagtggagggatgacgtcgttctctgcagcaagccagtgccatcatcgattaggagctttgaactcatgtacaattagtatagcgtctacagtgcaggtccattgtttgaactccataagatttaccttcctgacaacccacaagtacatgggtgtatccttcttaatataatgagaatgaagttttttgcgaatagctcaagtagaggaaatggctcgtgctgacaagttgagattccagccagaggtattacaaatgttcccttgttaatgctaacatgtcaaatcacatttcatctaacttcaaatgtgtgtaatatgtacttactctagaacaacctattctgttagtgattaaacccttgcattttcactagatctgtatctatcaattgcatgtattctttgacttgagaatcttcacattttgagctttgtttaggtaaatgtaacctggttcaaaatccgtgcgattacaggagtttcaactcattgtacttgccgtttaggccttggcctaagctacacacatgttatcaagtagagtttcttagtctatgttgcaatgcaagtgacttatataatgatcaattaacacattttcttgtgagtagtgagcatgtttagttgtgtttgtagattcaaatc

SEQ ID NO: 6405 - DNA, 750 bp, Zea mays
  Intron number 3 from transcript GRMZM5G892742_T02 (locus G RMZM5G892742) derived from phytozome v7.0 (chr-ID 4; pos 1 8691371 to 18692120 reverse strand)
gattccacattcagatattattgaaaagtgctcaggtactgtgtatttttctttcagtgccctctgattttcctttaatgagagaattagatttgtaccactattttaattatggttatgatatttgacattgctttcgtaatatttggattcatgacactaatgtgtaaaacctgttattatgtgtacaccactatcacacccatggcaagactgtaacaagttttgccactaaatttgatcagcagtggcattaatgaacagcatgagtctcaatattacaaaaagggcaatggaaaatatcagacaacgtaattaacacagtggcactaaccttacttttcctttaatatattaaatgcattcatatagcaacttaatttgcttatgtaggcttacagcatctgttcctgcattttgaatgttcctatgatggaaatacctttcagttcatgtcctcacatatgatgccataataactaacatgggtgcattcggccatacccctacttgctgatattgtgctatcttttgccaccaacaggccataagaacatatgcatgctactaatcttaacattgtttttaagttagggacacctagctaagtgtccttttttcacattgcaccttagaaagtaccttcttcataattttgttgctatgtatttatagtcattttaattttaacatggtagctattagttgtttattttttttgacagattgtgagggtcgtggagagaaacc

SEQ ID NO: 6406 - DNA, 925 bp, Zea mays
  Intron number 2 from transcript GRMZM2G146786_T02 (locus G RMZM2G146786) derived from phytozome v7.0 (chr-ID 4; pos 1 46058434 to 146059358)
gttgcaaaggttagaccgaatcgtcatgcaacgtctgttccggcttactgttttgttgtactgcatacatgtatgctcgttttaggattttttctggattaaatgtaggtgttaagcaatatagtcatttcgaaattttaattagccatccagctacctacttctgtcaaaaatgttgcgctggtgtttcttccttgggggtgggggatggcaatggtactatcaacaagttatctatgcattaggaggtaattactatttagtgttgttgtctgctgataactaagttatgtgcaagtctcacagtgaataatttggattgttgaatggatctacatgctaggttgaacctgatttcatgtactgtttattttattttcatttttacaaggactagtggagaagttagataaggcaggggcacggtggcagtagattcgagttgtttttactgagcccaactttcagaatgttaacgaggctgttaagaaccaatttgaattgtgacaaaaaatgcagcttgcaactgtagttagtttgttggctttatgcagtgagaataggcctagaccttttggatctaagagacaatgttgtgtctcagcgaaccatccatgcatttgagcaatttgtgatttctaaatgcttcgtagatgtttctgttttagacatgcatcctagaaatacatttcggttgactttgtggtgaaaagatttaggctgcagtcctgcagcattcttcagaacaatgctattttgttggtaaaataacatttttcgttggttttagtcacacgaggatgccttgcttttacttaaatgcttgatcaaatgactaagcatttccaataggtatcagtgtacaatgttcttataacatgccctgacagggattttggttctctactcggtggttgataccaac

SEQ ID NO: 6407 - DNA, 900 bp, Zea mays
  Intron number 1 from transcript GRMZM2G355229_T01 (locus G RMZM2G355229) derived from phytozome v7.0 (chr-ID 4; pos 9 4941581 to 94942480 reverse strand)
gagtggtcagcacgacggcggtggtcttcccttcaataaccgtgtagagatagattggatctcggtgtatgtgtttttcaagaggtgtacaaggaacacttgttcacgtgtgtgcttcttacctagttaatatacacagtgtggtatatactgcaatagttctttatggccctctggcagtctgtaaaggagagggtgagctagaggggaaggcattgctactggccttaacttctttgtacgtctgatggacgatttattggggaagcaatttaaagtcaacttgtagattttaacaaagctggaaactgcatatataatatgtgcaagctaaaaacatatatatgtgtggccttagtttgtgtcaacatcctatttgtaaagaaatcaaatcatactgttacatgcatgacctcaatagtctgtacttcaagagcttcaactgatcaggtactttatagaacataccatgtagctgcacaactaaatgatttatcatggcatccctttcaagatggagaatgcgtgtgctgtgctggattaaattaggcatgcacatttaattcaaaatcaagtatactcgaagaacatgaagttttctaaggatgtatgtgttttcactttattttgttggatttttgtattcttacgagtagtgcttggtgacaaaatcgtgtacatattcctagcttttccctaactataacatttaccttcatttgttgttaaatacacttggtgcagataacttacataaggatagtggtcagccataatattttggaatatcatcttccttttagaaacagtctacgcaaacaggtctacgcataatctaaaatccttttttgtttattatttgcagaaactgaaggaaaagccggaattcacgaacccgga

SEQ ID NO: 6408 - DNA, 781 bp, Zea mays
  Intron number 1 from transcript GRMZM5G811730_T01 (locus G RMZM5G811730) derived from phytozome v7.0 (chr-ID 1; pos 2 57631223 to 257632003)
ttggtcaggtaaattttcagttaggacacccatttgatgtaacaacaaccagacgatactggaggcaggcaaaccagcttcttactgggctactcttgttacagcttcttactgggctactcgttacaaccgatgatttagccatggaacattaactaacttactaggatgtggagaaatataaatatttacacacggaaagctatacctgtaccaacacagcaccagcagcatcaccaacaagggcgaggccgaattagttacctctaggaagttcttcataaatttcttgtccagtgggctactcttgttggggttcggcctcgcccttgttgccacaagcacctggctgcttctggaccagacacttccttggtgtacccatcctaattaataaggagatgtctttgctaccattcaacataaaaaaagaaaactcactacactaagctaacaaaggatttgatatcttttatcatgttgttttctaatatttgtgatatatgctatttaatcttgtatggtctaatagagacgtatagagtgggtttttattcacatatttgtgatatatgctatttaatccttttcattttcatattgtgtgtctctttataatgatgtttttatctctactataagattaatggcactggacttaatcaaagtatagagaactgaaactcatagcagtagcactggcactggcattgacacacttaatcacttcacagttcacaatgtttatttttgcttgaaggtggtctgttttttgccaagc

SEQ ID NO: 6409 - DNA, 960 bp, Zea mays
  Intron number 1 from transcript GRMZM2G107196_T02 (locus G RMZM2G107196) derived from phytozome v7.0 (chr-ID 1; pos 6 4005228 to 64006187)
ccttcggcctctccaccaagcccgccatcctcaaggttgttttcgtttcttgtcttcttcttcctcgccagtcgtcatatctccatgtgaattcggtgcttgggcggccggtcaattttattatatgttcgctctcaattcgttgcggggggcggtttccttgcccgtgtcttccgcttgattgaaaaatttgggggttcggacttcggcgatgttcttcggttcaattagcgtcatttctcatctgcgcatcttattttttttgtctcgtctttcgcgagcaatacgccacctgtttatctcctaggatgttcacaatattataataattctatgatacagtgctctgcacttatatttatattataataatgtggctgctccattttatatcggttgccagttcttgcattattggggaagaataagtgaataacatggacgatggccgctattattgtggacatggttccaataatctattggttatcctgaagtacctgcctttgcaacattttgagcctgatatatttgtaaactataaaatgttgtatcagtgctgttaacatggtggttgtcatgtcattttttatctctccgtttcactaaaatacaccatcaaaccattcttttcaatttgaaccagcttcttttgaatactaattgtcagtttagctcttgtagctgcaccatagctatatgctagtataatgaggaacttgggaacgttcttacctcccaaaattttcttgtagtttcatttggtcgaatatttgtctaaacctgttggcttctcgaacatttcactttgagaatcagaagcgcctaaattcgcatgttgcaagttttttaacgtggtattaacagatttcaacaaactagcaaattctagtatgtgaaagcagccatttacaatactaatttttgctttatttgcctctgcaaaggtgaaagattggt

SEQ ID NO: 6410 - DNA, 1028 bp, Zea mays
  Intron number 1 from transcript GRMZM2G015976_T01 (locus G RMZM2G015976) derived from phytozome v7.0 (chr-ID 4; pos 2 1671592 to 21672619 reverse strand)
gccttcgccttcggcctcctcggtattttttttacatttccttatttcactgtaagtgcgcttctcatcgggaaaagggtctcccctatagctaggatatacatataaaacataattttatttattcttcattattgggtcggaaggagaagtagatatatttttttttacagaaagcagggaatgagatatatatatataggacatatatgctatggtgccctgtccattatttagggcagaaagagggggaaaagaagaaaagaaaaaaggaggatatatatatatatatatttgcatgcctttgctgcctctgattaggggtggacacttttttaccataaacagaaaaccgaaccgaaatttcgatttttcgttagttcggttcggttttggtttttgtatctaagaagttcggttttcggcatcgtaatcggttttcaccgtataccgaaccgaaataccaaaaaaaccgaataccaaactttatcaattctcaaatttgactattagattatgtgaactaaatgtgtgatacaattaaattattattcacttatttgtatgtgatgtatgatgtatctctaaatatttgtgcctatataatttttatttttaaaaattatgtgtaatctatcatgtaaacttgttatatgtattgtcttaagtataagtttggtatttggtttttaccgaaaaaccaaagtaaaaaaccgaaaccgaatttctcggtttttcattttctagaaaaccgaacggtttctaatgtacgaagaaccgaagttttataaaaccgaaaaccgaaccgaagtttagaaaaaaaccgaatgcccagccctgatggtgtggcgtgacatcacaaagcgtcgtcgtcatcgaaattgattgaaggagatagttgcattgcatgtgtcatgctcatgcacagagctcgagctccccagctgaattctatctgacgcctctcgctcctttttcttttgtttggcggtttgctgtttgtgtttgcaggcaacatcatctccttc

SEQ ID NO: 6411 - DNA, 659 bp, Zea mays
  Intron number 2 from transcript GRMZM2G152984_T01 (locus G RMZM2G152984) derived from phytozome v7.0 (chr-ID 4; pos 2 23935795 to 223936453 reverse strand)
agcaatttcctttagcacgaaacagtgagcatttgtggtcatgttctgttacttgatcacaaatgtttttagttctttacattgtaggttgctagaaatgaaatgttcatgtaattcttcagtacacaaaactggttctgaaaaagaaaatttccaacaatttatcccagagaaaaataatagccatttggaagagactgcaagcctagactagctgttgtaacattgtatgtatctactgtatttaagatgaactggctgcattttggtgcacgagctaatcattttgtctgatcaacttcactaagtgcttctggactagacttgattattttattctagttagctttatcatttgcttttctaaaagctacatagtacatattttagtgactaacaaaataatgatacccttctttggtttattgtagcatatgttagtactccctccgttcttttttatttgtcgtgttttagttcaaaaataaactagcgggcgacaaatattcgagaacggaggtagtatttactacagtgtatcaataatcatgtggttttgtacaaacattgcttcaattcactttctttatacactctacctccttagtccttaccctgtcttttcccacacaggacttccaagattttcaagagtaaaa

SEQ ID NO: 6412 - DNA, 755 bp, Zea mays
  Intron number 3 from transcript AC194670.2_FGT001 (locus A C194670.2_FG001) derived from phytozome v7.0 (chr-ID 4; po s 206486079 to 206486833 reverse strand)
accagtcctccattaaggtgctcaagatgagttggtggtggtgtgtccgcttaatatttttttccattttaaacactgcattgcatccatcttagtgttgataacccttgcatttgattcattcgtagtgatgataagagtattcaaatcctaattttgtaggagtagttcgtgtgttgtgcccactgcccaagtgcccagcacctggtgcaaacaacaaactaaattttggatcctaatggttggctgtttgtcaaaattaactcaacatggaacatgaatacttgtagctagttaggtcaatatggaacatgaatacttctatattttaaaattcatattacttgggaaactaattgatctaccattttttaggaactattgaagatgctctcacttacctttaatgacagtaacacataagaatattcatttcagagaaatatctgtaggtatacaacacgatagttttacatacattttactgcacaaaatcaatagttgtttaatcataagtctgaagtaacagactagcaggtataaattgcttttcgttatgctcatgctgtcatgctaccatggaactatgtatctatcacactagtgcactgttgtttcttactgtgaactaagtatttgtaatctatctcattggagtctatttacatggaaattttatatccgccagctatttgttggaagtaactgtcactaacatgttgtgcagattttacctacttttatttctgcactta

SEQ ID NO: 6413 - DNA, 1006 bp, Zea mays
  Intron number 1 from transcript GRMZM2G075655_T02 (locus G RMZM2G075655) derived from phytozome v7.0 (chr-ID 4; pos 4 1956394 to 41957399)
gctggagcagctccgggcgaagatctccgccttaggtcagtgcccaaggtttgaatccacgtggcgcgcttgattttactgtctggatgttttggcctgggacgggttggtggtggaatcgtcgagttcatgccgcgcagctaggttaatttgtgccgtttcactggattgacgccggtccggtgagctctccggggtttagggcccgattcgttgcggcgaggcgcggtttcgcggtggttggtgagctacctggatctgtcttgttggggttttagcttctgcctgcttctagtcgtctggatggtgcgcgcgcgacagtgctcgattgatcgtgtagctggcggggtgctgcgagattgtattcgattctctcgtgctgatatcgaccgtgggttgcataattctccctttttggtataaaattggataattctatctttttgaggcaactgcttattttagggccaaccccccccccccccccccccaaagcttcctcttctgtttacatagtagctttgtttctgattgccgttaacacaaaagctacaaaagttcacatatacctctactgttacaattacgtcagtgggcggtgggccagtgtgtaattgcagctgttgtgcctttgccatggatgctgatccactgccataatgcttggggtcctgcttcattgatgtgtactagaatcgagtagctggggaagtctagcaatattaattgcagtaaaacagtaaattctctgaagatgcctgtactattgaagaatgtaaactcaaactatgccacggcatggaaatagtagtatcttgtcatcgtgatatcattcctgtgatcctgtcataagcaaagcaatttcctttacttcgccactttgtgattctttattagcctaccagattcattctaattttgatatcccacgggccacgggaaccattattgtgtttgttttcttgctacagagtcagacatagcagtgcgatctctcgaactgaag

SEQ ID NO: 6414 - DNA, 1032 bp, Zea mays
  Intron number 1 from transcript GRMZM2G118693_T01 (locus G RMZM2G118693) derived from phytozome v7.0 (chr-ID 4; pos 1 55836475 to 155837506 reverse strand)
caggagcacgacaagttcctcgaggccctgcagctgtaagcaggagcaacccctgacatgggttccatttattttgattgatgcggttcacaggcctaaagcgtcgggctttgtggtgttttctgtctttttgatgcgttaattatgtcgttgtggatttttactttttaatgtcttgagaatttttctaaaggtatgaagcagtcgtaataaataatcggtgcagctgtttcttcacttatttgggattttgctatcatttgttgtaactcgatttcttctcgtttatggtttcaatctagaactttacaattaatcgagggtttcctagtcctttttaggtccaacatagggaaacaaattatgtgttgaggcagttcagctactgtgattcacaagctgaatatggagtacaggtaaaataggatgaattcaatttgcagaatttggaatttgaaatgatgaagaaattgtgctctttgctttactggtgctaccattaggctttttttgttgggattcaactaggacttgattagtttaacaccccgtttggatcattggaattgaattccattctaataatagtaatttagtcatatatcaattatgctaattcggttttatgcaaatatatctatataatatttatgtgctaaatttttactatagaggattctctgcttagtagtattttgattgtaagcattaacttggtcctgattgtacatctgaatccattgatgtctttgaccatcatgatttgttgtgcatgatgccattctcttggtcccaaactcctatagccccatgtgtccacactagcactatctctgcacaactttctttttcggtgtgtacgatgccagccttttgcatatggttgtgacattcgctgttcttgaatccatacactgtcccaaaaaattgtcactgaaatataagaccacatcttgcatgtaatattcatgtgtaaactattttcttttcttttcagctttgaccgtgactggaagaagatagaggcttttg

SEQ ID NO: 6415 - DNA, 285 bp, Zea mays
  Intron number 1 from transcript GRMZM2G460594_T01 (locus G RMZM2G460594) derived from phytozome v7.0 (chr-ID 1; pos 2 74983495 to 274983779)
tcatcaaggccggggccgacgacttcacccccaaggtaacacactgacgcactgacgccactctgtttcgttcttgtcgagaagacagacaggcggctacattcttgaatcaaaaaaataataaaaaagaaacagagaaggggatagttgggcggtgtagtttgaggtttgagcggctctgataaatgattattccttcaaagaagactcggtgatcattttctgataacctctgtacctgtgtttgcagcctctgtccaaggagaagctcgtccgtatccttac

SEQ ID NO: 6416 - DNA, 688 bp, Zea mays
  Intron number 1 from transcript GRMZM2G035395_T01 (locus G RMZM2G035395) derived from phytozome v7.0 (chr-ID 8; pos 4 3067714 to 43068401)
tctggagcacatgtaagttgttttcgaccgaactgagtttaggttacatattgactttcactctgaagtcacattacctcttgagttgttcatttgagtttgagtcttacaaattggctcacatatcttgtaatctttgatatttaattgataaaattatttggaagtccactactatacaaccatggtatagattttcccatgctagttcaagtttctaatttttaatttcagtatggtgacgtgtactgtgtttatagtactgcagtattgcacatctctaccatttgccacctagggtacaatctgttgaacggttctgttgctaattatgcgatgtgaaattataaaacattatggattgcttgtctcttctaggctacccattcgtcattccttccactttgcttatctctgaactctgatggatagtttgccattgttgttttttcttcctaatataaggatacccagctctactgtatgtttgagaaaagaagcggccattgttttttttgtaactttcgtggtggtagatcatggtcatttttcagcatcttgtgttgaaatgttgaaatctgttacaaatatttgaaactcacagattcttctgacctgatttagctgcaataagtctttattactttctgcagagagacgtaattattgagattttctacgaaaggca

SEQ ID NO: 6417 - DNA, 671 bp, Zea mays
  Intron number 1 from transcript GRMZM2G465907_T01 (locus G RMZM2G465907) derived from phytozome v7.0 (chr-ID 1; pos 1 68426710 to 168427380 reverse strand)
ttgggtaggttttttccggctcgatcacgaacgcatcgcctcgtcgcattggctaacccgccggcgcccgccgcctcctctccttcgcactcgcgcatccgccgctgcctgctgtcttctcccctcgcgcacgccccttatagatcgtcgtcgttaggcccgtcgatggccaagtgccatctgggcaatggcacagggcccccaaagttaacagggcctccaaaatccaaatacttaaagcccatggccattagctaattctgctactttgcttacagccttacacgagaaggcccaaccagttggcagctgcagcctgcaagtgccgctcggccagtccgccagatgcccataggctagaatccagatgcatcgtatgccaattgccaacaccagagggcaccgcgcgaacagccgaacaccagaggctagagcgccgccattgacgacaggatcaggattcaggaacgtcgcgaggacctcctgagttttgaagacctgaacaaaatacaagcgaacaggttcgtctctattgagtattgaacaatctacttcgtaccatagggattaggattatgtatccaactaattattttttggtttgtgccatagggattaggattatgtatccaactaatttttttttggtttgtaccatagggattaggatc

SEQ ID NO: 6418 - DNA, 639 bp, Zea mays
  Intron number 1 from transcript GRMZM5G823306_T01 (locus G RMZM5G823306) derived from phytozome v7.0 (chr-ID 1; pos 2 02591979 to 202592617)
ggtgaacctagagtggtcatccgaggaaagaaggtacagtgggaacatattttctaatagaagaaatgctttgatgcctttttcatttgcttatgttaatgttacccaaaaccaaactcaattcatatctgtagtactatattcttgttacgatatctaatatgcatcaagcttgtgtatagaaaaattaagtaggagtactgtatcaaagatgcctagatacatggtcatgataactttgtgttaattaatatgcctgctaaactctgttagtttattgcatttgcaagcttcgtgtcctagggttcttgaggtggttggcgaccacaggaatgttcttaaatgagcaaccttttcatgcaatcaagaatcagaagtctgtgttggtttacatcttttctgaaagtgatttactgttttatacttgagtaactttgtcctatgatatgagatatccaaattcatctaataattagtttttttgagatgagttggtcctacaagggtccgtaactgtattgtatgctcttgcacccacatatatctaataagtgagtctgagcagtgacatagtccattggtaccatgggctgtatggatataggtcactgcattgctgatagtgaggagcagaaagtt

SEQ ID NO: 6419 - DNA, 971 bp, Zea mays
  Intron number 2 from transcript GRMZM2G031169_T01 (locus G RMZM2G031169) derived from phytozome v7.0 (chr-ID 1; pos 1 99736463 to 199737433 reverse strand)
tccggcggtcctttgacccttttgctccgtggaaggtttgtatctggttaatttgtacaaactggttcatgcttctttcttgttcatggctttgattagttttttcaggtgttatacgactaaaactatgaaatgtggagagtgttcttgccagaatcgattgaaatgtttgtgtctgacgtttgggctagggtacacattgggcaaaagccttggcgacggtgttgcctgtgggagctactttccctgttggagtgtcgtgcttattcccctatagcattgtcttccaagggtcaaaaccacggttcacttttaaatcgaagtttcaattcatgtcacatgaaattctcagtattcccttgtcagggaagttttaaacattgttggtacttaagatgatctaagttcacctgtacccactaattttgcctcagtgctagttttctagaccttggttcttgcattgagtactactcatggtgttgccatccctaatccatcttttcatccacgattgtggtggctgtggcttaaattaatactggtaatccaacaatgctttttgtgtagctgagctgattggtcaactggtctagttttttattacctccgttctcgaatatttattgctcactagtttatttttgaactaaaatgtgacaaataaaaaagaacggatggagtatttatttaggcaagtttaaaaaagttgtggcagagagagcctatcaaattatattaactactcagtgtttggtaaatttcctcttgatgtttctatatttggtatatttagtgaacaatcagtccatgggcttgcaactaatagtctaatagctttaaggatccaatcatattaccggcaaatggttgaatgcggatagatactcctttcgtttcacaaatgacagccgtgatacaattttgtgattgcaggtagacaactttggcacagtgaacctggttgaagc

SEQ ID NO: 6420 - DNA, 569 bp, Zea mays
  Intron number 1 from transcript GRMZM2G343175_T01 (locus G RMZM2G343175) derived from phytozome v7.0 (chr-ID 1; pos 1 94540927 to 194541495 reverse strand)
ctgtccctacgtaagttcctgtctaagcacgtcaatctggaagaagaaaacaagtttccttctatagcattatgaacctgaaggtcgtgtcatgcttgttattctgcaaccaataattcagctgcctccctgaagtagagctaatcaatctgaactagcaatcgggcacacacaaagacaccctaaaacagcggatggtttctttagtgattgtgaaacaggtttttgggtagcatgtagggctggtaatggatcacgatccaaatattttttacaaactgttagggtcctaaactaattttagttcaaaaatgaatagaaatagagtatgttcttgtaactttatagaaacaactttatagtgatagttttttacgtggtttggttgattgcaagactaataagtatcaattatttgatattgaatatttgcgttttgtctccttcaaataagtaacttatgctttgactgtgttacgatagtaaactaggctttattcacatatctctactattctatatagtcaaagcaaggtggcagaaggaccagtgttgatattggtaaatca

SEQ ID NO: 6421 - DNA, 838 bp, Zea mays
  Intron number 1 from transcript AC185504.4_FGT008 (locus A C185504.4_FG008) derived from phytozome v7.0 (chr-ID 4; po s 164035471 to 164036308)
gagagttggattatagttgggtttaaagtataacccatcgatatctctttctatctagtgacaaaagaaaacaggtttttgtccatgcgaattcagggttgtagtagtggaaaacacataccattgctaatttttggttaaacatgtgcatttgctgtgtaaaagccactctgcactgtccaaataggtgattaatgcaacttttaggatagcacatgtgtagctgttcagtagcaggtgtagttgtctacacgtaatttttgtagttgtatcctatgtgctaggataataaatccaatgttatttgttatgaagatacaatccctttcatgactaagtacttttagatctgcttcccgcttgttggatagttgggtatatgatgttcagtggcaggtgtaggtttatgtccttgattgtagatggattaagtagctatctgttcaaaaaaaatagtacatatatattgatacattttagtatacatatattttaaaataatatgatgacatggtccaacaatggaaccctgatgttgatggagctttgagaactttgcaatggcagtacatgttctgccatttttagattagaaaagctaagcaaaataatatttgatctgaaagagagaaataaatcctagcaaatttgactatgggagaagggatataggaacaaaaatggaatatgggagagggaacaaactcatcggcctatgcgccttgattagaatgtctcctaaaagttttagttattgaaaatatgacagtacatttattgtaatatgtttattttctaaaatattaattttgatgtatagaatattgacaggatcttc

SEQ ID NO: 6422 - DNA, 884 bp, Zea mays
  Intron number 2 from transcript AC185504.4_FGT008 (locus A C185504.4_FG008) derived from phytozome v7.0 (chr-ID 4; po s 164036312 to 164037195)
tcagtttcccttcccaagtaagaatagaacaatgcacttgttctgcccgtaaggtggttgtgtgataagtcaatttactccagtgcttgaagcttgcatatctcactaggaatctccctagataatttgttcatcataagaatgaggaactcatgtttttgcaggttagagatatccggtggcaatggtccaatcaaagaattgttggacagatcaacaatcctgagacccgattgagatgaaagaagtattgattccattgaatgggtgctctgtaatgaaatatttctagaaaatttatttctagaaagatttaacacagtcaaagttggtgacatgaagaaagtaggcaacacaattccctcgagtgtgttatgactgagatcaagggcagataacttttggtaggtacctaacaccgaagggagagaccctgacaataaattgttctgtaatttcagtgacattaagttctgaaactaggaggcatcatttgggtagcttcccatcaattcgtttgagctcaaggcaatgacctcaacaatgcctgagacacatcctccaatatattgcttttagtccaaaataactaactattgtttaataatatacttttgcaggattaacatttcccactttaggagttcctgcttgcacattatttgagtaatgtttccaatagtcttgcactcttgcttttctgatattttcatgtttgtgctattaggaacacgagccagtgaccttttctgtgtttggagaagcacgagggcttcaaaacactgtagtttcttatggaagacatttaattatatttttaggttgatgcttgtgcccatcccttcttagattagctgggggaccccaaggtttggttgctgagt

SEQ ID NO: 6423 - DNA, 821 bp, Zea mays
  Intron number 2 from transcript GRMZM2G109627_T01 (locus G RMZM2G109627) derived from phytozome v7.0 (chr-ID 8; pos 7 036892 to 7037712)
agggtacgcgcgcacgccactgcacctccacagtcgtcgtcactgcctagctagctcgatcgtactcgtagcgtggactccgagagatccgaatccgatcgacgatccttcaaatctccatgcacaaaaccagtttatccaaaaactaacgactagctagctagctacaaactgtatccaaagctaactataaattgcgagaaggaagaagaaaaaaacaagaacagaacagaaaaacacttcgtgcatatgcgcgtgtctgtcttcttgcttttggttttagatctggcgtacgtaattactcgattagttttgagttttgagaggaggacagccgtgcaaaattgattctgtctttattatatggttgatgacgataggagagctagcctgcacccgcatataactaggaatctttttttttctttttttccctgttacttttgaaagttttcttcctcctgttgcttgtgtgtggatgccagtttaagcaagttcccggggtcaatgaaccactgcgtttctttaaccccttctctccttgatagagagagacgtcaactcgctcggctcgaccgagatatacacagcgaccagattaactgatccatcccaattcccatccgtgtgccaattattggcgtgttgatcgcgcgcactggtcactttcgctcccgagctaattagcttccagtcaatgacacgtgttcggcgtacgtcacgagatcgaaagctagctagctcgagccatcactgacacctactgttggtcgacaacacccgcagctggacgactgggtgctgtgcaggatctacaagaa

SEQ ID NO: 6424 - DNA, 990 bp, Zea mays
  Intron number 2 from transcript GRMZM5G829297_T01 (locus G RMZM5G829297) derived from phytozome v7.0 (chr-ID 8; pos 1 72123258 to 172124247)
aagacaccgtggaagatcgtattcttgctctccaggtaaagtttgaagtttttcttggctgagttatctgcatttgttattcatcagcaggcattgagcttcagtttggattctggcaagaatctggtcaaaaacggcctgtcacggtgtgtttggtttggtttttggctttggcttttgtcctctaaaagccaaaagccaaacaaagggctagatccaggaagtagctttttataaaaagctgactttctcgtagtgcaaaattgaaagcctcctttgaccttcgaaaaacttttaacggcttttagtggttttcaccaagccgtttttagttttttaacagctcacagcttacaacagctttttccacagctcacagccaacaacatcttttttcacagccacagcccaaccaaacgtaccctatccaaaactttactagaggccaatactgtgatactgttagaggagtgtgaacataaggtctcttagtagttactccctcagtcccaaaaacagatgcaattttaaaatagtgctatgtaaactatgtcaaatttgaccaaatttatataaaaaacctaataatatattgtttcgatgtcataaatattaatatttttacctatatatttggtgaaactttagtcaacttaactgagaatacacctagaattgcattcttttttgcaacggagttggtgtgaataccattattctgtataagtttttctctggtgatttttagatagcaagcaggtttttttaattgacataaactggaactatgattcagaatatgcttcacctgaatactataaaaacataggtactggattcttctaaatttccaacacatgattattgtcttcaataccacttatttacgtgtaaactcactcttaattttgttggtagtaacaactttgtaatctacaagctcttgatgcttacctaagctgtacaatatgtcaggagaaaaagcgggag

SEQ ID NO: 6425 - DNA, 966 bp, Zea mays
  Intron number 2 from transcript GRMZM2G041050_T03 (locus G RMZM2G041050) derived from phytozome v7.0 (chr-ID 1; pos 1 62586172 to 162587137)
agagggagtgagggaaaaggcgagagcgtagaaaggtgagagcttttttcttttcttttttcatccgattgctcctcgcactcgcacagtcgcgcatcttttccgcccccacctcaatctctctggattctctcgaagtttcttccttttcgagaggtgggagagaagagacgcccgcagcggcacgagcttctgaattcctgtttttttgttcctggttttttgcttttgtttctgttcttgttcttgtgtgcgggtttggtttggtttccgtgcgccttttctctttattctagtgcgccgatgacgtgaggcgccgggttttcaatacttgcatccttttcgctgcatttgtttagcgggagttcttcgaacaagcagcgctgccgctgcttgcgcgaatctttggagtgaagctccccgtcacatcagtcctcttcttccccggtcgtcgtcctatgcttgtccctgtctcggcaattctgggatactaaagaggaatcggtgaaggtccggtcttcgattccccgagatttgcatctgaatcttcttcttcttcttctcttttgcctccatggagtctcttgctgcgtgccactccatcgagcgagtctagcgcgcgcgacacagtagcagcagcaaaggtgaactcttgcgtcctttttgctgagcaatcttcggaaaacatgttcccagtttccccccctttctcgatgaatgaggaagaaaaggtggcaagctttgagtgctgctctcgccatcggtttctttgctggtttctcccccctcgcgaatcgcttgaaattacagcatctttttatttgccgttactacgccaccctgaaatccgagtgattaataggaagcttccaggaaagaggtggagcttcttaggtttataattcgattcctctttctctcgttgcagcagtccggtcggagaagcggaagttcgcgttgctttgc

SEQ ID NO: 6426 - DNA, 1017 bp, Zea mays
  Intron number 1 from transcript AC210612.4_FGT004 (locus A C210612.4_FG004) derived from phytozome v7.0 (chr-ID 1; po s 145860681 to 145861697)
tcaggcgcgtaagcgacgacgttcaactcgaaggcatggaagctcagcgtcggacatccccaatgatggcagactgtcgatcgcttcagttaatagctcacagactccacatggcattctcccaccatgcattatgggttggagtaacatgctggcagcgaccgaagatgacttaaggactgatgttgtgttaaccatcattagcgacagtgagattgctcttgcagagattgttgctcttcttgctccacgcttggatgttcccaagacatctcttgttatccgcaggatgtcatcttccagcctcttgttgatcctccctgatattgcattgatagagcttctcatcactcgttggtcagttatcagagcaacttctttctctgtattttgcaaacgttggtcgagacttttgggcgcttcgggagtctccttgccataccttgttgaatttgagactgctgggacccctgttcatgcttgggaaactagtactatggagcatctgcttaacccatttgcttctattcatcaagtgcaccaggatacttcggcgttgcaagatatgtcatgcttcaagtgttctacgtggtgttctggtccatctgccattcctaatatgcgagacctgtggattattcagcctatttaggttgtcgagggcggcgttggagaaactgtagctctgagctaccatgttaccttttgtttctccattgccttccgatcgaacaactctgatccacattctaggcctcctggtgttcacctaggcgatgatgctgaagataatgatcgtcataattcttcttagaaggttttgattaggggtgtagaaactaatgcccccaccttggaggagagtaaaccctcccaggggcgttctcacaatgtacatctaggtccatttcagaaacttgctcattccgaatgcagatctgatgaagttcttctgatttagtgtcaacctgactccttgcagtgccctgtatctgagtgggagacaagggtggagtc

SEQ ID NO: 6427 - DNA, 1020 bp, Zea mays
  Intron number 1 from transcript GRMZM2G123776_T01 (locus G RMZM2G123776) derived from phytozome v7.0 (chr-ID 1; pos 7 0516290 to 70517309)
accgggactttctcgtccgcaactccggcgagcaggtcagtcagcctccgcacttgtttttgtctcgaggtctttttaccccgtccgcgtggtagattcgccatctcgcgctgctggcctgattgcgtcttgtttgtttgtcctttggcttttgattagacgatccgattatgaagtacgcggatattggggagggggtgtgggtcggctaccgggtgtagttattatcgtcgaagtactactaggtggtagatgatgaattgatgagtattgagtaagggagtggagactggagagagggagggaggaagggggtttactacattagcttcgactttactgtgtaggcctagtgctattttagggagagatcgagggggtagtggttacaaattagcaggtttaactagtctacggtttgttaaggctattttctatttttgtcttatataggatccttgttctctttttgaacatcttatctaggggtgaaatctgagatgatacttgaattttgtaataatagccctacagtgttgccaacgtttgtaccacaagtagggatagtaatggatcatgattcaaatgtttcttcataatattttaaagccttaataaatttatttaaaaaatgaataggaatatagagtccgatcttaatccgatttgaaccttaaattttataaaatgttatagtataaattttaaactcgttaccaaccctagccacaagatttgtggggtgggaagagatgggacattgtttagaacctactatcattatctattctgaaatcatagttgcctagtttgattccataactgcctatgaaggtttagaaaaagttccctatatagacatgtggaaggtagacatgcatgacatttttcttatagacataacaaaaacgaattagcatcttgctattctgaaccagaatttggtagctcaacagctgtgtcatcaccatttgttatcctgcaggtgaagatcagcagcattgaggcaagccctgtggc

SEQ ID NO: 6428 - DNA, 522 bp, Zea mays
  Intron number 1 from transcript GRMZM2G002499_T01 (locus G RMZM2G002499) derived from phytozome v7.0 (chr-ID 1; pos 2 64718904 to 264719425)
cggaattccaggtatactataattcattgtaacactccatgtaccttaagctggtttcatttatttatagttttcttgactgaacaaatcatgacgaatgacaaaatactactgctatgaccaccttaattatcagtgctattcagtattcacaccgctaaaaatcttactcgataatttgaaaatggtatcacagccaacttatgcagttgatccaaaattggcaagaaaaaaggtcacaatcaaaatataggtaatgtaatgtaagagtgaaaatatagcagaattgacaagaaaaagtggttcatccaagctctagaaactttttcccttttatttatgctatcatcctttcaggtttgcatttgcctaagctggaactggaatcttgggttgatgtcctttacattctatgttgttagttttattctatcagcaattgggcattgaataactggttgcttacctttagcttctgacttcgttttttttctcattggccagatagtgatctgttgcagt

SEQ ID NO: 6429 - DNA, 1045 bp, Zea mays
  Intron number 1 from transcript AC212231.3_FGT003 (locus A C212231.3_FG003) derived from phytozome v7.0 (chr-ID 1; po s 73101089 to 73102133 reverse strand)
tcattaaaaaccctactctgccacatacttacgaggtacacgtactctcgcattattcccatgtacagtatatattacacgtacgtacgtcgtaatatatataacagtatatattcccatgtacagtacatacttattcggttattactatctcatatggattcggttattttcatatatagaacatttgtttctctatctgagctctcgtttgaaaaattccaatttcaaaagtgagaaatccaaacataattttgttagatatatagatggctttaaaagaaaaggttgccaataactataaattcgttttgagatccataacttttgtgttaatcgtttctctatgtatccgagattgatagtatgacatatatatatatatcactactacacacttagggggtgtttggttttagggactaatctttagtctcttcatttttattctattttagttctaaattgctaaatatggaaactaaaatatagttttagtttctgtatttggtaatttaggtactaaaatggtataaaatagagggactaaaaattagtccctctaaccaaacacccccttaattgtgtactactatgacactatactgtcggttcatgcatgactctagaaccggttgtgagataagcaccaaaactgacgagtccaatacatatcactgctaattgtctgtgtcgcgcgctgcggctgaatcttaagcaaactgacagtgatttttgccagcacgatggtcaattaattgtgtagcaattaatggtctatacgtactctatacgcagggtcagagctttaatttccggagaatatagctagtgccaacaaatacacatatgcatggaaatagctaagaatgacgttcttgtaaatagttctagatgtctacaaagacgtgatgtcttgcgagagacaaaattaaagctgctggctgttaattgataatgcgtactcgtaaacagttctaccagatctttaaatttccttattattaaagccgaacagaaagccgcgcgtacagagtgccacgtc

SEQ ID NO: 6430 - DNA, 813 bp, Zea mays
  Intron number 2 from transcript GRMZM2G063729_T01 (locus G RMZM2G063729) derived from phytozome v7.0 (chr-ID 8; pos 1 46602756 to 146603568 reverse strand)
caacgtttgggctcattgctacgacgagttggctggtaaattttcactgtgtcaagtagaatccatctatttagcattagtatatgctataactaatccctgtgtttcaaattacagttcagtttagggggtgtttggatacctggactaaagtttagaccgggttttggatgccaattagtaggatcaaacatgagctaagtataaaactaattgcatagccagtggctaattcgcgagagaatctgttaagcctaattaatccatgattagcacatgtttactgtacaaaacatggactaatcattgattaattaggcataatatatttgtctcgcgaattagccatgtgtaatgcagttagttttataatataataattagcttatgtttagtccttctaattggcattcaaaacccagactaaactttagttctggggatccaaacacccccttagatttgtcctaactcaaatgtccctaactgaaaaactattaacgtccaccagttcaaataaattcactatcaagacatatttaatcaaaaaaataatgagactaatttcatgttgtagatgttgatacattttttctcttgtaagaattagttttgtggcatgtttctcttactaagttaactacattttctattgtccaatgagttctattgcttttcactttggagaacctacaaatgtgcttatgattcttctcaatgtatgccatttgatgtgttgccaacatgttagttaaatggatgccacctatttacctctaaaatccttcaggtttaaataaggatttcaggaag

SEQ ID NO: 6431 - DNA, 700 bp, Zea mays
  Intron number 2 from transcript GRMZM2G011364_T03 (locus G RMZM2G011364) derived from phytozome v7.0 (chr-ID 4; pos 5 703526 to 5704225)
gcgtgttctgtgccttccccaacggctgcaggcatgcactctcgtacccttggatcatatctttggagcctgtaccctgcattgtgtttgctcctgtagcctgcctaatgtattggttggatctgaattctgatatgcacaaatgatcagaatgtggtacatatgcccccttcattcattgtgtagaggcaatggtgaagataacacctaatatggaatcttgctagtaacaagtgacatggcctgaagcgaaggtatctgcaaattgttttgtatatagcggtatagcctaagccatgctgttcaagaaaatagcttatctaatgttgattcttgctagtaaaggtaatgttttgggcgtgtttgattatttcctgtttccctaggagttaaatcacttatcttctggtttttgcggtataacttgaagcatactttgggttttcttagttgctagtatagatgtgtttgtggttcagaaagtatcagctgcaaaatgtaccttatatgctttcccttcatcttatactctacagaagatactggggtcttatttcgtattcatttcatgcaaacagtaaataattaaacttggttgaaaagtttaattttcatagttttaactaggaaaacactcatgtaggttgtatcgatgggaatcacaggaaggagagggaccacagaggttggctttggagcc

SEQ ID NO: 6432 - DNA, 913 bp, Zea mays
  Intron number 1 from transcript GRMZM5G800064_T01 (locus G RMZM5G800064) derived from phytozome v7.0 (chr-ID 4; pos 2 5209361 to 25210273)
ctgtggttgcctctcttgaacacttcttgtccaaggtgaatgccttttgttctctcttgaatcccaacaggatattgcctcaaattgtgtatgctgcccactgagtcatgatgcatcagtggaagagttcaaaagtctcatcctttcggatttcagactatgtaaccaaacatgcatctgtagccaattcaattttactctgggtcctcttatatatgtcttgaggatcacacataaattgttctttcttgccaggccacattcaataatcgttccttttttcttataacttgaggataacaatcattctgcatccaaaagaaatttgtattactatgcttccagtatcttggattaccatcgtactatgacttgcatatcaaagtgttttacttatctaaaatgtgaaaaaaatgattttgtagtatggtttggaccatagtcacagtttctgggtcgacatggtcaaggggccgtggaacatggcttgttacttattggaggtttttgcacttcgggtaaaaaatgaatccgtgaatctgggtctgggtcgatgaacctggtcaaaggataaaatgcattgaacccgttttatgtgactgggttggaccaaagctgtgcttccattgtgacattggaactactaagcttatgcaaatggtgcactttgtcattttactgatgctatgatcatttttttagttctgttggtcttgtttaggatttggttgcagtatagatagttctggtgatcattttcccagcgttttagtaaagtgtattatcacattatttgaaatgataaaattctgttgtataggaatatcactatttaatctcatgattcatcactaaaaaatttctcatgttctcaacagcatcttctggtagttgttcctgttgttggcatact

SEQ ID NO: 6433 - DNA, 1022 bp, Zea mays
  Intron number 1 from transcript GRMZM2G118917_T02 (locus G RMZM2G118917) derived from phytozome v7.0 (chr-ID 1; pos 2 38325829 to 238326850)
gcactcgggtcgtgcacccattggttagtgtttctctgcacatttttttgttaatctcacttctcacatcaaagcaatgccactttgttaacatatgattctcatccactgagtcacaaataatccttgggcttactgtttctattttgtgttcgatatgactaatttgtcgttgatgttcgcgttctcgttcaccacactcacgttgaagttgaacgctttgaacacagaatgaacaccgctaattggtgctgcaaaaagcgcagcttttctggttctaccttctcttttattcgatgattacagaattttgagcgtttgtttcgctgccatcccagcgcccttcacacccacgagtgcgcgccacgcacaagccgcacgccgtcctgggcgccgactctgtccagcctcctgctcgagcgctgaacctctaactgaatgcatgcacagctaactgctaactgacaaatggaaatatgcagcagcaacactagattacccaacataatttcaagacagattaaagatgaactgctaactgacaaatggaaatatgcaacagcaacactagattacccaacataatttaaagacagattaaagatgaagagaagcacttttctgtttggtagcatgtacggggatcaatgggatttacatgtgtctagtgatggatcatatgaaaatgcgtatcatccgtatagttgagaagcaatgcaacattagtacgaatcaattatgctttggttttatggaaatcctttggatttcaaaatagtgtgtgtgttttttttttgtgtgcggatcactcaattccattcttggcgacttgataggatgcaaatttcactcatgcagaaaatctcttcagcatggcatcataattttagcatcagcactagagaagtatatgctgttgtccatgttctgcatttatatatcaaatatacaaaacaatttatctgcatgcatgccctgtttttgcaggaaaaactccctgttgaacaaataatcagcagaaa

SEQ ID NO: 6434 - DNA, 932 bp, Zea mays
  Intron number 1 from transcript GRMZM2G028926_T01 (locus G RMZM2G028926) derived from phytozome v7.0 (chr-ID 1; pos 2 85975588 to 285976519)
catcgattttggtctctccattttctttcaccctggtgagtttcattcattcaaaaaaataaaaaaaaatccttacatatcgacgcgaatttgtatttttgtacctcgtcccccccccccctttgacctgatccagatttattatgttctctcatcgcatcaacgtttggtcaacaatatcagcattatgtgatgcaatgcaatgcttctcagtatctgccaaagcagttactattcagtgatctatctacatgtttgaattgccagtgctgtttgataaccctgtttcagtaagttacagataaaatggcatctgctactcaatttaccgattagatcttcaccagaattagaatacagaggattttgccattcattagcagtgatagcctgataggtggttagtagagatgaaaatgggtatcggaataaaagcagatatgtataaaattcgatgctaacctttttttttgttagcagacacatttttataagtaagaataaaatattgtatagattttttatacattatttgcttattaaaacaaaaaattgaaaaaatatccgtattcgtatctaaattatatatctattattaacttttatgaatatttacaaacttaatgttaaaaataagaatatgaatttgcataaccgatcctatatcctatttatgcatagtcaaacaaaaaagaccacaaaactggtatacgaatacgtattcgtcttcatccttagtggttagttgatactacactatgtttttatcccctgaagtactggcgaaagtctgatccttgccagtaaatgccaacagttgagacatgcagctgcataccttcacttgtctgcaactctgcattccatccttgtgatcatccattcatcctacttcaggtcaaatattcaccgacgtggtgggtagcccttac

SEQ ID NO: 6435 - DNA, 893 bp, Zea mays
  Intron number 1 from transcript GRMZM2G090454_T01 (locus G RMZM2G090454) derived from phytozome v7.0 (chr-ID 4; pos 7 0761011 to 70761903 reverse strand)
aagctagtttatccatgtcaacttctgtacaactttacatccacaagctacatttgcctgaaagaaccatggagtaaaaaaaggaagagaggctttgatttcctctaaagcatgcaacaaccaacatcttatcttctagctatatgtcaactgtatcaaaattgtggaaccatgtaacaaaataacataaacataagtaatcttctcacgtaaaaacagataaagatcaagcctcaaattagtcttgtgtgctcacttgcagtgaagtcaaaagtcacaatataagttagaaaaaaatcacataaacacagtccatttttgcaatcacattaaaggcctctatcttttacagataacaaaaggctagattggaggcattaaaagggacatgctcataatagtacaatggtacagtagcataaataatgtcatctaaactgacacatacctttccataagaacgtgggtttaccgtcgaacttaatgtaataagtcgtcgaacttaccgtaagaacgtgggtttaccgacgaatatagccgacatcgatttttggacgaacttagagaagtaagttcgacggccctgtcgaacttaacattaagaacgtgggtaccgtcgaacttaacattaagaacgtgggtaccgtcgaacttaacattaagaacgtgcgtttttaagttcgacgggggccgtcgaattttttcccataagttcgtgggtacccaagttcttacggttaagttcgacggggccacgtggtcgtcgaacttatgtgtcctgcgtgggtctgcgaggactgtacattaagttcgacggtacccacgttcttaacattaagaacatgggtacccacgttcttaacccttttccagaaaaaataaaaaatatagaa

SEQ ID NO: 6436 - DNA, 778 bp, Zea mays
  Intron number 2 from transcript GRMZM2G002492_T04 (locus G RMZM2G002492) derived from phytozome v7.0 (chr-ID 1; pos 2 3938387 to 23939164)
aatcagccccctccacatgtatgtatgctgatgaattggtctcctttttctgctattcttgcaccttttgcctcttatttatagtataggtttagactgattttaggagagacttctatctagtcaatggaagaaacatcatagaaaaaaatatacacttgttaacccatgtctttcttttattttaagtgtacttcttgatgaggtttctatgagttgcacatttcttataacctttgctaaaagtttatttgacatttgtgatcaccttagctgaaaatccagaagtttccagctctgtcagatttcaaagtatgacaacaatagcaaccgttttcattaatgcaaaaccctgaaattgtctgctgagtctgatatatatagtggaatctgcactaagttagtttataatagaggcttcctgctcagccatatcctcatttttcatgtgtttgcttgacaactgagagttggaatttgtgaggtaatattatggtacattagcaaaatgaatgatgtgatgaggcaaccgtagaattatcagttgttgtcatgcaaccccagaatggcactgttgcatgttgacatcgtatttttttctcgaaagcgcaggagaactgcgcctcataatgtattaagaagaggtaaaaatggattgcattaagtttaggatctgaatatctctaacgtttctgtatatcatggatatatatttccataatccttaatgcattctgtaagagagcatgacaattgtattttctctctgtacgtgcag

SEQ ID NO: 6437 - DNA, 494 bp, Zea mays
  Intron number 2 from transcript GRMZM2G035552_T01 (locus G RMZM2G035552) derived from phytozome v7.0 (chr-ID 1; pos 3 3879850 to 33880343)
gcacgttcgatacggacggcgatcacgcccagcaggtgatgcttcttttctttccaggcgtttctttctcgattgatccccctagattttttccccctcccggagaaataggtcggtgatgccttgatttttgtcgcgatgatctgggtcgccattaccgaattccccgtcatctggagtttcataagttaactgcctgcgttaggcgcgttggacctttctgtcaaaattgttctctcgcttttactccacttttacctttttgaattgctttgattgtgattctcgtgtgtacgcttgatgttaacccagacttttgttcatgaaaatatcccttcactgaatctgctgttgtggtgctgcaaattgatttgagacactaccgatgcacgcttgttatcgcgacagtatgattaactggagctaatctgacatgctgtttgcttggcttgcctgcaggagttctacatcaggcggttggacgggcggccaat

SEQ ID NO: 6438 - DNA, 512 bp, Zea mays
  Intron number 3 from transcript GRMZM2G061662_T03 (locus G RMZM2G061662) derived from phytozome v7.0 (chr-ID 1; pos 2 93150497 to 293151008)
ttgtcggtggagttgcttcccaagaagtgattaaggtatgtgggccctgtatacaacattccctgcaatcctgaatactccttcgatccacatgatttagtcgctgtcaactttgaccggttataccggatgcttcataagattttacaacataaaattaaagttactaaattcatcgtaacttgaactaccataatatgtaattattttagtttaaaacaatttaattatatatatatatattattgatcaaagttaaaatagtttgacttaggataaacacaaaacaactaaatcatgtggaaggagcgagatacataattccaagacttcacacaatattgaagaaaatggaagaaatgtgttttgaattcctaggatggtatatacctggacaccagtgggaatgttcctgcatttgaaatggaaaatctattactgtacttatcaatgctcgtttcccttcttatcttccagctggtcaccaagcagtttgtgccgttgccgggaac

SEQ ID NO: 6439 - DNA, 904 bp, Zea mays
  Intron number 2 from transcript GRMZM2G011721_T01 (locus G RMZM2G011721) derived from phytozome v7.0 (chr-ID 4; pos 2 09221013 to 209221916 reverse strand)
gaggtgttcaccaacagccaaatttgattcaggttttctcactgtcttttgtaagatgacagtcgaatcgaatttgatcgaatatgtacgtcagttttagtttgatttaggtttcccttttgaacatatcaattcctctgaatcgaatttcagtctccaatccagaagatttcatgtgtttttaatgtgatttaggtgagcattggaggcatgtgtatttccttgcatatgcatcgaaatattttggtccttgaatttcattagattagaatacttgctactctttgatcatctgatgctcagaagcaagttccttatagattgttcctcttcgcttgtttatatgcctccagttttgttgtggtggagtgtgattccgatcccataatgctgtagaaaaagaatatgttaccatgatttctgcatgtcctgtttttttatgagccattgtcacttcggaaatggaagctgcttttatggtcatttcattacatgtttattttttatgatattatgacacattgttgtttttcaagtaaaactaatttgttttaaatttgttcacgagactattcttcctgttgtatccatatcttgagttcttgacatacatgtaatgttagctaagagtgctacttgtgcggttgtgcctttcattctttatgcttatttttttgtgcataagtagcaattttaagactgatatattgttttatatttctaggacaagactctggtaaggaaaagattgatatcaagcaacaacactcgtgtcaaggcagagtctggcacctgttaacgatgatgagtttagtgcaacctcatatcatgctttgtatctgtaactggtagaaacaaagttgttgcaacatcatccattgccgatgatttgtcagaggttgac

SEQ ID NO: 6440 - DNA, 999 bp, Zea mays
  Intron number 4 from transcript GRMZM2G149175_T05 (locus G RMZM2G149175) derived from phytozome v7.0 (chr-ID 8; pos 1 51500809 to 151501807)
gaaggaaatctaacatctggaaaaaggcaagttgctgatgaacttatgatgctttgatttccttgctatatgattgttctatgatatttaggccctgtttggttcctttagtcactagactaaattttagtgactaaagtttagttgctaaagtaacctgtttggttccagtaactaaaccgaactaaagagcattaattgctgtgaataatgactgttttacccctattaattaatggatgtttgctataagaagaaagttgagagggcaaataaggtaaaaatactactttagtcccttttagtcaccccttggtgactaaagaactaaagtttagtcaccccattttagtcaccatgtttgcttttttagggactaaaagtgactaaaatttagtcactaaactttagtcacccctaaccaaacggggccttacttatttaggcaacaagcataaggaattattgatcgtacgtggcactataaccttaactattgtctattaactgtttttagtccgtttgatacgtaccaatgcattttctttcagtaaatattgtgttcacaagcactggcaaagatatttggccaataactgtacaagaaatgtagatatgggcacaggaataccatatcttttgtcagcagtccattttgcttggaagttatgagctgcttcattcttaaaaggctaacatggtttagaattgtgattgaattgatgatctttaagcacaaaataagtgtacacatgttgcacttacaccacatgtgcatgtttttcagcaaagttatacagtcaacaactatgatagctgtacaaataattaaggaattcttctttctgatgatcctgttgcatgtcaactctacaatgtgttctgccatgttcagcagactttcaacaaactctagtattttgaagtagaaattgctaattttctaggagatgatattaactgtttcccctggttttttagattggtggacttgctgct

SEQ ID NO: 6441 - DNA, 608 bp, Zea mays
  Intron number 2 from transcript GRMZM2G110574_T02 (locus G RMZM2G110574) derived from phytozome v7.0 (chr-ID 1; pos 1 21028120 to 121028727)
tgtctttgattgtgcttctgtttacaggtagttttgtcagttcacagtaccctgctccactctgatgaaaattgtattactcttctttaaaatatggtgtttgctttgctcaagaccatatcctagaagtacacatttgcttatgctttagaaaatcaatcagtgcttcatgtatttgattgtgctggtacttggcataaaaggatagtgctatttggtagctaatctcaaaggagtatcaaaaaacaagtgattaaacagcaaaaacaatatagtaatataagcacaacctggcattcctctttcatagaagttcttattttcatgtgtaagttttgtatcattgtcgtgcgttataaaccatgcttttccaaactcagtcctatggctttctgagaactatcatgtccttgaattgttgatcagagagggtagcttgatagtaccaatgtcttatcaccgttaaactattgttatatagaatacaaagaacaattttcttctacattatgtacaactaactactttctttagatactactaacgcatatagtttgaattatttattccactattatggtctctttttttgtagaaaactggtagag

SEQ ID NO: 6442 - DNA, 885 bp, Zea mays
  Intron number 4 from transcript GRMZM2G138632_T01 (locus G RMZM2G138632) derived from phytozome v7.0 (chr-ID 4; pos 1 33927022 to 133927906 reverse strand)
tttccagctagggtatgtggctcaactgcaaacaatatttttcacagtttgtgtaggtggttcatacggttgaactatgttatcattgatttattttacaaaaccatgaccccatttctgtatgactgtcagtcccatacaagctcataattaagcaaacgggatttgttattattaagaatgatatattagaatgagaaaagtatgtgttacttgattgtgcatttccccttgttaactgatacagttgtcactagtccgctccagtaccttacagttttgagttttgacaaaactatgtttgtgaggtagcattctgggaattatgaatctggctctctacttgcaacatttgcttattataataagtatattctgaaattgacagtacttctaaataatcaggccatttctggatattggaaatttctctatgcccaaagtactgaaggaagctggctatgtatgaatatgtattgtccaattgttggtttgttttaggaagaaaaacaggtctcccatgtagcttatttatggtcaataaaaatcatgaaagcatgagtagaagttcaaaaacagttggctcatgttattttcttagccatcttctcatctgtctgtgcctatgcatttgaattatgccatgctcttgattcatcatttacacgaacaaaatgaattggcatccagtcatttgatttgctcttgttatacatatagctatgctcttgttatacatcgaagcaaatagcagcatattactagaaagatgatgttctagaccacatcattttttaccttttcctctctattctcccatgcactgccggactgtcatatgagaaacatcattcatgcctcttttatgatttcaggaggttttat

SEQ ID NO: 6443 - DNA, 1034 bp, Zea mays
  Intron number 3 from transcript GRMZM2G061624_T02 (locus G RMZM2G061624) derived from phytozome v7.0 (chr-ID 1; pos 6 1451990 to 61453023 reverse strand)
cttacggtacttcacactgacaccaatacgttgatttaaatttctgttgtttttactgtagtttgtttctgcatagataaaagtctatggcgtagaaacttctgtatatatttgtagtgtgtgtttaccgacttttatctatttgttgcatgtatattttactgttgtttgcttcttcaaaggtagaagttcatttttctatcctgtcttggaaacttttgcacatttgtcagatattgatgtagtgtgactgtttatcgacatctacatatttgtcacatatatacgatgaagatgctgaacatggtacacacttgttggacgagaaatgattaggtgctgatcataatacacacctaaaacacgactagagggagaaacgtgcaccctcattttttataggtagaatttgagaatgaaacctgggtacaaactgagcgatagctagtggtggggctggtcgtggtcatgccctctgaccggggttcggaactctggtattgcaaaagatccccatgctttgctccctggcttggggctgtggtgtgctgccggcctaggtaacagtgagctgcactggccttggtaacggtcagcacaagttcagtttggccctataaatgggcatgtgtcagggtttgaggggttttctcaactgggctcatatggccccttcttaattataatgctgtgggagcagttctttccccaccggttgataaaatcaaacactggttgactggggtggtcgtacactctcactagccaattcatctcagggagattctcgcttgttcaactgttttttttcttatacaaacacactgcatgtacagatccatcttcatctgttttcgatgaaaggccatgctgttttaaggcgtgagtcatttcagattggttcttggtttgctacattttctcactgtttgaagcgcaataaagaaacacagctgttacaaaatcacttccatgatctgctataatcgtctcgtgcaggtattcagctgctttggccagtacttctgcctaca

SEQ ID NO: 6444 - DNA, 677 bp, Zea mays
  Intron number 3 from transcript GRMZM2G110198_T04 (locus G RMZM2G110198) derived from phytozome v7.0 (chr-ID 1; pos 1 15406202 to 115406878)
tgcagggacaatatagtggcatcagaacaaaggaggtactatatcttaaactctatgatttcttcataataattagatccctcaacttctactgcaacacataaatttatttcatccatttctatacaaggttatttatgtcatactgcaacataaatttatttcatgcatttctgtacaaggttatttatgccatagagttgatcccttgttttctttctaatgagtgcacactgtacattggagaaatatttgaatgttttactctatgcaagtgaggtgtgttatttatttaattgaattgaagtattgaacgagtgctcaccgtgttgaaatattggatagttgcagtatttgttttttaaaaaagtaagtacagggcactgtaatgttgaaattcacatggcatgtccaatagtacattagtttctcctttgctttggtaggtgttttgctgtgagtgatgaaccttcaggagttggctattttatagatcatttttccttgtatggaagatattttcaggtggtaatatgctatgcaaaaatgtcagtttgctcaatggtattcctgactctgaaaggataatgaaacaccatctaattattctatgtttagaattttgtgccagcttgttaattaatactctaccttcggaatctttctcttctacagtc

SEQ ID NO: 6445 - DNA, 474 bp, Zea mays
  Intron number 2 from transcript GRMZM2G153058_T02 (locus G RMZM2G153058) derived from phytozome v7.0 (chr-ID 8; pos 1 43942545 to 143943018 reverse strand)
gggacaataatataaccactggaaagatctatcaggtaagaataatcgataatattttctgtcagaccttgatttgttgtgttgaactgcaaattcgtatatgtatttaatattgtataatcataacttcagtttgttaaatagccatataacgacattcttcgcgatacaaatattgagaagatgaaatagttcacttgatgttggtgttgacgtcttgtgctaaatttaggggtgggggtgggggaggacatccttgttgtctttacgttatttgagtatgttaagaatgtaaggagaaaataactaatcacaagaatatatgtaagaataaatatgtcctatatgagatgttgaaacacacttgctttttcctgcataaagggttgccttatttttttttcttaatttacttatattttttaatggtttatgccagtctgtaattgacaaggagaggaaaggggaatattt

SEQ ID NO: 6446 - DNA, 774 bp, Zea mays
  Intron number 1 from transcript GRMZM2G021760_T01 (locus G RMZM2G021760) derived from phytozome v7.0 (chr-ID 4; pos 1 39817594 to 139818367)
ggacaagctctttgctgcctcgccagctgcttctcgtgagtactccttttttctttcattcttgccttcgcatccaccactcgcgccttgctgtagcttagtcgtacggcatagtttgttgtatgaacaccagaagaagaaggtcatgaacagcaacacgtacaccttcacgaccaccatcttccatatatgctggtttgagtggaaaggatgaataatttgcacggttgcagtgaataccggaggcgagggtcgagtactgtgtatgctgattataaggagctatttaatcattctcatgccctccttcgcaaccacatagaaaggtccatcggtgtattgaagaagcgatttcccatcctcaaagtgggcaccttttatcccatagagactcaggttttgattccatcagcagcagtttcatttcataacatgattagaggtttaaatggtgaagatggatggttggatcaacacccaactaacatcaattctagtcaatttgttgaattaccagaggtagttatatataagcactcaatttctacaacatttttacttgcttaaatctgctatttcagttttttttctagtaaaatctgatatttagttacctctattatttaattgcttaaatctgctatttcaattttgtttctagtaaaatctgccgctatttgagttcagctatttatgtttacataagcaagtgcttcataaacatctaaatccacacctttgttccagttcagcaatgtcttctctttattacag

SEQ ID NO: 6447 - DNA, 719 bp, Zea mays
  Intron number 3 from transcript GRMZM2G006006_T03 (locus G RMZM2G006006) derived from phytozome v7.0 (chr-ID 4; pos 1 69435460 to 169436178)
ggctccattgttgcttttaaagtcagctttcgagagtgagattctcacccgctatagtcacgtttgtgtttctctgttttccatttcgaaggatcagaagtggagtgtgctaatagttcctacggcacatatgatactgtgataggatcagcttagttggactacctgagctgagctgctaaacacatgcttctaatgaaatggctccatgtttctgtaaaaatatacatttgcacatatcttttgattctgtttaactttaatggccttggataatagatgatcatctcctcactttacatcctcaaccaacttgtatttacatgctaaaacgtttgtacctcgtttataaatcctaaactagcacatgaagacgaatcaacactcaataactcggtgtctggattaatggcactcacatttcacaggcaatagatttgatgcttgttgtcaccccatttcttcccttgctctatgtatgtctgattctcagtccaaatgagctgtgccaatgtctgaatattcatgttttttttcttgtttattccactttcaaatgtaatagatcttagttcttgtcttccgtagaagcagggggtttatgaaatcgttgttttttttttctaaaacggaagagctttaacaagttaagcttgaatgacatttgttcttttattgttgcagctttaacccattgaattctttcatttggtttgagc

SEQ ID NO: 6448 - DNA, 871 bp, Zea mays
  Intron number 1 from transcript GRMZM2G090217_T02 (locus G RMZM2G090217) derived from phytozome v7.0 (chr-ID 1; pos 2 51818394 to 251819264 reverse strand)
ctatctgccttcactggagctgtgagaaggctgtaaagggtcttggtggggtggtggaagtttgtgctgagttaatgggcttctagatgggccatgaaatagaagtacatactgttctttttttctttcccttttcatttctttttctttctaacatcttttgacatattataattcaaagaatattggaacctttgagctgtattggggatgtatcatgtgttcctattagtgcccaggacttaattttatgtgcaaatatatatattatcttgtatattcctatctatttaagactatgtttctgtatttcttatttttatgtattattaaggccttgcctcgccttacgctttaacgcttaaaaggtaaaagggggtcggtcgccttaactcgccttaccgccttaataactatggttgccattttaggtggttcttggtgcatgattttccataggtggtactgcaagggttcttaaaaaactcttgctatgttaaagaacaacccgtttacgtatttgattgtttcatcgtcctgttgtatactcatgtttactttttttatgttttgtgaacctcttgattttgttgccatatcaatctaatgaagtaccgggtatgagatgttctcttgattttgttgccattccaatcttatgaatttcttggatatgagaatgttctattctttcgtttacccctgtaattcttagaacaaacatatacagttgagcatttgctttcccatttttgttactgccttgctgaggtcttcaatgtgtatgggtttctcttttctgcttgaagacaatttttcgaacatgtgttcccttcctttttgtaggtgcaaattgttcagcagataaatc

SEQ ID NO: 6449 - DNA, 664 bp, Zea mays
  Intron number 1 from transcript GRMZM2G388892_T02 (locus G RMZM2G388892) derived from phytozome v7.0 (chr-ID 1; pos 2 27734827 to 227735490)
attgaatccatccgccccgtgatcagggaccccaactccagcaacacactaaaaaatatccttcatgcttcaaattcgttttttgtacgcgtaactttgttattaggccttgttcgtttgtatcggattggtgggtcggaacgatttctagctggattgcttctctaatttatataaactttgattagttggaacgattccgggtgcaatccgacgtaaacgaacaaggccgtagtttgatgtttttggcaattgctgcaggtatttgagagatacaagtgtctcatttaagttgctattactagtcagtagacatagcacgacacagcagtttattgcaatttttaagtatttatttggttgctattgctagtttcccctgaaacgattcatgtcatagtgaaatttaaatggactggaattgtttaaaagttaaacttagtttcaatggctcagtctaaaactaccgaaacactttcttgatttttgtttgaccttttttgggtgaagaaactgtattgcattgagaccaaacaacacttgagtactgcttgcaaggaatgttataacggcaaaccctacctgaaacaaattctttttcccttttgttctctctctcttgttcctcttaactattattgtttactaatcctggaaaagggtc

SEQ ID NO: 6450 - DNA, 970 bp, Zea mays
  Intron number 7 from transcript GRMZM2G110622_T03 (locus G RMZM2G110622) derived from phytozome v7.0 (chr-ID 1; pos 2 48113574 to 248114543)
gtccgaagacaactggttagttcatattcataatggtattattgaagaattctttatttataatactattttgattttccattgtccgtagaaggtcttgccataattgactatcagtattatttgagtttaaatgcttataaattctgttttcgatcttgaatgggatgtggctggtactattctccttctgaaatcaagcttgtgacaacataattatcgcattggtatctttgtatgatactcccgttcataaatatatgacaccattgacttttttgaaatctttgtccactcgtcttattcaaaaaataatgagttataatttattttgttgtattttgttttatcacttaaggtagtctgtggttgacttaaaattttacatttttgaataaatattttgaataagagtggtcaaaggtttcaaaaaaagtcaacagtgtcatatttatgaacagatgtagtagtttgcagttttcatcactaaacattggcaaacaaaataacacattttctgcataaagttgtcggttgcttattatgtttgctctgcatcttattaagttcctgatctagacaaacttatgatagtatgatgtttcagttgacaatgttgctctttggtaagttgacaatagtggtaacagtataacgtgggggaattagggtaatgtttcaacaatataggtgcacccattttttattatgaaacgaggccactactatgcacatatataaggggctcaaaattgtaaaatagtgattatgactaaaattccctatatattcaccccttgtaacacaagtttatgcccccacaaggtaagcatatctctgtccagtttgctctatctttgtcactgatgtacactgagtgtcgtcatagattttatatttcctccgtttttctgacaattccttttcttttgtaggcgcaagcaagctacgcctacaaaagaagcatttg

SEQ ID NO: 6451 - DNA, 1046 bp, Zea mays
  Intron number 1 from transcript GRMZM2G149093_T01 (locus G RMZM2G149093) derived from phytozome v7.0 (chr-ID 8; pos 1 74292089 to 174293134)
ccgcccaactggaaggagataatcagatcgagctggtaagcaatcgcgcttccagtgtatttgtaatcatgtacttttttccattcctctatgacgatgggatggccggatccggatggcgggttatttgtatatatgtggtttcgttcaagctgcaggcttctagttctaggtttaagttggatcagggaccgtcacttggttgtagctggcacctcgttttccgggcatgcccttggttttgatcgggaggggataaaccaatgctgtcgcggattgcgcgactcctcttctcagctcgcggttgaatgagaatggacggttcttcagtcggcaggcggcaaaatctattactttttcaagtagcgacattttatgattttgcaatatccagttgcatggtagatggagagtaaaacaggggattgggtaacatttactttaggaactccattgtggatttacgtacagaaactatcccgtaaatgactgcaccttttacagggcccaataaatattctggtgattttgccaccctttggagtttggcaaacaattttgagagttgagttttgtggaattttaccattttgtgctgtgcagtttttggagtaacagaattatttacaattcctgcaagcaaggtgaacttatggttgattagaagaaacgaaaggcactgctccagtaatccagttttgccttctcttggtggaaaacagaaaacaatagagcaatgagcagcggctcaagttttgatgtagccttcttggaggaattcagaaaacaagaaagcaaggaacagcggttcaagtttcctgaaaccaacgtgttctgtgcgttggtctatgggggttacagaacacgttttctgtgcacacgcttttgtttgtatacaacagtctgtgtccagctatggtttccatggcaatttacaggattctttctgctcttacttcacaactattagcaattccagctatgatttctcctaccattctttcttacttgaattggttcgcaggaaggatccaaattacaaaagg

SEQ ID NO: 6452 - DNA, 255 bp, Zea mays
  Intron number 3 from transcript GRMZM2G073219_T02 (locus G RMZM2G073219) derived from phytozome v7.0 (chr-ID 4; pos 2 08870098 to 208870352 reverse strand)
aaaccaactggagtaattatcctatcatctgataggtaatgaagactccatgctttgatgacattatttgtcttgtctaaaacatgcagtttgtggagtgctacagcagttcttttgctaaacaagaatatcaacgtctcttgattgatagttaaaatgaaaaatggtttgaagttgcgacaagaaagaataggactttgtttgctaacaatgtattggcatttttactttcagctctggtgccataccatctgt

SEQ ID NO: 6453 - DNA, 1015 bp, Zea mays
  Intron number 1 from transcript GRMZM2G011806_T01 (locus G RMZM2G011806) derived from phytozome v7.0 (chr-ID 4; pos 6 1722059 to 61723073 reverse strand)
cccgcgggctccgagttgccgcctccgcctctctggtaagcgccgctcattcgcttccttccccctgtgtgcagtgtgctccgggtcgagcagtttccgcctgtactacttcctgttgtgtgttgcttgttgtttgaccccgagcaaccgccgtccgccgctaccgttcgttccgttcctgccgtctggtctgttgccctcgcattttctttgcccgcatctgcagcgcgggctctcaaatttggagagtgtgcttcagcaacgaagcagaaccgatggctgtttgagttgtagcccactgaaatgagctttcctgggtgccgattccgcccaggaatgtttctgcggtgcctaggaagcttcttaggtcttcgcttgttaggtaggactcattcggcttcggaggaggagcaattgcaatcgaggtgcccgttttttttaaataaaaaaaatcgaggttctcatcagcccatgtggtggttcggatcccatctcgtcgattagaatggcttatgttgaacagaagatcggccttgtcgtatcttctcaagctcatcataaactcaatctctgacacctttcaggaaaaaaacatggtgtgcatgtgttacaaaaggatttctagcagtaggcggggcttccttcaacattgttaatgttacaaaaggatttctctaccaagttttattggggaaaatcagtatcttgtagtttcaccaaattcttctaggacgttgcaattttggttgatgacgactgctcatacgtgttgtcagccgaaagacatgccttattagtgaagaaccggtaggtggaatttaacttctaccggtatcacgactagtcgacttagtaggcatactctactctacagtgatatcctcgtatctttggtaccctgtgcctttgctacgacacatgcaatccctattttgattgtgcgttgaactacttgtacattggtgacaaaaaaaatatttgttgctgacttctatgcaaaatttctaggaacaag

SEQ ID NO: 6454 - DNA, 382 bp, Zea mays
  Intron number 4 from transcript GRMZM2G389233_T01 (locus G RMZM2G389233) derived from phytozome v7.0 (chr-ID 1; pos 2 02754070 to 202754451)
gttggatacaatccggtcctcccttgttgctaaatgttagtctcttccttcaagccaactatttgttatcattatataatacatacatttatgaacatatcttgtgagctgctacctgttaggttagaaaataacttggttttattatgtgctaataagttttttttttgaattttctcttcttcacaaacacacatgagagctgatttttcttttttgagtagtactctagtaggacgtaataataatagtgtatttctttaatttattccactcatggcatgtaatgtacctacatggctcttcgatttagattttccttattgtctttcttatccataattcagagggtaaagtttgttggcaagaggacatcctgttc

SEQ ID NO: 6455 - DNA, 451 bp, Zea mays
  Intron number 1 from transcript GRMZM2G094240_T01 (locus G RMZM2G094240) derived from phytozome v7.0 (chr-ID 1; pos 1 17872459 to 117872909)
ggaaaggggctgtttagtgctgctcgtgtttggtggtaagcttttttcttcacaaaaatatgtaaaaattgctagggttgaagaccaaataaataaatgttcattttagctgtgtatttggctatatgcaaataaataaatgttattttcttttggcatttagcgctaggggatgctctttgaagtggttattgaccagtaaaaacttacacagtagtttgtttgcgttcttacttgatagcctaaatgccgcaccaaggagtatagattaacattgaattacatattgtataggttgagttttgatttacagaattgtctgtgtgctagtttgttcatatatgtgaagttaccaagattatttcaagggagggcatgaaatcctcatttcagaaaacatgttcatttgttgccaggtggggaggactgcacagttcgcatctagagcatc

SEQ ID NO: 6456 - DNA, 425 bp, Zea mays
  Intron number 1 from transcript GRMZM2G149108_T01 (locus G RMZM2G149108) derived from phytozome v7.0 (chr-ID 4; pos 1 7419791 to 17420215 reverse strand)
cccagaagaggtgcgcagccgccaaagacctcgtctttgccctttcttgtctgttcccccgcccctgcttcttctgttcgttttactaatttttgctctatttttcttccatctttgtttggagcacggcgccggttactgtcactaaaagttgctaccttttgggtggtttattgtattttatttatttcggatgtgtaccattttttttgtgtttgattattataaataaattatagattacaaatcgaaagcttgcattttggtgtgaaaaccccctcattgctgccgtctcgcaagttcgcttgacctcccccaatttattccccaagtcgttttcgtcatgcatcgcatctttccgagctaactgttatatttctgtttcctagaacagactaagtaaggcgcacgtgcttgtgtgtggc

SEQ ID NO: 6457 - DNA, 999 bp, Zea mays
  Intron number 1 from transcript GRMZM2G122039_T05 (locus G RMZM2G122039) derived from phytozome v7.0 (chr-ID 4; pos 2 14215518 to 214216516 reverse strand)
ctgatcctccaattcgttcgtccacgtctcgccatgtgagtgatcctttcctctcgcgacctccagattcttctcggcccgttcttcgttagcttcggaatctcgctccccttctgcttctcgcgactcgccccctcagagcgcgcgcgcatttggtgtatgagcagctgtttatttaccttcggtttgaccgtttgagctgcgtcgctctattagggatgcagccccgcgcgtcacgcctaagaattatgcgacctggtggtgtgcacggctgattggtcgctgcttcagtcatgagagggtaatgctttcgatggatacttacgctagcttttggtgtacaatggtgtttaatgtagaggctcttaggtattcaaaggggtatttgtaaaaaaatgtagagccgtctcttcgcgaagagacatctcttactcgtaacgcaagtagtaacagacgtctcacttctaactttacgaatttgtcgtctatttgatgataccgagctatattcttgttggttttatttttgatctttggaggctgtgtattcatgtacggttacacgtaaggaatttatagtttcctaaggacaagcagggtgaatgaatcggtgtattgctttcttaactgcctgactccaaaatgctactatatcccatcccttgccctgttctatttgagcattgtcttgctgctaagtttgagaactcatatttgtttggcaagcttggttttgaagattactgtaactgtaaacatcttgttcaactgacatgattactatgcggttatcctgtgttttacaaatcacaatcttaatcagcttatttagtacattcctgcattgcaaacgttcaactgttattcactgcacaacggccggtcgtcactagaatgttttgaaccgctcccctttttcctcctgtctcaagttccatgctttcctaatgttgctctatctcagggaggacgaggaacttgttgatcagaagaaatatc

SEQ ID NO: 6458 - DNA, 1016 bp, Zea mays
  Intron number 1 from transcript GRMZM2G567054_T01 (locus G RMZM2G567054) derived from phytozome v7.0 (chr-ID 1; pos 9 4305082 to 94306097 reverse strand)
atctgattgcagttttctaaaaaacttaatttcatgttgctttctcattaatataaatactaaattctgcagtcattagttgattgactttactgccagactccacatatattagattattagaagactagaacagattgttcttgtcgagcttagtggaaagaatcagcaatcacaagatgctgtcttggccaatggttgacagatgccatatttgcatgcacattggtatatgatgtagttaatctctttgtgtctaagacactcgacaaaaaacactcggcaaatattttattgacaaagggttctttgctgagtacttttttcgggcaatcgacaaagactttgccgagtgtcgaaaagcactcggcaaagaaaaacactcgacaaattaagaatcgatttttttaaaaaaaacagcaaatttttttttaattctacgaacaactctccaaccctacctattaggctgcccgcagccatgcactgggaagggcacgctaaagttttagcgcaaggcaatacgctgcagcgggaactgaaaacggcactggaaactgcatggaccgcggcggtacgccactcctagcgctcgtacggtgctgctctatccactgtgcacgaggacggcagccgatgctgcgcccgcctggttggaccacgtggaggacgtgtagtgtgttcccagggatagggttagatatagagtaaatatgagtgcggagaattgtggtatagagtaaagaatctcgctgaccaggatagaatattctttttagagtaaaaatttagggttgtatgagtgtggatagccttaccttacccattgccctatcatttttcactattattttgaatcaaatttatatatttgtaaatggtgagattcaaactcgcaacctctctctcgcgcaaaacttaatttcatgttgctttctcattcatataaatactaaattctacagtcattagttgattgaatttactgccagactccacatattagattattagaa

SEQ ID NO: 6459 - DNA, 396 bp, Zea mays
  Intron number 2 from transcript GRMZM2G105176_T01 (locus G RMZM2G105176) derived from phytozome v7.0 (chr-ID 4; pos 7 6613668 to 76614063 reverse strand)
gacttaaagaactgattaagtacataggttttcaggtaaagattctcatttttttcgcaaacaaatgtttagtttctgcaaacttttatttataattatgtgggtggtgaaaattagtaatctgaacagtgcttactgaaaggagactttgtccagcctcatttgagtcctttctgcagctaacgtttgcagttctactaagcatttatatttatacaaaatattattcagtagatattctttgcttactattcgatctaactatcataaaatggattatccttcacatatgttattttaccttttgaatcttatatcatgtgttttttctttagtagaatttcatatttttcttcggcagattgcacccgccgaggttgaagggctacttctgtc

SEQ ID NO: 6460 - DNA, 584 bp, Zea mays; identical to SEQ ID NO: 4758
  Intron number 1 from transcript GRMZM2G119657_T01 (locus G RMZM2G119657) derived from phytozome v7.0 (chr-ID 1; pos 2 27122211 to 227122794 reverse strand)

SEQ ID NO: 6461 - DNA, 194 bp, Zea mays
  Intron number 2 from transcript GRMZM2G122954_T01 (locus G RMZM2G122954) derived from phytozome v7.0 (chr-ID 4; pos 2 1913604 to 21913797 reverse strand)
gtacttgccagttgttcttggtttaacaacgaaaggttccagccttttcttgttcacttctgtgtaatctctttgtttttttttttttgaggaatctcttctgtataatcttcatggttaatcactcaaagaattacaatgtaaatctgattggtctgaacagagagccgtcttgaatcgtcagtacagttcag

SEQ ID NO: 6462 - DNA, 532 bp, Zea mays
  Intron number 1 from transcript GRMZM2G022069_T02 (locus G RMZM2G022069) derived from phytozome v7.0 (chr-ID 1; pos 7 9396747 to 79397278)
aacaactaccctcgaaaagatactctttacgtgtggtaagttattgaaatcttgaatatcatcaaataacacgaaactatataaaacacaaactgtagcttaagttcttcattcatatataaatgtgacaagtgaactatatacttacggaggaaagggatgaatgtctggaactgtcctattttggtttattctacctgatcccgccattgatcttgtaggaccaatcatggcattattgcaaagaaaacatcattaaaaggattaaatgacgaagtccctctgtcaaacaaatagatttcttttacatcataatgaaattacaagaaactattttgtagaaagtgtagactctatctacgtctttgttctttaagaaacctagcatcaaattgaagatttttcatataacaatatataaagttaaatcataaaatgtaacataatatgtctcatatgtttatctacatcttgtgacagttgctggtgaataataggacagcaagcgccagtgaaatagtaagtacacatt

SEQ ID NO: 6463 - DNA, 588 bp, Zea mays
  Intron number 2 from transcript GRMZM2G078862_T05 (locus G RMZM2G078862) derived from phytozome v7.0 (chr-ID 4; pos 2 30932369 to 230932956)
gtcgtcgtcgtcggccagccgcaccgctgccggaggtaacgtcgtcgtctgggcgcgggtccggaccaagcagattcccctgatcgagagtagctagctagctggggcggcctcgccgtcgacgacccctagctagctccatcggcgatcgatgtcctagcttgtgacaattgacaagacgagagaacatggatgttttcgccaccaccacggctcttcctcgaacaagtatcactccaaactgaagtttctacacgtatatatagttccaaaaacaaagtaaattgcatacatataatataggcttcatgctagtgcgactatggtgcctacgaaaaattatgcaacagattaatgtgtttatataatggatgtacacatgtacactggtaaaaggaagaagagatcatgcttgtctcttacacgtacatactatcgattcaagttattcatttgaattagaaacagttttttttcatagtaaatgaactagaatcggatacaaacttaattgcaatttaaacctgataaaattaacattttttccagaagttctagacggtaactgtactgtgactgttctacagg

SEQ ID NO: 6464 - DNA, 670 bp, Zea mays
  Intron number 1 from transcript GRMZM2G123887_T01 (locus G RMZM2G123887) derived from phytozome v7.0 (chr-ID 4; pos 1 69554976 to 169555645)
caacagttggcttcgcttggtgagtttccgtgaccttgtaatttcatttgcatatcctatgcgttataataattgattcatatggcttatgtatactttatttgtgctagaatgaaatgtgctaggcaattatgggtaggtttcaatatctgcaacatgttactttttgcatgccagtaatgcttcttgggtatgtatatgatctgactgtggcagccttctgggctgtgttattcacctattgccctctggaatgtatgtgtcatcatggcaaatacaataccctcgcattctgttctgtttatgtttctgttgtatgaccttttcaggattgtactctgaatttgagtaggtcctgacatgtcttttaagcatcttttttggtcattttttaaattgagatgatgaattcaaagttcttgaatttacaacatatttatattgtcagctgtctctattatgtaaagcaagcagttgatctcttttagtaccttgtctcttcccaaaagaaaaagaaagtagtggacccttttcctagctagcttttttttgttcttttgcgttcccttttttatatccacgaactgttgattttgtatctttgtcgtctgatgaaattctattgtctcgtttaggaaagtggtttcttggctctgttggaactggtttt

SEQ ID NO: 6465 - DNA, 973 bp, Zea mays
  Intron number 1 from transcript GRMZM2G017586_T01 (locus G RMZM2G017586) derived from phytozome v7.0 (chr-ID 4; pos 3 5575754 to 35576726)
ccgtgggacgcgtccccgtcgtcttccaaccccaggtccgcccagatcgaccgaccgattcctcccttccccacgccacctcctagttccggaaggcacggatgctttgtttggcgtacggtcctggcgacaggtcccgtgaccccggcgttccgtatctttgcgatgagtatattgtggaatcgtgacgggcggatgaattgttttggggatttgggctgtgtagtagtctactagatgcatgcgcgtggaggcgtctgatccgtagaggtggtttctttacactgcggatcttccagtctgttgctcgtgctataaacctgccgaggctgcttttgtacaggttaaattagattagagttcccaaacaaaaaaaatggtttcctaaaaaaacaaggctgctgagtttgcgcgctgcaagataacttgccttggtaggtttgttctcgtgtttccgtgactgtgcttatgagttatgacagtggaacggatgtattacgtgtgactatgaccaatgatttgctcaaacgattgagatggatgttttaattgattgatggcgattgtaataccagtcttgatgataagtggtgtggctgcgagtgatgggatgccatgtgttgctcggccatggatggaaatggaatcgtgacacctgactggagagccaaagatacaacttctcatcttctcctgtcatgtatgcgctgatgctgctatgatattaattttgagagtaatttgcagtgatcttgttgtttgaccttttttttcttgctttactgaaagcggtccactccatatgctcagaattcaatgccttacatgtagctagttgtctgattactttcgtccatgaatggtttccagttaattggttgagaacaggtactagccaaatacgaaaaaaaagttcatgtccagttggagctgctaatcacccttatattttacagtgtggaagtgggcagct

SEQ ID NO: 6466 - DNA, 342 bp, Zea mays
  Intron number 1 from transcript GRMZM2G102365_T02 (locus G RMZM2G102365) derived from phytozome v7.0 (chr-ID 1; pos 5 3271935 to 53272276 reverse strand)
gggccgcgtcaccgacgcaggtgaatattcaggatgtgctagttatcacaggcttttctctctctattttttcgtagttcacgtgtatcttaattttttcttcgaagttttgcgattaatttagtttttatcccatccgaaaatcattttagttttcttctgcttaggtttacttttagcagtttctagtccgtttgaccaccccgggggagttttctttgattccggagctttaattttataaataaaaaaagaaactggattttcatctataaaaattaaaaataaactggaacgataaagactaatatgatctgttttttttttggttcggttcctcag

SEQ ID NO: 6467 - DNA, 587 bp, Zea mays
  Intron number 2 from transcript GRMZM2G121570_T01 (locus G RMZM2G121570) derived from phytozome v7.0 (chr-ID 1; pos 2 52320511 to 252321097)
gaccaaccacctgcgccccgacctcaaggtgcgtattctcttttttcgatcgatccatcttctcattcgatctctcagatcttgatgcgtggatggaagctttgaattcgatctgtgtgcagtgtagtgtagctgtggcttgggggagcgatatcccctcgctctccccacacatgattcgcgaggggggggatttttctttgcctttaattcctacgtaaacaaatcctgctaaattttggtctagattcgaaagtgggggcattaactcggtaagaattagtgggagttgcatgtgtttttactctgcccactaactgtggcaatataattagccacggccggattgattgccgtggagaatattattcattttttctagcttatctgtggttatatatgtatgcgcatatacatgccaagtttgtgaccaccgatggggcattctgatcgtcgattaaccaacctagtgtgctttatttggatcttttgagctgctgctgcgcaccgtttgcttgcttttcttctctgacatgcaatgcaacaaaaataattaacagaagagcgtgtggactgaagaagacgac

SEQ ID NO: 6468 - DNA, 398 bp, Zea mays
  Intron number 2 from transcript GRMZM2G014432_T01 (locus G RMZM2G014432) derived from phytozome v7.0 (chr-ID 4; pos 1 13326397 to 113326794 reverse strand)
ttattggaacctggtttgggaaaaagagtattgaggtaaaagtgttatccagaaattcaattttgttgtgattttttttgtgtttccggttgatgcttgtaccaatctctgactttctagaccatagttgcctaattttagttgtcatctttgaagtttgtaaataagatctgaaagatttgaagtaccagataacaccgatttcatgttcttggtgtgtgaactaaaaccaaaaggttacctatgctgtttgtgcatattaatgagattctggataaccttatgcttgttgattatgtagtcttcagttatcttgttaaatcaacttgaacaataaaggctttttttccaattcttatccaggaggataggctaatagcagtttcacttgcaagcaa

SEQ ID NO: 6469 - DNA, 869 bp, Zea mays
  Intron number 3 from transcript GRMZM2G179281_T02 (locus G RMZM2G179281) derived from phytozome v7.0 (chr-ID 1; pos 1 55618199 to 155619067)
ttgttgttgagcaaggtaagaccgatgctatgctgaagaaacgtgtcagtgatgggtcatgaaaaatatcatacgctttcaactcacattttgcatgaattgatgccggaaaccatttataaaatcaatggtcttattgcttatattgttttaggtgttttggagtgaaaatgacatgagttaaaaaaaaactaaaattcctaataacagaccaaaatcccctacacgattagttacaaaagtttttttgacaaccactcgctgcaattggccgcgtaaaccaaaagcctatcaataaataggaacacattccgacaagttcccaaaaaatttttgtatcaaattggaactagtaaccaatcctaacatggaagtattaaaaaaacttatataaacaaaaaatctcaaatatccttatcgtgagacatataatcgtcactataaataagaactaagatgttttagtctatttccagtcatccaccactgttaatgttcatgtgtacgaataactttctaaaaacattaagaggatataaggcattagagtctacactgtacgatctagatttgggttggggataaactacactgtactaatcaagtattctttttactaaaaacttggccaccacagaatctgtcctttttcatatatatgtttatgctttttttcttaaagtccatcttcatctaccatctttacaggagaaaaccctacctcgttttgtttttctcatttgcattaaatagtttgttcatcataattgttagtgagaacagtcttttcccactaattcaagtatttgttacatgttcacgtgatttctgtagattatctccaatccatttttggtgtatattcgatc

SEQ ID NO: 6470 - DNA, 542 bp, Zea mays
  Intron number 1 from transcript GRMZM2G016004_T01 (locus G RMZM2G016004) derived from phytozome v7.0 (chr-ID 1; pos 2 53570161 to 253570702 reverse strand)
tacaccacctcggcacaagcaggtaaggtcgtgtttggaagtgtagttacagttttgaaacaatattatggtatttagtgatactatagtattgtaactcaaaagatgtttgttttgtacaggtaaaacatagttttaaatactatggtttacctaaaaccattatatttttggaattttcgaaactccactcatcattttaatgttcttttcttctctttacaaatactttgtttttctaatagaaccaaacagatctcggttttgagtaatactgtagttttatatatgcatgcgtgtttcatacgtacgtggtagctacagtttacgtctaattacccaatcgtctttaccttcttcaccacaggaaggagtggctacaactcgtacgaacctgatggtaagtaagaagacccttgtcatgtaattaacctcgctcgtgatgaggatcagtttaaccgcgtacatatttatacgctgattaatatttgtgcgttacgtattcaggaaggagtggatacaactctgttccaataaacggc

SEQ ID NO: 6471 - DNA, 814 bp, Zea mays
  Intron number 1 from transcript GRMZM2G306788_T01 (locus G RMZM2G306788) derived from phytozome v7.0 (chr-ID 4; pos 1 30959829 to 130960642)
gggaaggtaaaagcggtgccgcgggtgaggcgtgacggcggtggctagcgagatggaggctagcagtatggctgctcgatgttctctatagcgacccacctagcatgatgtcctctatggcggtgcgatcctgcagaagaatctgggtgagggcgaagatgggaaaagagacgaaaaattagggactaatatatgacagcaataccgaggacgagaaaacacttaggccttgttcgtttatgccggattggtgggtcgaaacgatttctagccggattgcttctctaatttatataaactttgattagctggaacgatttcaggtgcaatccgacgtaaacgaacaagttcttatggtgtttatatggttagttatacatgcaaacaaaagatagtcttattttatctggtttgtcaggcggaaacgagtgaagggaacatacttatgcatgcgtgacgcggtgatcgaaattggtcgaccacgcatcatcggcagtcaaaactggtcagccacacatcaccagcggaacacgacaccgaccagccgtccgctgtcgaagagtgtcgaaggatgccttcccggagcgctggttcctgctcgcggtgctctgccatcgtcatggattcctccccaccaacgtcgtcaaggcacgtgcccttcgacacaatcttggatgaccttagtatgcagtttcttgtcatttgttcttgtgcttgatctagatatgggatgatgaactgatgtggcgcggggatatggggacgggctcggcgtgcaggccaagcgcgaccgcgaggagggcagctgcaagac

SEQ ID NO: 6472 - DNA, 507 bp, Zea mays
  Intron number 4 from transcript GRMZM2G071025_T02 (locus G RMZM2G071025) derived from phytozome v7.0 (chr-ID 1; pos 2 70253152 to 270253658)
atgtgagtgcaggattcgtaaattgttccctgtcttatttttgcttggtgtcttctatagacagactatggggatgttgtgttgggcatataattactactgcagtgtctcgtctgctattctaaatttccaccaatatgcagtttttttgtgcatgtgtgggagccattgcagggatgatgatgtgctggtttgtttcagttgtaggcttgtagcatctttctgttatacttgacgaactaaattataactaaggcgtttgaggatgggtcagcataggtgcatctgcattcctcaggcataagaattaggatatcaatacatatttcatggtttgtttgaattttgtatagaattatggtgcttgctctgtaagctaatacacaagaaaagaagagttgacaaataagtaatgcagattaaaccttatgttaggtttttatcagttctgacaaccgtaaacaatttttttttcttcagaaaaaggccaagacagcagtggcagcc

SEQ ID NO: 6473 - DNA, 1005 bp, Zea mays
  Intron number 7 from transcript GRMZM2G071025_T02 (locus G RMZM2G071025) derived from phytozome v7.0 (chr-ID 1; pos 2 70254491 to 270255495)
aggaatttgaatcgtatgattcacaggatcacttcagctggtgtcggattcctatttgtacttcttttttatgtcattccatttgtagtcagttttaagcactgggacacaaattccaatgactgggtgcacttttgcactcatcagtgacttatgcataaattctggtgtatatctagaaaagctagaacggcttacaatttggaacaggaggtagaattttggcttagctttcattgtattctggcgtgcttttgcacagctttgcaaattatttcagattcatacttcatagaggattggtttctggtccttaaaaaccatatttgttcggtaaaccgacatactacgttctgttaaaagagtacccaagtgcatacacaatttcatcatcatgctctgatgtacatggttagagacattgaataataaagcctgtaattgtttattgggacgtctaacccataagaaggttgctccagttaaaatgcaattttctggagtatcatacttgttgatgatatattgtgtactcacatcatatttgttgccatgtcaatcatcaggggcgacggcaggggggcacatgggggcaatgtcccccctaatgctcccctaattctataggatatgttaggtttttagctaattcttatgtaaatagtgcaaaaaatgcttctaacagcccccctaatctaatttggtccccctaattttggatcctggcttcgcccctgtcaatcatgcaccaacacattcatagatggatgacaattatatttggttctgagttcttacatactagctaaaatgcactgatggttcttagtaatgttaacacattttttgaggaataacaatatatagatgtataacatcacaacttggccattatttctaagtataagtattccatgcattatatttgatttgttctgcctttgttgtgatggcacctgtcttcctgaaggtttgatttttctgcgaaaggaagtgaagaaccag

SEQ ID NO: 6474 - DNA, 474 bp, Zea mays
  Intron number 3 from transcript GRMZM2G011559_T02 (locus G RMZM2G011559) derived from phytozome v7.0 (chr-ID 1; pos 2 46471718 to 246472191)
ggcagcaaactgctacaagaagttctccctgcaaggtacttttatatacacttacctgagtatgatgaatatccccctttgttgttattcttcacttcgtacattttctagctagccatacagttcgatatatccttcatattttctggaatatcatttattggggcttgtgaaacccattcaattgtccaagttatgctgtttggtttgttccttctggctaaatatgtctacctctttccatagttggctacccttgggacatatagcagctagcatgcaaaagatggcatgtccttttgacaataattgttttaatgcaatcaaagaaacattaaggctatgttttgccagtactttctgcaactaaacaaatcattaatccaaccagacaaaatgaagttcgattctcttggcatgaatattcatgctacaacatgctctactaactgttacatataatgtttgatgcag

SEQ ID NO: 6475 - DNA, 912 bp, Zea mays
  Intron number 1 from transcript GRMZM2G393669_T01 (locus G RMZM2G393669) derived from phytozome v7.0 (chr-ID 4; pos 8 6596879 to 86597790 reverse strand)
caggttaaaattacttatctccgatagcttgtctgacagccgtaggagataaacttatttccgatgaccgtttgaagccgtcggatgttacatttatatccgatggctggcgtgtaggccatcataaataatctagttgtaggaagactttacaatttcggactgaaatttccgaaatttccttggttttggtggggtccgaaaaatatatgtttccgaaattgacattttgtaatataaattatattagtttttgtttttaaaaaataaatctgattgattttgacctagaatttccgaaatttagaattatcctgcttttttgctgggggcgaaatttattctttttcgaaaccgtaaacccggcctggtcggaagtgctatgttttactattgtgcctgggattggttaacctcgagacggaaatcacaggaccaaatgcgttaatgcaacttgacgataaagaggctgcttgtcgtatgactcgtatcgcccttgtgagcaaggatagaaagctcgctggctggctggcttgtttggatgtcttgcaaagaccgcgaagcctacatgagttttgtcttgtactcttgtccggttaagagagctaaagtgtttgtttattcgtctagacgttcttaagctcttctgtgtgagctcggtcacgtacgatataggaagacaccggtctatcaaatatcaactttttacaaacaggttgagcgcacatgtcgtttccatgactgctcgtgccaccgccgtctactgcaatgcacacgtcgatgcagagctagggatggtaatgcttcttcatgatttgatagtgtcttaagttatttctagttcaaaaataaataaaaatacagtttgattctaacctaatctaatctttaaattttatagtataaaattta

SEQ ID NO: 6476 - DNA, 812 bp, Zea mays
  Intron number 1 from transcript GRMZM2G058584_T02 (locus G RMZM2G058584) derived from phytozome v7.0 (chr-ID 1; pos 2 85128364 to 285129175 reverse strand)
cagagctgcagcttcaactctcttgaaggcaaaaggtatatcaagcacagatttgagaaagcgctctgcagaaccaagcttcgatgtgtcatcattataattagggatattactcctttagtatttgttttcatattttcttttctgattcggatggcatacggatattattgagttatgtcagataagatttaaatggatattgacattttaaatatccagttttgagtatattgatacggatatagaacagatactaaatatcaggactcggatacggatcgaatcgcaaccctcttagacagatcgaattcaaatatggacaccatttatatcctaattataatcttgtagtttgagttccttctactgctgctgttcgggtttcgggttccatgcgggttcaggggcagggcggaatttagcccaaacggggtttgagtcaggttcgagtatttttcttgggttttaggtgtgggtctgcgaacgctccacccggcacccgccccatttccatccctagtttccctttggctctccctctcaatctttctattcttcaatctattggtagaatcgggtttagtaggcctgtttctgtttattaattggactcaatagtaaaagtagagtcatggacctaaaagtgacagatttttcacagttaaaactttaaaagtagaaccataccatgtaatgttattaaacgattttatccttcacggtttctgatcaattttcgcactccctcctcgcatctgacactagtgacattccagaattgaatcgcactctgttgatgggcagcttgc

SEQ ID NO: 6477 - DNA, 774 bp, Zea mays
  Intron number 1 from transcript GRMZM5G813670_T01 (locus G RMZM5G813670) derived from phytozome v7.0 (chr-ID 1; pos 8 5732230 to 85733003 reverse strand)
agattcaaatccctgccacatagttctccattgctgtaagctcccgcacctcctccccatctcttcactccaaatctaccgaggccaccgcttgggcctatgggaacccctcgcgagttatttgctattatagtactgatttcaataggcttctctcttttagtactttcattttagtcttttctgtaatagtatctacaagttgattcatccttcaaaatagtattctaaccattttcaatcatttttattttctttttttatttctcagaacataagttgaccctatcattaccctcgcagctatacaaataatagaaacacaaataatccaggcagagacgcaggagtgcagacgatgagcaacactgctatcttctgtctggtggttcagaccgtagcaaagggtggcagttggccgcacggtcaccatccagcagcaccggcgtgctgctgcaatgtttttttgtgtgccgtcggtgcgatgctgaatgcgagaagagagaggagtcgagccgacgatggggagcaaggagagaataaaatagagagatgcaatatggtcaatggtgagaaataaaaaaggaaatgattaaaaaaggttggagtactattttaaaggatgaatcaacttataaatattattacagagaagatcaaattgagagtactaaaggagagaagccccacaaaatcaatattataatagcaaaaaactcacccctcgcgccgtcattagctcaggcgacttctcgtgcgcgcatagccctgaca

SEQ ID NO: 6478 - DNA, 817 bp, Zea mays
  Intron number 3 from transcript GRMZM2G044569_T04 (locus G RMZM2G044569) derived from phytozome v7.0 (chr-ID 1; pos 2 68878976 to 268879792)
accgttcttgtcttgaccactggcgatctgttaaggtacacccagtgctttcataacatcttccatatcaatttccttcaaggacattatatgtgctgtgtgcttttcaattatattgccaacactaatgccattaggttggtaattgctaatgaagactctttgtggggtaactggaacatattacatagaaaatatacacaaggcagtgctggagtagttgaagtttaaatggagattaaggcatctattgttggtcaggtactcaggtcatgtgtaatgagcaagaaatggcaatgctgcatagatgttaggttttgtttttctctggtggtagtagatgattgtgttcctgcaatgcacaagaacccaagcttttttttcttcattaaccaatttttttctttcaaatggcagattttgacacaaaatcagatttttgacatgtactggcagtacactacttgttagaagttgagccgcatctcttcaagctatttttttcagcttgatctggaggttaaactgtagaatgcatggtcttggctgccatttctgtgtcacgtaaagtctagctgcactaaaccttctattaaagtgcttgaacttctgctccttagtggccttagtgattctctttgctcttatttcctagtttgatgtcatgggtattcaaatacagtatcttaacttttatctttaagctgtcctctatttatgtggaatcaatggagaataaagttatgtactagttttgattttcatatttcatgattttgtaggaaggatttgcattttcacactgcacaacttgcaa

SEQ ID NO: 6479 - DNA, 989 bp, Zea mays
  Intron number 1 from transcript GRMZM2G126010_T02 (locus G RMZM2G126010) derived from phytozome v7.0 (chr-ID 8; pos 1 00397445 to 100398433 reverse strand)
ccgaagccatcgatcgccgccacctcttcgagcaggtgattattctccctcttgctcttcgatctcatcttctctgtctccgcggaatcgtactaatctcccgacagatcgcctcaccaagtcaccagtcaccaggcctttgactggtgttgtccggtaactttttttttttgtggtttctacgtctggcgcgctgctgatttttccgcggttctgtttggtttgtggtgatttgctgcaagggtaaaggaattcgaactttgctgggatggtaggattatgctaaggcatgctggctagctatgtttggattgtgctatggcgcagtgccgacagtacccgactttgctgccagtggtgtctcctattatatgattttttttttcaaataacaagctacgaatttactcgctgcccaaaaaccaaaaacaaatcgtagaaaccgctgtccgctgagcttgttggttccccgttgacctctagttgccagggtagtaagtaggaggcgtaatttttttgattagaaatgtccgtcaagcagagttccaccaagcatatgttgatagagcaggatagtgctggttttattgcttcgggccacagcagcagcaaggccagatgggaaaaaatatcccaaaaggaattattttcctatgaagttgtgtgtgaccaatggtgatatccgctttattttgtagaaaactgagatcatcggggagcagaatttctctgactccgcatctacatctatacgctcgaatacttagatctttggtattttaaggctgctgtactgctgtagaaacataaagcttttccctatgcatagaagtcacaattaaacgacagacaattatcaaaacataaagcttttcccttaaaccatgagcagaaagtgtattttgattccccgaccaggctgcataactgcatttttctatgaatgtgtactgaacgctgaactttggtctgttacagaatagttgaga

SEQ ID NO: 6480 - DNA, 430 bp, Zea mays
  Intron number 3 from transcript GRMZM2G025488_T01 (locus G RMZM2G025488) derived from phytozome v7.0 (chr-ID 1; pos 2 05685122 to 205685551)
cttctcaggcacaaccattctattaccaaggtcagcctacatgtctgaatatctcttctcactttgcattccttgtccagtttttattacagaacatgaacttatgcattgtcctatatagttgatctcatgcaattatagcccatgggaacataaaggagaaatgatatcaaaagttttatactatctattaggtggtgctcttaacatatttctttatgaagttacctatgatttatgtgtagaaatataatatatatcaatgtaaaatcagtttttgtggggtggacacagaacccacttattttgttttctttaatatattgtagatttcgcagctttcatcttgattgatgaaagttcttgttgcatccttagcatagtttccctctctatgggcaggctccggttctgaaaaccctacacaagc

SEQ ID NO: 6481 - DNA, 873 bp, Zea mays
  Intron number 1 from transcript GRMZM2G475059_T01 (locus G RMZM2G475059) derived from phytozome v7.0 (chr-ID 1; pos 8 113738 to 8114610 reverse strand)
ccgggcccccaaaaatagagggccccgtagccactgtacggtagtatttttttctattaaacttatctattatagacataaatacgtaaagagcgatgcgttatcgagttatcgactagtctcgtttatattcttaaactgtctcaattacttatcgaatactccatccgtttcaaaatagtatttgttttagttcttgatttttatgtttatattgatgatgataaatccactaaagaagcaaaacaaattctattttgatatagggagagtattataaactatacatatgatggttgctttggcagagagaagctttttaaaattgaaatatttttgtgaactatttttgatcaacaataactcaagatgttaaatggcttggtgattctatatatcaaaaaaagttgttggatgagattgatcttaatgatataagagatgactttgtatcacaaaatgttaaaagatatttttaataatatgagataacatgtgttttttgctatattttacatttgttatcttgtaaacttcaaaatagtgcataataatttttatatgtcaaatatttgataatatatgtataattatatatatgtgtggatgggtctcgatatcggatttcgcactgggcccctgaaaagtcagaaacggccctggcacgcaaaacacacggcagcttcgatgacgaaagcgctcacctcagtggctcagctggaaacgacgctcagaaaagaggcagctgtgtccggaacatgacgcacgcaacgacgtctagatagcccgcggccgtgcagagaaagagaaaagaacgagcgcgagctcgctgctttgttatataaatcatcacatacaacttctcctcaggat

SEQ ID NO: 6482 - DNA, 807 bp, Zea mays
  Intron number 2 from transcript GRMZM2G119791_T06 (locus G RMZM2G119791) derived from phytozome v7.0 (chr-ID 4; pos 2 00837971 to 200838777)
tcgcggggttccagtcccgcgtccagcagtgcgtggtacgtctcctcaatcggcttcgtgcctgcgcacggaaccgcacatgttttccattccttttccttcaaactcaacagtgacaaaaccccatatgtttcgcatttgatgcttgatgctgaatgctatagttaatgttacaatcgtggtgactgggaacaatgccgggctggcagtgatgttgtagctatcaaggactttagtacaataacacataggttcttccgaagttacagtagtttatcaactgttgattcgcgctactcatagaagcaagtatcgttcatgttatgtagaggaattgttcagttctctttatctttcttgtgataaatgcagagcatattccttggttatggatatgtgtgttgggtaactgggcattcacgttttgtatctgttgttgcaaggtccatatggatagtccggctgatctcggtatctctgataggctgtcgttcattgctgaaaacttttgtgcccgttgttatctctgatagcctgttgttcgttgcctgatatttgtttcatatattatctttggtgtttgtgtctccacatgagtacaggaggcaaaataatcatccactttgagctcattttaataaatcttctcaagacataaaagtcttgcgactatatgcaacatttcctcagcctggcagtgcaaagcttgcttgcttatttttcttctgttgtttgatcatcttctatcttctgaaatctcgtctttatttaggctagcagaggacttggtctcacagcacatattat

SEQ ID NO: 6483 - DNA, 1007 bp, Zea mays
  Intron number 2 from transcript GRMZM2G032821_T02 (locus G RMZM2G032821) derived from phytozome v7.0 (chr-ID 1; pos 7 5396512 to 75397518)
ggacacgagcctttcgcgaccgcctcttcgacgaggtgatcgctgagctctcgctctttcccgaactcttttttgtgtttgcgtgcagtcgagttgccagtgtctcagtgtacccgggccggaagttcgtatatacctcatgatcgctatctttaattgtttatatgcttccagtgttgggggaaatgggaattggctttggagttggacggggagtctgtgagtctagtgtaccctgggtgacctgaaattcggctcgtcttttgctttttgactccttgagatggggtggagtccaatgtaatgtaaacaaactaagctgaagtggcacaatgatgttcaattcattctttgtcaatgcaaattaattttctgaagagcttctcccgcatatgcaacgaacgcctggtaccagcaattgcagcttgctgaaaggagaaaactatacaagtcatcaactagagtcattgctttccctggttctgtctctcacagtagtaaaatatgcttgacagagttgccgtatgcagataatttggaatatcgaggatctttcacatacagttagtgtggcgttaggagtcatccccttccctcaggaaaaaaagactgccctaactatttatggtcctagaagaggaaagccctagatacctgtgggtagcatacaaggttttatggtcctagtgattcctgaatctcacctaaaggaaagcccaaactaattaaaacgatctctcggcaatggtggaatgctcctgtttgggcccacttatgcaggaagcatctcctattaattacatatatatatatatatatatatatatatatatatatatatatattgacagtaattttatcattttgtgttttcttttaattatctgctgttagttgttcagtgttcttcacgtgcacaaatatattttgctggccttagtgcgaatgctacttatcatgatcctgtttcaggcaatatcctgttacactaaagctcaaaatttgag

SEQ ID NO: 6484 - DNA, 890 bp, Zea mays
  Intron number 1 from transcript GRMZM2G562000_T01 (locus G RMZM2G562000) derived from phytozome v7.0 (chr-ID 1; pos 1 83274671 to 183275560)
cgcagcctcgtcgtgctgacaaatcgacaccgtgaagtcacatcggatccctgtgttcctcctcacgcagactgcgacaatctattttctatccacgatttgaaggtagaagaacggtccaatttatttatacgctacctcttatcatctacgtttaattttgaactaaccaccacgacaattttttcccattctaaaatgcacatgtgagactgaaataaattaaatattaatttgttaacttcataaatttatgttaaacatttgaaattaatgtttttgataattttacatgttttcataaataaattcgaattatgtttgctataattgatttttgtgtattcaatatctaaataaattaaatagtatcgagatagctatgtgttaatgtgctgatcagttgaattgatagttgcagcgatttaattatttttgtaaattaatttgttttgtgtttattgtaacgtgtagttttaaattaagaaattaaaaagaattacaaccttatgtttttataacaaagaaaataagagataattatttataatgacgtatgtatacaaaaatataaatttattagctaactcttctagtctagctttatttatgtgtaggtccctgttacagtataaaatgtatattaggaacccaattaaatagaaatggttttgttagtttaataattatgtgttaaacaattttaaatagtatttttaaacggttcacatgatttagtaaattaattgatttatgctgttataatcattttatacatagttttccaaatatgaaattaaaaagaatggtagaccatcttttcgtaaataaaaacattaggtaaataattatatgttgctcataaagtgtgattcagatttataatcaaa

SEQ ID NO: 6485 - DNA, 691 bp, Zea mays
  Intron number 2 from transcript GRMZM2G124091_T05 (locus G RMZM2G124091) derived from phytozome v7.0 (chr-ID 8; pos 1 73057817 to 173058507)
tttcggctgagcggtctaaggatcctaaccggcaggtaaacaacatctgtactggatgtctggatatgcgttcgcacaaatatgtttgtggaaattccttggtgtctcgctgacgctggaacatgcacaggcctaaatatgcaatcaaatggtctaattccgttgtcttgacatttcagtcacactctattactagagcccgtcttagaactagttactatgccatgttaagtagaaatatactcgcgattgaacaatgttatattgatctttgcaacctcctggcgagtaaaaatcaccagaattagcaacaacataatattttttttgtttctattgtgaaaaactttacatctgtgtaacgaaagattcactaaatctttccatgaccattgcagtgcttcaaattttataaaagaaatggccaaattgacagacttcattcctactttgtgtgacaatattaaaaataagcctattacttctttatagtctcgattaaaatatgtcactttctgcttgatttgttataaatggaagagggagaagataattgttttgacatcctttgcatactcatgaaatatatttatcacggtatgttagataatgtagtttttcttcctttacctatgtcaatgatcaaaatatgaattgattgatatgacatgcatttcactcaggttggagc

SEQ ID NO: 6486 - DNA, 524 bp, Zea mays
  Intron number 2 from transcript AC192185.3_FGT001 (locus A C192185.3_FG001) derived from phytozome v7.0 (chr-ID 4; po s 206204092 to 206204615)
gaagtgcccttcgaccaagtcctaggtggccgaaggtaccgagttcaccatgctgcaggggaaggtgatggggcgaagcaactggccgaggctgttggcttcgccgaacaactgggatacccttcggggtccatgatttttgggggcgagcaagatgattatctatactgctgcccagacaacatggaaacagatgtgtgccgctatatggtcgacaatgttggcttcccgaagttggaaggaatgctgtcaacaatgtctgatgaggacttttctgattgttttgcttatactcatctcaaggtgattttattaacctttgtttttagcttcaggttgctttgtcaaaaaactcatcttttgaatcctggtagggcctgcttctaggcaaagccttgaagaacaggacaaaagttgaaaacaaagctgttcaaaaagaaattttgaagcttagatccgaaatatttgggcttcggtttgattgcgaagaaaaaagaaagctttcaagatattggaacaggact

SEQ ID NO: 6487 - DNA, 785 bp, Zea mays
  Intron number 1 from transcript GRMZM2G092481_T02 (locus G RMZM2G092481) derived from phytozome v7.0 (chr-ID 1; pos 7 967900 to 7968684 reverse strand)
gaggacagcaagagtcctaagggtgagttctgacttctggagttgtatttttacatacataagaattgcttcattgactacatttttgttaggatagtgactgtagttgattacagatatggtctgaaaatggacttctgtttgtgtctgtgtgttttggagatttaccccacctgaacagtgagactgtgctagccaagggcagccattacagcatttttgtgtttagattttacaacaaactggagtagtttaaacctatataattctaatatcgaaagtcaaaactcattaaatctaccaatggcactgcaatagataggatcatgacagttcatgagcttaagtcaaacaaaatgccgatgttatgggcgccatcagcagtggtgcaaagtagaatgtgtacttttactcctatcgccacattctattgtatcacccaactggctttgaccaaatcacagcaattgatgctcaaacagatattaacaataactgggtgcacatttattgccttggtaaactaataaacttgttattcatgtcaacctgttcgctgcggctttaatccatcggcttgtttttgttgctacttaaagatgactgattgttgcacaatgttgcttttatgaaacaatgcactgattgctgtttggccaattggttgaaataacaatttagtttagagcgactttgttcttcaccttgcatcattcttatatctatttttattatgcataatgacattttcttttatacttcaggccgtcagaagttgttctcaa

SEQ ID NO: 6488 - DNA, 572 bp, Zea mays
  Intron number 1 from transcript GRMZM2G169911_T01 (locus G RMZM2G169911) derived from phytozome v7.0 (chr-ID 4; pos 1 62563351 to 162563922)
gacgctgcttggagtagacgcaagctctgtggaaggtcagatttctttttttttttcgttcacaaattcaaaaagatctctccttcctttttactttatctgatctgattattagatgcgtattgcttccgatttatataagtttcaattggtatatgcatgctgtttgatttgaattcattctttctcgataggtatgcttgtttccgtttcttattctcagttccgttctttttttttgtttttgcaaaagctctcgattttgttttactttatttgattagattcgtattgctgtctattttatataactttcatttggatatacgcacatgtttttttatttgaatgaatcggtttcgaatgacatggatctcagtagacctcgtagtccattctctcgccgtatcttcttttttccaccaaggataaagaagttcattgttacatacactgatacacactccaatctccatcacgatttttcggtcctgaactacccactttctgagcacgccgttgattctgtttatgcagatctctagtgtatccgttttttactagattgtcta

SEQ ID NO: 6489 - DNA, 821 bp, Zea mays
  Intron number 3 from transcript GRMZM2G029573_T02 (locus G RMZM2G029573) derived from phytozome v7.0 (chr-ID 4; pos 1 60459831 to 160460651)
gttggtgaagttgttttcaacacatcactgacagggtaaatcattttggactgagttacgcttttgtctaagtggggcgatgttttgcatgtcttttggttattgtttatctgagtggtggtatgtttcgcatctcttggttggttattatttgttttctcagtcaaacaggcaatcctcatactaggactttagatatttgattggggcgcgggcgcacttactcctgtaacctaacaaacctccccgatttcactgtacctgtatcacatattgatttagtttagtcatatagttatatgaagcaaatgaaaacaaatgactataaatttggttccagcttacagtcagctcattgtacctggaaatttcagtgttacaagcttccgtttacatcaaatttgatgtgacagaattgtttgggatcaattgctgaattttggttgttcttgcaagaagaggggtgagtgagcgggagaacttcattgaggtgagacaacctggggagataatattattcatcatattcagcggaggcattgggctctggagaagtggagatagagagattgttaagtcgttagaagttaggcttgttataatagctagattttttggcttattgtttgacagagattgtactagttttaacattcatagtgctgcacttcctcgacaaacctttctgtactattgaacatgacttgtcgatgcagttatgttgatgattatgcaccataattctaggtaggactaagaattgttacttacatggcacatttgtggttgcagctatcaggagattttgaccgatccaagtt

SEQ ID NO: 6490 - DNA, 829 bp, Zea mays
  Intron number 3 from transcript GRMZM2G102230_T02 (locus G RMZM2G102230) derived from phytozome v7.0 (chr-ID 4; pos 1 71689649 to 171690477 reverse strand)
tactttgaaggtacatttattatcatgactgggtgcattgactctgcaatggtccaatcatttgagcttctgtgtccttgtagaattacccagaattcagttctcttggatagtcttcttttcatttgattttggttctttagagtgtgatgtctgcttagctaacattctacttttgatattatttctgaattttagtaaacatgatgaccaagatatcatagttgtttttttgttgttgcaaatttgtactctagaatactttgttctgaggaattatgattagattttaggaagcttgatgttctctgcacaaaaagtgttgcttctttacctaataaagagtgaccgtgcagtctggtcatttgtcaagaggaagcatataagcgaattggccagtattaaacagcattgtgcattttcccgttgtgcagtgttacctgtctcctggcacatgttgaagtattcgcgaaacaatgaccaatactatttatttgctcagataccaatagcatgttctcatgttttttaattcaaactctagcaacggtgaatatgtgcaagttagatgttgcatcttggctggattgtactagttatgtggttatgccttggtataatttggtgtcgacctgcagttgatttgagttatttattctgtcttttaacattttttgtgcctgtcacatgtctagagatttatattagacatttggtgatcagcaactctttttatttacctgctgctcgtggtcaacaccacatttacttcagccttggttcgtggttcatgcttctgtaatgttctgtttatgtgatattgcagaca

SEQ ID NO: 6491 - DNA, 912 bp, Zea mays
  Intron number 2 from transcript GRMZM2G024482_T02 (locus G RMZM2G024482) derived from phytozome v7.0 (chr-ID 4; pos 2 6129354 to 26130265)
gacatcaaccagatccgcgagatcctcccccacaggtgagtgccggaagcttgattcctcgtccttggggttgctcaaacatgtttggcattgcaatcccacgacacaactcaggttgatgcaacagcttgaaaatatttgacattttgaccatgcaattcctttgcaaatatgagtatacactgcttttaactctgttgttccacactcacacctctagatcccagcagttgtagtcatgtaaaggactagcggcccgtgttcatagagcatacgtctacacgttgttaatgttaagaggctatcccaggtttggagttgaagcattgacataatgagaacagtttagcagttttgtctccttgtgagctgatgtagagtcagtttgtttctaaacaatggaaagaaacaatcagaaaatgtgatgacagacaaggtggatagttgatgtaaacctgaaatctaatgcaacttcagtcgactgcttactcaaaagtccaaagaagagttttgatacaaaacccaaaggcttctgcaatttcactactgtcttagctgtggaggctgctggagtcaccacgattccatctccatatcaacccctgatacatagtactttagcctgcatttctttatggattccagatatttgatctgttttcttgtgctatatgcaactgtaccctggatctcatatatatctgtgacaagttttacttgctactgaaaaggatgctgtccaaaatggaaatcaagtagcatgcctcattgatttcatgatgtgttgtgctctagagatcgataagcattatcatttaaataaccatgcacctgtttaaaactatttaatacctatgcatgtgggtatgcatgttaggttcccattccttttggttgatagagtaattgaat

SEQ ID NO: 6492 - DNA, 695 bp, Zea mays
  Intron number 3 from transcript GRMZM2G169432_T01 (locus G RMZM2G169432) derived from phytozome v7.0 (chr-ID 1; pos 2 59308743 to 259309437 reverse strand)
aagagtctggtatgtgctaatgatatacatccccagatatatgcagttgtttttggtctagatgcattctgaatttagtatgaataaagggttgtaaaaaatcaagccaggttggaattcagtagtttaaattgatgaaatgtgtattttttttatggaacttggatttgttgttgtggtggccatggagtccattccaaactagtttaattttgttaacaagctactacaatttactttgggttacaaattcaaataatcttaagtactatttctttacatttctactagtttccagttctggcagaatggtaaatccttattttattacattaatgctatggtcagataatacattgtgtcttaggaccaagtccatagtacatattctcagtttgcttaggcactgatgtattacatgacaatagatgatcattttagtaacaaactaattcagttttaaatgttccattcttctcaagtagtagtactgtagtagctaacgttagatatatggctacataatcgatgtactactgttatatgcctttatttcagtggctagagcacacccttgtatattgcagcttctatttttttcacttctatctgtacattagttacaaatgttgcattctttgtctgtccatttgtacgtaacaagcaattccttgcagagttctctggggattcag

SEQ ID NO: 6493 - DNA, 842 bp, Zea mays
  Intron number 1 from transcript GRMZM2G441289_T01 (locus G RMZM2G441289) derived from phytozome v7.0 (chr-ID 1; pos 5 3659635 to 53660476)
gaggtgcaaaggtagtctttttgatactaagtgtttcctatcattttctaaatttctggatattgatttgattcatgtttttaaaacaggctgctgctgatgctcagcccccttaattttcttcttaacctccagtcatttaaattctcctttggaatcacttcatcctaggctactcgagaggaggccaactcacaacccgtgacttctttgcgtcggaacaagagctcacagttctcatgcatgatcaaagaagccaagcatctcgggttggcccttagcatcccttcattagatgcgtactacttttctctgctctaagaaaactctactttaagtagcacatgtaccagcaactctactttaagtagcacatggctaatcctacctctttgtttaatcgatctgttctttaacagcgtggaagaggcagaaacacagcgtgcattacttagttttgcctcttgcgtgtaagtacaatgccttgtcatgatactaatgaaaccaatgttaggcgcatgtttctgatgtaccatctattctgtttcaggatgactgttttacatcggattcatattcattcctgtttggtgcaaagacagtttattagacatgttttcataggtaacaaccttttttctgagccctattattgtaatcaaggtttggaatatgaaaatatgcagtgccccctttacgcaattaatagcattgcttgtttctggttttccttatttctgataaaatgtgattttattgtatggtcatgatcttgtgattatcttttcctatgttttttatttttagctgtcaattgcttcaccaaacttgggcggatctga

SEQ ID NO: 6494 - DNA, 982 bp, Zea mays
  Intron number 2 from transcript GRMZM2G703783_T01 (locus G RMZM2G703783) derived from phytozome v7.0 (chr-ID 1; pos 1 61909910 to 161910891)
ctactgcatctgcctccgctaatctagctcctaaggtaattgttatcttaattcctatcttcagtataatctagctttacaaatcagcttgtatagttaccaaatgttagttttggtaaattattttatttgatgagctaatctgcctccgcggttcgtattgatggttcaaaattcttgttcttttttgcactgcatattatgctaggaataaataaagttcctataaaacggaggctggaacaaggttccaaccatagtctgaaatttgtaacaaggttccagtcattgatttgagaaattgatcttgtatattctattgcaagtagtagctcaatcactttcttgtgcatcatacaccgaatgaaaatgaaatattaggcaattattgtttccacattcaataaattggtagtatatgtattttgtatttctaaataaggtgagaccccatgggatgtgaagcgtattggtaagcaattgaactaccaagaagttattataggatgtggataattagtggatatttagtgcatgactgtatatttgacaatatgcgtttcttttcatttttctcttgtagattcactaagttatacacccataatatatgttggtttgatagttttattcattattattacggtagaaattgctatcatcaagttgataggtggacaaatttcaatgccaaagttgtttcccaccgttaatgatgtgaatgtcataggtgtataaatgagaaaaaatgaataattggttaggaagaacgtcagggaaaccagtgacaacggctggtcagttccccttggaatttacgcttctatttttttattgcttgattgtgatcacatggtaggcctcatgtgcactttgctgctgagggttagtcagttttccttggaatttaccattgttcttttgtcttattgcttgattgtggcctgatgggcgctttgttgctgcatttctcaggttcgac

SEQ ID NO: 6495 - DNA, 458 bp, Zea mays
  Intron number 4 from transcript GRMZM2G703783_T01 (locus G RMZM2G703783) derived from phytozome v7.0 (chr-ID 1; pos 1 61911229 to 161911686)
caggaaagtctaaggcccttactaattacttccaagtaagtagagcaatcaccatcacacagatttattcaaggtttttttgtgttaagccaattgttcgttttcatgtaatttttgtccactaatattttattgaataatttgtgtgtcgtcgcaacgcacgatcattgtactagtagtattgaatgctccatttgtagttcttgtgatattacagtactgcagtctaaaatactgaaacattgtacactgtaataccctgaaagactgggccaatcaattttgactcttctttacttgggcatgtgtttattcaaaaaattcttggtagctacggtctgatttggactctatattctatagtttatattgggaaggatttcttaaatagtctactaatgatttggtttttaatttggtcaggagggaggtcctagaggtagcaagcagatcgtggt

SEQ ID NO: 6496 - DNA, 785 bp, Zea mays
  Intron number 1 from transcript GRMZM2G700839_T01 (locus G RMZM2G700839) derived from phytozome v7.0 (chr-ID 8; pos 1 75183679 to 175184463)
ccaccgaagcggcgaaagatcgagccgcccaggaggtaccggtttcgaccacactcccaaattctggtggcgagattcctagcaacatgtgttgcgactgctacgtgctcccaacgcccatgtccgaacgagctgcgctgcccttctagtttcgatgggtggattggagaggttccgtcctagctagtggagtggggggcagggcaggggtgactataagtgtaggtttcttttgttgtgtccattgttaggcacctctgttaactcaactccagttgtgggttgcaagtcaaatatgtttctgcttctttattcatttttatcatcactaatccatcaaaccagaaccatctatcctgtcagttaactccactgcgcgtgtagatttaagtatcagtattaggttatccggagggcatatcttatatataccataaaataacaaaaggaaatcatagtgcaattaaattcatgccctgtagttccttctcagatagaatagcgcaatgcaagccaaataggcttgtgtgtcttcctcagctcagtcaagacaaaaacaagtgattctgctatgaacttcacatcaaatgcttttttaatcattttctctgttaatgtattaagtaccagccaaatatactgtatcttctactccttttgtttaacagttaccgattcacaagcaagcagcaactgtactgaactattgtgttgttgcctgttccataatttatctcctctggaacacaggaccaggctttctcaagttaccatcgataacaagt

SEQ ID NO: 6497 - DNA, 709 bp, Zea mays
  Intron number 3 from transcript GRMZM2G062042_T01 (locus G RMZM2G062042) derived from phytozome v7.0 (chr-ID 8; pos 8 7521071 to 87521779)
cagagagtggtacgtacatattacattttacaccagggaatgcaactaaagtcagtgatttcttctttgtctacaggaatgctatggcttaatgccctaatctttatattcctcttcttatatctgcacttctatggacactaggtgacactaaattcacaagatgtcttcattgatataagaaaccctgatgcacaaaacttggaactcgatagatatttgtgctctaattttattattgcatttacattttttggttatagtattaacgtctaatatcaaaggactgctattgtggggggctctaatggcatttcttatattgacaacatgtcttcagtgatatctcaaagtagtgcaaagggagagttaccaagttgatcaatttttttctagaaatttcactacagccggttatagctgccaatgaacgtgcatttagataatcatctctagctaaaaatatctactgcacttatcatgtggctccgttttttattggttactcatggagatagcattgtgttaattgtgtcagatttccataagagtgtacataactgatatatataatgggtacttgatacaaccatatattgtaaagtatatcatcatattggctctcatcttatatcacactacattcttaagatggatcatagtgttcatttgtctgaagatttatgtgatgttttaacagattcaagaa

SEQ ID NO: 6498 - DNA, 462 bp, Zea mays
  Intron number 1 from transcript AC233864.1_FGT008 (locus A C233864.1_FG008) derived from phytozome v7.0 (chr-ID 8; po s 124062274 to 124062735)
ctccgcttcaggcagctttcgccgttgttaataaggtgtgtgtgctactttgatttattgtgtaaatagatagtgtggggtttgtctccagcctggcctgtttatgtatagtttggagttccgacgatcggtaagaactaagaaaaaaaagcttaatgtccaatgttttcaagaaggaagaagaaaagagtaccagtcaacgagtttaccctttctgctagtttagactttagtttgtgactaggtatgtgcccgtgcgttgcgacgggagcaaaaaaaattgtatgaagcatagatacggaacgacaaatcactacactataaaatgcttaaacgtgcaactaggtccatcatccagttgacaagagctatactatttcatggggcagcacaaataaatttccgtaagatgttaaatattatgtagggtacagaggctttatatatcacaagaggaagttc

SEQ ID NO: 6499 - DNA, 1047 bp, Zea mays
  Intron number 2 from transcript GRMZM2G091715_T03 (locus G RMZM2G091715) derived from phytozome v7.0 (chr-ID 4; pos 2 16707427 to 216708473 reverse strand)
aattctctgaacttggtgcggattcgctggacacggtaaatcacaatatttcttttcgctgatgtcatctacatatgtcacttgtaaaatgattttttaatggaaatgtatggttgtgaatttgtcaatttatacttaggcccgtttgttttgttggaattgaattccattataataatcataatttagacaaactaattaagttaatatatttatatatttaatatattagtatattatcctgaatcatatgagagatatagttatacgctacacgtatgctatagagaagtaagtataagagtgtggtataagttgtatattagaaaagtagcatgtaaatttatagaaccaattttatctctcaccctatgaatttgagataggcttatatataaactttggaaagttatggaatgtcacattctaaaaaaatagcttactccattagttagattccaattcttcgaaatgatgggaaacaaacgggcccttagcctaatgcaactacaatgccctatttttttttcttttggcctgaataattagagagactgcaaacagtaagtaaactttgacctatctacttcatactgaggaactttgttgcttcaatataatcgctgtactccacacttgcctccaggacattgtcagtcagtctgtaattccttattccctataaggactaaagaagcactttgaaataatgttctgtgtagtaccacagataatgcatactccatctctggatgaatcaacttctagagttgcaacagtttgatcaatttcatacaaaaggtactaaaaactctgacaacaaaaaggaataccatgaaaatatgtttcgtgctgtatctgactattcaaattccttgtcataaatatcagttttttctatcaaattcagtcaaacttaaaaagaaaaaaaggattaggacaactctagagatggatttattcaggccggagggtggatataacttgacaggcgaatgaaagacgttgctaaaggtccttgcaaattcgttgcaggttgagattgtg

SEQ ID NO: 6500 - DNA, 517 bp, Zea mays
  Intron number 1 from transcript GRMZM2G087753_T01 (locus G RMZM2G087753) derived from phytozome v7.0 (chr-ID 1; pos 2 91887707 to 291888223)
cgatctgcgggtaccactccccacgcttctccgaggtaaacgcccctccctccctcgctccctcactccctgcttcccttcactctcgttcggccgaacggttgagtgcttgtagttttccctctcgagcaagatgggaaccggggaaggcttccgtttctaatacattttccgtactgagttcttcaggatattacttggctcccgcaatggcttcagccgtatagcacgccggtggttggcgagcaccggaacaacagtaccgccgtttcatcgctttcttgccaggtgctcttcttattttttttttctcttgcacttgtaggctcggaatctcttgactccgagttattattttgattactaaatatcctaatcaaagccgtaggtgtttcatttgatcggaaataacataccgaaatccagactgaataccactgccatttatgatctgatatcttggtctcttcatcgagttgcagaattgtgcgtttgtcgggcacccttcgcaggagca

SEQ ID NO: 6501 - DNA, 489 bp, Zea mays
  Intron number 1 from transcript GRMZM2G324172_T01 (locus G RMZM2G324172) derived from phytozome v7.0 (chr-ID 4; pos 2 15046202 to 215046690 reverse strand)
atcactatctagatctcaaaggtctcgatcccactgtaagtgtgaagcgatttgtaaaaactaaatgttaaattattttgttttttaacctacttggcatgtgaaatataaagacacttagtctgagattcttcactattggatttgtttttccagattttcagttatactagaaattctgaacacatacaacttaacactactattttctcataattttaaataaaactgacaaaacagactaagctcatttcactaactataggtgctcatttgttatgttgttttggtacattcgatatgactgttggaccactgcattaggagttgcgacctatttgattgttaggcacttattggtttaggacttaagggttctgttctgatatagattggaatgtatggacatagttggctctttgatgttgtatatcgttttcttatatgtttgcagctcttgaacactgaagctcctgacttgtacataag

SEQ ID NO: 6502 - DNA, 575 bp, Zea mays
  Intron number 1 from transcript GRMZM2G066352_T01 (locus G RMZM2G066352) derived from phytozome v7.0 (chr-ID 1; pos 4 8238099 to 48238673 reverse strand)
gcccgcactcctcctccgcttcactcgcccgccaggttcatggacgtacgggcgagatctggagcgcgcctctgccggtgtccttgaacgaagacgacctagcaaagattccccttttctttggtagcatcggtaggtggagctgccaaacgctatcccatccgcgtgtcgtcatgtgctgggtgaaagcttcttctcgaaggaacagcagctgcttgcctctctcatcttgctagcttgcacagtacagtacaattctaatcttgttgccatgtcatgcttcccagcaggatcaaggtcgttgccgtctccaggtccatcaaatgcgacaaggtcgagcgcgcgcaattctgctccgaagtcatctcctttcaacatgttgattttgatctgattcttctactataaagtgttggacatgttaatcatatatattcaacccaaaaaagaaatcccagtgttccggtactttcagttttatagttgaaaaaacacttgcatttgttgctgcttaatatctcttttacaattacattattttttatctgtctatttgtaaacacagagaccagcac

SEQ ID NO: 6503 - DNA, 770 bp, Zea mays
  Intron number 3 from transcript GRMZM2G043547_T02 (locus G RMZM2G043547) derived from phytozome v7.0 (chr-ID 4; pos 9 4862136 to 94862905)
acccagagagcgtccagggcctgcaggagtggcaggtgtgtggcaggatcgcttcttcctttcgttctattttgatgaaatcacgtcttaataattaaacccggtagcagaccactgaatctcttttttttcttgcttgttagtttgacttgagattagaaaagggcctaatgtttccaccaccaaacaaaattagcaatgaacatacaacattttggtggataagttcttaggtaaggagaaagcagatgttgatggtcgagagatgctaaactggccttctgccaatagctattcagcaggcatcgatctaataattctattgcatgtttgcataggatatcgaaaggacaagtatcttgaaaactatgacataaatcgttgtgttagctactcataggagtacatttttggcttccaggttgtttgaactattttgttttttgaacaggataacatggagaacttcaaccctttcggtgagaatggagagtagggtacagggtaagtacaacttcatttaagcatttgcagttctctcccctcgatttctcgctttatcgtcgtctctacgagtgctttcgcgaggggaggcggcgatatatatcactgagtacgaggggaggggtgggacgtcatggtgtgtgggtttggcccgtgaatgttctaggagttgatgaagatgttagttctcatgactgaattgtttggccaaggttgtttattcttttgtctcacatgtttggcccgtgctcgcaggtcaccataga

SEQ ID NO: 6504 - DNA, 789 bp, Zea mays
  Intron number 9 from transcript GRMZM2G043547_T02 (locus G RMZM2G043547) derived from phytozome v7.0 (chr-ID 4; pos 9 4866227 to 94867015)
gaagctcctctactaggacctgtggctgagctgttagttcatcatgacattttgaccaaaaaatggtttgcctttccttgctttatccattccactcaatgcttgagcaagtgtctaactgaaatatgtcaacaggaaactgaagaacccagatatttctgagagcgagtgggcggtgcaagccgccgccgcatcaatctactcgacctgcaacatggccatgagaacggagaacgtgccttgcttctgacctcacacttgtagttgtagtttagtttcttgcttttgctgatttttacctcaaaaggtaggcctcttttattacctttagtctttgtgaattgtgaccacttgtccattacactagcggcacataagtttggagggatctatcattttttcttttgcacttttacgtctgcaaatatggttctatttgtcacttccatcatcctgattggtcagacctttttgtttcataactaatcatttggttgagttaaactgtcattgacatcctataggtcattctattctgtttccattatgttctagaaggatatagaaaccaccaacaggaagctcactctaatcaaatcacacttcagcttgcaatatataccatgtcgaagcttgccatttgtaaatcattgctgaaagcagagcttgtagtgagcttgaaatcattagaggttcataaaagtctaaatagggtagaaaaggcaccatagtttctaatattatgtttttgttgcaaattgaaatgcctgatggacatatagtgaagtt

SEQ ID NO: 6505 - DNA, 941 bp, Zea mays
  Intron number 2 from transcript GRMZM2G037585_T02 (locus G RMZM2G037585) derived from phytozome v7.0 (chr-ID 8; pos 1 59449986 to 159450926 reverse strand)
gacaggtaagcatatctgaaacatgacgcattgacattttgattgtaaagctaaatcctctcaaatttggcttctgagttgaaacattaagtaaaatgttggtgggaaatgctaacataacgattatacttgcgccctggattagccctggatactaacagagttttacttcccaggctgttgctgtgaagcaacttgatcgtaatggcctccaaggaaatagggaatttctggttgaggttctcatgctcagtctcttacatcacactaacctggtcaatctaattggctactgtgctgacggtgaccaacgccttcttgtttatgagtttatgccattggggtcactagaagatcatctgcatggtttgtgtatctcctctttgtcatctagtctccggaatattccatgagtgcctgtagctgtaatgaagcattgtgttattctataggagtggcgtgcttcatctgactgttaaatctattttgtatatagcatgactgtaactgcgcgcttaggttgatagatcgtaattgttggttcagcttaaaatgatcggcatgcatgttgtactactgttggatctatcgtataggtagggtgctatttttttgtattgtgtgcctggccatgtaaatttgcatgcactatctatattaaaaaaaacctcgaccagagggagagatgcccctatgattttgtttttaagaagtttgtgccacccttcaaacctgaactggtgatggggggtttcatcaacccccagacttcaacggctaactagtgtaactcgggagaagttggcttttcataggctaaaatgaatatgttgatgttttctctctcttccatttctttgcattcagttcacgggtcttgtaactgaaaagtatttatttgtgtagatctgccaccagataaagaacctctagactggaac

SEQ ID NO: 6506 - DNA, 693 bp, Zea mays
  Intron number 2 from transcript GRMZM2G165137_T02 (locus G RMZM2G165137) derived from phytozome v7.0 (chr-ID 4; pos 2 5662776 to 25663468 reverse strand)
gccaagaagaacctcttcgttaagagatgtgagattttgtccacttaacattcacatgttctctctgctgtcgctctagtagcatacaatattaattaatggaatctccaaccgcatagatagagtttattgatgcattaatacaatgttgttgggataatcttcattccatgtgctgtcatggctcttctgtttggttcaaattcaaaaggagcaacctgtgatgctggatacattgagttcacaacatctactgaacatagtttgtggtttttgagacaaggcctatgatatctagtccctagccttttctttgaaatttaatagaattcccttaattacacaacaaatttaaagcaataaaccttataaaaatcagtaaccggaaggcaggcccatgcactggcttctttattggaagaaggtattgtcatcgtttgtaacctggaggttgttttgatcaatgtcaaatatatgatcttgaagtacaaaactgttttgatcaggttgttttgatcatgcaatactagtgttttgccagttttactgcttcgcacaaaacggtccagcttgatcttagattgccccttcaatagctgtttgcttccagtataatgaatggtttggttactatgatgttttgcatatctattatgtcttgaatgattaaaaccattttaggtgtgggaattg

SEQ ID NO: 6507 - DNA, 707 bp, Zea mays
  Intron number 1 from transcript GRMZM2G384691_T01 (locus G RMZM2G384691) derived from phytozome v7.0 (chr-ID 8; pos 1 21879987 to 121880693)
gtttctacaccattgtctccaaggtagttttactcatcgataacctttgttgcaggtaattcccattcattgttcttattgattaacatgctgacacttaagctaatgtgttcagtgttgcgaggaacataatccaatagaaatcttcaagtttgaaacagagatttattacaatttgtttaacctgaagatctaacaactctatcaaaacctttgtttcttacatgcctacctgctttacattgtagcctccccatccatccacccacccaccaagagtgaaaaaaattcaaattccatcatttttatcaaaaatgttatatttttagtgcttcctttgttaagcacctgaagtgacatctttatttcttccaaaaaattgttgtgttatactcgcaggcccctgttcctctatccatttttcaacacacttcatttcccagttatacaaaaaaatctttcaatgcattttttggtgaacacgaacatatttacagaaatttgttttaatgagtgttgtcttatgttattccatgtggcatgctatattgtaaatatcaagtaattgtgtgcttcttctatatgaatatgcgcatcaattcttgcaatagttaaatctatatgtacatttttacatatctatatatgcattcatctgccaaacgttatgtgtaaagctattttacaatttattaaccacaattcat

SEQ ID NO: 6508 - DNA, 662 bp, Zea mays
  Intron number 5 from transcript GRMZM2G071883_T02 (locus G RMZM2G071883) derived from phytozome v7.0 (chr-ID 4; pos 2 16764530 to 216765191 reverse strand)
tggtaactttcattttttctgaccgaataataaatacatatgctgtggttccctcttcaacaaactggggttaatcttgacaggcttagcattcagatgacattcagagtttcagaataacaatgttcagtagttgttataccacatcgttaaaacgtcaaatgatagccttttcgtcttattccatccgtttcagatcataattctttttaacctttttctaagtcaaaacatattaaggtcgaccaaaattataactaaaatcacaatgatttataatgtcaaatagatatgctacgaaaaagtaactaatgaataatctaacgatacttatttggtataataaatattactcactccgttgtaaattaaaattcattttaataaattaatagattcatatacttgatgcatgtgtatttgttttttatatacgtgtcatcagtatccattttaatatatacataaaaattaagagatagaactaatactgtttttggacgaggaaagtactgttttattaaataatatggtcaaagataaattattttaacttataatttgaaaccgcaaggagggagtacttcgaaaatacacatgcaatgatatgctgggctcttttcttttgttttcttttcttcttgtgtagattcctacctgca

SEQ ID NO: 6509 - DNA, 920 bp, Zea mays
  Intron number 1 from transcript GRMZM5G896834_T03 (locus G RMZM5G896834) derived from phytozome v7.0 (chr-ID 1; pos 2 1379174 to 21380093)
gtcacctcaagctgaccctaaactaggtttgtcttcgctcatgcctgcttcacggcgctctcttgtccaagtctcttcttgtcactgcccctcacctcctatgccacccgaagtgcagatccatctggccttggattcgttcgaccataccaaatctgtgttgtttctcaaatccgattcagcctcagctgttgctgagatttgcatgcttggtggcagagtactcaatgtgctatttgatagcttgttgctctattttggattgggagttcaattccgcccagatctacatcataaaggtgatttgggtgaggtggagctttattttgtacagttagttttgtgtgtgtgtgggtgggagggttgcgatttgggcatgaagagatccttctgatttgagctatctgagctccagaatcatctcttgatgctgcctttggcgttgagtagatctgaactgaggcacccggctttggcattgagtacatctgagctgcattgtgagtttgtgacagctttgggtggaggagctgttgtgccgtggttttgactagaggtgggctgaagcacagaggcttcctgtgcatgcgggttggggtgcggcagtgtgcaccagagatgcatacatgctacagatcgaaatatgtcaaacactgcaatggggaagaccattattgggtagaaagtgtcacagaatattatgtttctaatcggcatgatcttttgatgtccccttgttttatcacttatcagacaaaggaagttaagccattcctgctatatgtgaaatactttagcatgtattgtgttcttagatttctatgtcaagaaaaaacatggaaaattattttgaaatgttgaagtgctctctctgtattcttgcagatccatatcagggggaatttcctgagacaatcgaa

SEQ ID NO: 6510 - DNA, 558 bp, Zea mays
  Intron number 1 from transcript GRMZM2G041797_T01 (locus G RMZM2G041797) derived from phytozome v7.0 (chr-ID 1; pos 1 95886680 to 195887237)
gcgttaaggccaacgtgctttccttctggcgccaggtgatgcccacgatctgtctctgaatgcttttgatttttttttgcccgtagtttcgtctcagctgatgtgcgttgttgctgcgcgtcaacgattgtgacatgtgtggatgcggagaaggggttgttttattcattaactgattgatttgtataatttagttttccactgagattttgtctatattccggaggaggatcacgattttctgctatgacatgagtattacatttaccccttttcaaatttgtatgcattgttctgtcagctgattaaaaaatattttccgtgcttagttgtacattgttgacattaatcttataaaagtttgttcatgccaattagtgagtactagttggaaaatgtgcagtgaaaaaaaaatctagctttccttggtgcagtttgtgttgtgatttgctagttttgttatttcttgtggttgatgattcatcatgttctactttttctttgctaaggttactgatattcttaatttctccccagcactttgttttggaagagaat

SEQ ID NO: 6511 - DNA, 548 bp, Zea mays
  Intron number 1 from transcript GRMZM2G081922_T01 (locus G RMZM2G081922) derived from phytozome v7.0 (chr-ID 4; pos 1 26942114 to 126942661)
gtgggttttggtcggggatagagatggcaatggggacccgatccccgattccccgcggggaattcttccattaggggatggggatggggaagaaacttcccccgcgaggatataaacggggaaaatttatcccccaacgggtaaatatggggatggggacccgttccccgcggggacccgttaaacttgcatgtgactatgtttttgtgtatcggttaacaacaaaaataaataattaccttgtcaagagaccacgaattgtacaaatgtgttcattttgatgtatgtatattgtttatgacatctgacaatttgtataagtgacaatgtttaacattaataacaaagaacatatgtcttaattataatttaaacggggatggggatccccgttggggatttatcctcgtggggaatggggatgttgaagaaatgttccccgcaagcattcatggggatccccgcggggatgttttttcatcgcggggacagggatggagagctattccccgatggggaattccccattgccatccctagtcgggggc

SEQ ID NO: 6512 - DNA, 513 bp, Zea mays
  Intron number 1 from transcript AC196215.3_FGT006 (locus A C196215.3_FG006) derived from phytozome v7.0 (chr-ID 1; po s 15689645 to 15690157 reverse strand)
gccgtcgctggcttctctgttcgggagcaggccatgtacgtgagtttgaggaagaagatgatccatgtgtctatggcaggtgggcccaggtcacatgcatgtgtctagagttgcagattttgtgttgttttcccaaaaatcatatctcaagttttagagctccaaaaatcacgaaatttgttttgttggcttccttatgaaattctctaactattggatctataggttggcatgttttagtggaaaagtttttctgtagaaattcgtaattaaaaactggtttagagaataaacaaacttgcttctctccataattttaattataaaaatccaaaaatgatgaaacctattttgttagttagatgttatcatactccatctaggaaaaatataaaacttacatgttgttcactgttttcttggtgtgttaattaaaacatgttaaataggaaaaaaatgattgttttgatttttatttttggatctgtagctctggtgctccaaataggttga

SEQ ID NO: 6513 - DNA, 587 bp, Zea mays
  Intron number 7 from transcript GRMZM2G398755_T01 (locus G RMZM2G398755) derived from phytozome v7.0 (chr-ID 4; pos 1 48232504 to 148233090)
gaaaagatcccaaggtatgaattttcttaatgagcacagagtacaaatttgtcatttacctaaccatttgtgtgatgaatgttgtcattcattttataagtattatgaaggacattttactgtatatgaacatcagataaaagttggattgaggaagtttcttgtttgctgtattgttagtaaatcaaaacttagcactttttgggtactctcagtgttgttattgtaaatactaattcaacaaaaagctgtaaatgtagttgtagtccgtattgtgctgataagtttttgtgtactattgatgataatatacttgaatggagcacaattaaccagtggtctgtacttatatgatctgtgaaaacggacacaataatgcagaagcagaactagaaaatttagctacagggtgaaatgtaggttagccatgttgcacatccttcaaaattaatagatgtaagagggtttgtaaaacctgtgcagtgcattgattccacagatattatcttcttcttctacttataatgctagatttttgtcagattagtcttttacatgtcatccttttttccaatctcagattgtga

SEQ ID NO: 6514 - DNA, 932 bp, Zea mays
  Intron number 1 from transcript AC196154.3_FGT018 (locus A C196154.3_FG018) derived from phytozome v7.0 (chr-ID 4; po s 236931565 to 236932496 reverse strand)
ttgtgttgaagaggtgccacagaaaagattgttaggtatcttttttgtcgaaacaatgagctggaggaataatttcagccctgcaaaatattacagacagagagaaaataaccacaggaacctacaatgccaatagttgagttcctgtaccaagaacagaagaaaatactgacttattctttgggaatcggaagacgtcaccatgagggcttgttcgttttgctctcgatccatgtggattgggtgggactgagtgggtttaaatcccaaacaagttaaaatctttcataatttttttcaatcccatccaatctacatgggataggaataaccgaacaaggcatgaatatactttccatccagactcttcctggtcatcatccgcttcctcatcgcgggcataccttcagggcttgttcggttctaccccaatccatatggattgagggggattgagggggtttcaatccccagtaagtcaaaatcccctccaatccatatcaatcccctccgatccatatggattgaaaataaccgaacaaggcctcaagtggaaatgtacaatctaaagtaaacatacagatgtacatacaactgaattgtatcaggctaagttgctaacacgttgtgtgcactgtacctgagataatcagccaatgtgatcagctgaatgtataatcaaaatttatctttgaatgtgttaaactgggctgtatatatgcatttatctctaaatgtgataaactgtatcatatatatgagttttctcctaatctgaacaatcagtgaggtccaattctttttttgtatagatttccattttcttttacattcccctgcaccgtgtacaaacaaatatggtactgagcctaaaaaacctacgaacatagctctattcatcaccattttgatatcacgtataacatttgtag

SEQ ID NO: 6515 - DNA, 479 bp, Zea mays
  Intron number 2 from transcript GRMZM2G070394_T01 (locus G RMZM2G070394) derived from phytozome v7.0 (chr-ID 4; pos 2 40192157 to 240192635)
gaggaggtacacatctatgctattatgctcaaatgatggtagctaaaagtaacttgtccattgttctaggaaacacaacttacctcaagtcatttgattttatgtatgtttgttacaaaatctagattgaaatcagttgtacaatctagtccagtttgtcaccccactgtggctagtttcatcctcttttttttttcctaaacagggtagtttctttcgatacagttggatatttggattctgttaatgcacattgccagtgagttccattttactgctaattgctactaagacaatctatcaactctattatctgtatctgttcaaagtgagttagaaagaatgctgtcttttttttccctgttatttaatattaacaaattcatgcttcattctgtaatcgaaaagaacgcttaccactggctttatgaagtcctaacaatcttggtaatatgttcaatatccattcatatttcagg

SEQ ID NO: 6516 - DNA, 481 bp, Zea mays
  Intron number 1 from transcript AC197540.4_FGT009 (locus A C197540.4_FG009) derived from phytozome v7.0 (chr-ID 8; po s 145751909 to 145752389)
gcttcaattggagtgaacgacccgatcgcgttgaggttatgtattttgtctttgccgagtgccagagatatggcactcgacaaagaagtttttttatttattaataaatgttaccgagtgtccactactcaaacactcgacaaagcttatttgattttttttctaaaacttttccaattgtgttcctacaatctctgaacctacatgttcgatttttggcacatttgttagtgttttctatacatattaaatttagttcatttaattgtatttatttggatagttcaaattttaactgctagtcactcgagtgtttgccgattgttcctagttgccaacagcaacacttggcaaagatatcgttaccgagggtatgagatttcgtactcggcaaagaacacgtttccggtaatgtttgtactgttttaatccattattctttttagtttcatccaggaaggaagaaattttttactccaaa

SEQ ID NO: 6517 - DNA, 596 bp, Zea mays
  Intron number 2 from transcript GRMZM2G122160_T02 (locus G RMZM2G122160) derived from phytozome v7.0 (chr-ID 4; pos 1 1360079 to 11360674)
ctgctgcccctaggtgcgtaccactgctgcttcacatcatctaaatccatttcgattttggtttgcgcaacagttgttacgtagtagcacagcagaactcaagcctagctagctgtcttatgtctcctggacaaaaggccaagcaatttgactttctaacatagagatctgagtttaatgagtgtttataggtggaagtggaacatgtggtataaaatctagttgagccggatggcaaatgacagagcatgttattacgtatgtgtaaagctaaagcatcccttgctgttcagtctgtgttggtattccttggtcaaagctgtatctttgtaatcttaagaagttaccgcctttgctaaaacaccgtgttctgcaaggtaacactgtttccttttatcaggcaaagcaaccaacatgctcagagattgtacctaatgtttatcattaactgccaaggattattaacaggaaaaaaaaacagagtggataattgattggctaagctgaagtagcctactacatgcactgttccttagtgttcttctctgtaatatttgtcagggaggagcaaggagataaagagaagcctaagcagc

SEQ ID NO: 6518 - DNA, 615 bp, Zea mays
  Intron number 1 from transcript GRMZM2G067257_T01 (locus G RMZM2G067257) derived from phytozome v7.0 (chr-ID 1; pos 9 4257903 to 94258517)
aacttgctcaaaattggggaatcaggtagactgatcaaaatttaaacatagttttcttcatatatgaactgctcttcacattttctagcatgtactaatatagctttcaatgccagagcaacggttctttatgatcaatctcccgatttttccaccctacttcattgatggagaaacatggggtgagcatctattttgagttttatttttctccttccagcacttaatagtttgtttagcaggctagagaattccatctatagtgctatgggcaatgcccaaatgcatatcagtgggtacgtttttcatcaattagctagagcattttgatgtttttggttatttcgcttcaatttatttcttgttgccttatcatacatcgcagaggaagtatgggaagacatgaacattactgtcttcgctagtaagattgacggtgaagtcttcttgaagtctaatagaccgacacttgtgagcagcacaagctggtctgctcttttgaaccatacagtcattgatatagccttctttgtgttcattgcacgtgattatcgagtgaatagttcaaatatgagaaaggaaataaacctttagcacatatttttaggacgccag

SEQ ID NO: 6519 - DNA, 558 bp, Zea mays
  Intron number 1 from transcript GRMZM2G139018_T02 (locus G RMZM2G139018) derived from phytozome v7.0 (chr-ID 8; pos 1 56489019 to 156489576 reverse strand)
tggtactgtctactgcgtgtttgaattgcaagctatgtgtgcttcttttggctcttttcctccggttgtggctttttgcttacatgaaactctcgagtagacaatctagcgctaattgattcaggtgtagagccttcctcggatacctggctccttttggctttcatagaactgcagctgcaagtttatatcattgcatctcagtatgcggagtgaataagctgtatacacaaccataatgacttcaatatccaactgtttaatatgatatcagtattgatggaccccacacgcacatagaaacggccacttaagattggacattccctctgttttcacaactactctgtagatcaaaggttcttagcatgctgtatgtatagttcttgttctattttaataatgaaatgcatgtctagatcttttttgtagtagagattatgtaatgtgtggataacctggaaactgcacaaattttgtttttgagtatttgttttttatgcttttgatcaaaatttctatatatgtagcttctggacaaggttataacgaaacttg

SEQ ID NO: 6520 - DNA, 656 bp, Zea mays
  Intron number 1 from transcript GRMZM2G126865_T01 (locus G RMZM2G126865) derived from phytozome v7.0 (chr-ID 4; pos 1 63201783 to 163202438 reverse strand)
gcccggcgtcgtctcggcagcgatctagatctgaggtcagttccctcccctcccctgatctccgcgctcgtcactccttaacccactcctcggccacagatccaggcgtgtctgtcactagggcttgggatttcatttcttcatccgttggtaagggagggagcactggtttgcctagactagatgcatgcccgttttgttccgcaggatcgtttcttactttctttgttgtggttcctgcgccctgaacacgacgagtacttgattctggcatggatgtgctcccgatccacaaagctggattcgtttgctgcgtttagatccactccgtttgaattgacgttgtctccgccattattcatgcggtggagcaacatgtcttccccccttttttttctgttatagcagtttattttcagaagtttctggcttctgggttctaccgaacctatgccacatgttaatttaatcctggagttttatcttttttattatcccgtatatcttgatatctccacgggaaaacggagactggaaggggaaaagagagagagagagagaggcaatcttaagaatcgaattgatttattattctatgatttttttttgcaggttctgaggttcttgattgagcggtcacaagacctgtcactgca

SEQ ID NO: 6521 - DNA, 875 bp, Zea mays
  Intron number 1 from transcript GRMZM2G048584_T01 (locus G RMZM2G048584) derived from phytozome v7.0 (chr-ID 4; pos 2 09865333 to 209866207 reverse strand)
gcggtgagtgaacatatataataaacttcgaagctatttaatttcctgtgcatacgatatttaattagttgttaccatgcatgtacaacttgtttctttgattttgtttttctctctcttgttcggatgatcgatctgcacattttgttcgtcgtcgttaattaccttggctatcatatctatcatatcacatggaacaaccgtttccccccattcctggtgatagtaaacgggatataatgcatgtaacagacgatgcagtggaaatcatacatgaatgcatgacatttcgtcaccaatgcaataattaaggcaaaaacaaattaaagccctgtcaccatacttatccatacattagtaaaacagctagctagggttgttttcagccagcaggatacatgacatcgtattctttgcagtgcacgcacccgatgactgtactgacgaaggcctattatcttcatcactgtatccccccccccccccccccccccccgccctccaatttaatttgcaccgctgatctacccgatgcacaaacagatcaaaaactactaataagtagacaaattaattatagtgtaactataattgataatggactctaaattttacactataatttatttagggccctatcattttctgaagaaccatttatcatgattcattaccacctctaagtttaactgaacttggtttcacgatgctagctgcttatgttagctaaggtgcacgccttcagtttcatcaggaagatggttaaaaacatgcatcagccctcgtagtcgtcccctcgataggatagctgacgatcgccatgcatgtctgctgatgcaggtccggctggaccctggctctttgaggatagcagt

SEQ ID NO: 6522 - DNA, 409 bp, Zea mays
  Intron number 2 from transcript GRMZM2G060470_T03 (locus G RMZM2G060470) derived from phytozome v7.0 (chr-ID 4; pos 1 84858293 to 184858701)
cactcaggtagtatattcaattttatgttatttatccatgaagtgtgtctaaactataaatccatgttaatgctaacttggaatgcacatttactgagcaggacatgctctgttttttcacttcattttgtcaaggctttgttgttgttaattttgataagctgaaaaaaaaattatatagtgtttatgattttgatccttgactcttcagtaatatctgaagaataaccaacgcatgcactttccacagaaacatagatctgttgctggtgttctttggccaatgtgcatgaattccttaatttgtttgagttttgggtgtttatgcagctaccaatatatgtgtcggtacacattttgtaacttaactgacatgcctatttctttggcacaagtgcgaaggctactc

SEQ ID NO: 6523 - DNA, 416 bp, Zea mays
  Intron number 3 from transcript GRMZM2G060470_T03 (locus G RMZM2G060470) derived from phytozome v7.0 (chr-ID 4; pos 1 84858846 to 184859261)
aagtaagggttctatctcgttcctgctgttacattatagtttactagtttactatacctgctgtttatgatcctaacttcctatattgattcatgcaactgtagaagttgtgattctatcactaccttcggtctttggccttatgcaaaaattataattataatgacaacaacaacaataataaacatataaaattcaaaagcccccctcattcctttgtagtatgtttgttagtaaagtgcccatctaatgactgcttgagaacaatgctggtttgtcgatcccaaattttacctagtatgatctagtatgtgttcttagagaactgcagtattttgtatattcttgataaggaccttttccccctattttcttggccagattgttcttacagttgcagagcatcatagtgctat

SEQ ID NO: 6524 - DNA, 849 bp, Zea mays
  Intron number 3 from transcript GRMZM2G011588_T01 (locus G RMZM2G011588) derived from phytozome v7.0 (chr-ID 1; pos 2 56486696 to 256487544)
ttggacgaggtgtgtgtgtctaccgcacttgtaccttatcattttaacaaaacttacagtattatatgtttgttttgctcgatttgttgctatcgagtgttgaggtaatccgtgtgaagatctgtaggcttttttccccaaagattagcttcacctataatccatttgatattctaatatgaattttaataaactaatacttcatcttgggacggctgcatattacctttttctcatttatcagaagtctactccattttctgccttctgttctttgaaaaatacttaaggaatcccaaccccatcagttctgtttgaattgtggcctaattactgaatccaatagttggttcctgatccaaaggttctttacaatggttcagctccatgagcttcacaagttgagttcttgaaaaaactgggaggactagtcaaaggttattgagtactcaaggttattagtttaggtggttctagccttcttaataatgcctaggcgtcaacaattatagctatttaacaaggcttgaacctatagtagcatgtttttagctgaagatcctccaaacaagcaatgagcatatttggaaaaggaaccacaaaactgttattcaggacaaggtcaccaccaaatgcaggtcacgttatccatatttgtcagatgggtgcataaatatatttttcccttagaaagacaaaattggtcttaacatgggactgatcagatgaatgagctaggtgtgttttgattgtttcactaatgcaccatctggtatgtctgaatctttaagaccaaattgaaatttgctttcaggtggataggaagtacaaacactattatcatcagat

SEQ ID NO: 6525 - DNA, 754 bp, Zea mays
  Intron number 5 from transcript GRMZM2G023313_T01 (locus G RMZM2G023313) derived from phytozome v7.0 (chr-ID 1; pos 1 82102570 to 182103323 reverse strand)
cggagaaggttgaagcagtcactgaaaaggtttgcttttcttctcttatattcttcttgtttgatatcgtgtcattgcaaatcgtgaattgagcacaagaaaatattgtgcttgctttctgagaatctgatgtatgccaagctgctagctggtatctgtatgcacatatattttttgtctattcaactcctgaaacaaaaaaagagagaccattttagtcatttcttttggagagcaaaactagttacctatcttctgttgcacttgggagtctacggcactgggacaatgtgtattgacaactggtcttggtagtttcttttggagaccatataacactctctaccaatgtaaaagacttgctttgaaggggaggttagtttagttgtttcttgtgaggaactgagatcagtaatcatttgcaggtagtgttctgcacagaaatgttgtacaacacttgaaattgcttgcttggtgctgcatgagtgtcacttcagacatatttttttgacaccataagttgatggcaacttctgtaaggaatcggagaaaaacataggtctgcaaaccgcaaggcatgcgtcggattttgttaagaaaacttcatatgatgatgttttctgcatcatttggaagtagcataaaccgagcttgaaacatttcactacgttgctgtgttaacatgtgaagtgaaagttgacctggaataaatgatgtttttcttgtgctgttgtgcagatcgacaaggtcagtg

SEQ ID NO: 6526 - DNA, 797 bp, Zea mays
  Intron number 2 from transcript GRMZM2G034174_T03 (locus G RMZM2G034174) derived from phytozome v7.0 (chr-ID 1; pos 1 64958693 to 164959489)
ggaggacactcaaggtgcatttcatttgtctgaatgtaatccttgctcttatcccattaagaacctattgttcctcctatgttttcctgtctttgatcttaaatgatccatgatccacatgtatcaagtcaccagactcatcactcatgttctcctttttttctgaaatgttattttgatacccaaagtttcggactaaattccataccaagtgctcaaagaatataaaagtctgccattagggaaaaatgaagagaagaaagttgactttgtttctattagatcagactcagttcatctgcgaaagggtctctagccgagttggttaggtggtctgagtagtactacttaggtcctgggttcgactcccccggccctggtcgcggtcattctcacatgggctacggtgacgctgtgtataggtggggtagaggttcaggaattttctcgacctacgtgagaaggtctttttcttaatataatatcgtgggagcggtattacccgtgcatgtcgagttttttagactcaattcatctgatattgcattatattttgttgtctcactgtgttctatgcttgagtaagaggattgcttgcaataataccatatctcttgtacctagattcagcttgtgattttttgttctttggtatttctgatgttgctgccatagccatacgtgatacgtcatgtgtgctcactagaactttttttgtgccatgtgttgaagcaattctaaggtcatgtgtgcttactaaaacttttttttgctcggtgtagaacaccaggcgatcc

SEQ ID NO: 6527 - DNA, 519 bp, Zea mays
  Intron number 2 from transcript GRMZM2G080169_T01 (locus G RMZM2G080169) derived from phytozome v7.0 (chr-ID 4; pos 3 1278642 to 31279160)
ccaagagagttatccgagagcaggtaggtggaattcttgtaagagctctctgtcagttattgaggggagtcgctcaggacatggtattgtggttcgagttactagtttaaggcagacaatattctattcttttgtttttagtataaagcgcatcgcttcattcatttgcagttattctctccattgataattgatatttgatcttgatggcaaggcgaataatatagataattaaatcacagtgtcggttaccaaaggcgtttattctatgcgctctgtgtaactgtgttgtttgttctgtttgtcgccatataaacatgatcttgtgaattaatgtgaaactggtttttgtggtagtaaatatcaactttgtgggcaataactagtttttgtttcagtctagacattgaattctgaatcatccctcgacggagtggataagaaagacagaggattttattgatcgtgcttttgctctgtcaagaaccgacacagaagtggagcaactgcgtgaagaac

SEQ ID NO: 6528 - DNA, 978 bp, Zea mays
  Intron number 2 from transcript GRMZM2G472547_T01 (locus G RMZM2G472547) derived from phytozome v7.0 (chr-ID 1; pos 2 05147495 to 205148472)
tcgaggctccccggacaaaagcggcagcgacaaaggtacgcgatctcgtaactgtcactgtctagttccttgttgctaccgtagaactgtttggtgaaatgccactgagagatccagcacggtttaagaagtagcccggtcatcgcatcaggagtgcaggacgcaactgcctgctttcctcgtctagcttgatgcgatctgtttatctgatcgcgtagggcctgctaagatttgagttgcccctgcttgcttgtttgcttcaatttcaagaggccggtgcaggttttggtggttgtctgcgacctttagacaagatatgtatacgttatagtttgacgtaaggagttgtattaagccgagcgagagaaaaaaaaaatcaaagatgcaccagttgtgtagaccgtcctcatgttggcgttcatttccctttctgtgtgtcagaatgagatttacagtccacaatccagtagttaggtcctgactaatccaaaactctccttcactgtaattgaaaccttttcttttttaaaaaaatgtcagcagtatgatggttttgaagaagaaacagtgtttctgctttccggagatttccactattcttcgtatacctaatccctttacactgaaaaagttactacccgactttgattctgtttatccctacatttgctttggtggatttttggtggtgatgattgatgaatttccatcttaattatagttgtttttagaagtctattctacattatggtacaaggttatgtatgatacttagtttggtgattctctttaaagcttcttacttccctttttgatcaagatgacaacgttcctgccttcctttttaacaagaaaaaaaaattcgcactacttatctgtccatagttacttagtttattttggataccattatgacggtaaaagtaaccatctcttctcttcctcgtcaggtgaaacctctgctgattgggacaaggc

SEQ ID NO: 6529 - DNA, 745 bp, Zea mays
  Intron number 1 from transcript GRMZM2G355742_T01 (locus G RMZM2G355742) derived from phytozome v7.0 (chr-ID 8; pos 1 32881050 to 132881794)
cgtgggaggaagaggaggttggggcttgggggtcggtgagggcttcctagatatcgcgcaaaaaatccgataagcatcgaagcaaacaaatattccgataaaacgccaggtgtttactccagccttgtacatacaacgagatctaacgtccttgtgaatttcaaaatgaaaatgaaaatgctgtgaatttcatcgacaactccaagagcgaggattcgctgcctccatcgtcaattcatacagagcaatagcaccaccattgtggcagccaggcattcgctgcctcgttccttgcagcggctcttcctgtaattgagagtgactagaaccatccaaacgcgagctgatgattggagagctgctacagcagctagagctcaccgcagacgaggaccagaaagaaagagggtaaaaaacgtgagagagaaaaaacaacaagcgaccacagtgggagtcgaacccacgaccttctgatccgaagtcagacgcgctaatccactgcgctatgcggtcatttgatgatttaacaaatcttgcaggctataaataagcactcatttaaacggcactcattagatgattggacttttctagcggatatattgttttgagataatattgttgctcatgaaaacaatattccctagatcccacatagaacgtgggtgtgcatatccatgaactaacaacacagggtattctttttatttatgttattgtctataagttacatcacattatcctt

SEQ ID NO: 6530 - DNA, 527 bp, Zea mays
  Intron number 2 from transcript GRMZM2G145595_T02 (locus G RMZM2G145595) derived from phytozome v7.0 (chr-ID 8; pos 4 2287404 to 42287930 reverse strand)
aaatcactgggcctacaggtgatattctcataatggaactactggttgttgtgtgtgtttttatgtatcaacaatgatttgcaaaatgctaggaacctcaatgtacaatcatgatgaatctaccctgtgctagttgttttacaattgagtgttggctcatctatttgattggccaattaacaatgtttcagtagattcttttcttagcttaagaactgtaataaattcaaaggacacttttgtcacagtaactccagtttgtaaatgatgtaagtcaagtgttcttacactttttgaatttattatgttcatctttgattcttttcaaaatttatgatgccttgtctttgctccaagtatatgttggcatatactgcattcgatttcaaaaacaaaaatcaacccagaatttaccttttctcttaaaccattagctatgatgtgtataccttttccctttgtatcaagttattcatcccttgaccctaatcatttgtgatggttgtaataggtctcatcaccaggat

SEQ ID NO: 6531 - DNA, 838 bp, Zea mays
  Intron number 2 from transcript GRMZM2G009442_T02 (locus G RMZM2G009442) derived from phytozome v7.0 (chr-ID 1; pos 2 67576975 to 267577812)
cgatagaagcaaatcaatccatttcgtttgacaaggtacatacatgcctttttttaactacccagttagcgtcttgtgtattttttaggactagatagcatattaatggctacaactatttgattccttttaaagttccttgtattatatgattcttgtaccaaattaatactaacacccaatcgacaaatgtaaaacaatggttgtttatattccttgctatgtatatatgtacattaatttatctggactaaataattcctttcgctgtgtctcactgtaagctacctttggcatcatggtggaaccagagtagtgtatttgttgatctaggatgtatgtatttgttgcttgcccttgattcatcaaagagatagtcctctttggtgtcgttataagagagagatggtcatctgttaatcattttgtgatcataaacaaagatagattcataccggtccttttcttctgcaagttcagccaaagtctatttttctacctttgtttatactgtcaactggttgtgttggtctctcccagatagcccaaataggtctatttttcattggatgttggtctctcccagatagcccaaataggtccataccgattgtctctccttgatatctgcattttataatttttatttgttttatggatcaatgttcttgtcatcatagagtgtggtctattattgcattagagtgacttttctggttgaaatcatctaagaatcaatgtgtcactccaaaggttgttgtaagcatgatcgttcattctttagtatttattaacaactatattctatgctttatattcttacagtagaagattatat

SEQ ID NO: 6532 - DNA, 773 bp, Zea mays
  Intron number 3 from transcript GRMZM2G009442_T02 (locus G RMZM2G009442) derived from phytozome v7.0 (chr-ID 1; pos 2 67577917 to 267578689)
tgaggattgtgttctcctagcagccataggatcaggtgcgttttctgtaattctcctctttatcttctgtaatttattactaccgctgatgtgactttgctttttatatgggttgtaagtgtcagtaatcttttttcataacttctatcattattgaatacttatattttgtatccttttttcgctgaaccttcttgccttatgtctgaacatgcaacattttgattagggtaggaggtaccaaaggaaatgagcgaaacatagcatacagtctcagatgctgcaggtgcacatcatgtccatttttttaatcattcaagtaatgccatttgccaattggttctaacttctttcattctgtaactgtttagtttgatgcaaataaattgcaatggtgttcgtcagagccaaacatagcagacaacactgctttagtttgatgcaaataaattgcaatggtgttcgtcatagccaccaacttccccaaaacaaatgtcacagaaaaatatctatacctagaacaataatagatgtagtggtgtcactgacttttcatcctgtgcatgacttagttcaatcatagactgcacattaacacacaaacacaattaattacatgggacatgcaacatgaatcatagacttcatatacgattaggcatatatatgtggggtctcgcaacacaaaaccatccactgtgaaggaccctttctggataatttcttgtccaatttatgatttaattgaagaaatgttattcatacaggatcac

SEQ ID NO: 6533 - DNA, 510 bp, Zea mays
  Intron number 5 from transcript GRMZM2G009442_T02 (locus G RMZM2G009442) derived from phytozome v7.0 (chr-ID 1; pos 2 67579546 to 267580055)
ttgtacggtacgtattttctccattccttaatcagtttttgtggtgtcatttgagtatgttgtgaatctctacaatattacttgtggcaatacttaggaatgaagttggttgatttgacgaagaagaaaacatttttagtcttgtggctgtgcgtctagctgttgatgcagctgatgagaagtcggctatagccgagagaattttagtcatcctgcagaaatatgtcttcccatatgacttatttcgttgttggatttatcatcaagtggagagtggcaatacttagtctggccactacttgtgcttgccaactttgcttaggtaatttcttggcctacttttaagcggtgtcatctgtagacaaaatgagcaacaacaagattagcaagatgtgatgcattcatgttttcttaaagatggatttgaataatagaatgtatgtactaataaaaacttccacactatctctgaaatgataacattgttttttatgctttcagcaactttta

SEQ ID NO: 6534 - DNA, 545 bp, Zea mays
  Intron number 1 from transcript GRMZM2G020801_T02 (locus G RMZM2G020801) derived from phytozome v7.0 (chr-ID 4; pos 2 8119041 to 28119585)
atccaaggattggtaattgtgctgcttccttttgaaattgttttctctttacttcagcagttgctaggttacattgccaacgggtgtgtatgttcagtgtgattttagtatcctaaactgaagaaaaattataatacatgcttgtaatattacttcacttaagttccccacttccagtcaaaacgaggttttattagttgttttctattctcaatagtcaataatccatgttaagtgaaaatgaaatattgacacaattctatggcattccttccttaagaaagctatatattcccacatcaaatttggactggttaattaactttatacagagaacatatcacacaattctatggcataccttccttaagaaagctatatataatatattctctagtcataccttttgtgtttctatcaattctttagtatgtgacacagcaaattgtacatagttatatcttctattgttgtaactgaatgtatattatatcttttgttatgtatcagataagctgccgtactccgtccgtattcttcttgag

SEQ ID NO: 6535 - DNA, 1025 bp, Zea mays
  Intron number 4 from transcript GRMZM2G153594_T01 (locus G RMZM2G153594) derived from phytozome v7.0 (chr-ID 1; pos 1 38642318 to 138643342 reverse strand)
tgcacattgtacttgtgcattatcttgagacaaaggtaacactgattagtgcactcctttttgttgtacttagcatggctctctttctgcgaagatttttatttcattgcttagtatgtagagcgaagtgctttggtagcatatttttgacacatgttcttttttttttcctgttgcgctgctaaatgacaagagcactgatatttacttttacactgttagctccatgagcaaatatacatgtcaaaacataccatattttagaagatccctttaagtttatattaaaagattctatgggtcttgtaaatttattgcttccgatgaatactcttcatggtttggatgaaccgagtggtcacatactaactgaactatatgtgtttgcttcttactgaacatatttacacacataactcacaaaatcaatgtcttttgttcattatcatcaaataaataatggatgttataggttttgactttgtggaatctttgttttactccattgcaatttaaaagctcgtttgtactttgtaccgattttgcttccgagagaatcaatgtttaagctttgaaacacaccagtttaatattcttcaccttttcagaagtcgtaatttagaaaaagaagtcagtgctggttttcaaaatatgataagtctgttgcatatagtggcactatacaaactgttcaacacttataaccaggtaaacaagaatccgctatatttctagcaattccatggaggtcaatgttataagctagttaacttgacagtgaaacacaaattgatacaggttttatttcagcactgtttgctttcatatatgttctcaagttggtttatgtcctgtttcttgtttcaaatgttgaagaaaaaggattttagcaggttctgttggaatagaaattttgcatcacctattttgctcttgcaagaagttgcatacaatcctttccccccttttgatgatgtgaatcactttcagggtggcaagtcatctcgtgctagaggaaataacat

SEQ ID NO: 6536 - DNA, 647 bp, Zea mays
  Intron number 1 from transcript GRMZM2G308356_T01 (locus G RMZM2G308356) derived from phytozome v7.0 (chr-ID 4; pos 7 7665265 to 77665911 reverse strand)
tctgagtcatttgatagttgcccatattatctaaggtacacgtacattctgctgtctcattagattctgttatttgtggtttactgaaacttgtttggccaggagacatgatactatttcttccacataggtgcattaagttgaaccatgtgtcatctatacaccataatttaagctcttgacacaatgcttgctgattcagcacccatgttttaatcttgcatacatttgtatgtctgtacctcaagatcgcatgatctataggatttctaaaaaagtctaatgataatctgtttgggactatgaaacacagtgagtagatagtagtttttttttgcttttctcttcaggaaataattagtgatcatttgttattggctgttgaacaaatatcttacacaactcatggttggagccaattttacacaaatggctttccctatcctgtattccaattcttgaaacattttgtaaactattattttcattgtgcacagagcttatttgaattcctctagccttcaaaaaaaatgcaagtgtaatgctcaaaataatagttgtactaaacaacattctgatactgtttaattgcttatcatttaatcattgcagtagtcaagtagtcgtttactgtctttggcctgatt

SEQ ID NO: 6537 - DNA, 999 bp, Zea mays
  Intron number 2 from transcript GRMZM2G074300_T04 (locus G RMZM2G074300) derived from phytozome v7.0 (chr-ID 4; pos 3 1005174 to 31006172)
cgctacaagctcctcggaggccttgccgtccggaggtataacttgataagaccctactccctaccagctagctgtgtgatttgctgattttgatgtgcttgctactacttataatttgtatattcttgttcgttgaattgtatttaagtggtaactatagcatcgaaaaattaggaataccttgcctacactacccaaaatttggaattattaggagatcataacctataatttgcttataatctatttagaagaattttgagttgcttaaaacttccaagttgagacgttagtcattggttagaatgcttgcacctgtgattatatgttctgccttcagttcttgttggttagatattgtactggtgcagaaaggaaatgctgctccttgaggcagtggcggccagacaaccgttgagacagatccacagataaatgactaatatcctgtttgtctactaaatctgtctcacatttcttcagtcccattgacctaatagcatagcaacttcattgaccttaatagtcctttacagtagttgtgcccactgcatgcaaatttatcgtgtatcaaatacatttttcatttttggcacctatatttatatttacctgccatcttttatggtagtggggcttaagatggtgcatagaggaaatgctgctcttgtagtagcggcggccagacaaccgctgagagatagatccacagatgaacaatctttctgctgtttgtctactaattctatctcacattcttgacatgaatggtactcataggctcattaattttcttctatgtgccgcctttctatccatcgtatcaatttatgcctttgctaatatattttcttgtttggatgataaagtgtcattgttcgttgggcgtatcattaattcttgtgttaaaaaatgctacctaaggttgttaccctgtccagtattacagttagtctagttctccttactaacatgcttgttttgtcggcagggcctgct

SEQ ID NO: 6538 - DNA, 875 bp, Zea mays
  Intron number 1 from transcript GRMZM2G052884_T01 (locus G RMZM2G052884) derived from phytozome v7.0 (chr-ID 4; pos 9 8928323 to 98929197 reverse strand)
ctctgcctctacgacagcgggtgcttcggcgtcaggtgccccccttagcacttaccctacctttgtttgatgaaatgtctaaagaagttcgtcttatgtcctagtcctagtttagtaatttgcttacacttgagtcaagtgaacagatcgatgatccttacattgaataaattttttggctaaccaatgttttttggcatagtagttgtaaaatagtccgatcttttgagtcatgcttgaaagcttcagaactcagaagaggtcaagaggaggcaataggtgattaattgttttttgctattatgtccgaatgaggttccactaatcctgtggatttttaagttaaacgagatggcactcatgaatcatgttgagaacctttgcttatatgtcttctagccatctgcttgcttgcttgaggaaatgctttgcttcaaaatgtgcaatttaatcttgccatagtatagaatggctgggtaatggggatttgagtcatgggcgttcaattaaaagtaggttgatatgcttcaatgtaagccaataaatgaaatgtgttatgtatgcgatcctactacttcttaagataagcatcttcatgtgaaactaatctggttttctgtgaggtgtgctgcttcaagaattttttctatcactcatgacaacactcattgccttggattaaatttcactaattgataacatgccactttgttgaatcaagtagctttaaactatatctgattttctatgaggtgtgctgcttcaagaaattttatatcaggaatgacagcatactcgttcccttgaaataaatttataaatttgataacatgccattttgtggaatcatgtagcttgaggtgggaggcctcggg

SEQ ID NO: 6539 - DNA, 128 bp, Zea mays
  Intron number 2 from transcript GRMZM2G125587_T01 (locus G RMZM2G125587) derived from phytozome v7.0 (chr-ID 4; pos 2 22649061 to 222649188)
caattagaaaggtattttcttcacaatattattctcttttgatgtattatcctaactgtgtttacataatttattgtttgtgtttgtacttaggcgtgtgccagcttggaagagggctaccttcctcc

SEQ ID NO: 6540 - DNA, 691 bp, Zea mays
  Intron number 5 from transcript GRMZM2G127396_T01 (locus G RMZM2G127396) derived from phytozome v7.0 (chr-ID 1; pos 2 19606656 to 219607346 reverse strand)
caggtctgtagttttgtgcactgctttcatttttggatctgtcacttaagctattatgatgaatccggcctatgctttgattcttgaaatggactaaacagaactacaattataatttatcaagttttatttgcaatatttagccaaattactcgcttgaaagacaagttggatggaaggtttagcttcctcatgaagtttgttccgtactgtgttttaggacagaatgactgatcatgtgatagaacattgcaatcgatgatcagttggttaaatatcttgatgaccaattgacctcatgaaaagagctttacccaagctagcttcatcaatgtttcaaaaggcacagtgtgctaggcaggtggttaggctctcctagcaccttggtgttcctgggcaattttacttttttcgcttagctggaggagtgacccatgaataaagaaatatggcatccatgagttttatgatcataatttgtcttcctctctctaatgtctcactttaatacatagatcaagttctaagccactcctggtgaaaaagcacctaagtgctagccaaggtggtgctgctccgcctagtactacgttttggaacagaaacatcatgcctttttttctatttttttgtatttgctttgttttatctaataattagtcaactatgctgctttgtattgcaggctgtt

SEQ ID NO: 6541 - DNA, 832 bp, Zea mays
  Intron number 1 from transcript GRMZM2G043799_T01 (locus G RMZM2G043799) derived from phytozome v7.0 (chr-ID 1; pos 1 0674519 to 10675350)
tccgacgaatcccacccttcccaccaacgtacgtaggcaaacgcacctttctccgcccattttcccgctttcagtccaagatggcgtgcgcgcgcgcgtgtttttttttctttttgccaaaaaaaagctttttatgctcgatttggagactagatactgtgcactaattcggaaaagtgcccttgtacaatgaacagttttgagatattttctccagttattagcaatactagtgtctaattagtgctccctgttttgtttgcagaagatttagctttgatcttagtttatgcagtgcagctctgctgcaacaataacatttgtctcctgtcgtcctgatgagttttactgtataccggacgtgtgcgacacttcgcctgtctgacctttatggttcatttatttgtttgtttgcgttccatctgtcaccatgtggccctgccccagcccaatacgagccgccatactatatgcaaacccctagtcccctaccacaatacggatttgttaacgtcctctatgattgaaggagaattccaaaacctgtaaagaatgaggtacggatttgttaatgttccctctcatctatgaagaattctaaaacctgtaatggtgaactgtgaccttctccgttaattctttcgaagtcgtgacgcaattaaagataagttatcattgaatcggtgctgttgaattcattggacaatacacgtaaacgtgttttaacaatttttgcagcacgtgttatcgatatgttttctggcatgctcagggccttacctctgttaaatttgcagtctcgcagtctttgagctcacaaggttctaacagt

SEQ ID NO: 6542 - DNA, 710 bp, Zea mays; identical to SEQ ID NO: 6284
  Intron number 1 from transcript GRMZM2G314882_T01 (locus G RMZM2G314882) derived from phytozome v7.0 (chr-ID 4; pos 2 40035925 to 240036634)

SEQ ID NO: 6543 - DNA, 837 bp, Zea mays
  Intron number 1 from transcript GRMZM2G413253_T01 (locus G RMZM2G413253) derived from phytozome v7.0 (chr-ID 4; pos 2 08390376 to 208391212 reverse strand)
acctttggtctttggctggcaaatacttgttgcaggtgagcttcgctctggggagttccttgtcgtgccttggtttatttatagacacatcaccaataatttgccaatcactcaggccctgtttggtttctcttagaaccaaggggaatggaagggattggaggggattaaattcccactacaagtcaaaatccttatcagacccctcagtgactcaatgcccaacaatagagccggtcactagctatttgagtgccacttcacatcacgggtccatctttattcttctcttcttcacatcccttcataagtgcccatcagtcagcgcttcgctttgtctgagtttttctataaagattccaaagcggttttctttggacttttctgccatccataaccagagtctgtcaacctcgcatctatgtatacacacacaaggaaacaacattagacatagacctacctgtggctgggcttttgatcatctttttattttggagttatatgcatggtcatgcacaaaattaagcaagggagggccattgctaagccaaaatatagctctttgcaatgcttgattttaagctatttgattgtgccttcaacaccagaatataagttcccatatttgtgaaaacaattgtcctccttgatcccttacctttatcctgtcatttgtgaaatgcaaatggtaatgacctgtttaaatcaatgcaatttaatacaatattatttcattttgaatagccagacaatatttatttctcatttaatgtttttgttataaatcttacttattaagatattggctcagcttgacagtggtgaagttcctcc

SEQ ID NO: 6544 - DNA, 700 bp, Zea mays
  Intron number 1 from transcript GRMZM2G082908_T01 (locus G RMZM2G082908) derived from phytozome v7.0 (chr-ID 4; pos 1 51400193 to 151400892 reverse strand)
gagatcctcgagaagcgtcgtgcgttccctgtgtagtagaaggaggagtttcttcactccctctacgacaactagaccctcatcctcgtcgatgaaactggaagcagaaatacaactcaggtatcgtgcacactatagtacccatacaccttctcctaggcggctatgccctactgatgtttgattttcttatttatatcctttgtagctaagggctaggagatagtgttataatcctttgcatagttaggatcaagcagggagtaaaatcgtcatgtcaaagggtcgatataaccagacacagtactaattccaagagccagggtgccagcagtaatcacacatgtaagggtagtttgaaggaatcatttgaatagtctaacatgatttagcaggtattttacctagtccaagaagaagaaaacctgataaaagaaagggtttcccttatgtttgttgaatcctaatctatgtacttgcaagttgcaaaccatcctgatgctagttgtcagttataatttgatgaccacctcacagtagactatggttgtatcaagagataataaactacaagttggttattgtaggcatctatatatactctaaatagtacccaaccataaaagcattgttttagaggattttgacaccgattatagttcactttgggctataccttttttgcaggattcattctacc

SEQ ID NO: 6545 - DNA, 420 bp, Zea mays
  Intron number 3 from transcript GRMZM2G107629_T04 (locus G RMZM2G107629) derived from phytozome v7.0 (chr-ID 1; pos 2 31702163 to 231702582 reverse strand)
gctataaggtcactactgatctaactcttctctcaaagtgttcttttattccaattagatcttgcatgagatatatcttcgcttgacttgagttcatagactgactatttcaagctttcaaccagtctttttaatgtaatatttgcagcaactgcaatactgcatcttgtatatagtagtatgtgcttcattcgatcaataatacaagctcttttgcaagttgactaagataattttgccttagttgtctcaagacatggttataagttttccctgtgcttttctgttttattcatatttttttcttgttaataacacgtgccctgacagactgaccttcctatctgaaattagttctgtttgattgcatccttgctgagctgtatccgacccacaattttttttccaggtccctataaa

SEQ ID NO: 6546 - DNA, 1023 bp, Zea mays
  Intron number 1 from transcript GRMZM2G467642_T01 (locus G RMZM2G467642) derived from phytozome v7.0 (chr-ID 1; pos 7 5284816 to 75285838)
tttactggtgagtgaataacttttttgtttcaaccgtggtcttgaaatattggcttgctattgagcatgactagaaacaacaataatttgagtactagcattagcatatgttcttggcaataaattgcatattagtttatagttatgttttacatttaatctgtcgatggcagagaaatatatggcatatagtttggacatggtactatggtagaagaaaagattataatagaggcagggtagaaacattgaattcaaatatttaatatttgaaaacgtgttagccgtgctaaatggtagtatttctgtttaagttcacatgatgccttactttttatttttctttacctggaactacagaagcttcgtttttacagataagggaactcattactggttaggtgatttagagatatttaaaaggaaattgtcacatatgatatacatatattaccatccacagctttgtttgtttacctggtagttaatctatgtatgtagttttccagttctatttgtgcccttgtcttgtcttcatatttgctatctcattctaaggtgcgactttgagagaggagagtgtatgtacccaagttgaatgtcataatttagattgtttttttatatttcagtgccattagtactttctattcgatttagatgtcgataattaggatcttgtttatgcttcattgtggccataagcatgctgatgtatttcacggatagacggagcattgatgtaagacagtttctatcgaggaatctttttgttttcttctaaagtttgtgtgccagtatctgctccactgactggaacaaattcattggtccaacagattggatcattgaactgatctcaactccttgtttagtttgtatcgctaactgttatataccatattgggcactcaatctgaagcttcgatttatatgtgatgaagtgttcttgtatatccagtctgatttgtaattgtattactactcaatctctgaacagataaggagctagatataattgag

SEQ ID NO: 6547 - DNA, 716 bp, Zea mays
  Intron number 2 from transcript GRMZM2G101245_T01 (locus G RMZM2G101245) derived from phytozome v7.0 (chr-ID 1; pos 2 08276549 to 208277264)
gggacttcaaggcctccaacatcctgcttgaccaggtgaagacgactctctgcctattcttttcgttgctgtctagtgctagtttcgacggcagctattgcgtagctgtagaaaaggatactgacgacatacacctgccttgtgtctgcgtctgccttaacaaaatccagaaaattccttcgctacgaacggaattcataaaaaaaagctcagtacaaaataaactttccaagagatttgaccctgaatcgtccataggagttggatgtcaaagtcgtctgccacgcgtcccaaaactgttggctggtttcgaccgaagaccagccctgccccggcgaccggcgtgattggaactcggaagtttcttcgatatacccaattcctagcaatcccagctcatggagtctacgtaccaagctcaataatggatatatgtatctgccatcatttttaaaagagagagagagagagagaaaagaatctgcagctgcctcatcctcatccgtgctgcactgcactagttttcttggcatcaaagcactggtatactaacttaaacagcttgacgatgacagtgatagtctaattagtctgagagggggcgtcgccttagcacccaagtctgcaattgtcgcctacgaatgcgattggtcgactaactcaaaatctgccatctttcaggactacagcaccaagctgtcggactttgggctcgc

SEQ ID NO: 6548 - DNA, 907 bp, Zea mays
  Intron number 1 from transcript GRMZM2G003930_T04 (locus G RMZM2G003930) derived from phytozome v7.0 (chr-ID 8; pos 1 0290441 to 10291347 reverse strand)
ggccccggagccctgttcttggtacttaggacaaggtaaagatttggttttttcttctccccgtcatctggttcctcttcttcttcttcctggcgctgctgtgttactcagttagttttaatactcgccagacgctccgagaccctcgagattgagagctcgctcgctcgctcggtgtcttcgccagctgcccaccctccttcctgctcgtccccccgctcgcgcctcctcttcctcggtgagtctcggtttcttgctgttcagacattttttcttcttcttcttcttcttctgtccgtggtgtaccgtcgatgcaacgctaattaaacgcgctttcctcgcaccccttgtgcggcatttagcaaccaccaactctcatcaattcgttctcctcccacagaaaagtggcagctttttattcgtcccaccatatgttgccgtgcgctccgagcgtggagggttttacctgttcttggtacacttgccggtttcgatccacatctcacagctttggcctctctcggcacagcggctgtaatcccactaatctgatccccatttcttgcggttatcagtttggtatatatattttttttaaaaaatgaattactattatttccaacaagcggttccggttagtttctgtcagtcagttcctatatcataagggagcagttgcccggtttccttggacatttggatccccaccgcctgcgaccgcgtgctcctcattgggtttggcttcttggtctgcctctggttactcttaccgatgtttcaaacacaatttcaatctgtcagttgcgattgcgtttgattgctttttctgcatcgagtgtctgcaattcgcgaggatggtggcattgtttctgtgaactgaaccatggatcacgtgctcgtaggactg

SEQ ID NO: 6549 - DNA, 988 bp, Zea mays
  Intron number 1 from transcript GRMZM2G162840_T01 (locus G RMZM2G162840) derived from phytozome v7.0 (chr-ID 4; pos 9 5682115 to 95683102 reverse strand)
ccctccaccaccagtcatcgccgtgcctgtatctggtgagctgctcgttgacttccgcttcgcctttttgctgcctcccggtgcttgcactgtctgggtttcggtgcttcattaattttttggtgctatattagggcatgtacagtggtgtttaatgtggaggcttttaaggtgtttaagggggttatttgcaaaaaaatcttagagtcgtctctccacgaagagacgcctctggctcgtaaaccaagtagcaacagacgcctcacttcccactgtacgaatttgtcgtctgttctatcgatttgatgctatacaaatacatttaattctgtatttattaatagactacgtttgtagacactccattgtacaatacagtctcttagttgtctcctgtgcttagagaaccgttttggtgtctctccactgtacatgcccttatactataaaatcagaaaattttaattgcgaattcgttttgccgctgtttatacttgaggtaaaaggttggagcctttctggttcttgaccatgcttaagttgaggtattcattcataacttgtaagcacaagtacttccttcaaatcggatgctgttgattggacgtcctactaagtatcctgttattagatgtatgttgtgttctttattttggtgctttaacggggtggaaaatttcaagttcttggtcctctttatttttttctcttggaacatccgcaatcaactttttaaatggaataatttagctgctgttctggtcctggatgattcggtctgattatcattttggtgtgctggaatttaagtttgagattggagcttgagtgactctctgattcatctcttattcccgactgtgttcatttgatgtacttttttcttctattgtcgatctcattcgtaagtccactggtttgtcttgagtaattgcttcaattttccatttcagagaagcccgaggcatcaaggcaacaacagagtgct

SEQ ID NO: 6550 - DNA, 528 bp, Zea mays
  Intron number 1 from transcript GRMZM2G040806_T01 (locus G RMZM2G040806) derived from phytozome v7.0 (chr-ID 1; pos 8 4470255 to 84470782)
tcggcggataggagaagagagaagaatcctccgaggtgagctgactattcattacgctgatagtgtttctgttaattcaaatatcgttcagttggatgcaattacaactagggttaagcttgcgagttgtgagttggatttgaggttctgttgtgctacatgtgtatgtgtctatattttttcttcctctatagcttgccccttttgatctgatctacaagaagaaaacaaagaaaattgtcatccaaaaaccttctgatgaagtggataggcttgcagagaagacaaacactggtagtcgtagaacccaatgaaagtaacttcactagaataaagaagaaaaagaagaagcaggtatggcatatacactccttagtgttaggctggacaagtttaagaatacaaaatggattagtgctagactagaaaagtttaagaataaaaaaatgaattggggctttacatttagtcactgcgtaggcttaagaagcgagcattgaattcaggtggatcttgatttaactctta

SEQ ID NO: 6551 - DNA, 991 bp, Zea mays
  Intron number 11 from transcript GRMZM2G181362_T03 (locus GRMZM2G181362) derived from phytozome v7.0 (chr-ID 4; pos 175744300 to 175745290 reverse strand)
atgtaagcttcaaatacttctattcttcattgttgtattcctctcagatagttcacttgtacgatgtgatccatataggtgcaaaccactcaaatagatattgttaaaatatgtggattattttagtgttttgcactatgcttgttattctacaatacggggagtagccttttattaaacagccctgcaaattgtgtccttcaaagtttcagttggcggactttcttaccatggcatagactatgcttgtatccctccaaactcacactatgctgagtataaaagggggtagaccggtagagtgtacttatgctgtggaattagtctattgtataggatgctactatgaatacatcccttgcactcctttgtgcagagtgtttccccattgggcatgttaatggatgtgtttcttaacttctatagttctactattgtaaaccagaacacttcaggttggataaaggactaagtggcctagtttttactcttttttgctttaactagtatgctttgttggttatttttaataagtggacaagcatctctgattcatgtgtcttttgttatcttatcaataatttgaacaccatcatattcctgtccctttattttttttgttcagaaacttctctatgtagtggttgctcatgttgtatatattgtttttttgggattttccatagcatcacataaattcttttctcattatggtgcttaccagtatttaccaattgccacattttaatggtacttaatgttgttgtcgaagttatattctatttcttgcagagatttggcacccgcaaaaacaaatccattgcctgacaagaagtatagcaccctggttagcaaatagtattttcctagtactccagtacattcatgttttgtatttgaccaatacacaattacttagcctttttgcctttaaaattattgattctatgaaacaggtatctctcagtgggcacctatttgataagttcct

SEQ ID NO: 6552 - DNA, 650 bp, Zea mays
  Intron number 2 from transcript GRMZM2G151193_T02 (locus G RMZM2G151193) derived from phytozome v7.0 (chr-ID 8; pos 8 4357661 to 84358310 reverse strand)
atttgctgctgcaacaaggtatgctctaaggactttctatttcacttttcactagttgagactagtataatggcatgtgagatgtatatatttgtttggaattgaatgcagaatttgtgaagcacaattggttgctggatcttccattaaccttctgtttcttttgatgtttagtagttaattaacttaatagccttcattagtttactaatcagatctgttgcaaaaaagatgttatcaataattttgatacatgtttctcactcaattgttctgagtaatatttttaagttattggaacacttagtgcataagtaatgcatgtacaagtgtagcgacatttatttgtattcattttattggtatggatgtataatgtgctactggtacagtttagtagtaggatgatgcattgacatataccttgtgaactctgtattttattatcagcattgtatttgttacatccaggacttgctatgttggttacatacatatgaattaggatatgtggttacatcacatatctacagttcgtctgctgttcatgtgatctatttcattaagctaatagcactgttctgttccaagcatatactgtcaatgtgccatggataatcaaactaatgataatggtattctgtttttag

SEQ ID NO: 6553 - DNA, 769 bp, Zea mays
  Intron number 1 from transcript GRMZM2G151193_T02 (locus G RMZM2G151193) derived from phytozome v7.0 (chr-ID 8; pos 8 4358755 to 84359523 reverse strand)
gtttactcttccactttggcctcctctcttgcaaggtatcacctcgttcactgtcgctcgacctctgttcttgagctgcttcatgcgatagcgactggaccaaagttgtactctgctgcctccccgtgcctttagtgattcggtcctcggttttgcgtgcaattgtagctattgcacctccattcccttagttgtttttgggttttgtttgcttctttgttccaataacctgtttcttatggattgtttcatctggatcagatgaattacttacgcatcgtcgttggaattggatgacttagtgattgtgcttgtggtcctgttacgtggtcttagtaagtgtcagatcgaatttttaaggtgtagagctactgtagtttctgttttgcagatactttgctctgtatgtgtcttcgcagttcatgtgcagtaagagttgcaaccacaaaatatgaccagatttctgatctggtttatgtagttgtgtccaatttttactggctcaaaattctgtgcgcacacttgctagtttgatattttttctaggcctgctttgtgtttatattatgtcgtttgctttgttttttgtttgctgctttacattttccactgctgatatgtatgatgcttttcttaaagctgatgactgcggtttcaacgttagattcagttttgaccccgtctaataaattttgttagtgggagttgtttactagtgtttctaattattgattcgtatggcttaacagtttaagcttcgcctccagcc

SEQ ID NO: 6554 - DNA, 798 bp, Zea mays
  Intron number 2 from transcript GRMZM2G034174_T02 (locus G RMZM2G034174) derived from phytozome v7.0 (chr-ID 1; pos 1 64958692 to 164959489)
gggaggacactcaaggtgcatttcatttgtctgaatgtaatccttgctcttatcccattaagaacctattgttcctcctatgttttcctgtctttgatcttaaatgatccatgatccacatgtatcaagtcaccagactcatcactcatgttctcctttttttctgaaatgttattttgatacccaaagtttcggactaaattccataccaagtgctcaaagaatataaaagtctgccattagggaaaaatgaagagaagaaagttgactttgtttctattagatcagactcagttcatctgcgaaagggtctctagccgagttggttaggtggtctgagtagtactacttaggtcctgggttcgactcccccggccctggtcgcggtcattctcacatgggctacggtgacgctgtgtataggtggggtagaggttcaggaattttctcgacctacgtgagaaggtctttttcttaatataatatcgtgggagcggtattacccgtgcatgtcgagttttttagactcaattcatctgatattgcattatattttgttgtctcactgtgttctatgcttgagtaagaggattgcttgcaataataccatatctcttgtacctagattcagcttgtgattttttgttctttggtatttctgatgttgctgccatagccatacgtgatacgtcatgtgtgctcactagaactttttttgtgccatgtgttgaagcaattctaaggtcatgtgtgcttactaaaacttttttttgctcggtgtagaacaccaggcgatcc

SEQ ID NO: 6555 - DNA, 968 bp, Zea mays
  Intron number 1 from transcript GRMZM2G024668_T01 (locus G RMZM2G024668) derived from phytozome v7.0 (chr-ID 1; pos 1 84245541 to 184246508 reverse strand)
tcttccttagggagctcatttcaaactcctccgatgtgagtttcatcctcaccccaacccccgatgaccctcgtctatttgcagaccaccgataacccccctccattcgcgggttctagaagtaagactagatctatgcgctaaaccttcctgccgtgctatggatggatcggagcctctccggcctttcaccgcgtgttattttgatttgaatctggtggtgatgggttatgtagggttttgtactgtttctggcggcgcctttatggggtgtttggtttgaggaatgaactggtccatcgtcttctcattcctcactatttttgtttggtttgtggaatagaatgagttgatccatcaccatctcattcctcatagttagttagttagtactaatatgaggaacagagtcatcccaccaaatctgaggaatgaacccatgatgcaccaccttaatttggatggtatgattcctcaaaccaaacactctattaaatcctccacgtggttggaggagacgtcggtcgtaaatctagttggactgttttgtgtcctgtgtcttactattactttcaacgatctgtgctactaaaaatatgttttagttagctgagatcgctattatccatgcttggaagtttacacaaagtatgtggcggtagggaggatttgaacactatggggtcattatgttgtctgaaaaattcgagtttataatttaatgatctattagttctgtgctaatctagaatctgcagtgggtggtgaccaaacagtagtaaatgaatatttatttactaactgaagctgcgcacgtttgccaccattgattatcatcccttgtttgtgctatactcttattactgcatggttaggctgcactaggttgtatgcatcaaaccaacgaactgtttctttattgtttccaaacaggccttggataagatcaggttcgagagtttgacgga

SEQ ID NO: 6556 - DNA, 668 bp, Zea mays
  Intron number 1 from transcript GRMZM2G154487_T01 (locus G RMZM2G154487) derived from phytozome v7.0 (chr-ID 1; pos 9 0229458 to 90230125 reverse strand)
ccactccccagcacggtgacggcctgctgcagcaggtgatctctgatgtctgattctcttctccagttctccccagtccccgtctccccgacttcctgttcagtgttcaccgttgagtggcctgctgccctgctgtgctcatgtgatgtgctcgttgtgaatttgtgatccgatccgagccagtccccacccagttattaatgaaaatgagatccttgaagatgatgaagaatctgaggaaggaaatgcaaatgaatgaggaagatggttctgggccttctagctcatttgggactgaaaatgcatttcaagtggatgaagatttactttagctagtagatcatttatcacttatcaagtggatgaagatttgctcatttgtttcatgtttgactttgctgcagttggactttgtacttttttgctggacaacctgcagcaatgcagttttactaatgtaatggcttattaacccgttcctgtgagtttgcaatggctgtactgttttttactatgttttacttttacctatggtaatgtctgacagccatacagtgcaggagaaagcagatggtacacttatcctgtgatttttgttgtgttcctaactttgctgggatttttgtttgattaattgattccattgttttgtgtggttgttgctgcag

SEQ ID NO: 6557 - DNA, 694 bp, Zea mays
  Intron number 2 from transcript GRMZM2G089631_T05 (locus G RMZM2G089631) derived from phytozome v7.0 (chr-ID 1; pos 2 14484119 to 214484812 reverse strand)
ttgtggcctacgctcgagctgaagccagattagtggttaatgttatgaattactttaacaatagcggagttctctttgaattcttggtcttgacaaattttggcatgtttctgttttttggcagatgaggggggcagttgtccttgctgctaagcatgcaaaaacaatggtcgggaagccattgttgtatggaataggtaccctgttggtcatgtcgctgaggacactgtatggagtgggttgtgtttttggcgcacggtggttcctctacatgacaagcgtatctccatcgctgcaaattgagtttgtaagtggtccgaaacaactaggtagctactagctattgagtatttaggagtcaatgcttaatgatatttacttaatgcttaattgcttatcgaagtaagaaccctgttttttgtattgacatggtggtgctctttaggagagaagccaggggtaaaaaacaattagttctgcagattttattttatttcgatcagttgtgagagtttcttacaattggatgacattgctttgtagaaagaaaatacaaggtattttttagtaggaaagagttgcattttctgtgctcatatacagctttgccgttcgttttctaaaatgttgaaaaggatcatgtcattggtgtaacactcctgtttgtcttaattgaagaagtggtaccaacgag

SEQ ID NO: 6558 - DNA, 773 bp, Zea mays
  Intron number 3 from transcript GRMZM2G030324_T01 (locus G RMZM2G030324) derived from phytozome v7.0 (chr-ID 4; pos 6 0873620 to 60874392 reverse strand)
ttttgactgttgaaggtggtctcctgcgtgttaaggtatcaatgcttcttcaggtttaaactattatccatccagttttagtttcaagtttgtgtgtatatttgatgttatagacttcatgagatgctcttgtatatcctgagttgttttattttttctagtttttgtgatgtactatcaatattttcttgctatttgttttgatctttttttgtttttggtgttttataggtcaattcaaggaaatatactgagttttggcaaaatttcagaagttgttgttacgttagttctaaaaaaattgtgtttttttgtaagtttttttctcattttcatccatccttaaaaaaaaagcaaggcgtcatgttatacattaacacatatctttgtataatttttgtgtataatagatcattttttatttttagggtatttttatttgtgaccattagatctcgatctagcggatatgaaatgtgtgtgttttgtgtttgcaaaacacacagttttacctcaaaacataatctgtgtgtttttgcatttaaaaacgcacatgtgtttctagagtatataatgcccatgtgttgtatagacaagcccttaaaataatcataatgatatcaattggacttgggttgcactgctgaagacgacgactgcactttctttattgctgtaccgtttcttcagttgttattgcatggaccatgcgaccctaaagatcttaccgctaatcagctgtcgtcttgctcgcgtcatcaggtataaattgg

SEQ ID NO: 6559 - DNA, 664 bp, Zea mays
  Intron number 1 from transcript GRMZM2G153476_T05 (locus G RMZM2G153476) derived from phytozome v7.0 (chr-ID 1; pos 2 65175952 to 265176615)
ggggccgcagctcctccgcatccttccccgctaaggttagtgccgccttctgctatacccctatacccccctgcgtccagggagcttgtctgattggggtgtcttgtttttctaaccctgtacggccttgttggaatggggtgtaaattagttttttagtttcactctaatctatatcaatacatattgattgtgctgaatacgagagtatccaaaaacaaggcctacttgggatggtcgtgtcaggagcgttggaaggatggtcttctgtgaactgctaattttcaatacattggtaggaaatggcgcgtgttggttcatgcatatgaattttctagcgcattgtcagtaatgctagtgtttcatggtacagcagtatgactgattctagtagcaaagaaaaggatgtttctttagacttttgatgtggatctgaaattctgaacctgattataggagctgttgtttattatcgctgttgcattgtgcgcacagcctgaatacgacacaaacatgaacttcgatacatcattaatttatccccatctgaatgacccttcatacccaggctcatgttggtggtttattttgcggtttttgattgtgctgtatgttgggtggcctgacagaagggaggaatcggtcacggtggcttgcggatcga

SEQ ID NO: 6560 - DNA, 864 bp, Zea mays
  Intron number 1 from transcript GRMZM2G078414_T01 (locus G RMZM2G078414) derived from phytozome v7.0 (chr-ID 1; pos 2 75675202 to 275676065)
aatcagtactgggcgtatagcatattgttcagaaggtaattttggaaactttggagaatgtttgttcagttaaagacgaattatctttgcttgctttccacttgcactaacgggccgtttggatctcttcattttggatgaattggaatttacttaataaagtagactatttagcttggaatttgacattccacaactttccaaagtctaaatataagcctatatcaaattcgtagggtggagggatagaaattgattttatgtatctccatgatatgtttctactctttaatttataacatgctcttcggcttacttccctgtagcagaaatataacacataaatacctccctcgtatggctaaaagtggtacacaaatatattcagcataaaatcatactagcttaattgagctgtgtcagttatgattattcaaatagaattcaattccaaggattcaaatgggcctaattgtatatttaccagttaactatcgtgttacccttaataaaatatcttgttgggtgtttttgaatctgctgttttgttctagtgaaaccttgactatccaatgaaaagagtatgcacgaaactatatctgaactttgaggatgttgcgtcaataatatgcattgtggacttttgctgattctgccatcctaatagtgggtaccttgatgagtggtggtagatcctgtccaggattatatgtagctgcttccttttcttctgacccactgatgttgtctcgtttttgtgcactcctaccgatccaaatatattcgtttatggctcattcgaatttgttttgtaacatagcaatggtttgctttgtgcaggtttttataccattggacagtcat

SEQ ID NO: 6561 - DNA, 732 bp, Zea mays
  Intron number 1 from transcript GRMZM2G039238_T01 (locus G RMZM2G039238) derived from phytozome v7.0 (chr-ID 1; pos 1 62267126 to 162267857)
gctcatatcagtggtctcgttgctgcgcaggtaactaattgtctttgttgctgcgtatttaaactatactctatatgcgtttcaattgccgattgtttatgaatataaacgttttactttctatcgtcagttgtgtttatctgagtagtcgatacaaaagttgtagcttttctatgtaaggcaagcactatttctccaagtgaggtgatcgatcatcctgattgtgccatcaactggtgtcactcctttagctagatagaatttgcacacgaagaaagagtttttggagcagaaggggaaaaacaaactaggacagttttccctatggagcaaacaaaaagaaatgcagtaaaatctgctgtttagattgagatggcatgcccaagtttgtcaaatctattgacaattctgaagtcatgtgatctagtaatctctcaccggcattgatgtagacttgtagagtaatttgtggagtgtctcagatcaatagtcaatgatcaacttatgaacatacaaacagagcaccaaatgcatgcatccaaactaagtgatgacatgatgctattggccagggtagttatggatgcagaaatttgaatttttcaagttaaactttgtaatttctacagaaatcctgctggactcccatattctgtatattcttttactttaccatccatgttaattccttcattcttctataggaggctttggatccttttgagttctctg

SEQ ID NO: 6562 - DNA, 902 bp, Zea mays
  Intron number 1 from transcript GRMZM2G135949_T01 (locus G RMZM2G135949) derived from phytozome v7.0 (chr-ID 1; pos 2 15762685 to 215763586)
agggcagcggcctccgcgccatcctcgtcatctcggtgggcgcgcctcattgatccgtaacataagcacgggttttcatgtcctgtttactaaatctgactcgatgttctttaggtgattgcgtattggtacacttgttttactttgtgctatcagtcaattgggttactgtgtcatatagcattgaaatgttggtttatattggtactgtttaggtctcaggggccaaaatgtttacaagatctgtagagggaaatgaagaataggatgaattgtaatccctccttcctgaaatataataggtatatgcagggatggcaatggagaattgttcatcgcagaatagctccacacaggggcgaagctaggattcaaaattagaggggaccaaattagattagggggctattagaaacattttttgcactatttacataaaattagctaaagacctaagatatcctgcacatcccgtccccgtggcctctatgtttgccctaaatcaatctttaacatctacaacctcaaataggtaaacaataaaaatagatttagtacggtatcagggtttttaatactgctcatttagtatcgtaaatattatcggttttttctaaaaacttattaaactgagcttagtttgacgacttcggacagctcaaaacttgcatttcaaggtggagactggagagtgcatcttgtaagcggaaacaaaaacatggtggattactttcggtagcaacagagcatggttgattgctttcgcatgcagttttgatcccataaaactcttacatgataccttggtttggtatggcatccattttagcaattattgaaatttctcagtaaataaattttcctcattttacccttttctgatctggcaggtcgggacaatc

SEQ ID NO: 6563 - DNA, 918 bp, Zea mays
  Intron number 1 from transcript GRMZM2G148773_T03 (locus G RMZM2G148773) derived from phytozome v7.0 (chr-ID 8; pos 1 65976839 to 165977756)
ggtgtggcgaataaggcaagttttcaatacttactttgttgcattattgctgaatcaatcgtttctttccccgtctactaaaagactgtttttttttgttatctcagtgtattttgttcttgctgataatgttgcttagagattagtgcaattttctcatgtgaattttgaagtcccttgttctgaaatattagcctttcatgatatcttgaactggtggatgatctactaacatctttgcgtgaagtttaataagtcttctttgggtgcttggcagcaaggcacttgctattctctgctataactataatgcatgtgtatgttgctttgaatttatggtcacacaagaaatgaccaagcaactaaccaattcgtcctaaaagtttaaagttgatggggaaaggtggacaactcaatgggcatgtacaacctagagcccttggaacggttttctaggtacaagatgtatctaatagattgcatgatacaacttggggtctttacatcattaatgcacttaaaagacattatatatagaaagtcgtgaagagacgggatcttcgcgaagagcccgtctcttgatttttttacttaacccttatatacctctcaagagacccatcaattaatggggttgtacatgccctacgtcaacactctctcacttgtaggatccctcaggcctcatacagagaaataggaattggctgcaattattttaggactacttattattttagaaggattgtctgagcttttatcactgctaaattgaaatgttcacccttaactttttgttcatgaattattctaaattctgctcgttcagagagatcgtcagaccctatgccacacttgatgttttatttccttgttgagataggtttcggaagtaagctcaattctgggtagagctag

SEQ ID NO: 6564 - DNA, 728 bp, Zea mays
  Intron number 2 from transcript GRMZM2G417921_T01 (locus G RMZM2G417921) derived from phytozome v7.0 (chr-ID 1; pos 2 8561612 to 28562339)
acagctgcccaagaaagtgtaagatgctttgtctcaccttaatatttatttctttcagaacagtgaggaaaacaatctggttaagaattttgaattgaagatatttaaagaataaatatgcatagtttttgacgatcttcctattgtttctattccacctgtttcatgattttaggaagattttcgtataggtttgtccaaaatatgtgacctcttgaaaaatcaagggagtattcgataccattgtttcattttcttgaacaatattatgaaatatagggaatatttgtggaccttgatgttcatgttcatgaagcattcaatcatttaggtttttatttgtgccaaaatgcaatgtaaatacaccctaatgcttgtactgtgtctccaccttgttattatttgctctctatcgtgagttaaagttttcaatgttgtagcttaacttgggaagttaatgtattttgttcttgtgttaattatagatccaattttagaaagtatccactttacccctgacaattgaaagggatggaacactaataactttatattttcccccatccattactgtatattgatctttctcgtgctgctttcagtttaatctagaaatgtcaacatcaccagctatcatcacctatacatttgattattgttctctaacatgaatatttgattcaaaatagctctcttatggccttaggtagggcttgaaggcagtgcca

SEQ ID NO: 6565 - DNA, 912 bp, Zea mays
  Intron number 1 from transcript GRMZM2G057618_T02 (locus G RMZM2G057618) derived from phytozome v7.0 (chr-ID 8; pos 1 41803381 to 141804292)
gcgcggagctcgttcgtcgccgtcgcgcccccctggtgcgtctctttcccttcggtgactctggttttccggttccgccttcgtttgagggcggggtgtgaattcggcgccgctcagatgggagctgcagaaatcggaacggttttgtctcccctgtttttgcagttggtatatcattcgtttgtttatggaacgaaatgcgagtcaaatccagcgttgcatttttttttgggtgggggggctggggatttccttgtcgggagagaagaaatttcgattctggctttgattcctcccacatggagaggccaattctgaggcgcgaagcgcggcgagatctgcgagggcacgtccggctcgaataatttgtgacggcgattcctgtggcgtgccccggaatactgtgggtaggcggaggacgaggctgcactgtgcaatctgaccaccagccgaagccgagggtccggggtcatctttcccgtctacagtgccggcgaccgcagcggtggtgcccgctcccatctgcggccaccaataaaggctgcgatgggcgggacctaggccaacacttgaactggtggaaaaggctgcctccttttctaactcaatcatctttacctgtcgtgttgctcgcctttttggttcaactccgcctgccaagcaggttcggcgtccaactctagtggcaactaccagtggtacggtactcgctcgcttgctcactcgtctcccctccctgttgccatgagagcgcggttgctgtgttgtttgtactaggcgggcatcaattctagtttgctttggctgtttcttcttgggtcttaggttgttgagttgtttgctttggcagttgggttttctggcttagtgcttctggatttgtaggcatcgctggttgtctagaggaagaag

SEQ ID NO: 6566 - DNA, 854 bp, Zea mays
  Intron number 2 from transcript AC196018.3_FGT009 (locus A C196018.3_FG009) derived from phytozome v7.0 (chr-ID 1; po s 279040203 to 279041056)
accaacttgtgaagattgcaaaggtaagcattagtttgattgttcattccacatgtttctgcgataaagtagatgttttggtatgggccttaatatgcaactcgtggtttgattgtatcgtatgttatttatatatatgatataatcatccatactagagttggataaagcttatgaaaaacctgccatcatacaatggagtttatgtgatttatgtgatataattatccgtactagagttggataaagtttatggaaaacctgccatcatacaattgagttttgttcaaggtctgttacgtctatagcagataaactttacagaagcagatcaactccgactctatctcaacatgaagcatatattgtttgttgctgatagcacttgcctgattttaatcactgtcaaacttgaaactttgaaatcaaactcacaacccagtcagacttgcatgtttacaacaacccagtaactgatctgtagttttctttggcctttgtaatgtgacatggagtcttccaccataccttaatattgcaaagctataattttaaagtgttgtacctgatacttaatgcagcatttagcatctaccagaggtcatagatagcaagtcaaagatttgtgtacttactatgaataactgaaaaatcctcaggacgttctaatgaccttgttgtgcttgtttgttccatgcttatactgaagcactacatatacatgcttatgctgaaaactcacgagaatgttgtccagataatgacttggccaagttctggagtcctattatctcaatgatcttatccttctccattatggaattagcagagtccaagtgccctaggtggcttgg

SEQ ID NO: 6567 - DNA, 712 bp, Zea mays
  Intron number 2 from transcript AC216253.3_FGT005 (locus A C216253.3_FG005) derived from phytozome v7.0 (chr-ID 1; po s 196982331 to 196983042 reverse strand)
tgtcaggctttctactaaggctgttggagttcaaggttattatggcttgctaaaaagtagattactgtggtatgatgggcatctgtctagtttagtaatttttatgtcaacttctgcaacattataggcaagagcaagggattttgatgtgctcatgaaaatccaaagcacgttatgcatgagatgatgcacaacttaaaaaggaaaatataagatgatgttcctctcgtcactctgtaatctctatcttgctttagctgtcacagtttgatacttacataccgttttttgtaatgtagttgatgtggcaacactaatgacaacatgttgccattttttcatatggtccattttttgtgtcctttagaaaattagcacctttgcccattagtcatgtcttcatttgtctttagttgccattatggggcaagttggaatagttaaatgcctggtagcgacttttgtttctgaatttatgagaaatttgttagatacctatatttatccttggtcattttcttaaatgatatcttcttgttcaagtagttttttgtgctttaaaatttcaaggtgtgtaagagtgtctgtaatatatttacatggccaaattttatgtgatatttttgcttttctacaatatatactttgtgttgtgtacttgtgtgcctgatatgttgctccatgttatatttcttgaaggacaaaggttctg

SEQ ID NO: 6568 - DNA, 776 bp, Zea mays
  Intron number 3 from transcript GRMZM2G050325_T01 (locus G RMZM2G050325) derived from phytozome v7.0 (chr-ID 8; pos 3 922467 to 3923242)
gcgttcacaagtcaacgacggccggtgacctcattgtaattctcctaatccttattttcgccttactgctaatgatgtactaggggtctgtttggatgcatcacatcagcactaaaaattagcagctaaaactaatacatggatccagacatacagctaattatgcaaacacatctgctaataaaccttctaattattaacggaagcactactaattattagttccattagtaggttttggagttgctaatagtttatgtacatcttcgagacttcgactcactatccaaccaactattatgccgtttgcagcagtctaaccaaagtttatttaaaagaattgttttgcattgttctgcattgtatactgtactgttcgtataatagaatttgaatatgggtatagatataagtaagctgctgaagatagccttagcagtggatctaaacagtctcctgttaacaattagcagctattagctaactattttttagtgctaatggatctaaacatgccctaggtgcctgcttattaatgcaaaagttaccaacacgaaaatggataacaagattccaaccaaattttcaaaaacatgataatcctacgtacatcagcactaaactatttaggttgcataaaatctacatagaagcgatgaaacaaagataaacaagagtggtaattagaaagttcagtttgttcaggtaactcaacacaagaaaatattattttgctttcaggtggagctttcatcaggaaaggaggttgctgatat

SEQ ID NO: 6569 - DNA, 603 bp, Zea mays
  Intron number 1 from transcript GRMZM2G447145_T04 (locus G RMZM2G447145) derived from phytozome v7.0 (chr-ID 1; pos 2 46699564 to 246700166 reverse strand)
tgggcgcggggaggcgggaacgagcggcggaggaggtgaagctcgacatccgcaacatgctcatggcgctcgaatccctcaaggaggagtccctcaagaagaagaagggcgatgccgcgcagcagcaagagccaccacagaaggaggtagggatgaaaacggtcggaaacagtatttattcggtaatcagttttttagtcgtttttctttgattgcgaataaataggatatggaatctataatacaaatttgtattcttgtttttaacatccaacttgtaaagattcataaaagataaaccttaaattcattctatattttatcaaataataggtataaacttcggtatgaattcggaaataaattcggtaattttttcaactatttgtattgtagggaccaaataatacataaaacaatttatgtaatattttattcatatttgtactaatgtgcttgataacataagaaaagatcaacatcaaattttatacatatctattttaaaatattaaatttgtcctaacagttcggattaccactttcatccctagaaggaggtattctgggctcccgcgtcgctcaccaccaagtcctgtgcag

SEQ ID NO: 6570 - DNA, 890 bp, Zea mays
  Intron number 3 from transcript GRMZM2G370858_T01 (locus G RMZM2G370858) derived from phytozome v7.0 (chr-ID 8; pos 1 44407304 to 144408193)
ttaaggaaagaaccactcttgaagattcagctaaagtacttggtgtttgcaagagaacacttttgaaacacgtgaaacaagggaaagttagaaggcacacgagtagtatcaaaccgcatcttaccgatgaaaacaagaagtctaggctacagtggtgtgttgacatgcttgagcatgagactttgcatgacaatccaaggtttaagagtatttttgaccatgttttcattgatgagaagtggttcttcattactcgaaaatctgagaggtattatttgttgcccgatgaggatgagccttatcgtacttgtcggagtaagaacaacatcccgaagctcatgttcttatgtgccaccgctcgtccaagatttgagaatggaatttgcacgttcgatgggaagattggatgcttccctttagttacttttgaacgtgcaaaaaggagtagtattaatcgtccagctggaacaatggaagtgaaacccatcacttcgataaagagagatgtcgttagagagttcatgatacaaaaggtacttccatctattaaagctaagtggccacgtgaagatgtcaacaaaccaatttatattcaacaagacaacgcgccatctcatattgaagttaacgatccaatgttttgtgaagctgcacaacaagatggtttcgacattcgtctcacttgtcaaccggcgaattccccagattttaatatattagacttggggttttttcgtgccatacaatcaattcaatacaagaaatcagcaaaaacagttcaagatctaattccagttgtgcaagaggtttgtgatctatctataattcgaaaaaaattctattaatttgttttatgtactaacattattctgatatcatttaggctttcc

SEQ ID NO: 6571 - DNA, 968 bp, Zea mays
  Intron number 2 from transcript GRMZM2G015005_T02 (locus G RMZM2G015005) derived from phytozome v7.0 (chr-ID 1; pos 2 51614270 to 251615237)
ttaggtcacgggagcacatacaggtatgattctgatttaggagttgtactttgtgattttcagatatatttggaagacagtttggttggatcaaatctatctatattctccatgcattttgagcatcattcatcaatgttcataaatatcttgctagttgactatccacaacattgtttagggtgtgtttggtttggcttttggctgtggcttttaccccgtaaaagccaaaagccaaaccaaagggcccaattcagccaacagttttttttccaagaagccggctttctcgcagtgcaaaattgaaagcgcctgcttttagcggctttcggatggaagaactttgcaaatatgtatggaagaacttttagtggcttccaccaaatggcttttagcttttttacagctcataggccacaacaacttttttttcacagttcagaacccacaacagttttttcacagccacaacccaaccaaacagacccttagaaattgagtaatacataattcagttataattgtaaattaaacatgctgattgatgaaacgaaaccagatccaatgcttccaggtttagaatataatcagtgtaatatgtagtctgaagaaaaacacatgccttgctatggcgagccacattaatcatgtactccattccaacaatttctaagatgttttagcttttctagatacatagcttttgctatgtacgatatacactatgtcttaagatatagcaacgtatctagaaaagctaaaatatcttataatttggaaaggagggagtaatatacactgacgaaatcataataagagaaactgtaggtatagttaagctgagacaatttaatgagacaacaattatgctgaacctcttttggatccagtctatttaacaacgttcaataatgcaattatttatttttgcaggcatttagcggccatcggggaccaatatcttgtct

SEQ ID NO: 6572 - DNA, 726 bp, Zea mays
  Intron number 1 from transcript GRMZM2G100084_T01 (locus G RMZM2G100084) derived from phytozome v7.0 (chr-ID 1; pos 2 76435745 to 276436470 reverse strand)
ccacccaagaggtttgtgctgttggaagaggacaggtaaatgctaaaatcctcatgaactcttgttttttctgtattctaatgcatcaccatcagcttacttcatttagcttgctgtcaaatttcttggcttaccctaccattagatatttaggtaggtagggtaggatcagcacacacgctcttttttgttgctctctgagctgtcttatgatctgaagttatattagatggccatgaccaaggtggaaacaaattttgtctgtccttggctccttactaaacatcctgaaatcattgctatcagtgcatgcatccaattctgatttgatgacatcagagcatctattgtctttgcctttctcagctaggtagggcatatgtagtcctcttttcatctgcttggaagacactgatgtgtacttggtctaattttgagcttttaactttacctttgaactttatatgaagtaattaggacattgaaaattgttgggattttttattaggtgctgtcaccttccattcatattcttgctgcttgctggttgcgtaccgtgtttatacaggatatcatggtcatagatttgtctagacctggtacagtgctttgccctatggtatattgtagtgacaaaataatttcaatactgatgcttgtgtttgatctttgatgttctttttgtgttggtggaccaggcaacagcagtatataaggtttcatctt

SEQ ID NO: 6573 - DNA, 515 bp, Zea mays
  Intron number 3 from transcript GRMZM2G428035_T02 (locus G RMZM2G428035) derived from phytozome v7.0 (chr-ID 4; pos 1 89368465 to 189368979)
gaagtcttgataaatatatatctggtatgactgttgaaaggaatgtttttcatcttcattttttcgctgaatattatctgttccaagtatctcataggtatgatacagtgactttacaatttttcaaatgtgtggaaatatgtcttactgatcgcataaaactgcacaatgcataccttaatttgcatcatacaactccaggtaagatttgttgcgatacaaatattgcaaaagaaacatatgtgagttgttggacgtttatgtggttcaaaacggagactggaaaataagaaaaaattggtcactttgttagacactcccatacttatattattttctccagtccaaaatgttatgtcatttacacattaatgcagtctacaaggtgatattttgattctagggatttccacgaaaacgtatctcaattaaaaatggctattcattatggatagcaatttcattgagaacatagcatcatcaatgtcaactttttctgtatgggctttacagat

SEQ ID NO: 6574 - DNA, 833 bp, Zea mays
  Intron number 3 from transcript AC199421.3_FGT004 (locus A C199421.3_FG004) derived from phytozome v7.0 (chr-ID 1; po s 247099060 to 247099892 reverse strand)
caaaccgttccatcacaacacccattattttgaacgtaagtattttataagattacctacatcaacattatgtacttgttttcattatattgttaactgagtatgcatgtgattaaatgttgcactcattgcagcaattcaaaaggctttggtggcacggaacgatcgtcagtttgccgttagatatcttgacgaccaaaggtgtagatagagtctataacttttgcaactctgaattttatgatggaatacatgtactgtcattgatgcaacttacatgtgtcaatatttgtaaaacattttgttctacttggaaatatcaatgaataagtggatcatcaacgtttagcccgtacgttttccatttagaacactattggtttaatgttgtgtcatgtttgacattaaaatcgtaacttcgctcgtgaaattacgtcaaatatacaaattgacttcggaacaaatttaatgtaaattcggtataccgaagcccatctacaggagctatgcgtgctccaggaagatagtccacatcaccagagtatgaaaacaattacttagcgcgtcacccatatccatctatgtagttcaagcttggaatataatttccatatcttataccaacaccaaaatcgttctcctatcacctctctctaggtcttatctctttactctcggttatgatgcttgtttctataacctatattaccaagggcttcttttttgatcttctattcacttgatttattgcagttaggtcatttcacccttggttcttgcagtattatttttatgctcatgttttctcggctactgttcttgctatagatcag

SEQ ID NO: 6575 - DNA, 739 bp, Zea mays
  Intron number 1 from transcript GRMZM2G134104_T01 (locus G RMZM2G134104) derived from phytozome v7.0 (chr-ID 4; pos 1 81183764 to 181184502)
gcgacctcggaaaggcgggggcgtctcgtcgcgaggttcgcactccaaagtccaaaccctgcttcccctccctaccgtcccgcaccgcaccgcctcactcgcgctttcctttctggctgccgagtccgcagtccacgcgcgtgaggagcgaggatcctgctaggtttcccttgttttggcacgcttggaaggctataacgtttgatttgtccccgatagccgccggatttgtcggtgctcgcgcccccctcccttcccctggttagattgtagtcgcggcgtctctgcgcaagagttatggatccgtgtcttctcccgctctaaattttagcctttaggcataagggtactcatttcgttacggtgctatgaccttgatttaacaacatggacttcgcattttgatctgtgagcgagattgggagaattacgtcatatagaaccttggattttctatttgttcgtttgtggcatgcattgtctgcttcaaaagggcttggatttgccccaaaatttcaattagcacgctgcgcatgtacttgtttccctcctgtattggacggatccagctgtttttctatgggcaaaacctagctatttgtttagcctacagccctatactatccatcttggaatttcacttctgccgttacttcaactgctctcattgttagcttattaggtcttgtctgtggattgaccaggcatttgaggccaggattttttggtgctctcattg

SEQ ID NO: 6576 - DNA, 853 bp, Zea mays
  Intron number 1 from transcript GRMZM2G158811_T01 (locus G RMZM2G158811) derived from phytozome v7.0 (chr-ID 4; pos 1 78038136 to 178038988)
tccttcgcggcggtgcttgcccaggtgagcgggatgtatcttgcctctttctcttcttgtctacgccgcggtaacccaaaaattcaatctttacccttcgtgcggtctagcttctattgccatgtttggatggttttacacttttgtgcgagatcataccgtgtacatatgttctgatggaatatgcaataaccaaacatgaggcgttgctcaaaccactgaagatttctatttgattcagtgcaaaatcttgagttctgtcgaacttgggataatgctgtttgatgttaaagccttacctggggaaagaaggcctcaattcaaattgacagaatttacaagaattttgaaatattcagttccgactgggggaaaagaatcggaactgtatacttttatatacttgctataaaagccgagttacatctgttcttgcttggctcatgtttttttggctgttcagttcagaacttgccatatgaatgcaccacattgttaaagggctggggacgaggtactttgatttttaatgctatcttgattatagttgtttgacttgtgttctgttgttaacacttattttttgtttttaaaataaattccgagtttgaatattaagcactgcatgcttgtttatatcaaagtgtaaaggtatgagcatctcatcctaatattctaactgatagtgcatgttggaatgtttgctacttatattttgggcctaataggaggaagtaaattctatcagtaactcaaattgtacaataagtgaaatgatttaggtggatgtacttggggcaacaccaatcagcttcagaaactaacacctccttctcttacaggttgtaaatag

SEQ ID NO: 6577 - DNA, 1025 bp, Zea mays
  Intron number 1 from transcript GRMZM2G174896_T03 (locus G RMZM2G174896) derived from phytozome v7.0 (chr-ID 1; pos 5 2154702 to 52155726 reverse strand)
gccgatcagcctgcgctcgggctcagcgctggaaggtgagagcatccagtgcctcggcccgcccgcccgccccgaatctggttcttgtgctggctctggctgtgcgctgcacgaactctgcatctgcctctttcgagacgcaattcccggaccgtgggctttggtttcggggctgcaaggccgctcgtcgttgcggcatttttcgtttcgcttgtcctgtgatgagagatgtgcatttccctttggcgggcttaccgttccctgctcgtctgtatgtgtgtatgtttgtgtgacctttccctcgacgccaggctcttctcccctcttgctgtttctttcagcagtacagacgcgcatctgtacaacgcctttcttcggtcctgggttatgattgatccgttaacagttggtcaccaagtgctggctgtttaatatgtactataagcttcttggtgccgctgcctctgcctatacgactttatgcgctgcctgcacaagtctcagccatctgtgggaacgtgtgtctctcacctacctttcatattgcactagctggattgaatcattctgctttggagagatgtccggtcattttttaaatcattttcatctcgcgtactagtttttttgtttttgtttttgcgagagagtaattttttttaatatttactgtctcctgtcccatttgctgtttctttacccagaaatttccaccagattcagtcaaacgaaactcatgtgctcttttttttctccctttcaaaagggtgtgtaaccgactaccgactcagataatataagtgcggtcacctatcacatgatatcatctcgcctctctcccttctctggtgttttattctcctttttccaaccacagcttgatgaacttctttttgggggtaactacagcttagtgaacatgaatgggtagttttacaactaacgcaacggctggttcactgaacaactgtaggtgttggaagagaatagcctgaaggttcacagtaaccttcatctgtcggaag

SEQ ID NO: 6578 - DNA, 813 bp, Zea mays
  Intron number 1 from transcript GRMZM2G106363_T01 (locus G RMZM2G106363) derived from phytozome v7.0 (chr-ID 4; pos 2 09807646 to 209808458 reverse strand)
gggtaccgcgcccacgaggtgctcgggcgcaactggtcagtgctatgctatgctatgctcctggcctccgctctgttttctgctctgtttttctctgcttggggactgacagatttgggctgctgcggaatgccgcttgcttgacgaagagggagagcatgttgatgattacctatgatatattttgcttgatatttaggttgcacttctaaagttggccacatgcacatagagaaaggaattcttcaagaataataatacctagaatatatgggtgtacaaaaagtatttgttggccatgacttgcaggtggtagactcaaaacctggttgtgattatgttctctgaaactggatgttaatggaagaataggaaatcattgggaattccagtttacttcatatcattatgttgaatagaagctaggtggtcattgtatcgagtatgaagtcgtattcgcatttagcatcagatcttcagtagtgaatgaaattggtagaaattcaaatgctgtgccgaagtagcagcatggtaacggccagtttaggaacttgtttcctgctaatgttgacataaggtagcgaacatccacatggaagcagagagaggtcatttatttttgtcaggctagtcgatccaaataattccatactataacgtcttgagtagttattttatgattgcttgtgccaaccttaaatttgctaacagtgccaaacttgacagagggcctatcggagcatctcacaaactgtgttcactcaaacttgtctttcagccgattcctgcaatttcgggatccacgagcccaga

SEQ ID NO: 6579 - DNA, 870 bp, Zea mays
  Intron number 1 from transcript GRMZM2G054207_T02 (locus G RMZM2G054207) derived from phytozome v7.0 (chr-ID 1; pos 2 32284912 to 232285781)
cgcgttttctctgatgagtcggcaacctggtgcgtgccagataagtaagttagtacagtagtattatatttccatcaaaaaaaatctatgaaaatattataatacacttcttaagaactgatctgagttagcagaaagattttcagcaaaatactaagaacatggaaaagaggaaatgccctttattttcaattcactagactcatcttttatttagtggatttgacactaagtatatattttcgtttaaaaagttaatacctccattcatgtttactagctaccacagctaaatcagatactttttttctacaagagcaataaatcggatacttactgcttcgttggacgttccaaaggaatctgcaaagcttttgtgcctggaatgactggaatgatctgcagggcgcccagagcctggatttcttctggcgaatgcctcaacagcaccagtgaacctatcccggatctcttgtcccactggcaaaaacgcaactaattaggtcaatcgatcaattttcacatagcaatggtccaaatgcaattaactaccaggagacatactggaagctttgtctgttctctcaactgatggtccaactccagccattcttgcacttggttgctagataatttaagaaacataatggcattttagtgaaacgaaaagacaatagtaattcaccaataatgtagacaagacatagatataagattagagagacatacttgaacaagcttgttgttggagcccatttgagggtacttgagtgcagtccagtcaaatacgtaatcaaattggtatcctacagtgttaatctataatgagacccagtttcctaacaccggatcatagtgcaggcgagaaca

SEQ ID NO: 6580 - DNA, 665 bp, Zea mays
  Intron number 1 from transcript GRMZM2G137968_T03 (locus G RMZM2G137968) derived from phytozome v7.0 (chr-ID 1; pos 2 99410251 to 299410915)
gctcgcaacagggtgcgttctcgtcttacctccattgcttgcgcattaaatgcatttccctgtttcgaccaatcacaccttctaaataacgcgccacacatttgtttggcttcaaaagagaaaaaaaggcggtatttgtcccttgtctatgctagggttttatctagcgggaaaaacatacctatgcttctgaatccattcgagtttggtcccgcaagttaagttctctggctggtgatgtttgtttgcctggactgtacactttagttgctccaaggtagtaggctagtagcttatcttaatttgtgtcgtgaaaatatgttctctgttcgcactgcatacatgattgattcccccactgctacgagttcaactagtgatttttaattcaatgtgtaaaaatttactacctcatgctctacaagtctggataacatacatgttatgtgacgtaaatagatatcaaattgttccttcttatctgtcttatctttgtcaggtttatatgatgtaaatgggtccttcgctccttctcttttcgggacatttctataacttctttttcaactatgcacggaattggcttcccatttcttctcttagtgatgcctgtgcttttgctaattatgtaatcatttcttaggaagtggtgattttgctgttgg

SEQ ID NO: 6581 - DNA, 607 bp, Zea mays
  Intron number 1 from transcript GRMZM2G311036_T01 (locus G RMZM2G311036) derived from phytozome v7.0 (chr-ID 1; pos 6 6305848 to 66306454)
agagtattccacctgcaaccgctgttttcctcaaggtaccatccgtcgtcaccgctccctcctccatttctcattgtgtttgcattttgagatccatgtcaaacttcgaagttttgactatcgttttgtcttgtcttgggcgaaatgcctcccccgtccaaaaataaattaaaattttattttacagtatagattaacgatatctataacaccgaacatgtatactataaaaatatatattttatgatgtatcaacgatactaataataatgctatattttaatagatttgtttgacttagaacaactctgtaatttaattcagactatgttttgtagtgattcagatctaaattccctcataaatattttggataatcaattagaatcagtttataaaaccgtttggtttgtaatatttccacaaaatgcattttatataaaaaatcgtataaatgaaaataagcttcagaaaaatcctgaaactagaagtaaatagttttgacatcatatacatacatgttattatctttgaatccaaacaccaagaacccttttcttcatcatctatcaattaacttaatgaaatctatgccagaaaactctac

SEQ ID NO: 6582 - DNA, 802 bp, Zea mays
  Intron number 5 from transcript GRMZM2G056573_T01 (locus G RMZM2G056573) derived from phytozome v7.0 (chr-ID 4; pos 3 9977444 to 39978245)
cttctcaggtacagatttttataagttattagtgatcggctttcttttgtcatgttgcagtgtatttgtgattaattcttacatataggagggattattgacttccttggaccactataagattctcgtcttttcgggtagggcctgtattgtgcttccttcacatgataatcccatacctcatgaacatgtcaccccattgtaatcaaagccaacttttagtggaatgtttatttggtaacttcattcactcaatgtatcacattcacaccattggatgtatggtcttcatgctgaagctttttccaggattgctttggacagggtactggtagttcattaaaacgcctttagcaaggaacctaagttttggaagttgttcagaagaacttataaggggcataacctttttgtttttgggattacttttagctaaatgacatctgaaattataaacacgtattctgtctatgaatgttttggacatgaatgtgtggggccttgctttacctaaagtcaaaggtgagttatgttgaccttgtgacttgtgaggggttttcctatttctatgctgtactgtgggtcttaattttgttcaagggggttctttagagaactttagtttgcttctataatggcaagccagtgcatggtatataaaaattgtactgatattttattgcctgttttcattatgacatgttttacttgtagtaaggtaagctgtgtgtcatctgttcccaaccgacctgtcttgtttattacaggtatcagcacatttgtctggaaacaattgccttgg

SEQ ID NO: 6583 - DNA, 669 bp, Zea mays
  Intron number 1 from transcript AC205713.4_FGT007 (locus A C205713.4_FG007) derived from phytozome v7.0 (chr-ID 1; po s 229064583 to 229065251 reverse strand)
ggggagcgtctaccagggttctcggtgttgtgctcgtgagtggtgactttctaatttgctgtcagttaatatctagatgttagtgaattgaaaataaaagctgcatagctaaaacaagctgaatcaaaaataaaaacgataaacttcttgtcgatgtacttatttccatcaccattattacttgtataactaaaaggcaaaaactaaattcgagttattcactctgactttgcttctatctgtacaacttctcagacaaacacttgtagagaatctgtatcgagcagggtcatagcccatagattaagcattttatctttttgtcttctacattatcagtgccttaaaaaagaaaagggcacataaaatttggtgcaataattgcttgtacccctttacaaaagtttcctgcatgtcacttgcacatataaaatttggtgcaatatttagttgtgtgtaaggcatgctatcgatttttctctacagatggcacacatataataaaattgtttagtgttttatcaaattggagatattaatagtttaaaaactatttagtgtttcagtttagagtacatatctttaattgtacttgtctagatgtatttctaacaaaaacctatcatatattcaggttgttgaatctgataggccttatttgttcagcta

SEQ ID NO: 6584 - DNA, 567 bp, Zea mays
  Intron number 3 from transcript GRMZM2G067028_T01 (locus G RMZM2G067028) derived from phytozome v7.0 (chr-ID 1; pos 1 79642077 to 179642643 reverse strand)
aagctggtacgcccggatcttcacttcctcctttgttttgccctaattatatgctgctatgtgacatgatctttgttgtgttgatcatctcgctcaatcctagaaaagctatttgtaacgtcagtgaagtcataaactctttcaacttagagtgtttttgtttttctactagattatataagttggattatggtgaaataggagggtaaaatatcaatttgtgactacgaataagctgaaagaagcgagcattgtgtaatttattttagcttatttgtaatttcaaagtgatattttatctttttactcttccaccataatccaatttatataatatacgataaaaataaataaggcctcccttaataagcctttaccatgacatgattcggtattgtggtctgtttttcatcaggccagattatcattgaagagtaaagactgactgtaaaccagcataactttcttttaccaaccgtatgaagatatggtttgctctatctcgatactaatgaaatagtggtaaatgcaggaatcagctacacgctaagcaaatctgggaggcca

SEQ ID NO: 6585 - DNA, 652 bp, Zea mays
  Intron number 2 from transcript GRMZM2G002498_T02 (locus G RMZM2G002498) derived from phytozome v7.0 (chr-ID 1; pos 2 3490779 to 23491430 reverse strand)
gttgcctgaactacatcgaggagaacgtaagttctatttctccagctcataggactctttgactatgggcaactctatttatccagatcatatgacttttcaccttgggtaactgatggttgttcatgcctgctgttcgctgctaattgccgccacactccgtctctctgcataggcatatatgttaaccacgatgttgttcactaaagaaagaaggataactaatgaaacatataaatggtatgccacgggcactaatagtttcatatatgcctatgcattttttacagactttgtgtgagaatattattctcactttctttgctttctgtttttactcatatatatatgcaaactggagtggaatctttgatacacacctctttcgcctcagatttaaaaatccctatttctgcagcatggggtgcgagagcggggaagggagcgacggtggtgcatggtgaataagcaggtgagagctgagagacgatagagatgagcaaactagcaggaacaagaatgaacaaagaacttaatgactgtgaattcaatcagagaaaaaatttctttttatggccattgttcctttggaacgacatgcatgtctcattacacttatttttctattctttttcaggtatcttcctataga

SEQ ID NO: 6586 - DNA, 980 bp, Zea mays
  Intron number 1 from transcript GRMZM2G135450_T01 (locus G RMZM2G135450) derived from phytozome v7.0 (chr-ID 4; pos 6 1550146 to 61551125)
tggccggggtaactgcactcttgatcctcggtaagaacccttatactagcttcatattacctccaatttggttttgcaccatacgcgggctagtttcgcgctcgggttggccggattcatggactccggcgatccccgccgccgtgcgtgggggctgagtgcgcggctcgggttgggggggtaggcgaagcttgcgcggccgtcagatcgggcgcgagcggttaggattagatcactgcttaccccttcgcacttaaaatctggtccgttggcggttcatccgagggcatgtgagcggagaaaacgtggttggatctggggcgtagatcttagatcctgcgggcgacaaagcataccggttcgcatagatctggatctaatctggagcgtcgctcattgatccaacggccgagatctgagaataccccttcgccgtggcaatctttgtaaagagcccctgttctttttgtaaatgaacccgccgtccacttagctaggttctgagtctcaggaattcttctgtaatagcccctgcgttttctggaaaatgaggccccgtccagaatagttttaacccgagaatttaaatttcaaattgattttcaatgtataaataatgtctagaacttcaataattcatagaaaatgcatatgaactccaaattacttcattccagttcctaaaattttgtaataatgttgtttattacatagcacctctgttttaacatgaaaatggtattaaaatttatttcttaactaatctcgtatcaaatacataaaaccttagtaaattcgtatctccttcgttttaaatccgatttgactcgttccagttgcgttagtctcgtagcaacgcgtagattattattactcagtttattcttatgtttgttgtgatgttaattttgcctataccatatttgtttgtattgctacgactagcgtgaggtcacgagtcacctgaagatcatcctggt

SEQ ID NO: 6587 - DNA, 859 bp, Zea mays
  Intron number 1 from transcript GRMZM2G111300_T01 (locus G RMZM2G111300) derived from phytozome v7.0 (chr-ID 4; pos 2 6656328 to 26657186 reverse strand)
tcgccgtgtccatcaggcacagggtgatctctcaggtgagcaccttcccagcttccgtcaacagcggttcacaagagagagagagagagaaatctggtgaaacttcccaataatctggcatgctaatgattaaaacattccaacttcaacggagacaggatagatatgacgagctactttgatttggcaccaaccattccgaacgcccacttggggcacctcctcgacaagaacacacgccatgccatgaagaaaaaacaaacaaacaacctgtccttttccctgagcacaatccgtcgatacctactatgaaacttcaactgataagaaaaaatgtgtcatctgtctaataataagatgctctgataaatgacagtagtagttgttagcagtcaaaaccgattgattaggttgattgaaacactactctgaataccaacgaagtaaaagtatagtaacactagtcctcgttctgtaccgtcgaaaagctcgtgttcttgggcttatcgattggaaccaggaatccaatcagtgctagtgaacgaaagagacaaatcagcgcgtagctctcgcagcagtacccacaggccttccgtgtcgtctccatcggagaaagggggcgtcgtccctgccgttggtgctaaaggcaagagaatcctgctgcagacaagcggaacggaacaatgccttgttgccttccttctcccccagcctcacaatggagccgccccccctcccctttgcagattcttcgagcaacatggcaggatcattcattattcgaatcagtaaccgtaagggcaattctgtggtggttggtgcaggttctggagctgggaatcctggtgcactcggtgat

SEQ ID NO: 6588 - DNA, 992 bp, Zea mays
  Intron number 2 from transcript GRMZM2G128444_T02 (locus G RMZM2G128444) derived from phytozome v7.0 (chr-ID 1; pos 3 8610181 to 38611172)
tttcgagcgctggtaagttgcagcataatctcctactgtgcgttcggatggattgtgcagtattcgtttcgttatctattttgataaggttctttcattcattaatttaacaaccgagtacagagattggagaaaagtttcccaagaactattctgaagtgtttctatcacctcagttactagcatgggtcttgtttttgcaactaaaagtaaagaattgagaacagattctctagcctgtttagctaatctatgtgccttatcgttgaattgtcttggaatcttgtagaattctgctggttgggaacctgagatgtttatgatctcagcaattgtgggtcaaatcctctagtgtgcaggtttcttcaccggattttcttaagtctttacaggcagcttgtagtccgatttttgcatctttgatttggagagttttagaagggcttggtgcagttgtgaaagtcatcaggtcatgggtttcaagcagcctctccatttttatggaggaaggtttgtctcgctttatcccttctccagaccaacttatttgagagtcggttatccctttcccagacaccactctgcgggagcctccgacactgaatctatcctcttttttttattgtaggagagttttcatcaccatggtagccaattgagttactatagcttcttatctttcgagttttagttaaaaaacaactcttcaagttttcttttgttggagagttttcatcaccacagtagccaattgaatggctagagttccttatctttcgagttttagttaaaaaaacaactcagcttcaagggtgtgacatatctagacattcatatcacagggaaacccggtgtgttgctcggtagccaattgagtggctggagcctcttatcttttgagttttagttaaagaatcaactctttaagggcgtggcatatctgcacactcatatcacagggaaacctggtgtgttgcttgtaggctaaagga

SEQ ID NO: 6589 - DNA, 553 bp, Zea mays
  Intron number 2 from transcript GRMZM2G479127_T01 (locus G RMZM2G479127) derived from phytozome v7.0 (chr-ID 1; pos 5 7191362 to 57191914)
tctcaaaatcgccatctactggtcagattcaggttaggtcatatacccactatgatctttgtttgtctgttgctttaccatacttatcatatcattattatcttttttacttcagtttccaatgaggccataaacttttgatgaagacccaaatcaacatggccgacttccaaatataatcatccaactccctcttatgcaagacctgatggcaaataagatttagatgcttcctgtacatcaacgccagaagttccaagctacgttgattgattatgacttagaggttggcaaaatatttgcctctatcaagcaatgtttgaatactattggtacaaagcagtccaatctagctgctacatttggagatttgattgatggggttctttgggccgatgaatctgttacaccaaatattgttagtatttaagcttgacttatatatcttttctgtcttgatagcttgcatttcatgtttacatattatgattaacgtatacttcatcttttttgtgtagcaaggtcagacagtggtaggtggcacagttgacca

SEQ ID NO: 6590 - DNA, 1002 bp, Zea mays
  Intron number 3 from transcript GRMZM2G479127_T01 (locus G RMZM2G479127) derived from phytozome v7.0 (chr-ID 1; pos 5 7192009 to 57193010)
gcatacttgtgttctaggttcattgaattagacaggtacatacttttcaaattgtttgacttggcataatgtttaattcttattaattctgattgaacaacatcgtggcaatggtattgatactattaagttttattcaatctttgtacccaaagatttagccttgaatagaagcgaaaggaaagtagctatacacatgactgaactttgagttgtagcttctataggagttcaactataggtctcttgttgttaaagagaaaaaaaactagttcaaagcctagtgatttaaagcctgcaatgatctatttctagacgcataccagggtactgaatcaaagcttgtgtccccccattcttctataaatagcaattttttggactgaaccaaatgatgagaacacctgtagccacgttgtcatagttagaagagaaaataataataaaattaaggatattttaaattgtcttcacaattttacttacagtttgaagaacatctacagtaacagcatattgcatattctcaattgatgcaacaagaacattgccttgagcctcccctttccttctgtcagctccaacagcaggctgtgccagacaatcaaaaggcaaaacagcaagtttacataaaagagaaaaacagaaaattgtaatactagaatgcccatggtcttctgaaaaagtaataaatacctgtaatgtaccatccatggcagaataattgattgttggatatggattattataatccctgctgctgcggagggcagaggcagcatggctgctgctgcacaaggacagaggtggagcagcagtgccaccgcatagaagtggatgggagagagagggagagggctcggagacggagagagggtggtggctgaatggctgagagagggtggcgtggagaagagctagctgggcagtgcttaaccaaagtttggatgctgttgttaatgcattggacaatgtcactgcaagaatgtacattgattgcag

SEQ ID NO: 6591 - DNA, 738 bp, Zea mays
  Intron number 2 from transcript GRMZM2G065496_T02 (locus G RMZM2G065496) derived from phytozome v7.0 (chr-ID 1; pos 1 65069074 to 165069811)
acaggagactttgctcatcgcattgtaagtttctaactgtccaaagcccactgatgctgttctttgttcctagaaaacatgcggttcaaattccacaaattttttggttgtgctgagcaatactcagctaaccctgtaatgcctagtttgggtactcttggaataagggggattggagtggatcaagaggtattgagggggattttgatctattatggatttaaacactctccaatccttccaaaccactccaatccaaaagtacaaactaggccttggggatatgttacttactgaaaccccactactctgttcttgctgccttaagtatcatgtatggatctaaatattaatcttacctaggagcacttgttgtgctgcaggtatgctgtgagtgatataaagatcttaatctcatgtccacttgccgagcttcagtttctttatcaaaaaatacggcagcaactctacatggcctaataactgaaagcaaattcagttaaactaccccattattatagtacaagaaaagaaaatttcccttcagttctttttccgtcaaaatatttgttcttttctagggttcacaagattactacagttagttgattacaaaacgatatttgccttgttactacactaccgtcatctgaaaactaaccatgcaagcaaagagcaatcacttttctgatgtcatcttcagagcgtgccagagaagttcgcaaagaacttcaaggg

SEQ ID NO: 6592 - DNA, 704 bp, Zea mays
  Intron number 2 from transcript GRMZM2G003930_T07 (locus G RMZM2G003930) derived from phytozome v7.0 (chr-ID 8; pos 1 0290441 to 10291144 reverse strand)
ctgctcgtccccccgctcgcgcctcctcttcctcggtgagtctcggtttcttgctgttcagacattttttcttcttcttcttcttcttctgtccgtggtgtaccgtcgatgcaacgctaattaaacgcgctttcctcgcaccccttgtgcggcatttagcaaccaccaactctcatcaattcgttctcctcccacagaaaagtggcagctttttattcgtcccaccatatgttgccgtgcgctccgagcgtggagggttttacctgttcttggtacacttgccggtttcgatccacatctcacagctttggcctctctcggcacagcggctgtaatcccactaatctgatccccatttcttgcggttatcagtttggtatatatattttttttaaaaaatgaattactattatttccaacaagcggttccggttagtttctgtcagtcagttcctatatcataagggagcagttgcccggtttccttggacatttggatccccaccgcctgcgaccgcgtgctcctcattgggtttggcttcttggtctgcctctggttactcttaccgatgtttcaaacacaatttcaatctgtcagttgcgattgcgtttgattgctttttctgcatcgagtgtctgcaattcgcgaggatggtggcattgtttctgtgaactgaaccatggatcacgtgctcgtaggactg

SEQ ID NO: 6593 - DNA, 896 bp, Zea mays
  Intron number 1 from transcript GRMZM2G015021_T01 (locus G RMZM2G015021) derived from phytozome v7.0 (chr-ID 4; pos 1 75337812 to 175338707 reverse strand)
cggcggcaactggatcgcgctaccgcacaagattggtatgctgctgtgccgtgcgtgcatgcatgatgatgcgtcgatctcattaattgatccttcatatatatgatctccgatccgagagaacttcagtatcatatgcatgcctaattaattggtgtaaaatatatcatcaaactaataagattgctagactgtatatatatatatgatcccctcctgttaaaatatgcgtgcagcttttgatttaaagtatattatttcatgagaccatgcttaattgcttgcttgctagctagctcttgttccatcatcgattgatctatttgtttgtcgcggtgtggtagatctttagctactcggggtatcaaacttaatcggtaaaagaacaagcacttcccctttcttgattaagaaacacgtacggtgaacatgcatggtggtgtaattacatacatgaaatcaaaaccaacggtaagctaggccttagctagctaatacgcagcaattatgtgtgcagaattatcacatcatcgtctctacctgccccaccagctccggccttaattttccctgtatatatcctgctatatatgtatgtctaactagctagctaggtttttcatttcattgctactactatagttttcttcttccttcttccatggttttgtccctgtattaattacgagagtagcaagcatacatctaatacatgttgctagctactacaacattttttcttctatggatttgtccccgtgtgttactagctagagtggcctctaatacatgcttgtacccttttgcctgttattaatttgatctgattttaattaattaaaagtatatatgtatgatatcatatgatttatcgctgcggctgcagggctgaagag

SEQ ID NO: 6594 - DNA, 499 bp, Zea mays
  Intron number 3 from transcript GRMZM2G083016_T01 (locus G RMZM2G083016) derived from phytozome v7.0 (chr-ID 8; pos 1 20775905 to 120776403 reverse strand)
gcaagggcgccaaagtcatcctctcaagccacttggtgagttcccgcccctacgcccttcccgtatctcatctcatttggggaagtaatgctcttcgcacgcatagacaatgtaggaattcagtactccttggatcacttctattttcgtttttgggcacaaactaggaattgatgcaaaggtaaaagagaatccttctagaaaaaaataaaagtagaagaaggctgagccaaggatctcgcagacacccacaatgtaggagccaaggatctgcacaatgacagtgtttaatcaaactcgtgattttgtatatgcacactggatattaattgcatatttgcttccagtgttcaatgataattttatgaaatatagctgaagcaatatatttttctcggttagctgcttaatttccttgtcatccaactatggttaaaatcctccattttgctctggatgtgcagggtcgccctaagggttttacacccaagtttagctt

SEQ ID NO: 6595 - DNA, 999 bp, Zea mays
  Intron number 4 from transcript GRMZM2G038761_T02 (locus G RMZM2G038761) derived from phytozome v7.0 (chr-ID 1; pos 2 54664642 to 254665640 reverse strand)
ggaattgcaggaacaactttgctggcctctcgaaggttcttgctttatctttgtattatatatatatatatatatatatatatatatatatatatatatatatatatatatatatataacttttgaaatttactaagctgtgaggtagatagaaagttgacactggaactaaacatacaaaaaattggcaaggtttttgtaggctaatggcttggcagctgagcttacagcttctaatatttaccatcctcctggttcatgtttgttccattttctgggttttctttcttagtggttttctgaacaaggaacttcttctgacaaagaattgattaaatttctctacaacatccatttgtcatgacagggcgcctgttagagcaccccatgcactattggttacaaattagcagcatatcctaccaccaatatacacaccgcccagtcatgttgcacccttgatactatttttgtagtaataataatatgttgcttggcatgtgacttaggcgttgagcattttttgagaaaagtgagcattaaccgaacatcataattattactgaataaaggatatgtaggcattatacaattagagatttaccccaagaagaattttttaacatagtcaaccacgaggattcttgagtccccaatcccagcaggcagtagaaacttgttttgtttccacttttatcgtcaatagatgttatcaatacttactgattaaattcacatcctttggtatatgaactttattgctacccagaagtatgggctttctgtacatgtactatctgaggttggtatgcttgctgatttagctatactagacctccgaagtaacaaaatgaatggtcctaccatagaaaaaaaaacattttacgaaatttaagcacctattattatctgggaattccttgacctttgcgggttagcgttgtgccgtggttagctatactaattttgtttgttcacgatgtgtcacaggttagcgct

SEQ ID NO: 6596 - DNA, 751 bp, Zea mays
  Intron number 3 from transcript GRMZM2G038761_T02 (locus G RMZM2G038761) derived from phytozome v7.0 (chr-ID 1; pos 2 54665730 to 254666480 reverse strand)
tggaagttcagaagcggctacacgagcaactggaggtctattatcgaaagataataactaatttatttgtgtttattttttacattattttaatgtcaatcctactttttcccactaatacttacaatactacttagctgggggatacttctacgggttgatattttggtccattcttaatattcaattattaattgtcaagttacacctaatggcggttccttctcatggttgcagtaatgcttagttgccaataatctctcattggcagttcttttgttttgtcttatttcttgtagtttatgagtccttttgggtctgtttggttgggctgtggctgtgaaaaaagttgctgtgggctgtgagctgtagaaaaagctgctgtaggctgtaagttgttaaaaagctaaaaaccgtttggtagaaaccactaaaagtcgttaaaaattcttcgatatatgttttcacagttctatccgaaaagccactaaaagcaggtccaatggtgctttcagatttgcactacaagaaagtcggcttttagaaaaagctgcttcctggatccagccctttggttggcttttggcttttaggggggcaaaagccaaagccaaaagtcaaaccaaacacttagcttcaagatcaaactgaatttaagttgccaactctcttttgctgcccaaaacaactcactattctctctgatcatcaacaccttctttcaggtatttgaaggtgtttgagataaata

SEQ ID NO: 6597 - DNA, 927 bp, Zea mays
  Intron number 2 from transcript GRMZM2G146786_T01 (locus G RMZM2G146786) derived from phytozome v7.0 (chr-ID 4; pos 1 46058434 to 146059360)
gttgcaaaggttagaccgaatcgtcatgcaacgtctgttccggcttactgttttgttgtactgcatacatgtatgctcgttttaggattttttctggattaaatgtaggtgttaagcaatatagtcatttcgaaattttaattagccatccagctacctacttctgtcaaaaatgttgcgctggtgtttcttccttgggggtgggggatggcaatggtactatcaacaagttatctatgcattaggaggtaattactatttagtgttgttgtctgctgataactaagttatgtgcaagtctcacagtgaataatttggattgttgaatggatctacatgctaggttgaacctgatttcatgtactgtttattttattttcatttttacaaggactagtggagaagttagataaggcaggggcacggtggcagtagattcgagttgtttttactgagcccaactttcagaatgttaacgaggctgttaagaaccaatttgaattgtgacaaaaaatgcagcttgcaactgtagttagtttgttggctttatgcagtgagaataggcctagaccttttggatctaagagacaatgttgtgtctcagcgaaccatccatgcatttgagcaatttgtgatttctaaatgcttcgtagatgtttctgttttagacatgcatcctagaaatacatttcggttgactttgtggtgaaaagatttaggctgcagtcctgcagcattcttcagaacaatgctattttgttggtaaaataacatttttcgttggttttagtcacacgaggatgccttgcttttacttaaatgcttgatcaaatgactaagcatttccaataggtatcagtgtacaatgttcttataacatgccctgacagggattttggttctctactcggtggttgataccaacag

SEQ ID NO: 6598 - DNA, 808 bp, Zea mays
  Intron number 4 from transcript GRMZM2G359637_T01 (locus G RMZM2G359637) derived from phytozome v7.0 (chr-ID 1; pos 1 81307587 to 181308394)
aagaggattacgacatgtaagaacaatcacttttatttgaatctgtgctttattttacatgcatttgtacaaaaacagttttccctgtttacaagtcttatttttgaataatgtattctcacgcattataaactttgaatttcaataaaaacctttgtatggcaggatgtcttcttcaatgcaccggtgcaaataacagagcatccagttaggtcacttgtcagtcttcatgatttttagtatgagtcgtcgttagcaaattttgtatttttgctccctgctgtattgagttttctctttgtctttcctccagaagtaccttgccaggaacaccttgaaactacttatgcttggtgttgctgcatatatgtcattttgcaccctgctgtattgcgtttctgctttgtctttcctacaacagttatcttgccaagaattgtatgttaggctacttatggttggagttgctgcatgttgtcatctcacagtgtgcagttaccacttctatcttttgctgtgcgcttctttactaaaagtaaaaataacattcaagatgaaacctactcaggatattgattctatgactgggttagttcttgccagcctgtcatgcaacttctatttcgagtaggttaaacatactcacagtgggtatatagaaagaatacatgccatctatgattactgcatgtgagcttgtactcaaatgaatttttttacttggacagtgttgttgatgaaattcttctaaatgaacctgattgatgcaatgagcttgaaagagaaataatcgacagaatagtcaaag

SEQ ID NO: 6599 - DNA, 926 bp, Zea mays
  Intron number 4 from transcript GRMZM2G457630_T02 (locus G RMZM2G457630) derived from phytozome v7.0 (chr-ID 4; pos 2 40215997 to 240216922)
agtgggcttgtgaattgtttcaggtatcacttcgagtttcaggatttttttttaaataattgaatctatatataccattaaaagattgcaactttagatatataccattggctccacatgtcattgactcatctgaacccacacgggtgagatagcaatggtatatatctaaaattgtaatcttttattggtttcgttgttaatccgctgatggagcttcgtgttggtaaattgcctctgtgttacgacttacaaggagtgctataactgtgttgggtctagcacgtccaatggagcagctggggactgatagtaacttggcttcactctatgtttggttttgtatcgcgacaaaactttgtgccccatttctgtgagagcctacttatagttatagcccacggctgaccttggagcaataaccagtgaatcttcaaaaatctgtgtctgacgcttctgtaaccttcgaatctcagaccacactggatataatcaataatttttatgtttgatacttacataacacttccaaactctatccatattggatgatagcttgcagcttccatttgtagagatgaaatttgtcatttgtcaatacttggaagctgactaaatccagaggaaaaaaatcctaatcgctgttatcaatgtactggcatataatatcatgttaccttttgctctactcaactgtgatatttttgagcactgcaatgttaatgtgatatcatttttttcatggtggaagtatctctgttaacttatctatgtgtaaacttgtgaacctggcatctatactttttagtcttcacagctatttgccatgttatgtgcacaactatcacaggagataatgaaacatattcatatctttctcttctcgtttaggaaactctttctgattctggagaagttcatagttg

SEQ ID NO: 6600 - DNA, 805 bp, Zea mays
  Intron number 3 from transcript GRMZM2G059381_T02 (locus G RMZM2G059381) derived from phytozome v7.0 (chr-ID 4; pos 1 87596480 to 187597284 reverse strand)
ttggatctccaaatccttcttgtggtaagctctgcatttgttttttaagataaaattaatccatcttcaaataatgctgtgtttatgctattaattccttttgattttacatttatgttactcggccgagttggttaggtggtcttattctgagtagcactccttaggttctgagttcgaatcctagtgggagcgaatttcaggctgaggttaaaaaaggccaatcgctggtaccctggttgtgtgcacacgagatggactgacctatggggggcggatcctcgtgtaggggctggagggctcaaagcacgagtaaagatttggcctatagggggcggatcctcacgttgcacggagatcacggatcctcacgttgcacggagatcagctttcgtgacctttctcggtcgaggatccgattgagcttcttcttaatttaataccgtggggtggtcttttccctaccggccgagtttttttttgagaatagttgtaccaaagaaacctgttctgggttaatcttgcatttttttcatgttatcctgagttacatcttacattcaagggttattttatgttcaatttgtttgaggttgtccagttaacaggttaagtagtccacgaatggaattatggtgtttcatgaaaaagatgttagcgttctctccttttccagaattaaactaggttcaacacttcaagatgaaagatctgcatgatgctaagctatgtgcattggtcccagtctctaacaatgcacattctgttttcttcttcagaggttaaacttgtggacgtcccagaa

SEQ ID NO: 6601 - DNA, 726 bp, Zea mays
  Intron number 1 from transcript GRMZM2G436319_T03 (locus G RMZM2G436319) derived from phytozome v7.0 (chr-ID 1; pos 1 94735507 to 194736232)
gcgcgtccccagcccccgcgtcgtccgcttaccaggcagggaaccgagaatcttcttcccttccattatcttcgttgcaaggtctctaatgccagctttctctgatctaatttgatattttgatgtagccatctaagtagttgaattgtagaaataaccatgatgtattggttctttaattatacgtatttaatttatggctctacactatttagtatttgtatatcgaattgtggggtcttttaatgctactttaccaaattgctatatatatatatatatatatatatattaccgatttggccatgaaatttgtttggtcgggatatgtcccatgcaaacatcttagatctgtcactgactttagaccgtgttcggttgcatgggattagagaggattggggtagattaaatctctttctattcgattttaattaccaagtgatttaattcctctaatccccttcaatcccttcataaccgaacaagcatttactgggtatgctcctgcgtcctgcccgaactctaacccaacttaagttgattggctattcgtatccggttctgatctaatcaatattgaactgtatacatgtgtttttcgtactaactttgatattttttttcctgaacaccattggctatacatttgtacacccatgtactaactttactcggaccgcgtatgaacccgcaatgcttccttgtcaaggtcgctacatcaac

SEQ ID NO: 6602 - DNA, 731 bp, Zea mays
  Intron number 1 from transcript GRMZM2G415955_T01 (locus G RMZM2G415955) derived from phytozome v7.0 (chr-ID 4; pos 1 84955269 to 184955999 reverse strand)
gccgcggcgcgccgctcctggctctccgcccgcaggtaccgtaccgtacgcacgcacgctctgcttgattcgattgatcgcgtatatgcatgcatggttgcgttgctacgacgtcgcgacggacgacgagacacgacgattgagcgcatccgcatctctggcccccatagcatgcatcgtggatccatacattgatctcccttccgtgaatccgcttcatttctttgcaacgcgaacgatcgaaaacctcctgcagaagcaggcttgcgatacaaagagaataagagatgacagatgctgcaacatgtctgtgtgctttggcacttggcagcagcagcagaagaaaagaaaaaaacacacacatactgacatacacaagcactttcgtccaaatcaaagcctgcaaatacacagccaaaatgcctgccttggtttctctgacgacgctacgtacgcgtcttgcacatctacatacacaacagctgtgtaagctgtatgtaatcacagaagcgacaacgtctaacagctgcgaaacgaaattgacagattggatcactgctagtcctagtatctagctcccctttctctttgttaactaccttttttatttctctctttattattaccattattacccgccagttttgagcagcagctggagtagccagcaataaaccaataataatgtagtgcgccgccccctcgtgcatgccgtgtgacagatcctcagc

SEQ ID NO: 6603 - DNA, 711 bp, Zea mays
  Intron number 3 from transcript GRMZM2G003875_T01 (locus G RMZM2G003875) derived from phytozome v7.0 (chr-ID 8; pos 6 2556226 to 62556936)
agctgtgtgataagtataatatccctacagctaaggtacttacttttcatttatgtaataagttactcatggcatgactgtagtgtaggctaggatatgtttgtcgaaatgcctgcatataggtaataggtgacagcatctgtaggttaagatacaaaccaaacgatataccgttttaggtattcatatagatgttctctttgttttgagacagattcttggccatgttcatgttgtactaatctcatactgatagccacaaagactataaatagttaactatgattttccatggcatttctagttttatggctgaactatattaaagaactatctgtaaaagagggcaaacccagtgccaaagactcccatattagtggagtctggggaaaggataaaccgaggcgagtcttccttccgcagatgcagagaggctacctcgaaaccgtgacctggtgactgtgagacatctctaattactacacaaggtctgcccttcattaaagaactatctacaattctaaaaaatccctagcttttatgtttaaattgaagtcattgtgttgctgtagaaaatagagaatgtaaggtcagtatacaaaaaagtacaaacatagctcattcatttgtaaattgataatttcagatgttaagccactcaaaccattctaatatgagtacttatttctctctagtatcacacatttacgg

SEQ ID NO: 6604 - DNA, 920 bp, Zea mays
  Intron number 3 from transcript GRMZM2G103292_T03 (locus G RMZM2G103292) derived from phytozome v7.0 (chr-ID 1; pos 1 3449045 to 13449964 reverse strand)
aagttcagtacgatagtgcaaacagagagcatcaggtactccttaggttcctattgacgttgaattgtcctaatgaggttcatctaatgttacttatccatgttctattacgaactgtatgtgtgctattttcccacaattttctaatcaaaatattcagcacaaaaggatgacctcgtatatgggatattcaattgagtgtccatgaaatttgacaaaactagaaaattgaaaaaactagcaggcctgtagatctgagcaaatgatatgaagtacatgtaattactttctcaaaacgtagattagcttttttgcaaggactttagttgaaaattggaaaatctaacatgcatgtagatctgagcagacgatatgaagtacatgttgtttctttcacaaaatgtagatgagcttttttgcatggacttcagttgttatgttgctcctcgttaacactaaaacttaacctgctcgagttacaattatacatctcaatccagatcagccttttcattgttctggttctgctcatttatcctttctggtcacataaattcttgccatttaacaccagcactaaagaagatagggagagttcaatgcatgatgtttgatttgttgacactggaagaggcgactaattgaggccgttgtcattgccaccggtgtgcacacattctttgtcaaggctgcatatcttgtcgattcaacaaaccaagttggtcattttcagaatgcaagctaagtgtgacgccgccacagaagaccatgcccactgtatctatactttatactaatttttaacgtccaaaggacaccagatgtttcaatgttaacgatgttgttgttatacactgatgttttgttcttatttgcttgcaactttttgcagctgttcgtgctatcggtttggaaagaac

SEQ ID NO: 6605 - DNA, 631 bp, Zea mays
  Intron number 1 from transcript GRMZM2G050803_T01 (locus G RMZM2G050803) derived from phytozome v7.0 (chr-ID 8; pos 1 64865179 to 164865809)
gcggcgttcgccgccgccctccggcctttgctgaggtgattttctcggagcttgagcaatttttcttaagctgttcaggcaacttcttctggtgatctatagcttactccggtggctaacggtctgggtttgagccttttaggaggtgggaaagagcaagcaaatactatgttgcctactattggattatttaagagctaacaagtgctattcttgctagtatcatttccgaagtatttagggcttaaaaagtccctgtgttttagtgcagaaatggtaagcttttagctagctgattgcctgattcaagtaacctgccaacttaattgccctagatcaagcgcctattaattagatgatcaagtttcgtacttctgtacgatattagctgcacacgtaatctctaatggatttgtcctggtacgagcactggaggtttaggaagcgatcagcttaaatcaaacgaaaaattttcgattgaggtgtgtgtgttggggggtggggtgaagacaaaatactgtagttttttggttaagtcttggtaaatatgctccagtgttgtcattaatcttatacagttactttgttgaatgcagtcctctagacttgacaaggctgctgctgagtatat

SEQ ID NO: 6606 - DNA, 587 bp, Zea mays
  Intron number 1 from transcript GRMZM2G005253_T01 (locus G RMZM2G005253) derived from phytozome v7.0 (chr-ID 4; pos 3 1843318 to 31843904)
caccacaacctcttccgcttacacttcagcatcaggtgcatggcttcaccctttatccttccttgcattgcgttggaatgcaaaactctcctcgatccgctacctttacttgggccaccaatcatgggtgcgttggttttgattttcgccttcacaaaatcctgattgccgcatcgaaatctttgcgtttatccttgcccaaatctgaaactatccgtttcttccgatgcaagactactgagcctgttaattcttcctgacaagttttaaacgttcttgtgcctctgcatctggttcgctttagggagcagttcctgaggacattaatccacaaggcattttcacttcactttacgaatttatctgtcattcgttaaatctgcgttgaatcatagtatgcgaaaagcccaagctctttgttacgatgtatacttgaataatttggccttcatttcataccggatcgatcgcaattgttttttcctatttctgtgatagattccgaaagaatttggttgtctagccatttgatttcctttttcctaaacacagggagctcgccgtggcctgttcttttggcggcgcac

SEQ ID NO: 6607 - DNA, 409 bp, Zea mays; identical to SEQ ID NO: 6522
  Intron number 2 from transcript GRMZM2G060470_T02 (locus G RMZM2G060470) derived from phytozome v7.0 (chr-ID 4; pos 1 84858293 to 184858701)

SEQ ID NO: 6608 - DNA, 864 bp, Zea mays
  Intron number 4 from transcript GRMZM2G433790_T01 (locus G RMZM2G433790) derived from phytozome v7.0 (chr-ID 1; pos 2 27912795 to 227913658)
catacagtacacgttttaaaccactttctcatcaggtgtgcccagcattgcttatcaaatgatgtctcttgctgtttttgatacacatttcttccattatggtgctatttttaaaagggacgctggcatcttttacaaaaatttcaaatttgtatcctaaagataacaaggtttttgttctgtttatctgcatacattgtctttgtgtgaggactcataaaaagaggctacttgtgttacaatcagctatattacataagaagttaactctgtctcttcacctttgttcagctgtataactatctggagcattgaatccaagctaaaaaatgatatttttttattctcgagctaacattttacctacagaaatcattcaaaagtatgatcatcaatgatgtttggtctatgtaggcctcatcattcttctttcttgctctgttactgtaagttgttttgtgaattgtggcattcttttataattttactttatgatttttgcaaattcggttctggttattactgattagttaaaccaactttcgttatgaaataattcttgcagtcaccaattttctctttcattgtcttgtttgtggttacttaccacttgaaccacataggagtttgttcgctctattagagcctagaggcggtactaggctaggagctatgctggatagagaaggtttaggagagcacaaccaaatgcaacccattacgctcttgcggttctaggaaggattggccgtgttcactcaatggttacccaaaatgtggatatgtagtgagctgggcctgtgtaggtaacagaagtgtattttcaccttcacttgttgtacatgtaacttaggttgcataatc

SEQ ID NO: 6609 - DNA, 692 bp, Zea mays
  Intron number 3 from transcript GRMZM2G505324_T03 (locus G RMZM2G505324) derived from phytozome v7.0 (chr-ID 1; pos 1 34323838 to 134324529 reverse strand)
aatatttgctcaaggtatggatccaggggaataaaactgagcatgtaaaacactacaggtttgggactattgtcaacatggtttcacaatgttaagtaggcattgcaatttatttgattcaacatctcgagcgaaggcgggagcactgccacggtccatggaggaccttgcccgagccaccaggtcggtcactgcctccccctccgggtctacctcctccacgtcgttaactgggatttctacagtatgtcactgcgatttgagcaacatcctatgcagttaactgggacttggctgcattccacctcctatacttatcccctgtatgagctgtgggatggtattttgattaagtggccacctaatcggctttttaaatggctggttgttttcgatagctgttgggtaaaaacaatgtttccctatacttgcattgttgattcctatagataatataaatactggtgctagataactgatctcgtttttttaccgaagaaatgatatgaagttgtgtttgtatggttaggtattaaatgatgtacgggtaacttataagtagttcttgtagtctggattaaatgttgataatccacagatgttgataatccagggggttagttgatttttcattcatgtactctcttttcagtgcatacttttctatattcaatctcatgcagtgtacatct

SEQ ID NO: 6610 - DNA, 768 bp, Zea mays
  Intron number 3 from transcript GRMZM2G072608_T01 (locus G RMZM2G072608) derived from phytozome v7.0 (chr-ID 4; pos 8 5678078 to 85678845 reverse strand)
acttaaggaaaaaaattcctctgctgaccacaaaggtacgcaaacatatatgttgtagttttcagatttaacagtgagtcaaaatttgcagtaggaatgtgctgcaaattgtttagttttcttatgatatataagaagaaacaaaagcaaatcagtgtttacaaagttgtatgtcttcaatgctttgtgcttgttaattcaaatgcatgtttattaaatttgcactgaccttttatttccttttgttatgttatttgcaatcaagttgatactggtttaattttcttcctttatgactcccatactctcttttctgaattctcagtttttgttggatcatctactatagtttagttattatttatctgacatagctatacacttattgatatgttattaagatagacattgtgtgagaccatgaatacatttgatcgtatagttcattgtgttaatagtgctcttatgcgccgcatttattgttatctggacacagatatgttgatccagtgcaacattcttttcaaacattctaccactctgtaactcttcttttatataacattcttacctgtacaacattccctcaacatgtgaacagagagccttaaggccaccatacgttaaatgagtccaatccaaagtccaaaataaagtttgaagaactattatatgttaccatatatttagctaccaattctttattaatggaacaacatgtgctctttaacagagggtattttggcgtggtgttgtcgaagaactcct

SEQ ID NO: 6611 - DNA, 707 bp, Zea mays
  Intron number 5 from transcript GRMZM2G036640_T01 (locus G RMZM2G036640) derived from phytozome v7.0 (chr-ID 1; pos 2 64522409 to 264523115 reverse strand)
ttttaggtgtttctacgaacaaggaaacccaagtttgtacttttgcatgcacgtattattatgcaatgatttgtagaattttgcatctgcatttctcatgcaggtctcaagttatgataatattaccttgtgttgcttattttgattctgtatgattttatggcacacagtaagtacaatttcattaagcctcttatgactacacagcagggttgaaaattttggcaaaatttcacgagtttcggtaatttaaaatccgttattttatactaatacatgggttaaataactcaagattcatattttttattgctactcgataaatgtgtagtcataaacattgataatattttgtttggatctaaaactctaaatcatacttcatgtgtatttttctaaaaaacagcaaaaaattggttaaatttctcgaattttggggtggctgaaaaactatcgagaaccatatattggtgttatcggaagaaaaactagcgtatgtatacaaattcttacaccaaaaggcatggttagggtaacaatcattttgcatattcagttaagtcattttgcatactggtttcgtacagcagcaaggacattttttatgtcatttaagcttatgttaaagtttttctttgtttaagcttctgataaagttattgttctatgtacatgtttcagccccaaggcctcacagaccagtacga

SEQ ID NO: 6612 - DNA, 1055 bp, Zea mays
  Intron number 2 from transcript GRMZM2G032222_T02 (locus G RMZM2G032222) derived from phytozome v7.0 (chr-ID 1; pos 2 23686687 to 223687741 reverse strand)
tggacgagctcattcccaagtggaggcaagaggatgtacgcatttctgtcttctgattctgaactgtgacgagtttatttacctaggggtgtttgaatgcattagagctagggccctttggcagggctctggcttctccaaaaacagctttggctctggctcacgatgtgaaaccacttctttaaatgagccaaagctattctaaaaaatcatttggcaaaacggcttataggttgtttttcagaaagacccttgtatatgtatatctcttctgtacgtggctagggattgagggcaggaccaaaaaataataatttggactggtgggagggctattgtgcaaaaatgacgtgagctgaagccgggtgagccactttttttggctcatgccctctagttcattttggaaaagcacttcactggtgaagccatttgaaaaagaggtgtttgacacaacttttgcatgagccagagccgaagctgaaaaataagccctaccaaaggggcccctaatacttagtgactaaaataagctggagacacccaaacatcctagctaatagttcaattattagctatttttagtaaattagttaatagttagctagctaatttcactagcaatttttagccaactaattattggctctagtacattcaaacacccccttagaataatttctcctgcatatacaaaccaagcattacatgtgcctctgtgagcttgtggttcattcacttcacatttgacttagattcattcaactgaccgtgactatttttatttagtttcaattcaggtatacaacaattccagttactagtctctatgactgtactttcgatttttattagaaatccaaaccttatgagaatttggatcgcacaatggagtacattttgttgaatacatttgtcttgctgtatgcgtgttactttaatcattttcttgtcaggaatgcagatcggaaaccatgtaatgagctattttttgtaatgtggttatgttgtgtttgacagtctccaatcagagttcctgtttcatctgacaagtt

SEQ ID NO: 6613 - DNA, 925 bp, Zea mays
  Intron number 1 from transcript GRMZM2G501303_T01 (locus G RMZM2G501303) derived from phytozome v7.0 (chr-ID 4; pos 1 80250502 to 180251426)
ttagactccttagtgtcgttctccattctactcctgtaagaatgcatatcaagtaacaaagttacttggttattctttatattttggtgtatggagtattagttttcttttcgaggatagaaaacatgggggctagaactgaacattgatggtaagtaccaagtatgtgaagaatgtagacctcctaattagtttctaatatatttatttgactttgggctgggtatggaaaatgggaagaatataaagctgattagtaacatctagctacttcaaatgatgagtttccctttgaaattctccattcttaacttgtttctcttatagattgcatgattatgtgttggttattagtagataaataaaaaacatagttttgacattttttgttcctttgatatctcaaatcggccaaacaaactagaagtgctggcaggaaaatattggtatgtttatgctaccatattaagacgtttttattttctaggttttctttgaacttgcacggtaccatctatttttcagattttgcaatataattatcagtgaagatttgtgtagttctcttataatgctatataattaccacaatacagtgcactcagtttattatttcttgatgaaaagtgagtgatatagccactttatttggaggtttttacccaagatatcatgtacctgaaatactaagatagtatgaatcaatacatggatattgaaggctatactctgaaatgcagtctcactacataattgactcatgaaaaatctgttttcttattacatgattctgtttagtagaatctatggttttaaggtcgtagtagtttttacgatcgtatacttgaagttctggtctgattcaggatcactattttaacaaccttgtgtggttaatttgcaggatcgtgataactattggaag

SEQ ID NO: 6614 - DNA, 708 bp, Zea mays
  Intron number 2 from transcript GRMZM2G046932_T01 (locus G RMZM2G046932) derived from phytozome v7.0 (chr-ID 1; pos 8 975448 to 8976155 reverse strand)
gctggctcggcacccaccctacagtttgcttctgggtaagtctttgctcttcttctcaggtacagtggcgagagcaaatatatggggggtgcaccttccttgtgggtgcatagggatgatatgtgggtgatgcatatatgctgaaaatttgactatcataactgatttttggtggatttttgtggggtgcatgtgcatccacaaggtaacatgtagctttgcccctgctcaggtatatgctctgtttcccttattaaaatgtctctttggtcaattgctgcaagcagcataccacttgtatcatagttagctttgggacagttcatacgggtggggatgctgctaatggcaacctcgggttgttgcttggagctagagatggctgatgcactattgcactgttagttgtccacaaattattgctgcaacagctattgtgtttcacacagtttactatcatcctcagggcaggagtatatctaatatgacatctactttgctattttgtacctgtttcttgcgggtctgcaactttgtaatggcaatccctgatactgaatgtgtcaatatgtaattttccagataattgagtgcgatttgtttttatctagtttcatttcatgtatttctatttgatttgactcaccatttgggagtttatataatttctcattcaaccgtttgtgtttgtgtatagagaatcactcc

SEQ ID NO: 6615 - DNA, 1038 bp, Zea mays
  Intron number 1 from transcript GRMZM2G048804_T02 (locus G RMZM2G048804) derived from phytozome v7.0 (chr-ID 8; pos 1 5958594 to 15959631)
tgagggcgcgccgcgacctgcctcctcctgagaaggtgagggaccccctctccccgtccatcccttcctccctcgggcttctgctcggcccccgcgggtgaggtgagcgtgcccacattagtgcgatcgtttgtgtctttcgggcgtgtgtgcgatgggcgagttggatctcggggaaccaactcatggccaatttgttggaactagggtttgctgaagacctccaatgcaaggcggcgccggcaagcattcaagggaacgaaaaaaaaatctacaacggggttgagtttctcttggttgaatctagttgtctgcaaaaaggatgctgtacacttttctcgttccagttggaaaaaaaaggaagcgacgaatagtcctatataataattatatgaacaccagaattccatatggttgcaaaacctaaccactatatttgatagtttatcttccccaaggttggcaccatttactcgtacaaaaccaaacacagttattaactagaaatcagatttcttttaggacctgtttggatcccatgaattcaaaccaatatctagcaaatgcttcccatttcattattatattactttccaattcctatcaattccagggaaccaaacatggccttattcaatttcctatttaaactctggacgttcgtttaatattacttttctagttctcttctgaaatttctgtagctacagaaagcaatcattatccattaagggggtaaagattttgaaaaaacaattcaatgatgtaaatattcatgagtacttggcctaccacctactggcttgtgtgtgtttcgactaatgagccttaggttagaaagtggatgggtttagtgacaaaaccttgccctatatgctataaagtatttcactgcacccttttagcatcagctgttatgcgagcttgtgctcccttggcatcattatgttgtattttaggcacaggtcctgtagagttttactcaattaattaataattgtgaattatgtgcatcagacaattgaaaggcttgagagt

SEQ ID NO: 6616 - DNA, 618 bp, Zea mays
  Intron number 1 from transcript GRMZM2G167758_T01 (locus G RMZM2G167758) derived from phytozome v7.0 (chr-ID 8; pos 1 56884150 to 156884767)
ccgcacctcctcaacatgtaatttactacctttttgcttagcttgcgtctctgacaagcctcatccgcctctgctgcatgctagtcagtaatgatttcctttcttctatttagtttgtttccctcataaattatttaagctagattatggtaaaaaaaataaaaaatcactttagaaatataaataaactaaaataagctagtattgagtagcttatttgtaaatctaaaaaagtattttactcttatatccttcctccataatcaaatgtaaagctcgttcaattcgctcacaatctacgtgaattgagtagaattggatgagtttaaatctaaaaaaatcaaacttcttattttttttctaatctcgtctaattcacgtataatagaaataatcaaaataatttagaaggaaaacaaacacattagaattagtttgggagcgggaaaccggagtaatagattctcatttttattcaaaattgcataaaaattttgaatagaaaagagaatctagtctctacaatcttcttcggttttatagctcccaaactagttcttagaatgctttaaacaaagcaaaacaacaacaaacctctgttgctgtgctggtgaagat

SEQ ID NO: 6617 - DNA, 439 bp, Zea mays
  Intron number 3 from transcript GRMZM2G357804_T02 (locus G RMZM2G357804) derived from phytozome v7.0 (chr-ID 1; pos 2 04647103 to 204647541 reverse strand)
agggtcacttggttgaagcagctgaggtacttgcgggtctcatcatgtgcatttcctattctatctgagtatctattgtgttactgttcttttgaattgcaacaagtgatagaaaagtataaaccttgtctgcaacatgttagtgctatgaatggcagacttgatggaacattatatacactttatgtgattttaaaggcaaatgtgccaattctagacttaattactatagtcctctaaatttatgccattatcttgtttgtaccttaactctgttcttttcttccatgtcggcctaattaaatgtattaacattatcatattacaaaaaatatcaacctgctgctcttacagttcatgtttgtttcttatatttgcttcctaaatgtctgattaaaatttataaaaaaaaatgggacaggcatatcaaaaagctagg

SEQ ID NO: 6618 - DNA, 834 bp, Zea mays
  Intron number 3 from transcript GRMZM2G028914_T01 (locus G RMZM2G028914) derived from phytozome v7.0 (chr-ID 1; pos 7 7578098 to 77578931 reverse strand)
ccttgccatccacctcgtttccttcagttgctgatgtatggtccatttaattgctaagctaacatacaatacattcatttgtgatcaatttttggaagaggataatcactagtatgcctattttatcatgcagaagacatcaaagttttttgtgtatcagtttttttcacttctcttttgcttttgaaattttaaatgtggccagtacaaccaatttagctggaggacatggtttcttccaagtttgtggatgtgtgacaggaagaattaattaacctttactgcctgttaatctgtttctctaatgtagctgtaatagacaactctccatgtagatattgtttttaaaccttttttgttttgcaaaaaatatttttcttatctatgttagacctactccaaaagaatgaggtatttgagtgtagttggtttgagtcatgtaaatcatacaaccaaacactataccacaaggcattactcactagtcactaggaaatacagataaacaatatgttgctgcagcagaatgtaaaggtgttttgtgacctaaagtttatctgcacctcttatgacaattgactacacaccatactgtatcattagtatcatatttttggacagtttgagaaacgataactaattgatgtatgtatttttttgccatacaaaataccacttggaatacaccatgtctggctggggaaccctttttaggactctggtgtccaaggtgtactggttaaaaagtacactggttttgactcctaactgttgatcttacagagtaactctggttttctttgcacttgcagaggcgagactgttggggtcgca

SEQ ID NO: 6619 - DNA, 1004 bp, Zea mays
  Intron number 2 from transcript GRMZM2G136250_T03 (locus G RMZM2G136250) derived from phytozome v7.0 (chr-ID 8; pos 1 73593381 to 173594384)
caagaagagaaggcctgtgtcaggggcagctataggtattggcctcccctgttcctctccttgatgtgtccttagatttggagattattcgacaagggattgggttttggaattaaagtcatttgtctgaataaggagatcaaacccttcgaaattatgacagcattttttattcttcactcaaataacatcatttgatgcttattaggtgtgaaaacacagtactacagtttggccagcttgagcagttattataatcaataatgcaatgaatgtgtggtagtagtttttttttacactgagccactgaatttgtgtaaccattgggaaaccactgccactggttctgggtatgtggtcgctttggtctaatgcgatcctgctggtatgtctgatgtttgacactttgattaaatgctagccatgtatgccacactaatgtttataatggtattttgatcggagatggaagtgatgtgattaatgctgatggtctgtgcctctgtggttgtggtggttgtgtcctgtgggcttgagatgaatgtttgtgggacatttcaaatgagtgattgtgccttggacttatatggcaattagatggggagctactgataattcatatgctcatggagtatcacatttcatatatttctgcatgagatcttatgtttctcctcatgtattgttgtttgagatttcagtagttttatgtattgaggtagtttatgtatttataatctacagtgtttattatgttttacagcgtacctaatcttcatccatgttgatatgaagtatgcatttgttatactattctcaaactacactttatgagatttatacatcaatcattcatttattaaatattagtgacatccatacagtttttctttgttttctttgttgtctttgctctgacgagactgttctgggataatctcatggaatgcactcttgttgcttcggtaggtggcaggtgcaaagataggcaacaagtgttcaac

SEQ ID NO: 6620 - DNA, 848 bp, Zea mays
  Intron number 3 from transcript GRMZM2G136250_T03 (locus G RMZM2G136250) derived from phytozome v7.0 (chr-ID 8; pos 1 73594562 to 173595409)
tgaagaggtgcttgagagagtccgtgcactgttaggtgagtcaaatttgtttatcttctggaattttggtatcttttaccattgcctagtcgtgtttttcattgtgagcttggaatcagattttaaatcggtttttatatttccgctaatgtttattctggaatgacatctcgttaaattgaaagtcaacctgtttgtgactatgatgtcatattgtttttggtgttttctttttggtgcaacaagacaattcatgatcctgtcttttctatgttactttataaactgtgttgtttgcctgttctagatcagtagctttcagttactggcattggtggattggtttaattaatttgtttgttagtgggtcagactatgaacgccatggtgatgttccaacccactgcaaataactgacaatgactgatagtacaatggaacttcaactgagtgttgcagctttaggtacggggaattgggttcatagttttgaatctctctccacacagataactgagtttttgcaagaaaagagtggtgctggtgttaatcttttgacgggtttatttatcttttctcctgtaaataaatctgtatgctcagtcatatatgtttatttgatatatgacagcaacagtaggattcactacagctcaattccctccaaaaggaagcaacatcttggtttattgatttcattaatatgtttggcttgcatgtatgctataaaattatgttctggcactgctgctctaaacattatttcagttctaacattgggttctgattggttctgtgagataagagcattggcagacttaaaatatgacccctgttcctttttgtag

SEQ ID NO: 6621 - DNA, 563 bp, Zea mays
  Intron number 3 from transcript GRMZM2G077136_T01 (locus G RMZM2G077136) derived from phytozome v7.0 (chr-ID 1; pos 3 00475731 to 300476293)
gagctagggttgggttatctgaacttctcacacaggttgataatcttgtcttgatatcatgttattatttctttgttttctttgaattctgattttgggcaggttgtgtttcttttttgttgtaaggacttcatatcatacttatttgttgattattgagaaaattttaatgatactgtatgcatactggactactggtgtttctttgggtagtgcacacatggtcggctgtcgctttaccggaaagacatcatgaacctgatgttgtgccctgaatctgggatagcacaaaataaaaaacaccttacacctgttgttgttgaatattttcttttggttcaatgatgtaggatttatttgctccacgagtgtgtggcataaattcacttatagcctaaagctctgcagtgctcttccatttttttgagaagcatgtatgaatgttgaccaatttgcaatcattaaacttttgtgagctgagatattcccaaacaatgtcttgaacttttttccactttctgctagcagtcccaattaacgtgttctagacaatcaacatcaca

SEQ ID NO: 6622 - DNA, 996 bp, Zea mays
  Intron number 1 from transcript GRMZM2G041262_T01 (locus G RMZM2G041262) derived from phytozome v7.0 (chr-ID 1; pos 1 94558863 to 194559858)
tcacgcgccgtgtccccgtgcccccgctctgggcggtgagatccccacgcatcttcattttgtcatcgacgcgttactttttttttcattgcttccttgtcactgcgcgttcgatgctcatgctcccgttccattctgttcttgggtctttttccccgttccccggcgggctgcggatgcattggttggttgcatgtcgcgatcgcctatgaatctgtgatcgctctaccaacgattaaacttccttacgttttcttgcccatgactgttgttgattgaatcgtgcacgatgcttctgtggaatatatgttggaattttgggtttccaaatgcagtcgtcgttgaaattccaagctttcggaaaacttccgtatggtagcagcgtcataccgtgatgttccatacagacatatagttctgcagattttgctgcacctttgtcaaatattcttgctcacatggtctcataacatggtgttactagcgttcaaatcatttctaaccatacaaaagaccgcatgccctcgggcctcggggggtgcagagtagcacttggactccttcacttagaaaaggacggctgagctgattccgtttgttttaggatactgcctagctaaactttgatgtttactgtagcgtgtcccattaaagcagaactatacagatacagttatcgtggaaatggatactcttttataatgcagaacttctccaagttgcattgagcaatttgacataggtcctattgaatatggccaattgttgtgcgggggcgtgcttctcttgacaatgtggtcgctgtcctgctttccatgtgcctccagctgtaccttactattatctaaaatttcctgtagatgctatgaaatcagggtaaattgtataatgatttaactgtggtatcttattcgtctcccttaattaatttgcaatttagaacatcagagctgattagtcgttttatatcaaatacagttgcaggaggtcacttga

SEQ ID NO: 6623 - DNA, 981 bp, Zea mays
  Intron number 3 from transcript GRMZM2G077669_T01 (locus G RMZM2G077669) derived from phytozome v7.0 (chr-ID 1; pos 3 273362 to 3274342)
ccttcgagtcctggctcgtcgcagagcacaacaaggtacagtaaccgattgaccccagaggccagatccggctgccactctctgtctccactgctgctttagagctcctctctctgcctttaccttcaatccaaatgttttcttcaactgcgtgtctgcgctcatatatcaggaatgcgtactaattgggatctgttgctctttaagtaatgcttttccccccaaatccttgtcgcgaataaattactcgagtgggagcaccctttagattagattcattcatcacatgcttgtcgtggaagccagccaagtgtattggatcttggatgtttgactaccaatgcgatagggcacttatataatgagttgactgacgtacgattaaaaaaattgaacactgaattaacttatagtagcactagtatgattgcttgaagttttaagaacaaacttacaaatgcccatttcatgtctgactgctacgcccagtaaaatgtggctctgtcagagatccggaaaggccgaggaaaatcttgctggatgcaagctgaaacccacctgttatgttttgtttgatttctgctacttgtgtcggtggatcaggtggttgacacctgacgtggccaagaggacgagcatttaaaaagcatggtccagtcataataaagccatcacggatggtcttattaagaattgtccttttattcggtcatgtcctgccggcattagtctcattagcagacaataataattattaatagaatccaaggatctagtgcagtagctgctgcctgtgatacaaaatgccatgctcttccacttgcggcaaaagctttattaataccgcatgatcttacatttgtgaattattatggggatggacacattgcatcttgttggtttgtacagacactgaattttttacctttcttttctctttttacagagaggctttgacccgcagtggctgtccataacatt

SEQ ID NO: 6624 - DNA, 529 bp, Zea mays
  Intron number 1 from transcript GRMZM2G097253_T01 (locus G RMZM2G097253) derived from phytozome v7.0 (chr-ID 1; pos 1 9525924 to 19526452)
tcaggccatctcaagtccagtgactcatcaaccaggtactttgtacacactttgatacttcaccatcgatgttatttaatctaccagttcatgcacatatgtacaattgcgactcagttttttcgtttaaattatgaaacattgcatgtgttcctgtacaattgtgattccattttttcgatagaattattaaacactgcatgtattccttgttttgctggtacaacagtgtatatttatataccaaaagatcactatatacttgatctaggtatatatacttacgtattattagaagaaaaaaatgcaggttgaaaacgtgaaacgttccaagttgctacattattaatgtataaaaattaatatcgttgatccaaaatggaacatgctatttcaaacatcacaaggaagaggagtaagcgccttcgtaccctgtctacatacatcacctgaatctaaacggaaaaaagtatcatccacggattgttatgctcatacaagaatttatcatgccagaacaaatcagtac

SEQ ID NO: 6625 - DNA, 694 bp, Zea mays
  Intron number 4 from transcript GRMZM2G089631_T01 (locus G RMZM2G089631) derived from phytozome v7.0 (chr-ID 1; pos 2 14487359 to 214488052 reverse strand)
ggcaaggtactttgcatggcctgtcgtcatgaatttctttctgacaacatattggttcaacttgttttcttgccattagccataaaattgtttttaatgaattgttattcagttttgcgtcacaatttccatgttctcgcatgaatatgtagctctacattggccttgaaatcttatcgaggtcttcactttggactatggaattagaaaagagtggaagaatagggtagggagtaatttctttttctacttgtatagtgagctgtgtaaaatctcattactttaaccactccaatagttgttagctttgcacaccagtttggcatgttggacccatggatcagctttgcgtgacgacacaacatgcatcattatatagcacctgaaacccatgcaagatcagtggctgacatctagaatccacccacagcttctcatcttttcaagatctcttatctatttagagagcatgattggcctttttgtcttctactccattcgttactcttttgtataaaatgtttcgtttttagttctgattttgtttttgatgaatgatgatatgctcatttcaagttcttttcatcagatgctactcacatttaagattcccataattttgttatgttggtcttatttacagttaactttttttgtagtggggaattgcatattgtgtcaagggtggtccaga

SEQ ID NO: 6626 - DNA, 644 bp, Zea mays
  Intron number 1 from transcript GRMZM2G155448_T01 (locus G RMZM2G155448) derived from phytozome v7.0 (chr-ID 1; pos 2 93034258 to 293034901)
attagttgtgatctatgaactccgaacagaagtttcagatcctgaaagaaatacagtagtagctgccaggctcaccttccatcttggagaggtgcttcttcactttcccggcgcatgctttgcagtgcagggataccttgagcacaaccacctgctaagatgccaatgcatgctttcttagctaggcgaatctagcaggaggcatatgtttccttcacaggtactactgaactaaacgaaacgaatcagcaggcttgaaacctaagaagcgcctttgtttacatattattgtttaaaaaaaatcagagacgctatgtttatcaagttctgataacgatcctgtaagccataaagctacgatttttctatcacataatctcaaagcccccacgctgatatgattgttgtcactggtcacatcatctcacttttgatttctcttatcattttctaatcaagaagagtagggccaaaagctaaaaataacaataataaaaggaatcacacaagtactgcacgctagtcataactcatactagtgagtattcagtaacttcacctgctcttgcgcctgctcttgcgcctgcgcgctcttcgcatcagcagcagcttcacctgcttcctcccgcttgggcttgacgtcg

SEQ ID NO: 6627 - DNA, 475 bp, Zea mays
  Intron number 2 from transcript GRMZM2G104184_T01 (locus G RMZM2G104184) derived from phytozome v7.0 (chr-ID 4; pos 1 24010687 to 124011161)
atccagtaagtatgtgtatgttcagttattggcttcaccattgcggctgtcccattgtcaccattgatgttgtctgtaacaattaaatagattttctagtctcttaacatcaaacgcgtcttgcagttcatattcttgttgttcagtaataatacttgcctttgctatatatgcttgtactcaagtttgaatcttttttcccagtgcccccttaaaatttatttttgtattgtggggttattattttctttttgtttttttacatttgctaaaaaaggatcgttcttttctgagttgaggccacagccgcacaggtgacgggtgtccagggtgttgtggatcgatgctaagcaattatgcattatgcagttgtttatgtgataaattgttttggggcgtaggggctggacggttccatgatacagttgtttatttttgtttacgtaatgaattatgccttttattgtttagattc

SEQ ID NO: 6628 - DNA, 796 bp, Zea mays
  Intron number 1 from transcript GRMZM5G815076_T01 (locus G RMZM5G815076) derived from phytozome v7.0 (chr-ID 8; pos 1 62336415 to 162337210 reverse strand)
gtcctcacagccatcgtcgaccatactttcgcaaggtaaagcttatcgtacctgtttagtcgagctatgtacgttagtttgtgccaaattaggaatgaaactaatgctttgttttctctgcttgtttatttccattccgttctacctgtatatgacgggtcacctaaggcagaaacgacacagactgcagagtctgccagatatacacaaactggcactgtgctcaactgaaaataggcagctttataaaaaaatacaaaaaaatcctgaaactacgctgattgaaactaacctggtcaaactgagtaatgatttatgtatatggaaaaaggactaaacttatacattgctcagatgctgcacgaactacaccgcgaactcagcagaacatatgctaaaaagaggttactatgcatcatttgtcgagaacaccacatgctgcgcacatactgcgcacagaactggtgtctatctcggaaaattacttgaagcaaccacagcattatagctcgggtagattttcagaatatgttccgcccatattaaagactcggcagtattacactgggacaagccatgctagcgtttaggccatagtattacagtttagagtcattttttccatctacagaacaagcattccccccttctgactgagtatgtttctttttgagtgcaggtcttttcactgcgccctctccccatcaactgcaactcttctggctctaacctatttttttgtctgcctgctaactccgcagcaggacaaggatcaggtgtcgcacaaaacaagggg

SEQ ID NO: 6629 - DNA, 894 bp, Zea mays
  Intron number 1 from transcript GRMZM2G074645_T01 (locus G RMZM2G074645) derived from phytozome v7.0 (chr-ID 8; pos 9 5777372 to 95778265 reverse strand)
gaggacgtgagcttcttgatccttcattgaaaaatacgtcttttctctgcttttgtttcttgtcgcaattatttcttcttcgccgagaagaatctaacgaatacctcatggtcacgtcatggagcctacatcctgttcgaatctttatctgctgttctggcacagcttatttcttgtgcttgtgatttgatgagagtagatatggattgcaaatcgagctctttcggatatgtttctttggttatttatatgcatcaaatcattgttttgcactgttggtgttgagaggtttgcataccttttcattttttaccttgcgacaactagaaaaacttcttcatgaacagaattgtccagcagttcaaaatatggatgttggaatatcaaaatatatcaggtctctctagttttatcccgtagaaattttcaaagttgctactcgataagattcctggagtttttgtcttctttctgaaggatgccatatgcatcagtgaaaacctgcagaaagattctgcttatctggtcgccactcttttgttaaaataattctattgttcatggttgtaatttttgccaggcagagtagaatagtgactcggttatcgaatatcgttcattttttgaactaaacggtgacaaataaaaaagaaaggagggactacgtgctagcatcctgactccttaaacatacatgaattggtgcagtctcgtctctcggcaggaaaataaaatctggctatgtcctatgctgaacttactgagtttattggctccactaagtagttatagctattagttaagtactgaattttgggtgtgttctacctttaaactcagaagtgtatgaatcttgcaggtttgcaggcgatacaaacaatactaccagcagct

SEQ ID NO: 6630 - DNA, 525 bp, Zea mays
  Intron number 1 from transcript GRMZM5G800022_T01 (locus G RMZM5G800022) derived from phytozome v7.0 (chr-ID 4; pos 2 14985514 to 214986038)
gcccaccaaccggtgagagcacggtgtgcgcccaggtgaaggcaagctgggccacatagtgaggtaagtgctgggtcgatcacatgattttggcctaggagcaggtgaaatttgtttccctttttttctgttttcttatattttctattttgttttcaaaactatcttttgatttcaaatatggttatatgtttccaacagtttaaatgcacaactcaaaacttatcagcatggatgcaaaattgtattgatataattactttattaatttatttataccatgtggtgaaaattaaatatacagtcataattttactccaagaaaatgatgttttggatgacattcaagatttctatatttattggttatttgaagaaaagtcgtttctattgtataacctcgatttaaaagattctctaacatcaatcttacagagcacttataaaattctaccagggataacttaatgtatataagaattttttttataaaatcatatctattttttgttgcagttaaagaaa

SEQ ID NO: 6631 - DNA, 781 bp, Zea mays
  Intron number 1 from transcript GRMZM2G114952_T02 (locus G RMZM2G114952) derived from phytozome v7.0 (chr-ID 4; pos 2 5556317 to 25557097 reverse strand)
ggcatttctagataccaaacaagtaaaaaacagcagcgaaccagatctagttagatccgaaatcttaggtgtaggtcccgatccgttcttttattctacacattattactcattgggtatcgattgcagtttgatttgtttgggctgggcacttgtttttaataatgccaatgggcattcgaatccctgagagagagctaataggaaggaagatggctctggattcactaggctttcgctggctagaagcttcgagagaaagtaatacattcacatctttaactactcgttttttcccgttgctagctagcgtctcaccttcttttccgaaaacgtaggaactaaagaggccggccttcggcaaagggaaagcgtgaaaggatttaaaaaaggtgttcagcgaagtatgctagccattggccttacgttcaggatactccttcctgtccttgcgatgtttggttaagtgttttttaatagaatctattccaaattctatattgaatttgatttcagatattttcaatttgatatggctcggaggaataatctaatacatagaaaagaagaaaaagaagaatatatatgaataatataataaagagaaaatgccaagagattggcattttcatttgatcattatatacatttttgagatattttgtttttttatttgttaataatttaaggataaatagttcactaaggagaagatagaatcatagcaaatgaaatttctaattcagtttagaaaaaaagaatgaatatcaagcgttatagt

SEQ ID NO: 6632 - DNA, 992 bp, Zea mays
  Intron number 2 from transcript GRMZM2G312693_T01 (locus G RMZM2G312693) derived from phytozome v7.0 (chr-ID 1; pos 8 3177728 to 83178719 reverse strand)
tggtctggagctgtaccatccccggcaagcagggggtaagcctcggtaacacctgttggattcgatttggcccggttaggtaatatagttctaatcatggtcaataggatttttagggaaacccctatgtcctgtactcctgtgctgaataagtacgtaggcttgactttagtgatgttgcgatgtgtgcatcaacgcccttgctccataattaattttaattattttatttgattttcccaacacatggtctatggtttttattatttctgaattgcactgcttattgaatccctaagcattactacgtcaggaactgtgagttctacttctttttcttctacttcttttggttctacttgtttcgatttaccacaagctaaaacaatcactaaggctttgctaaagtggtttgccttttaagcgtttcattatcgtttggaagttggaacccatggtagaaagttggaaaatcatgttgagtatgtatttctttttgtcctagtgattcattgtcaatagatttagaacgccagtgtattgtaggaattaagaattacatgccacatccactactccactaacatgtaatcacattggcatgttgttttgtagtggtttttctagctccataactccatgttattcttctcatcccctgttcctggcaaaatgtttgtttgttcctattttgtagcatgtacatatctgtactatttgtaaacaatcttgaaactttgatctccagtgtcttttggtgattatttcccagcactcaggaatgttttcaggtgcagcgtccattgttttgactgatgttccattttatactgtctttgaaatacaagaatttcataggaatcagttcatttcacaggaaaaacacaggaaacgggaatttttcccgcattccaaaggcaaatttccttgtttctaactaccctgtcttctatgcagactgattgggaaagtgggtactacccacttaccct

SEQ ID NO: 6633 - DNA, 821 bp, Zea mays
  Intron number 1 from transcript GRMZM5G864088_T01 (locus G RMZM5G864088) derived from phytozome v7.0 (chr-ID 1; pos 6 2558949 to 62559769 reverse strand)
accgccgtggagtccgtgccgccagcgatcaggtcctgcatccgtattcggtattcatcgcttcagaggttctcttttaaaagtatggcgaagtatattatactgtactacctcatttttttaattgacgctgattagttcagttatatattaaggattgacgctggttagttcaattatatactaacaaaagtcaaatataaaaaaatcggagggagtaccatttagaggttgtttctaggactaatttttaatgtttccattttattttatttatctttaaattaataaatgcggaaactaaaactctactttttcaatttaacaatttaaagactaaaatagaataaaaagagaggctaagaattagtctttacaaagcaaacaatccctaacttaagttgtgcaccagtctgaacttcaaccaaggtacaaaattagatagcgggctcctcctgtcgatcgaaatcggaaagaaaatttttaaataagccaactgttcaaatttcaaactagaactaccctgcagatctcgatttaatgcgttcatgtaccacgtgacaaataactataacatatgtgccatcactttattttctaattaaattaacatgattgacagcgattggttaattaaataaactggagaagagcttatcatatccaaataaattgacagctcctgatggggtatttggggacaaaccactaacatgttgttattaaatttaagtttgtgatcaaatcgtccagctaagcgccgaaggagtgaattattagcaagccttaccagcgcgaatcccttgacgccatcccgttcg

SEQ ID NO: 6634 - DNA, 934 bp, Zea mays
  Intron number 3 from transcript GRMZM2G028005_T01 (locus G RMZM2G028005) derived from phytozome v7.0 (chr-ID 4; pos 2 33253496 to 233254429)
gtatcaggagcgtggcctaactgggttggtaggtgatctgattttatatttctatctcacatagttgtttgtgctagctcctaggatacctcatacgtataccacacagaaacgaagatgaaacagaaacaattggtaccatggagcaggaaactaaggtgataaggacagaaagaagggaacaatgggaaagcagacatgcctagtgagcgcggatgttaacatacaaaataggaacgaaggtaaattgattgaatagttgaatgaaatctgacataaacgaaaaaaaactttgaggtgaaggaggagaagattgtggacgaagctgattaggggtttcctgaatcttttatagatgaaaccctgcaaacaaatcagactccagtcgagagaggtgaagaagattgaggatcaacctggtttggggatttcctgaatccagtatgggtcaaaccctgcaaacaaatcagaatattccggtgaagatcacatgcattattggaagacagatgcaatgggagcactgctgtgcttcgtactggaagtgccttttaaatgaggagttgagtggtcgtagtgggaagctatggggttggtttggtgcaaggctactggactgtcccttttgcttgtgtcgagcttgaggattagtggactgaaaaataatagagatggcatggaacagcctggttgagagaaataggagttttctgtaggaagggaggtggcattggttgccctgaggtgtgggagatgatacatgttcaggcagatgtgattgcaacctcatgattgaactgcatatatcttactagtgtcaaatatatgggccgctgagcatgcagcataggatttgttggttattcttgatgtataaaggtacattgataaatgtcaaatcacaaagattccttggtttggatacaggtctcat

SEQ ID NO: 6635 - DNA, 830 bp, Zea mays
  Intron number 2 from transcript GRMZM2G107575_T01 (locus G RMZM2G107575) derived from phytozome v7.0 (chr-ID 1; pos 9 4985991 to 94986820)
gcctgatcaacaaggtatattctattggtcgcctctgtattccttatcatattgccagctttgggtatgaacgtcaaatatgctcagtagccatgtcatcgttagctctccttgctgatcgtaagactggaaagtgaaactggttcctacaagttgtatttttaatctcttcagcttctgaaattatgctgcaattccatttttatgtactttttgtagttttagcttgtaggcaccaagatttacgttcaaatgtttgtttttgttctgctcatggttgttccttgccaagtgttccttctttacaatacaacccaatgatatatcaagtgctctactttatatatcaaattatctcacacttctacattttttcaatcaaagatgcaataatcgaaacatactcataagttatctgtctagattggagtaaggtgccttctcagtttacaggtgcacaacaagaaaatacctctttgaaatactcataagtaatatatcaatattggagtgaggtgccgtctaaggttatgggcgtacgacgacgaaatacctgttaaaaaataagctattgtatcatgtgccattcatattttggataagctaaatttgaactgcataactagaggaagtgtattttggttctatatttatttcaaacaccatgttatgtaaagttttttaactgtcatgctaagtcatgcagaatatcactttatgccattgagaactaaatttttttggacataacaacctaagagtgattaatcttcgctgtcattttatattgcgtaggaagaattccagctagcactatttaagaatcagag

SEQ ID NO: 6636 - DNA, 799 bp, Zea mays
  Intron number 1 from transcript GRMZM2G058584_T01 (locus G RMZM2G058584) derived from phytozome v7.0 (chr-ID 1; pos 2 85128377 to 285129175 reverse strand)
cagagctgcagcttcaactctcttgaaggcaaaaggtatatcaagcacagatttgagaaagcgctctgcagaaccaagcttcgatgtgtcatcattataattagggatattactcctttagtatttgttttcatattttcttttctgattcggatggcatacggatattattgagttatgtcagataagatttaaatggatattgacattttaaatatccagttttgagtatattgatacggatatagaacagatactaaatatcaggactcggatacggatcgaatcgcaaccctcttagacagatcgaattcaaatatggacaccatttatatcctaattataatcttgtagtttgagttccttctactgctgctgttcgggtttcgggttccatgcgggttcaggggcagggcggaatttagcccaaacggggtttgagtcaggttcgagtatttttcttgggttttaggtgtgggtctgcgaacgctccacccggcacccgccccatttccatccctagtttccctttggctctccctctcaatctttctattcttcaatctattggtagaatcgggtttagtaggcctgtttctgtttattaattggactcaatagtaaaagtagagtcatggacctaaaagtgacagatttttcacagttaaaactttaaaagtagaaccataccatgtaatgttattaaacgattttatccttcacggtttctgatcaattttcgcactccctcctcgcatctgacactagtgacattccagaattgaatcgcactctgttg

SEQ ID NO: 6637 - DNA, 1010 bp, Zea mays
  Intron number 1 from transcript GRMZM2G037912_T01 (locus G RMZM2G037912) derived from phytozome v7.0 (chr-ID 1; pos 1 3865525 to 13866534 reverse strand)
gatttagtaatgcacattgttcttgcatcgctttattctctctctctctcctcgcatgcttataagccaatcgatcctgctatttgtgcaacttttatttgatggcgagatttgttatgcattggtgaattaaagtcggccttctttactttttttgcttgataaagataatgaagaaaccaggtccagtgatgatttttaagagggtgtgaattttagattatatcaacaaccgtggctttaattctggtgcaaaactttacctgtagcgtttgatttgatcaatgttgttaccattataacattctattatttctctacgaatgaggttagacgtcacggtatgagtgacgtgtaagctgtgtggcaagttttagatatttttaaagttattgataaaaaacttacggctttcataacaataatgttaaggttcctttgccttgtgtaatagattaagacgtgtgttctagagcatataccattttccagcattttgggtaaacataactttgacacaagtagttaactttgcctttttacaataaacttctatgtcagaacactaataaacaaattttatggaacatacgaggattatcacaaaatacatatctgggtgtgtgtgggggggttgtttggcctagccgtctagtgcttttgtatttgctagttgctttaagctccttgccttagtgcacttcttataaatataataggcatatctcctgcgagttttttcaaaaaaatatcaatatagaataatcatgtacacaaaaattatatttcagttttgagtttgcaccatgagtttatcctttcatatgggcatgagttactatcaacttctacttccaacatacttctataatattgtttcagtagtaacaagatagcaacatcactctcctaaacaacaaattcttgaagagttgtgcatgtcattcatgtgacggtgtctttgattgtctacagcatactgcgttgttgctactgaatcagctggtcga

SEQ ID NO: 6638 - DNA, 604 bp, Zea mays
  Intron number 2 from transcript GRMZM2G347762_T01 (locus G RMZM2G347762) derived from phytozome v7.0 (chr-ID 1; pos 2 57220965 to 257221568 reverse strand)
atttcaaaccagggcttcgtgaacctctccagcaggtatatgtgtgcatagggtcaatctagtgtacgtcttaagggcaataattgatgtgcatgtgggatgtatggaatgtgttaagatgtgtgttcagatactacaatttatgccatgagtggaggcctaaaaaagcatcaagaagattttcttacaatttattccatgtgcataaaaaacatgggcagtgagctggtaaactgaataaacaagtcataagtcatctggatagaggcacaatgcatatggataattggtatttgtgacaagatatcaatgttaaaaaaataattaaacaaaataccaaatcctagacacagcaggtgtagtggaatcaaatgcttcagagcaaaaactacatctgcagtatcagttaatgtgctgcactgtgggcactgtgtgcaaaagatacttgtgtcgtacacaaatggccaagcaattcctaagacacatctatcaatgctatgtaataatgacaatcaactaagaaccataattttcaaatccagctatgaacccccgtaaaactaaagcagcagcctagaacttgatccatatcgagaaattcaat

SEQ ID NO: 6639 - DNA, 760 bp, Zea mays
  Intron number 6 from transcript GRMZM2G094039_T06 (locus G RMZM2G094039) derived from phytozome v7.0 (chr-ID 8; pos 1 40505002 to 140505761)
tctcttctgagtatataaaagttccaagtacaaaggtgcctattctcacccactcttttagtgattgtctgctatttctttactaggaatacagtatttgcagttttcttgaatgattgcttggggttgtacagaagaattcgcaaggtgaaatgcatttcaagtgcttgccgaagtccagtgccataaagctgatagattttggcagtaccgcctttgataatcggaaccataactcgattgtttctacgaggcattatagggcacctgaaataatattaggtaaattggttatttttgaagatttgattcagttttatcttgtttgagatatggactatgataattcagtgtgaagatttatgtgctcttaaatatgctcgatagagtaaaacagacatcgtccaaaatcttagcaaagtcttggcacatcctgattcatactcttatttactcctaaatgatgtgttttaatcaaatctgaaagaaacaggtggtacttcttcctctttgatggtttggtgttttctgcacatatttagttttacagttgatggttgagcgatatcgcactgtattgttgaaattgattgaactgagttctatgcttgtgtgcagaataagagttagatcttttatactatttcgttagtggccatgtcagctatcatgatagttgctaaaggtttcttctccaattctgtatgtcattagttctgatgttggatgtttcttttgcaggtttaggctggagttttcc

SEQ ID NO: 6640 - DNA, 845 bp, Zea mays
  Intron number 1 from transcript GRMZM5G857450_T02 (locus G RMZM5G857450) derived from phytozome v7.0 (chr-ID 8; pos 1 8203507 to 18204351)
aaggtaagtaaatatgtatgaatagtcactcatactcttgtggacacatcatgtattaatatgttgcaattattagcatctttcggaacacgttttttaaattgattgctgaattaacattttcttgaaaagatttaagttattagtctaggtctctaggacaaataacatcagcccaaattttttcaaggataaattcaatatcgtctaggaaaaacaaaaagaaataaacttttgacctttccttaaggtgatgataacgttggacctttccttgttattcccaccattccaaactgtaagatgttttgttttttctaatgtgtctagaaaagccaaaatgccaaggatttttttaagctaagccaaatcgaatctatgcattgaaaaaatatgtatctctttaagttaaggcttatattattaaatgttttattttcttatgtttatcttgttctcaaaatattaagattttgaagtctccaaaaagatgcatgtttcacctgatgattccttttttatgtatatcaatgtaaatggggtgagcattagtgaacagtaatcaaattccattgaaattttcttgatcaatgtcatggtctaacatgaatccgaactaatatcccagtcccaataaaataaccaaaattctcatcttttcctaacagttatataatgcattgcattggttgtcaaccatattattgaaagaaaagacaatgctggttatgcccatgtgaaagccaccattggggaaataaatccttcatatttttagttaagtcttactacatcttctgtcttgtatagaagatagctgctctacagcaacaacagccgagtaa

SEQ ID NO: 6641 - DNA, 851 bp, Zea mays
  Intron number 2 from transcript GRMZM2G139894_T01 (locus G RMZM2G139894) derived from phytozome v7.0 (chr-ID 4; pos 1 8592611 to 18593461 reverse strand)
gagggggaggacctcttcaacgacaactacctcgagtaagccaactcgaatctgacccggccaactggggctggtatttcggggatatgctgtgggttttggggcggttcggtaattgggaccaggggatctagtagatgccgtgggttgattagcagatgcgatggtttttggcctgtggtttggtgagatatctgcggttcaaggatttgttatgatttacctcataatgtaggcaaattgtggcatttagagaagaaatggtcaatttattgactaaatttgttaaaaagtcaactaattagattgtcctcggcggaatgatattgtacttattaggtaattgtaggagagtagctaactgagagacttaactaatatttgctggattgattgaaatgaacttaaatctactatgttttattgaaaacaaccaacttttagttcttggttgtgcatccaaatttgctaaatttatcggtctgaaggaaacccacttaatccatctcgaaatttgctaaattgaagtgccttgcatgactctctgcccataaacgcagatacccaggcacaccatcttcgacgagagatttatcaagtggctctgctgccttgatacgaatttatgtttaacttacacattgttagttaactcaagttactgtatgttcccaaaattgggaatttggacttgcacactttgctttgagggtcgctgttggagcttttatatgattgcgatgaatgatccaatatatctagccaacacaaaccatatctgctgactgtcagttttgtttttttgtttccacattcactccttttttcctgattgcagtgattaccgaagg

SEQ ID NO: 6642 - DNA, 385 bp, Zea mays
  Intron number 5 from transcript GRMZM2G054152_T01 (locus G RMZM2G054152) derived from phytozome v7.0 (chr-ID 1; pos 2 32287602 to 232287986 reverse strand)
cttgctgatcaactggtgagtttattcattccatattcaaccttacgctgccctgcaacagttaggaggcaagtcaactttctggaatttgataacagctattggttgggagttacatgttcagaagtttcatgagcattctgccataagtgttgccttcttttgtgggttttaattccaaagtattagatcattgatggtacaaatggatttcatgaacaccgtatgttgttctaagtgtatcgcaggcaagctttgcaagattgtacatattttaagtttgattctttttccttagtgggtgttggaaggagagcgagattttattattgtcctggacttacattattaaatcttccatttttagataaaccgagtggaatac

SEQ ID NO: 6643 - DNA, 730 bp, Zea mays
  Intron number 1 from transcript GRMZM2G003506_T01 (locus G RMZM2G003506) derived from phytozome v7.0 (chr-ID 1; pos 2 4675721 to 24676450 reverse strand)
ccgccgcctcaaactccaggcttcaccgccgtaacgtgagttccacttcctcctcgtcttttccctcccgcttcgcttgttttctttttcaggtctcggtttcttatgtttttttaagaaaaagattgccttccatgcccaattcttcagacggtaggtaaagtttagtttggtagtgatcaagtagaggacggcgacgttctgtagattaagagtgagctgagttggagatggctgcaaccaagctactttcatcggttgtttaatttagggcgtgtttggaagcacacattttctaagaaactggtagtttataaaaaactgatgtggttccaaacataccagtttatatctcggtttgtagaaattagattaatagttttttaaagaaagctggcctttcctagctaaaaataaaaaccaattttttaaaaaccgagttgcttctaaacaagacattagacggacattacatacatatataaaatctgccaaatggcttactaagctttaaaatccatttgcttgcttgcttcaccaaccggatagaccgtgtcatatgaccctgaaaaaagagatgttcagactcctagtcccagaagcaacatctttcattttcagatttcgcaagggaatactccgtacttaaaaattgctacatatatttgggccagtcttaaattttgataattctaaccaaatgtatggtacaacaaaacagatccacggc

SEQ ID NO: 6644 - DNA, 750 bp, Zea mays
  Intron number 2 from transcript GRMZM2G133023_T02 (locus G RMZM2G133023) derived from phytozome v7.0 (chr-ID 1; pos 2 87721024 to 287721773)
gctgctgtaagtgaactactcctatgttgtaccaaattgtttttttttggctattctcattattaacatcttatgagcagacattttgtcaataaattagtcagtgactcagtggtgttgtccttttaaaaaggattgtgcatagtggtgttctggttgctctatgtggatgagaactcaaatcatcttgggatgcacatagaatcggcatcatatatagtagacaactaaaggttttgcttaaggtcgaagtggcaatgccattttttcagcagactattggatcatagtggtgctagtgcagaactggcagcataaaatcgaatcaaattcccgctaattgggattatgacacctatctagtgagtagtgatgtcacttttttttcaagtaaaaaaaaatgagaccttcacttctagactagtctagagaccccagcctattctgttcgtgtgatcagcatcatctatgtgacatttatcaatgttttgagtttccaccttcaacaagaacagcaacatcactatctacctgcatttcactaaattggctggttcttgacgatgcttctgcctaacattttcatgtcatcgtcctacatttacaaagaacagatgcagctgttcagttattcccgaagacatatatctgatcacaggctactgctacgacgtacaatggtaccactggtattgaccggcaactgataggtagctcagctcgtgttcgtaacctcataacaggacaccg

SEQ ID NO: 6645 - DNA, 389 bp, Zea mays
  Intron number 1 from transcript GRMZM2G156240_T01 (locus G RMZM2G156240) derived from phytozome v7.0 (chr-ID 1; pos 1 11927963 to 111928351)
ttcattcaagccccttgtttcattgaccatacgttagcttgcaccatgcataacttactcagggcttgttcatttgtccaagaatggacttggaattgttccagctaatcaaaacttatctaatttagagaagaaatccagctaggaattgttccaggcctctattccgtgaaaaccgaacggcacctcattgggttagttttgtctcacacagtaaaccctgtgtaaagagcatcctatgttgttgggaaataacagactttcgtttttttagattcgactacatgattaacctggaaccagccattctgttaacttactctacatgattgaagtgtaatgttatgttatgccattttctcactgccaggtcacttgttttgaaggct

SEQ ID NO: 6646 - DNA, 694 bp, Zea mays
  Intron number 1 from transcript GRMZM2G339848_T01 (locus G RMZM2G339848) derived from phytozome v7.0 (chr-ID 4; pos 3 754984 to 3755677)
ggccccccactcgtcatattctttgggctggtatgcataacctttgtatggaagtgatttgagtatggacaaccggttcatgcaaatttcctcattcagctaagcagcactgctcacgcagagcttgttcatgcatatttccttggaaatatctgttccctaatataatattgtaactctgaattcaagctagtatttttttataggtagtttaaactccccattttatatagggtatggaggctgagtgataatgaaaagtttattggactgtgctactaaagatactatttctgtatgcctgctactggtctccatgaggaggtgttgtatttggttcatctttgggcttaaacttttgttgttttcttcttcttaatataatgatgtgcagctctcctgcgtgttcgagaaaaaaaactgggcttcatcaacatacactaggaaattactcgattctaatagatatttttcaactatcatatatacatattgcttgatgtgccaagcacattcatttgcaagccatagaatagaagtctcatgaccttgttttcccacttcttgactactgcacaaaaaaatatttgttctacttctaacttctggaagattagcataagtaggatctttcaccatagaagtctcatggtcttgctggatcacaatagtttccctgttgttctgggttcag

SEQ ID NO: 6647 - DNA, 997 bp, Zea mays
  Intron number 2 from transcript GRMZM2G061602_T01 (locus G RMZM2G061602) derived from phytozome v7.0 (chr-ID 8; pos 1 55896209 to 155897205)
aggtgcgtcgcgtgtcgtgtactatttttgagcgtctatcccagcagcttccatatcccatcccatatttcaaactccaatgtgtaaacagtgccacctactaaaccctcatttttcatgatccaccggagacaactaggtagcatggagtcctttatgcatatattagtaacgcttctcctcaaagctgggaactgcttttgcttgttagtatatgtgatgtggttgtacgctttgtaagacagagaacgtgggtttgatatacatggccatggtgttgtttgaagatcaagcttgcctcgaaaattggctaagtcttctagcaagataggaaagccaatatttatggggcagtagcagacactagaattataatcagcaatttgaaacaatggaatttgttaacaatgctccacatattctagatttgacattcttgttctagccttaattttatatggaaaagtgcagcaaacaatctaaaagttgtagcaaccaaccatcctacaatgcacttgcgggacagttttgcctatttgtgaaagtcagacgtatcatttatcttataatatttcggttttgaacttttgatattattcatagttcatgtttatttcgaatcttcaatagaaaaatgtggttgtattacaactgatgaaagtgccagcacacttcttttcgttctaggcgttcctcagtggatctttatctttggctagagacttatatttggacaatagaccatgctggattttagttgaggttaatatattttttcttcgttgccttctttctacttcaattgctagttgcacatgcttgcccttgacgtaattatttcataaatttaattaagcaaagatatgtatctgtatgttaactttgtgttatccaatgaggttgtgccacattgaacttcttccctgttttatttctttcttttgtttctttttgtttgacagtgaggtgctgcagagtgagttccttaatcagtcaa

SEQ ID NO: 6648 - DNA, 904 bp, Zea mays
  Intron number 5 from transcript GRMZM2G070072_T01 (locus G RMZM2G070072) derived from phytozome v7.0 (chr-ID 4; pos 1 5303718 to 15304621 reverse strand)
ctccaacattggaaaggtttgcactacagcttggtttctgatggagttgtaccagatttttttgttcaaactagcagttgacgcattgttggaactttagcagtctataaaggatttttttcttaaagtaagttcacagttacctagggtacattgtggttgttgttgcatgagtaatcctacatatcatttcatatatggattaaccggatggtctcactcttgaaactgtgggagtgttggtgcaattcttatactagtttcacttaacttaatagtgccatgtgtggggacctattaatattgaacatttactcgctagattatatgacatttaaaccatgtactcgtgaataaccagcaagggacaccttgaaccacatagaatatcatttacccttgctacccaaatgcttacatggctacatgcttcttggattgtattctctcttctctgatatcagtatgatcatcaaagcacctaaaatgtgctgctgtatgtatatagccagtgtaatgttgtttcttaggatgcattgcactaataaaacagcaatttcatcaatgatatgctctcctagtctgtagttataggaatagctcttgaacttcccttgtgatagcagtgctctatttgaagacactgctatatatggaatattctttttgctgaatatcccctgaaatctgcttcagttatatgtgtatattatttgattcaccagaatttttcttcacacatttctggttgtgttacaaatattcatgcagtatggattacaatcgtttaccatgttaagtagttatgattgcatcatatatgatcttctgaggatcagaattaacccttctatttttcttttatacagtgccgttggaccacatacgattgttgattgttgat

SEQ ID NO: 6649 - DNA, 652 bp, Zea mays
  Intron number 2 from transcript GRMZM2G011364_T01 (locus G RMZM2G011364) derived from phytozome v7.0 (chr-ID 4; pos 5 703526 to 5704177)
gcgtgttctgtgccttccccaacggctgcaggcatgcactctcgtacccttggatcatatctttggagcctgtaccctgcattgtgtttgctcctgtagcctgcctaatgtattggttggatctgaattctgatatgcacaaatgatcagaatgtggtacatatgcccccttcattcattgtgtagaggcaatggtgaagataacacctaatatggaatcttgctagtaacaagtgacatggcctgaagcgaaggtatctgcaaattgttttgtatatagcggtatagcctaagccatgctgttcaagaaaatagcttatctaatgttgattcttgctagtaaaggtaatgttttgggcgtgtttgattatttcctgtttccctaggagttaaatcacttatcttctggtttttgcggtataacttgaagcatactttgggttttcttagttgctagtatagatgtgtttgtggttcagaaagtatcagctgcaaaatgtaccttatatgctttcccttcatcttatactctacagaagatactggggtcttatttcgtattcatttcatgcaaacagtaaataattaaacttggttgaaaagtttaattttcatagttttaactaggaaaacactcatgtaggttgtatcg

SEQ ID NO: 6650 - DNA, 963 bp, Zea mays
  Intron number 1 from transcript GRMZM2G085960_T01 (locus G RMZM2G085960) derived from phytozome v7.0 (chr-ID 4; pos 5 2565303 to 52566265)
cgacaagctcatcatcgatacggatcccggcatcggttcgtctcccgtccctctcatttcctcctccgcgttgtcattgtttcgtttctttaaagctccatataactagttttcgtgtattcgacctcgaaaatgaaggtaaacttcgattgtttttccttgtaataataactcatttccaactcccaaccacattagagtaaagacggagagcgagagaaacagaccacaatttcgtttccttgttcaacgttcggttatagagacaaaatacggtagaaaaaacagaagctgtggattaaaaccccagtgaacaggctctatccgtccgtcgatggaaacgatggcgtggcgccacccaccaaactcgacagtgggtagtaaagctacaaccgtggctcactaattattcttattaggtttttgaaaattccaagtaatctgaacttattgtccagctacgaggaaacattcaatcaaatgactgataggcctaagtatacattatttgcaaatgctactccctctgtccaaaaataaaattcgttttagcaaattagtgggttcatgtaacacttcatgtatatgttttgtatatgtgtctagattcatcatcatccatttgaatatagacacaaaaactaagagctaaaacgactactattttggaacggaagaagtcaaatataacatcaaaaaccttaaggctataactgtacaatttattaaaagactgttaagatttgtattgtagtactacatccgttctcgaatatttgtcgcccgctagttcatttttaaactaaaccgcgacaaataaaaaagaatggaacggtatcatttggtacccatttgtgatatctgaattctcaattgtataagtccttttcctagaaggcatttcaagttgtaaggagtagactgcaattttactgtctcttgtctccacaatcctatttctag

SEQ ID NO: 6651 - DNA, 556 bp, Zea mays
  Intron number 1 from transcript GRMZM2G106834_T01 (locus G RMZM2G106834) derived from phytozome v7.0 (chr-ID 1; pos 6 7855664 to 67856219)
cgtcgttgcatctcgcctctcgcgcacgcacaaaggtgagtctcccctcccccgactcacccctctaggtctctgattcttctcatcggcgagcaaggacggaggagctggcggaggagctgtcgaatataacctaattatgtcggtctcgggtgggatttggctattttgggcgccatggcctaggtgagcgtacagatctggttctgcattttgttttcttatctgtcaatcatgttttttcatattactgcaggtgggtctgattaaatattacagacatgttttgcttcgaagccctacacctgtccatctaattttaggaactgacgattgacacagctttgttgtggcgctatttagtataagttatagaaatcggatctttggctctcatctgcttgtagttgcaacattgaggtagaacctgggtgggtctgattgctcattgctgtgatatatgtctggaaaagcagagttatagtttggaaactagcgcgtagtacatgtcggtttctttaagtaattgcttatgctctgttgttttgatttccag

SEQ ID NO: 6652 - DNA, 735 bp, Zea mays
  Intron number 2 from transcript GRMZM2G005652_T01 (locus G RMZM2G005652) derived from phytozome v7.0 (chr-ID 1; pos 1 91092896 to 191093630 reverse strand)
ccttgttgttgacaacccgctctctcagaacccaggtatttttgtgctagacctagacatgatttcatgaccagaatgataagcatgaaattttgatgatatatcttctgaatgtagatgtttattttgtttgctacccgtttacctttggcaagacttaattattaatgttagtgggaactactatgtttattttgcatcgtcatcgtagattcctttttttctccaaacaacgaggtttctcctggatcaggttttaggtatgttgtgcacagtgcacaatgagtaagaaatctatatattaaagtagaaaggtgtttatctggcctatttacactttggcatactgactttatgcttgttagtagcataactacaccggtagaaaggaacccataactctagataaccaacaagaacaaatatggtaaaattttattttcttaaatacgctggagctcaagcgtgggacactaattgatagtgaactctataattttgattgcagtatgctatcaggaatttagaggctggattttcccattacaactagataataattcttgtgttgttctgtttctaaatggcattacgatggcagctttatgatggtgaaatggaagaatgttgcatgctctgctccagtgcttcctgctaaaactttcaagaccttacatttctatttaaattccttgtgcagatagcagctggggccgcttctttagaggggctgag

SEQ ID NO: 6653 - DNA, 577 bp, Zea mays
  Intron number 2 from transcript GRMZM2G031846_T01 (locus G RMZM2G031846) derived from phytozome v7.0 (chr-ID 4; pos 7 3099838 to 73100414 reverse strand)
tcgccagatctggataggaaaacgccgcgcacaagctgagctaaattctgttcgattcgagttcttataggggttcttgtggctgcgtgttttgaattttttcccactggttctggggtgccgagaaagggaatcgtggctgactcttgttgccgtcgtcgagccagatctggtcatgctgctaccgtggatgtcttattgcttgatctcctttgttttttaattccttcggttcaagaatagcatcattaccatgagcatacataccagagaaacggagacagattcggaaattttcatttattgctagcttgtagttttggggtcctataatatttttcttggttctcttaattaattgagctagtaaatcaacaaatctgccactacagccgtcacgggcaaacataaaaaaactgaacaacaccaaattgaggcgcctagtccacaaacctgaactgctgaacttaaatgtctggaagccacagtttctgatttctgatggtttgtttttatgctcatttactctttctttcttccaggtagaccaccttgtgttgattcctcgagtcttcac

SEQ ID NO: 6654 - DNA, 714 bp, Zea mays
  Intron number 3 from transcript GRMZM2G133838_T01 (locus G RMZM2G133838) derived from phytozome v7.0 (chr-ID 4; pos 1 40790458 to 140791171 reverse strand)
acctcttggggtgccaacgcagtctgctcacccaggtacaccgcctttgttcactggagttacttttgtttctgctgttcagctgttataacttgcctgtcaagatgtaatagtggggtaatactctttggttgggtacaaggatgcagagtcatggttatctaattattagcggtaggcatgtttgtagacttggagccctacccgatttgtgtcattcatccagtagtatgttgtatcctcaatttcttctgagtttagattctgggtattttatcagacaaataaaaatcccttgcataactcttaagaatggagttaagagtaacagtacctcattctttctttctctgtgctttatatgataatatgacctcacgtggcattcacataatatagagttctggtcaatcatggatggctttaccatgagcattgtctgccaggttaaagcttcattgtgttgtattattggactagatgtaaatagactgtagatagatagaacctatcttagtttacctgaggtgaacacttgtgttgtggatgtgtaggaccaaaaaaagatgtaaactgcagaactgaaacgtgtggaattcgttcatttttatggttgcatttggggttttgattgtttaataaatctggtgcccatggccctcacatcatgatttactgaaatatttccttgtggtgcagctcggttctcaccag

SEQ ID NO: 6655 - DNA, 386 bp, Zea mays
  Intron number 2 from transcript GRMZM2G022909_T01 (locus G RMZM2G022909) derived from phytozome v7.0 (chr-ID 1; pos 1 03563843 to 103564228)
gtcaggtttgttttgagttcgagattgttagctagttctcagatccatcatggggccctctatgttttccatttctggtgatgagcatgtggtttgttccgtttgggtttaatggggtttagacctgtaacttcgtccatttttagcttccacctacctggatcttagtaaattcgaggactcactgcacatgtccctatcatgctactcttgttgaattaaaaggaccttgtagtctagtggcagctctgatttcatttccatttactgtgttgtacctgcacaccaaaactctacatattactgcaagttcaatcttctaatccttatggaatttcaatcttgttctgaccctgcctatactgcagctaagaagctacaagtga

SEQ ID NO: 6656 - DNA, 266 bp, Zea mays
  Intron number 1 from transcript GRMZM2G160647_T01 (locus G RMZM2G160647) derived from phytozome v7.0 (chr-ID 1; pos 2 14099352 to 214099617 reverse strand)
gattttctacaattgtctgaagcacaaggttggattgaatttgatttccttggttggtttaacctgcatttgaactaatttgtattttgtttggttcactggcagcaaaatggctatggacgtaccatctagcgatgggaggaagactatccagacatgattaataagatacaaaagaaacatgaaagtttggaggatgcaatagagaagaaaattggattgaagaattgtgaacaagtgttgcagatcactattttagttggatt

SEQ ID NO: 6657 - DNA, 469 bp, Zea mays
  Intron number 1 from transcript GRMZM5G815757_T01 (locus G RMZM5G815757) derived from phytozome v7.0 (chr-ID 4; pos 6 7172701 to 67173169)
gaacttggaggtgttgccgctctgcacaccccttggttagccttactcaacctctgcatcccctcttgcttgcttattccaacttattcccgaatttaaatttattaactctaatttattttgcttattcttcatatgctcattagtacttatttattgcttgatttcttcatatgctcagtttggttacaaaattgctgcaatttgtacagaaaatgagttagttacaatatggttaggcactgatatggttaggcactgaaatctgttttttgccaaaactcaatgacaactgaaatctgatttgagttgaacaattgcatttatctaatctggaattttatgtgagggcgtgaggtgaagtctcctatgtagctaattattttttcttcgctatttcagttcttctagcagttgaactttgctacttgaagctgcaaaattaacttcgacagcaacaaggtgagtg

SEQ ID NO: 6658 - DNA, 936 bp, Zea mays
  Intron number 2 from transcript GRMZM5G815757_T01 (locus G RMZM5G815757) derived from phytozome v7.0 (chr-ID 4; pos 6 7173128 to 67174063)
cttgaagctgcaaaattaacttcgacagcaacaaggtgagtgaacgcttcatgtttattttttttaattgatgtgaacggatgcaactgaaatcaaattttatgcaccactgaatatcaattgccatgcttttctgcccataatagaggatgagaactgctgttacccgtcatgtaaaagagcaagtatcctcgacagacataagcgaacaacagttctcatccttcttccggttttttattgcttgaaggtgatctgttttttgccaatacataattaaactataatctgatttcagttgaacaactgcattttcctgttaaagaaatacaatgttcttatgtatgtcgaggcagttaacagttgttttttgtgttaagtaatacattgttaagtttgtgtgtattggggttttttgtgttggggtataaagtttatatgcattcttccggtatatatcggttgatgctattcgtagaaaaaatgatagtggggaggcttggatggtactatactttgaattcggtgcacttgcatccgttcacagttctctttgtcatctgcttctcttcatgttcttttccgaatataccattcaacacaaaggcaaacacccttaagtgcttctcttaatgtgcttttccaattacatcggttgctctgtgagacaaccactcactttgaatttctcaccaaacatgaaacaagttattcttacccattgatgaacacatatatataacaacctagggagactgaatgcataaactcgcttgacgacatgatgaatgattagattaaatggctttataaagtaaacgacatgataaatgatcaagttgcatatgccaacatcacatttttgaaccgcgaaagtatgacatgtgttccatttaaatttaaatttgaaattttgttaaaggctagaaggttttg

SEQ ID NO: 6659 - DNA, 535 bp, Zea mays
  Intron number 3 from transcript GRMZM2G077757_T02 (locus G RMZM2G077757) derived from phytozome v7.0 (chr-ID 1; pos 1 44970354 to 144970888)
gccaagttcgacttgaaaaggtgtctactttgtttttttccactggagatagtatacctcctgttcttatactgttgcttatcattttagttcttttttacagtctagtcatttctgaagatgatataattcgtaattgtaactaggtgcggataacaagccaagtgcacttctttttgagctttaggtcaaactgatgtaatcttatttatgagttttccaatctatcagtaattcaaaatcatctgttttattttaaatgaaaaacgagttcaatcggaacaattttgaaactagttacagagccagctcaatgagttttttttgtccagccccaattgtatcatataaagctttaattactgatcaaattgtatcatgccatttttgtgtttcaaaagatgccactattccctttatcccccttcttgatgctggtctcctcactgctaattgtttcaatatatatgttatctaaccactttgttaaatgattccagcttttggggactgaatctgagaactctgtctcgag

SEQ ID NO: 6660 - DNA, 597 bp, Zea mays
  Intron number 2 from transcript GRMZM2G110131_T01 (locus G RMZM2G110131) derived from phytozome v7.0 (chr-ID 1; pos 3 0035181 to 30035777)
ctgctgcccctaggtgcgtaccactgctgcttcacatcatctaaatccatttcgattttggtttgcgcaacagttgttacgtagtagcacagcagaactcaagcctagctagctgtcttatgtctcctggacaaaaggccaagcaatttgactttgtaacatagagatctgagtttaatgagtgtttataggtggaagtggaacatgtggtataaaatctagttgagccggatggcaaatgacagagcatgttattacgtatgtgtaaagctaaagcatcccttgctgttcagtctgtgttggtattccttggtcaaagctgtatctttgtaatcttaagaagttaccgcctttgctaaaacaccgtgttctgcaaggtaacactgtttccttttatcaggcaaagcaaccaacatgctcagagattgtacctaatgtttatcattaactgccaaggattattaacaggaaaaaaaaaacagagtggataattgattggctaagctgaagtagcctactacatgcactgttccttagtgttcttctctgtaatatttgtcagggaggagcaaggagataaagagaagcctaagcagc

SEQ ID NO: 6661 - DNA, 803 bp, Zea mays
  Intron number 2 from transcript GRMZM2G072806_T01 (locus G RMZM2G072806) derived from phytozome v7.0 (chr-ID 1; pos 2 82550938 to 282551740 reverse strand)
aacgcggggattcccaagcggttcaaaggtcagtgctctccccctttctattgggttgtttgccagtatcggtaccacacaaatagtgcgattcatgttgcgctggttacctacatgttaagggcttgtttgttttgttctcaatctatatggattgggtggtattgagtaggtttaaatttcatacaagttaaaatctttcataattttttccaatcccatccaatccacatgggatgggatgggaataaccggcctaatagtagtgcccaagagcagttaattaagggatgtatgaaatggtttggtcttgggttattgattgattgtatgtcttccaagtttcaatcaacgtgacatgcccaaataggatgatgaacttgaaatcagaaattgatgaggataatctagcgcagttctatatgagtgtctggtttgcaattagttgtctggtgatgagttttggtaccttcggctgtgtgaaagagcagtttttcaggatgagtgttgggtaaccagttaaatttgactttcaagtttcagccgacatgaaattctcaaatacgaagttgtgccttcctgtcttggtttattttgaggattgtctgttgaactgtacatttgaagttgatggttgattaggcagattactatatgagttgtatttcttcacagttagacttccttgtcctactatgtgtttacatacagaatttgagtttgttcattgttacttccctctgagggtttaatcctattaatgaccagaggaagaggagaaagaacagcttgcaaaagatatc

SEQ ID NO: 6662 - DNA, 487 bp, Zea mays
  Intron number 1 from transcript GRMZM2G401721_T01 (locus G RMZM2G401721) derived from phytozome v7.0 (chr-ID 8; pos 7 6747395 to 76747881 reverse strand)
gcaacgaagaaacaggtactccgtggatctctggctttttgcaaacatctacaagaggtgtgtcagtttcctcatgtgtttaaattttgatttttgaccccaatttctaataaaaacaataaatagggcatgataatcccacaatgaatattcctgagaactttgttttttgtgttttctgaaggtggggtcagttctgttatccatgcatatatgttttagtgtgccgataggactcataggagcataggttatacgagaaacttagagggtatttggtttttagggactaatttttagtccctttattttattccattttagagttttagtttccgtatttgacaatttagagattaaaatggaataaaatagagggactaaaaattattcactagaaaccaaacaccccttaatgctttatgtagttttcacttataagcataccaattgcattgaaactctgttttcttatctctcataggta

SEQ ID NO: 6663 - DNA, 350 bp, Zea mays
  Intron number 6 from transcript GRMZM2G139828_T02 (locus G RMZM2G139828) derived from phytozome v7.0 (chr-ID 4; pos 2 865264 to 2865613)
gcatagttccaggtatgattttccccccctctaggctgaatacactttttatgttttattttcatatagcatagatatttgaattcattcttgctggtaggatggtaggacttaatgacttagtgctgaatgcagcaaaaaaaacatcttgatccctgaagaaaactgattctcctttccccttttcctgctgtactatggtatcatccaagcctggataataatatgccctaactgttcctccataggcttaacaaagaatctcaactactcacactttgtaactcttaaatgcactggacagcgatgtcgagagggttttactaattattcattcttgctccagattc

SEQ ID NO: 6664 - DNA, 1050 bp, Zea mays
  Intron number 1 from transcript AC217561.3_FGT003 (locus A C217561.3_FG003) derived from phytozome v7.0 (chr-ID 4; po s 86919319 to 86920368 reverse strand)
catttacaggctcttgtaataccccaggtcttactgtacgtttaaccgtgaacatagacttaagcacgggatgtcgatgaggatagtaatttcaatatcatgatcattttctcttgtcacgaatttagtatcgcatgtctctgtctatctagactcttactaaagttttcgcgaggttcagaacgtatttgttccaaaaattagaaagtccagtgattatttaaaaatcatctaaatttaactgaaacatatgtaaattaaattaatcgattaaggcgaattagaaacattacctaattatttcgctctgttcgagcaatctctacgaatttggcagaaacactactaggggcaggttgtttaaataaaccgaacccgaactaaccgaaaccagtttaatgattaaccgatttgctttcatattttaaaattcgagataattagagctaatattgagtatcatagttaatgtgtttccctgttcagaccgcggataaaatttttcgacttcgaatcgaatcaaatttagcatagtggtagtagatgagtttaacatgcctcagttatatcaagagaaatctcctatttaatcgacaatgtcattttagtttgaccagattaaatctcatttatgctttggtactagattcagataacagagtacgaatatatatggattattgtgtaaaaaggggtataaaagaaaataaaatatgaaaatctcttttatcctatcccctgccgctgcccactactgatatttctcatcgcacgagctttatcttccggtcgtccaaactcctttacataatttctctatccggtcattgtttcagcggcgcacagctgcctggagatattctagatattcttgacgccgctgttgtaaaatctctgcaaaatatccagccgcacgttggcttctatagtgtgcatctccttcacgtcactctctccccttgatctttttcaccgtgcctggctttatctcctgtcgtgcgtttcttctgcccaggtgcagctcacctctctctgcccttctcctccagt

SEQ ID NO: 6665 - DNA, 1004 bp, Zea mays
  Intron number 1 from transcript GRMZM2G093316_T01 (locus G RMZM2G093316) derived from phytozome v7.0 (chr-ID 4; pos 1 53639861 to 153640864 reverse strand)
ccacccgggcttcgattgctttcgtcgtcttgttggtacgcactcctaacttgctcggagtagatagattgtgctcggagtttttattgttgtgcggggaatattaatgcgactactgcgagtattcaattcggaatcttgctttatctacactcagctacctgtggatttgcttacaatctactgtgctattctagtccgtccatatagttccattatgctgttattcttccgggcataatcagtgccagttggcgccacaggatttgataccaaaggtgcgggtgtatttgatttcgcaaaaatctcgaggcaatgactgcatcttgtcctttcctgcataaattccaacttgtatacaagttagctgagttatatcggatttcttagcgttggatactttagagcagttagcctggtagtttatgccaccccgattgaaatggtgcattgcatattcgaatgtgcatatatcttatgccgccagcacatatcatacccattcaaaatggttattacgtgagagctctgaaagaaagctgcatatcataagcccagtgtttttgcatacatggttttgattagatactatgtccatgtggctgttagtattgcggacaaacttttggtcaacattgtgattattttcccccgttactttacccttttgcatgtaagagttctcatgaaaaatgatgttacaagatcgaactaacgctattttggggtctgtttcttttgatttctatatgatcctagcaaacctttgaaatgatgcctattatacttcgagtaaattgtttccaattgtgtgttttttagagtacgctactcgtaatgattacacaatttattgaaaatctggaactgaacatccacttgcagtcagcttaagaaattattatgatattttgttttagtgctccattattgttattgatatcacctggtgtttgcatatggtttcaggctttggggtggagacgacactaagttggaatttt

SEQ ID NO: 6666 - DNA, 882 bp, Zea mays
  Intron number 3 from transcript GRMZM2G031609_T02 (locus G RMZM2G031609) derived from phytozome v7.0 (chr-ID 4; pos 2 04528266 to 204529147 reverse strand)
gtccaaggtatatgtggactactgttaatataacttcacattcaagaaaagaaataatggaaatgtatatgccttattttttataggatactaaaggaacatattattttgtcaatagtagaaagttattatttgtctcaagcttactgcaatgacttgggacttcgaatcatgttgtatcttagccactgtattagtctagaggggcgttggtaggattgcggatcctaccagggatctcccttagcctataaggatgaacagttgcgcgagggagatggggcgccatggctgacctaggctgcgtgggcaagagagattgattcacaccaactcctggctccctcagggaagccaaaataatttgattctgcttaattccacagatgacctcttacaagtatttatatcccagctgatgcttatctgatctaaggataagagctatgagatctcttctaatccttatccaactaactagagataatctctcttttttattagctaatccttatctgatctatcctagctgatcctggccgcatgtggcctgtggcctggccgtgggccttagccctcctagccactaatgtccctgcgcctggtgtaggggatgccggtcataacaggcgtagtaatggcaacttccattgctcctgtgtttcataaggaaaaggaggaccagcattttcaaagtggtccagcatctaaatttgtttaacattttaatgacatcataaggtttagtgctgcataggctaaacctcattatttcaatgttccttgaataaacttaatttgaggtatgttattcctttctctgaagttaatatggtttttttcttattatagggaaatttagacaccttccagttgttgaaa

SEQ ID NO: 6667 - DNA, 894 bp, Zea mays
  Intron number 2 from transcript GRMZM2G079316_T01 (locus G RMZM2G079316) derived from phytozome v7.0 (chr-ID 4; pos 1 78570552 to 178571445 reverse strand)
cggctgaagcagtgggcgcaggtggttgcgatgtccttgctgagccgccgatgagctctcgaggacgtacggccgagccatggccgccgccgccaccaccttgcatttgtggcgtggggtgcggggagagaatcaatcattcgagatgcagaacagcagaaggaaggaatccccggtcgcttcgagaaggaaaaaaaaaaggagaggatttctgttagggtttggtgtccgccgcctgccaccttgcattgcggaccgctagctaatcaaagacgaaacaccatgcctaatcactttggttaataattgttaaaatcctcttgcttcccctagttcatattagtttctcatgtccatattagtttctcacctcctttcaagaggtagattaatttgattcctttcaaaaaaaaaaaagaatgcttcatagatccttcagagttccttaacactggttttgcagatcaaagaaatttcatgaaaaccggcaaaagaaatcgagaattgtttagtgaggcgggccacaggctgtctggacgaatgggaaaagagaggactcgggcgtgtctggagtccggctgtccgtttctgtcgtttcggcgcagcgaagccgtcttctagctgctacggcgctcgctgcccatgtcacgttgagctactgccgagtgcaacagggcaggggccaggggtgtggaggtgcggtgcgcacggacgcatcacgtgcccgtcctcttggttgaactgcactgttgtccgtccctggtccagcagcacagcacctgcctaataatcaactacgtactatactaatcaagggcagacaacgacgtggttacagcgctaactaatgcggcctcgtcttgcataactcagagcaacctcgggccagcgcta

SEQ ID NO: 6668 - DNA, 558 bp, Zea mays
  Intron number 2 from transcript GRMZM2G096585_T04 (locus G RMZM2G096585) derived from phytozome v7.0 (chr-ID 1; pos 1 92400681 to 192401238)
tcgtggagaacccttcaagttcaagcttggacaaggtaaatttcttcctccccctgaggttatttcttctgtctcgtttgaattttaaatatggatttggaagtagcattaaccttgtaatggtaaaacagttcaaagttatcaatctttcgttagttagataagtagttttgatcacatcgtcttgttccattgatatcatggatactgccagtggacacttactgtatctatgaaattgatgtaaagttgtgagtgcttggtagtgtcttcacttgcctataacgaagtatttcgtggctgtgtttctgtttctgtttgtcgcagaataatgcctactccgtgtagatatagatatgaccccaagcgatgcttacatcggtataaggggctatgatgtttgaaaaacatgctgatgattgagtaaattctagcttggagatcatcctgtttctctcttgcctctttgttgacattgccaagttgaaaaataatgctcattaactattttgtcaatgcccaggtcaagtgataaagggttgggatcaaggaatcaag

SEQ ID NO: 6669 - DNA, 402 bp, Zea mays
  Intron number 1 from transcript AC216251.3_FGT001 (locus A C216251.3_FG001) derived from phytozome v7.0 (chr-ID 4; po s 104588976 to 104589377)
aactggagggatccaaaacaacggagggaaatatagtatgtcagtaaactaaattggagggaaataaaataatgggagggaaacaaaaaataataccttaattatttaattaattcaatatggttttcaaatattttgctaaaaactgattgtgtaattcaaaatacttgtattgttaaattttaaccataatacagggaagatttgttacacaattataatattaatgtacatttcaattgataccgtcgtgcaataaattgatgacacacttgaagaagaataaaatttgtatagtttataatactctcatgtatagtttataatactctctctatatcaaaataaatttgttttgcttctttagtggatttatcatcgctgtcacaacccaaccaagtt

SEQ ID NO: 6670 - DNA, 669 bp, Zea mays
  Intron number 2 from transcript GRMZM2G448927_T08 (locus G RMZM2G448927) derived from phytozome v7.0 (chr-ID 1; pos 2 87750382 to 287751050 reverse strand)
gggagctcggtggggaagacctaaaggtgaagacggtaagtttgtcattaagtcattttgactttttattgaatgataacatggatctgattgtccttttctgagtgtttaattccttcttatttagtgccattggacatgtggtagctggctgtcacattgatttgaattcctatatatattctttagatggcataatcattttatcgttgcaaaagttgtttcagataaaattatgtctgcataggttcccttgccccaaagaaactccatgttcagttcaagaccaaattacaaaaagaaatcttcaacctacaatactactactccatttcattccttacaaagtttgtctttccttgatacaaattgcagaatgcactgaatagccttgaaatctttaaaaaagttgtactcacaccagcgcactaatgtcagttaggccatcaatgaagttatagaagtcactgatgtcataagttaggccattgggttgatatccctattttttctttcataaagcccacaaatccctaccatttctatttactgtaaaaagtaacttgtgtactttagaagggaaataaatcaagaagcacgactaactagaagttctgtttaattttttctgaagcggaaaaactcagggagaagctgaggcaggagtgc

SEQ ID NO: 6671 - DNA, 924 bp, Zea mays
  Intron number 2 from transcript GRMZM2G055520_T01 (locus G RMZM2G055520) derived from phytozome v7.0 (chr-ID 4; pos 3 2783903 to 32784826)
gctgcccctgaataaggataaggaccggtatgcatcactacctgtctactccccagcccccctttttttatttaagataagattgcatctttggagcagtacaagccatacttcagtattgctcttgctcatctactaagaatggtcattttacttgtagatcatttcaacttactttacttatgctttcttgtcttctttatttgaagatcttttctatgatggcaggaatccattgttttgctttctgctggcttccaatttatgccttgcctttgctgtttttttggtcattttgttcattgtgttatgggtaaagaacacattttgatccctgttgcattgatgcctaatctaattttctgtgggggttatggttagattgatgtcaagactgaggcccggtttcactgggctaacatgggtaaggcatcagactatcggaggttattttgttgctactgttaggactgatcatctcacctaaccgaaaatacaaatcaggcctgtttggctgcaaactagtgtagctgaacaggcccatagtttcattattccttctacttatgcatagagatgatatcattagcttgttttgaggagattaaatagattgatattttgtaggttacgtgaagtcataactgggcgtcctgttcaactgccataattccatttgttttgaattaaagcaattttgcactactctgctttattactgtacagtttttccataatcttctgctctccttttctgctacctacagtatgctgagcttaatttgtcttgtctctgttatgttgctctcaattgtgtttcactctggcgttttaaaagtttctatattatggaggcagctatgcttactatgttttgctgtcttttcagatataccaaatacaggataacttcattggagaaaa

SEQ ID NO: 6672 - DNA, 749 bp, Zea mays
  Intron number 11 from transcript GRMZM2G314133_T01 (locus GRMZM2G314133) derived from phytozome v7.0 (chr-ID 1; pos 13788447 to 13789195 reverse strand)
tagatcaaggaagcaaacacaccctggtgtcagtggtatggccaaggagaccctttgttttattttatctcattcttgaatgtgtggatggttttgttgattgtagttttcttaaatctcaaaattatcttcttctggtatgtgtatttatactacttatgcagcagcaaaaccatatgcagctggcctgtgctttttgcaggcccggctagacttttgaacaggtttagggaactaccaaaataactccagtttgagaataaaatgatgtctccagcttgggatactatttgtttctttttccagggagctcattgtgttgtcacttgttagtattatgtcatcagctgatttgggagcttgctttcagtaatttcgtaaactgggagctgataggatacgaagcaggttgaatatatttaaggcggatagcaaattgagttcagctgcatataacgttaatgtgactgtattgttattgctgattgtggtaaaaaaggtgtaacattattgtcaatctttccatttgttgtcaattttttttcccatttagcttcattactatacctaccaaatgacatattttctccatataatggatttacagtaaaggtgtgttgcattttgaagtaaacatcatgtctttacatagtcttttatctaaagctggtgcttggcatctgtctgtcgatgcaaggagcattagatatataacattattgcttttttactcctgcaggtttgttact

SEQ ID NO: 6673 - DNA, 952 bp, Zea mays
  Intron number 5 from transcript GRMZM2G314133_T01 (locus G RMZM2G314133) derived from phytozome v7.0 (chr-ID 1; pos 1 3793145 to 13794096 reverse strand)
cgctgcaggaacagagaagccaaattttgagaaaggtagctcttttcgtgagtccataaatctaagcataaagtaatttgcaatatcagtttttgaatactggatatagtatttgaagacttgaagtttaaacaagactgctaatgtttacacactaaattagcacacagtggcatgtacagtaacagtagttgtttcctctgagttgcatgccatcaaattgtacaagcaccccaatgttcctggtatgaaaacgtacaagtattgccatggccttcctatatttataggccataagtagctatttgtctatttggttaaataggagtatctttttggtgtcctatgatacaaacttgtttatgaataataggattcacttagcagggctggcagagggcagactcagtgttggagactcccacatgagtggggtctgggaagggataaaccgagacaagcctttcctccgcaaatgcggagaggctgctttgaagtttgaacccatgacctggtgactcagtgagctctcaccattgcaccaggattcacttagcagattggtaacaaattaatttactacattaggaatgcctcaatacaactaaagatttataaagcattgaaatacatctaaacatcggttagttattattgtatttttaattcagttgtataatattcttgttctttctttaagcatttgtgttacttgaccaaaccaaccagtattgtaccttgtttactatggccatttttacatactcattgcaactattctttactttctggttccttgacctgatatcatctcttgtaaattactaaaaaaatgcaattggttctgtatatatactttttaatttgtttatgatctggacttctgtggaattgttcctttcacattcagttggcagtggtgcaataccatcagcggatttgtgcatcaagg

SEQ ID NO: 6674 - DNA, 940 bp, Zea mays
  Intron number 3 from transcript GRMZM2G021498_T01 (locus G RMZM2G021498) derived from phytozome v7.0 (chr-ID 1; pos 1 5514089 to 15515028 reverse strand)
tccccacacaacgacaaatactattaacaaggaatgtaagttcgaaaacacaggtcctgaaaattatatcgcttgggaactatcactaaactctggttaagttgctaagaatgtaaggtgatccactcaatttatcactatcacttccttcgctaccaatgtacaatggtcttaaatagtgcaaaggttattttggggatctcatattagatggtgggggcacagaatatgggataatgctacacattctcacttgggaattaaaccttactctcgttaatctgcttttgctatccttatatcagtggccctgtactgttgggctgaacatattgcagtcatcatattgcagacacatgtgatgccagagttttcatgagtaatgtttgcgatcaaggtagttaacaaatatgcatagttgtataatcatgcaactctaatgtctctgccaatatgacgacatttttcattcgccccccagtgtcttatgacacaaaaagttttgtagtgttggccatcaattttgtctgattaggacccatttgttctctatagatttttggctgtaaaatagacatccttggccattatactgataagagtgtagagattacaattgtttcaagtttcaaccatacttatacatgtcggaatcatctgataaattttttatgacaagcttagaaaaattctaggcgtaggcatgcataaagtgagacctctttgtgaatttgattgttgcattaacattcactaacaagtcataagagttaaatatattttttccttgaagtcaggcagtccaactttcagtttcttagaattatttttcgttttgcacatactgcttaacaataacttactaatccatctttaccttgtattcttatgctgtccttttacaggcatccaacaggtacaccaaagtccaggtagtcct

SEQ ID NO: 6675 - DNA, 647 bp, Zea mays
  Intron number 3 from transcript GRMZM2G111304_T02 (locus G RMZM2G111304) derived from phytozome v7.0 (chr-ID 4; pos 2 36955028 to 236955674 reverse strand)
cagaaagagaggtaactgtcggttcttcaagtgatgcactgttgtcttgtttggagatagttgcttcagtgcatagtttgatagctatataacatgattttcttgttcatttgtgctcaaggcatgccatactccagttctcatgcatatgtcacgtttaagattgaaaattttttcagtcaaggtagctaaccactgacgtgatgtttgactttctggtttagcaattcccatagtatcccaaagctgtacatgatttgtagattcttacgtgtaccaggtcctccttttttgtatttttcttactaaccatgcatactaccattgttctctcatcccaaaaaaatgaataccacagttgttcacatttaggctttgttcgtttcatccctaatccatggggattgagggggattttgacttgtaggggattcaatcgctctcaatccccctgggtttgataaaaacgaacagagccttagggatatgctagaatttcaatggtagataatatattttactttgggtgtttttacttgtatcactatcaaaatatctagttgttttatctatcatttcgattaatattacagtaagactttcttatgcaattggtcactgaatctgtgatgttcctttaacagtga

SEQ ID NO: 6676 - DNA, 854 bp, Zea mays
  Intron number 2 from transcript GRMZM2G469584_T01 (locus G RMZM2G469584) derived from phytozome v7.0 (chr-ID 1; pos 2 55445411 to 255446264 reverse strand)
ggtgtcacacagattcacgtcgcgaggggggtgagcgggagacggtggtgccgaggactggggcgggtgcgacaccaaggccggggagcacggtattgctgtgcacggctatagttgatgcttaataggtactagagatttagttaattatacataaaagtggagctttaatttaagatttggtgtggtatatagtgaacagcaaaattatttgttttttaaaaatatatagaattaatcatgttattatttgtaataaagtagagaacgttatgattagtgtagaaaacataataataaaaatcttatgatgttttttaatcttaaatacgatgtattttgtggcctcgtagaattttgaaaacaaatcaaactatacataaaaatcaggttttagaagcaagggaccgaacaaggtgagggaatacatttccgtattggcatcttaattataaagattaataccgaaatcaagagtaggatgatttcctagtggttgttttgagttttgacgtctaaaagaaataaagaaacaaaaatacacatgcatggtttgttttgacgtctaaaacaaatttccaatattgttcacttaaatacaatattattttggatgtggagtttgagtaaaagtttttccaatattctattacttatctgatgtaagataaaatgtcttctaaggtataatttccattaagaaatactagtgactgtttcaaagtttatagccaagtctatataatgatctttttcatttaatccctttgtttagagttaatacttgttttgatctttgaaggaatccttcttttaataaatccctaagtatgattttgggtattacaggtgcc

SEQ ID NO: 6677 - DNA, 960 bp, Zea mays
  Intron number 1 from transcript GRMZM2G081310_T03 (locus G RMZM2G081310) derived from phytozome v7.0 (chr-ID 4; pos 1 56994714 to 156995673 reverse strand)
gaggcggtaagttttttgaatatcaattatagcttaggacattttttgttgttttggatctgctatgagacatctttagtttgttaacgaaaagggcattgcctttaagcttttgccagcagatttttcttgcacgatatgatcattattcttggattaggaaatatggcatgacatgtatgttgttcttgtcttcctagcgttaaggtgatatttaaatttgccagagctggaatgttttggatattaaagatctcttgaccgaaagctattgcattgactgatgcatttcagattttttagactgaataaggttttatcattttcatctttttgttatactgtgatgtcttggctacaagaaagtgtttcatgtttcaggcattccatggctaaaatttcctttaaacatcaatgattttatttctaatgaacttgattatatgttactactccatgtgcatgaaagccatttttattttgcatctccttatgatccattaaaaggctgaaccttgatttgtggctttggttgggtttcaactgtagcttacccaacttgcttaggactaaaagactttgttatacttataatttattaaaagctccatatagacactgagttatgatgtactccctctattccaaactataagttttttttttggcttttatagatacatagcttttgctatgtatttagacatacacaatgtctaaatgcataataaaaacaatgtatctagaaaaaacaaaatgtctgataatttataatgaaaaagtacggattttagaatgatcgcttcttttttttacgaatctcagagtggggattaccaccaagaattagtttttagtattaatcctaaagagtgaattagacgacatgataattagttacctttgttttatttgaatcatttaggcggatatagacaacagtgggaccattgattatat

SEQ ID NO: 6678 - DNA, 452 bp, Zea mays
  Intron number 2 from transcript GRMZM2G028726_T01 (locus G RMZM2G028726) derived from phytozome v7.0 (chr-ID 1; pos 2 08434150 to 208434601 reverse strand)
agtaaataataaaaaccctctcccgctcttccgctttctctcgtctggaactggaactcaaacatcgtcactgcaccattattttctgttatttcattttagaatcatttcacttgatattcagaaataagcagttgtaacagcagttaccacttcatttgtcgcgacaagaaaatagggaaaaaacaataaataaaatatcttcatttgtggcttgatattccttgaccccacgcattgcattcccccctgggaagaaaacagactcacatgaacagcgagaagaagtacactgtagtttttcttgaacgtttgcttcgtgtactaattatatcttgtcctggtcgtctcatactccacatttggactgttcacacatagctcagattccatttacattcctgtttgaggttgcaggataagtggtagctagtgtatcaggaaaccaacat

SEQ ID NO: 6679 - DNA, 719 bp, Zea mays
  Intron number 2 from transcript GRMZM2G028966_T01 (locus G RMZM2G028966) derived from phytozome v7.0 (chr-ID 8; pos 1 68158869 to 168159587)
ggtcgcccggcctggtctggcccaaatccgaaaaggtctgtattgtttgaatttcgggtcatgtcgggccggcccacgggcctagccctcggcccacggcccgacccataattgcttaaacgtgctgggctcatctcaagcggcccgaagttataaaagcccgaaattcacattagggcccgaaattcaatttttggcccaaaatttacatcagagcccaaaattcaaaataaatttaataaaacaaataaaagataagacaaataaatttgaccaaaagcaaacttaatatttatattaagttaccagagctatgcaatgactacctcgtttacaaatctttttgttagaaagaaaaagggtataatcagttctatataaagttcgtaagttcaattcattatctaatgttcataacaaaaataaaattacatcacatactctaattcaaagctacaaaaaacatttaactaatattatctctagctttatgttatttatcaagtacatgaaagtatggaatgaagtgtggttttaataaatatatgggccttttcatgcctttatatgggtaatttcttgtctgccttaaacgggtcgtgctcatgcccgtccattggccgcgacctcggctcaaacacaactcgatatatcggaccgtaccgtgtctagaccgtgtttttttccgtgcttcggaccggtccatagatccaacccaa

SEQ ID NO: 6680 - DNA, 795 bp, Zea mays
  Intron number 3 from transcript GRMZM2G010163_T02 (locus G RMZM2G010163) derived from phytozome v7.0 (chr-ID 4; pos 2 40248633 to 240249427 reverse strand)
tggaaggatatctactgcatctacttccaaaacaggtacgagtttttatttcagacaatacactcacttctatgttttttcgatgtgttactcaactaaatataccaaaaataaatggtgatattgccatatatttatgtatgttgttgtattaaattgtggaagcatagatgattagcatcgccaatgcccacatgtttacatatttatatgccttataaatatgcatatgcatatatagtacgcacacgtatgtgctcatgttcgttgaacacaaataccttttctatgtcctccttactccagtgtaaatcatcagatcaggtaatacttcagagaaaaatgaaatcgaaattagcgtttcagtagaacaccattcttcatttttttaaatcacacaacacaataatatatcataaactacaatcctttccgtttagttaatctaccacaatactttcatgtaattaaactagagtactatgatcgttcacacaaacacttactctatatatacacagtacttatagggaaaaaagggcacagtctactgctccaaaatcactccattctacgcactatcatttactccatatgcacaattcatatgtaatagataatattggtaagaagagattgaaaaaaattacaccaacatgttgttctgtagcagattattacataaattattcttatcatgaatgatatcattctttgatattaaatctaaactatcttctcttcgtattcaaacactgtattaactcatttataaataatttttacatatacagc

SEQ ID NO: 6681 - DNA, 757 bp, Zea mays
  Intron number 2 from transcript GRMZM2G125556_T03 (locus G RMZM2G125556) derived from phytozome v7.0 (chr-ID 4; pos 1 42197974 to 142198730)
caagaaggggaattccgctgcgagatccgtgaacggtcagttcgcaatcactcttgactgtgtgtatgatttcagatcatgacgcgagcttagcgcgtacatatgtcgtgagcttagtggagttctgaatccggccacgctggttcagtggttctgtgtttagtccgtggagctctgatccatggatttcgtggttacatccaaatattcagtgagagatcagaagttgtatgtttagtttgaatctggtgcatgttggggcaggccgtctgggtgattgagatttagacgtgtatcatgtgtgggcaacttgctggattctttcgttttgatgaggctgctcataaatggagactatttgagcttgaaaacctgttgacttttgggttgtaatgatctggttcctgcgtgaacgttaaatccggaaactaggaagatgtattgtgaccttttgggaggttaaaccgcgcttgctgttgctgacgcatgtttttttttctgattggtaaacttgaatcgggtattcaggtcaatacctgatttatctgttcatctgcagtagttcacccttttgtctaggtttagtgtctgcgatgtatctgttcatctgcagcgttttcttttgctgttctgaatgttacttctaagacttaactgtatttctgttatgcaaataatagaaatgggggtatccttcctctcagcgagcataatctatttgctgtgatgatgtatatactttcttgcaggttcagag

SEQ ID NO: 6682 - DNA, 708 bp, Zea mays
  Intron number 3 from transcript GRMZM2G441115_T01 (locus G RMZM2G441115) derived from phytozome v7.0 (chr-ID 4; pos 2 888564 to 2889271 reverse strand)
gtttctaaatccactgcagggttcagacagtcgaggtagaatatgatgagtcgacaactgaaagcgagttatgtgatttcatttttccccccccttcatgtttctaatgctatttggatttcaataatttgacaggagctatcagcagagcttgtctcgttgcagggtcaggtggcggagcttcaaaagcgtgtcaggtgaataacatcagctcataacatattcagcataaggaactatattgataaatgctgtaggaatgcatatctcttttgaaatctttccacttagtgtcgctgtgattttcctttcatgacacatgatcctgttaaatgttctccacgttgtgaatctatggcattgattagcctgtcacagaaataatgggcaaaccaaaaaaaatttgagagaagtgtaacggcaaggcgatttgttttgttcttcagtgattggagcgatcctgagaaagttgacaatatcgacaatataagagcaatggagcaatctctcaaagaaactattaatcatatccaaatccataaggtacacatctgtaaccttatggttaactactttataatctcaatatctagttaacattattatctgaattttcaatatcaaatcagattagttctgacctttgcatctgtttgggtctctgcctctccaggggaacttcggaaagcaacatctaatcgggctaca

SEQ ID NO: 6683 - DNA, 600 bp, Zea mays
  Intron number 1 from transcript GRMZM2G479301_T01 (locus G RMZM2G479301) derived from phytozome v7.0 (chr-ID 1; pos 2 08121058 to 208121657 reverse strand)
ttctcttccgtggaaagcctactgctttcactttggtatgtgtttaaaacatattgttcttcaacaatatgatcttgccatagcagaataactagagtattacactatatatagaaacaatttctctatgcaattttatgttttaccacttccttatttatgtggaatttttttattggcttatcacctgccattatgttatacattaaactgaacatgtgaaaacaaatattttcataccaagtttagatgatgttgatttggcaacctgagggaaccgccaagtagctacaacacattggctgtcataactttcattaggaaacacatttagcttcaccactttataaaaaacaattctattagatccaactgaaataaaatggtaggctaatagtgttaattctcaaatttggtatttttcttccttactcatacttatattatcttataccatggcttgcattgttcgatttaagtggttaggcttttagggattagtttgtgctgaatctgaaaagaccggcagtgcaccccaaggtgctcgtaaaattgggtttgatttgaattctgacatctttgcaaatagtagtatccata

SEQ ID NO: 6684 - DNA, 800 bp, Zea mays
  Intron number 3 from transcript GRMZM2G033022_T02 (locus G RMZM2G033022) derived from phytozome v7.0 (chr-ID 4; pos 2 01182169 to 201182968 reverse strand)
ccttatctccgagggattatcactcggtgacttgggtatgcccatcatgcccttgactagctcaaacaatttagtttttgttgtttgagactttgagtgtaatgtttctgtttaggatgatagttcaactcttttaattttaatatgtttcactttgtttagtttgcaatttcacaatcctgcaaatgtactttgctcatgctgtgatgtcttcaagaaatatatgttaagcttgttacttggaacagtcataatatctgtgttgaattgttaagaggaccagtatgtctagcagaaaaggaaatatatgttgaactttgttactccaaacatttgtagaaaatttgccttctgtttagctcctgctctctatgaacacatgcctttctagacagaaaggaagttcatcaatcattactgatttactgcaccaagtgcactggatgtgatatcttagcacaacacatacgtctcattcaaactagatctactaccgactttggttaaacaactactttatactcatcatgccagctcatcttttgattcctgtacggctgtactttatacctttttcctctcttcactgagctaactttccttatcctcatgcttgttctcatcatttgagcagcagcattatctttatctttatgatttatagtttcaaatgattttgtgatatattctcttttcatatccatgccttcctttgtattcaaagtaaagaatggtcaagtttcttttgtttgtttcaatcttctgtgttattcatctgttttggtactattatctgtaca

SEQ ID NO: 6685 - DNA, 970 bp, Zea mays
  Intron number 4 from transcript GRMZM2G014994_T02 (locus G RMZM2G014994) derived from phytozome v7.0 (chr-ID 4; pos 1 63252960 to 163253929)
tccacggtgtggtaagttcattgtctaaattgttttgttagctccattacttattttgatccttgaagagttaaacacaataaaattaaagagaagagcattccctgctcccctttgcaataccatccctataaattcatttgcaagaatcgtatttttaacatctttattatgcttgccagatgtatcttaaagttcagatatcatgattagaacataaattttactaacaattacagtttgtacaagatagtttaccaagataaacatgcaattttcagaagtcccaaaatgctgatattatttaaaacagccctgtaacttgattgattaggatgttttagggggtgtttggttgctcctgctaaagtttagcccgggtcacatcaagcgtttgacttttaaataggagtatgaaatatagacccaaccaactggactagattcgtctcgtcttttaatcttcggctgacaaattagttttataatccgactacatttaatacccggaacggaggttcaaacattcgatatgacaggggctaaattttagtttgggggtaaccaaacacccccttaatgtttgtgccaaaattgacccttggagagaaaaaggatgtaactcttgttgtttttccaatctttgaatgctacttcaactagatatctaaatcaaaactactacttttagaaaaacttatgcagtggattttgttctgatactttgtttattttccaaatgcttggatataaatctatcgatccaaaaaagaaccatcaatagagctgcagaagttaaggttctctgaactactgatgcaggcataatttcattttttctttgttacttcatttgttttctgtaagcatgatgtagtttgaaaaaaaatcagatatctaatatgactttctgttttctgttctctgtgatatagggctggaagaactttagcaagatcgcgagggattt

SEQ ID NO: 6686 - DNA, 877 bp, Zea mays
  Intron number 1 from transcript GRMZM5G856067_T01 (locus G RMZM5G856067) derived from phytozome v7.0 (chr-ID 8; pos 8 9824549 to 89825425)
tctgactatatagactgcatcgtttcctcatacataggataatgcatttggaacctactgacatttcatatggtgatggtgaatccattatatactatccatcatgaggaagatggccctttcaaatctgaagggtaaggcaaaatctaaatgccccaaatccattacagccaaagatcaccaaacctacagcaaacacttaacctgacaaaaaattattaaaccacaaatatagcatggcctccatccagaagtttacatgaaagatatcgataatttgtgcttacatgatcatgccaatgttaaacactgacaacagggtaaaagcgccttcaattttttctgtactgcatgtttattaattgagaaatccagtaagacatcatggtttgcatacactgagttgcctaagatatcaatttgttgaaatgtacttttctcctgcaaatttttcttttgagttttgacagattaggttcttttagattttcatgctaacatctcatgtatgatctgtgcaggtgccacatgagatgacatgttcttaacacctgttttcattaggcatttacaacagcagtgagatatctgcaaatgctgattagcttcaaggttattggttttatctttgccaaataactgtaatactgttgcagccaggggtttgcaccttggttttttatgaggggaggtaactttttttataccttatcatcatgttccatgcacaataattataacatgtttgttggaccttaaaattctcaatgtcattttagaagtgtggtcagtctttatggcgaagggtatttcaaatatctattagagccgttttgcattaacttcatttttcttctgaattgcacaggaagatcag

SEQ ID NO: 6687 - DNA, 812 bp, Zea mays
  Intron number 1 from transcript GRMZM2G118534_T02 (locus G RMZM2G118534) derived from phytozome v7.0 (chr-ID 4; pos 1 6629414 to 16630225)
atatctttattatcgggactacgaaggagatcaatgtaagttcagtttagtccattttatctattttcctttcttatggtatggagtcaacaaatgaaattaaatagagcccatgctaagtttggatcaagtcatcacgagagaaaggaatttattggagcacctataaaattggatgtggaagctcatgctcgcattcagaagcataggtatgccaattttttttcttaatctgtgagaagatatcttaggctccagatcaatgcccacattattcttatccacaacttctcaatatgttggactgtaaaagagcaaaagcgcctagctgcataatcctgcccaagacacacccagttgactgatactcaagttttactataaaaacattgttttttactaacttctccttgtagcatgtaaaccgcttacatttcgtatgactgagacaaaaacaaattatttatatacttctcatagtgtaagcccgctatcatattatttgtgatgcaaaattgtgctggctttgctttactgtaatctagcttagaatggcaacttacagttggataagcataatcaaagcaggcagttagcaacaaaatttccttgtgctagatattttgcaacactaaagattttgtatttattcaatctagatttgtctttgtagctttataggcagcactgttcgtcgattcaagctgttagttaaatcaatcagggtccatctcaaaagtttcatggtgaaaatcatacactttgtgacatgtgttatgtccctatcttgtttcagtgactgcatctaaact

SEQ ID NO: 6688 - DNA, 598 bp, Zea mays
  Intron number 1 from transcript AC190821.2_FGT002 (locus A C190821.2_FG002) derived from phytozome v7.0 (chr-ID 1; po s 253309792 to 253310389)
gcagcgtacgcacgtggaatataatgacacgcaggagattagcgttactcgcacaaccattatattgtgcaagaactaatgtttcatacatgtgtatgcatgcacgcactaagcttacaacggagatcgattattatgttattacacgtatacaaaaaagccaaattacaacagtaaccttaggtgtaaatttcattctagtttcatatattgattcaataggctatatctgacaacatttttacaattagagaagaatagtgtgtgtatatttaataagctatctgacagcattattaaaaacagagaagaatagtgtgttatagggataaattaaaagtataaaactaggttggttcagtttttaagtctagatgaatcgtggattaaatgaccataaaacaatagaatacgactatgcattaagggtgtgtgttttatcaatattttatttagttttatatgatattgtagtcttcaaaacagtaccatgaaactctctactaagaacaagtataataatggtcttataatcaaactactcaacatttttcttgatgtagaggagagaagagtttggctctcatacaagcaacaa

SEQ ID NO: 6689 - DNA, 699 bp, Zea mays
  Intron number 2 from transcript GRMZM2G345223_T01 (locus G RMZM2G345223) derived from phytozome v7.0 (chr-ID 4; pos 5 9260621 to 59261319)
caagacaaggcccagaggtatgatagattctctattactacttggtagcatatggcctagatgtaactcttatttatatgtaatcgaccttttgatgtgccatcagataccatgggacgtactgcaatcaagatgtcagtatcaaagtacttgagcttgagcaggttagtgttgatatgatgcgtgagtttgcataggaagtttacataatgaagtgagtgatgagctttacttatgctaggactaagaaaattgtgtaaaagtcacttcatgatacaacattttagaatgatgttccatcatattttatggttgcccaggcaaattgaattcggtgtaatgacttctcatatgggaagtaacatgatgctaatttaagatttttgtgtttcatattcatgccatttgagtttactgaccatgggtttaaggaatgatttattgtcactttctccaaccatgtttacacctaattctgtagaaatatttgtcacaaaaatgatgtgcaatttttcggtgcatgcacgagacctcatgttttgtgtattgttgtaggtatatagttgttttctattttcacagtgtagcttagattctcttgcatttgtactttggagcatcacttgtattagctctttatttcttttccatttcttattgccagaattcttgcctggaggcagtatttttgacatcctt

SEQ ID NO: 6690 - DNA, 889 bp, Zea mays
  Intron number 1 from transcript GRMZM2G410991_T01 (locus G RMZM2G410991) derived from phytozome v7.0 (chr-ID 1; pos 7 566940 to 7567828)
tccccctccctggtaagcgtcttcctcttcctcttcctcttcttacgccgcaatccatacctagttgtgaattgtgaggacgatggagtgaataatgcttgtagctctgcttaggacgtactacgagacatagaagtggtggatttttttttctagttacagaagaaagatgacttgatatcagactgggaagcatatggatgagctgttagattcctcttatgtgacataggtctgctaaatgcccaaatcaaatgcaggtctcaaatggcataccactattgtgtagacaattggactcaacgatggttcccttgggttgggtggagactggagactcttttttttttaaaaaagaaagaaagaaagatctgttattgacgacttggtgagcttgacaagtttgttgccccatggatgctccagttgttcagagacttggtgagtgagaccaccatcttggacggtgtggtggagcgtttagacaagtcgctatcggttcatcctgcgcgctaggacaagtccaccgatttgaattattcaagaaaccacagctcatattcgtcctaagagatcaacttttcattcataatctgttatacgttgctatcaccgtgcgaattgtctgactccgtgtctgaaccctaatgaacatgctattagcacaggaccgctcacaagtctccgtgcagtttacttttttgactattaccatagatacttggccacatcctttttgactactgcttcattatccctctgtttacttttttgttctatggtaatagcaaaagtgatctcgcagtcccgtctcccgtcagtactgactgttcgtgcaaattctgtgcttccagtgtgcaagtcatcggtcggcaacgcctcggctgac

SEQ ID NO: 6691 - DNA, 614 bp, Zea mays
  Intron number 3 from transcript GRMZM2G153434_T03 (locus G RMZM2G153434) derived from phytozome v7.0 (chr-ID 8; pos 3 885529 to 3886142)
ttaaccttgccggttgcttcctcgaacctgcaactgtaagaaccattacttgtacttctttttctgagccatcttcaacagtaatttgacatatgtatattgtaggacattgacagttctgtatttgatctaatatcgaataccagcttcttaacgaaagtaatggcatttattttgtatagtgtaatgtggtgttatcattaacagaatggatattattctacttgtttctgccagccttcattattctatgaatccctaaactgcaccataagattctacttgtttctgccagcattattaacttttattgtacgttcacaattattcatgaactgacacattatggcaccacagaatatggatagttagacaggaattccaaatagatctgtattaatatttgtgacaaaatagcatttgtggaagatgattcatatggtatttgccataaaattgctctagtgtgcaactgtgcattgatatattcacctttttccttttgacacgatgaaattattcatgagattgtatgagaattttatttttttcctaaaatgccaaatataatattttcattttgttcataattgcagctgccaactcagttctac

SEQ ID NO: 6692 - DNA, 687 bp, Zea mays
  Intron number 3 from transcript GRMZM2G058370_T02 (locus G RMZM2G058370) derived from phytozome v7.0 (chr-ID 4; pos 8 07624 to 808310)
actgcgggctgtgggagttggagaagcaagcgacggtgaagtagcataggaacctccgtcagatagtggtgaatctagcttagaatcaaagcttgggcaccgttataaacctctaaatttcaccaagaggatattagtctgaaaacttcaatgtcagataataaaacagataagggtatatcgtacttttgtatctaagttgctaaatccagatcctaaagcaaggtcaactttggttgcgccacatcatgtagttaaattttgtccgaccataaacctatgtcttgcaacttttagaatctaagcatgacataataggaaatgtaaacacaaaatgacacataagaagtatatatgtcacatgcaacaataatatcatcaaactgaacatcaatagtttgttgtgattaaatccttgttttggtgctcttcgtttgagaactaaacattatcttgtgtattctgctgtaaccgtatacctgaagctgcattactggcacgttcatatctttctagagatagtggcaatttggagagacgacctgagtaaagtaatttcttaatgttctcatcttaagtcttctttctgaaaagtgtcgtgtcattagaaaaaactgcatgctattatcttattctttttgtctgtatgcagattaatccaaaagctgcagagtctctagcagatcc

SEQ ID NO: 6693 - DNA, 883 bp, Zea mays
  Intron number 2 from transcript GRMZM2G083068_T01 (locus G RMZM2G083068) derived from phytozome v7.0 (chr-ID 8; pos 8 6870288 to 86871170 reverse strand)
gtaccactgtccctggagtgcgtgtgcctttactcttctggtactttcgttggtttatgacaatcgaggcataatcgtttcacggactaatcgaccatgagcaacaaggattcggtggaatgtgaagtagagttgagaccgtaggcttgacttgtttggtctgtgttccctatctgtgttcttaactggtttgcaactaatgcacaccgtgtgtctgatggtcgtttgctgcaccacgtgtttacgcatcaggacacccgctggttcatgttacctattcaaccgtttgatttttatcttctgagatggtaatgtcatgtacggagtttgcgtataaggttcatgttaacaagtggggaggattgcaaataggtaaggtcatcttagtatacggctccactgttggggtttgcagtggagttccatccacatcatcgcgtaacctagtgctaatttagtcagtatcagtgagaagctaacctagtgctaatttagtcagtatcagttagaagctcagtgatcattttctcttgctacagttgtggtacttatctgctttagaatgtggttaagttatattatgggtacaaacttgtttggagacttacatgaatataagataagatgttttcagttctcactttaatcctttaagtgtttttagtgattccttgtttgtttttttattttcatccaaatttcaataccttttatagttttactttgctagtttgtatcatatgcatttgcttcatccataatttgggacgatacaactgctaagtagtttataactttatatgacattcgtacagatatttacttaatagagagtttgtaataattaggttaaatacatcagtggaggcgtagcaagaaatat

SEQ ID NO: 6694 - DNA, 972 bp, Zea mays
  Intron number 1 from transcript AC191759.3_FGT003 (locus A C191759.3_FG003) derived from phytozome v7.0 (chr-ID 4; po s 176443322 to 176444293 reverse strand)
tgtccgataggtaaataatttatgcaatgattcttagacctttggctcttactgcttcaaggattaatgtgtgactatttagccttcaatccaagcggtatgccactaatctcaaaaattgcttctacgcaatatttacttgacaatttatagatttgttgtttcttagagatattttttcatgtaataggttataaggttgttcatgacatatagaggtttgttggtcataatttatactatatgaagattatgggagtcagccctaaattcacattttctgcaatctacagattcatgtaaaaaagttcaatctacaacaacatttcctcaaaatgtctaacagacttgttttcttcaggctagggacccaggggctacacatcttataactgaaaacacatgagcaatatgttgttaacactttttttcttgttcgtgttttatagatagaggtatataatatggagacgtttaatatttaaaccattagagacttatgtaacaaaaaacatattgtttagctattatgctaactcaatatggagatcctcaagtatcttagaattagttggggaaacacaaatttacactcatagttttctttgatgatttttacaaatacttggtttgcactattgatgaaaacatggtattgtttcaagccaaccttgagcattcatcggagaagtttgaaaatgttactatcctttctgctcttagtaaaatagttattggactgttacagaatgatcaaatattgacctatgctaatcaagagttgaacgaaagaagtgaagattcttctgtgtgcagacaaccgaaacttttcttgaattgcctcaagattactaatacatttgttgacttacacttctaaatgggatacatgtaactgtcctgcctaagtgcccatgaggatgacccctgtctattttagtaatctataggctttttatgatatgcaggttt

SEQ ID NO: 6695 - DNA, 435 bp, Zea mays
  Intron number 2 from transcript GRMZM2G131699_T01 (locus G RMZM2G131699) derived from phytozome v7.0 (chr-ID 4; pos 8 8533568 to 88534002 reverse strand)
aggagttcgagcgccgcgagatttcccgtgctccggtaagtatgcccttttccggttagaccgagtgcagcagatctcactagcctttatcctgtttatattagtaaagttgtgagttcaacactctggattacccttttgatttgtaggtaaatgaattgggtgccacatcatgtgccatttttcagcaaattagactgtgacaagctattggtttttcttgttattttggttctagacgagtgaaattcgcttcctctaatacatgtttgagcttaactggattttatttatgttgccataaaattatttcgatatgcatgccctttatcttcagagttcctgcatcatgatttggttgctttcctaaggcatgtgaaatttaattttatttttataattgatgagtttattacaactttaaaatgtagacga

SEQ ID NO: 6696 - DNA, 745 bp, Zea mays
  Intron number 1 from transcript AC190620.3_FGT004 (locus A C190620.3_FG004) derived from phytozome v7.0 (chr-ID 1; po s 161173256 to 161174000)
tcctcgcatcgcaccccctcttccacgatatccacgtgagcacccattttcgatcgaaccctcgtcttcctattctttttgtgatttgtggtgtgaattttttacactcctaaacttacactagacgcggaggacttagcagtcatcagattatttttcccatactactccatgtaagatttaggatgtttggagtcgctgcttccatcaatctccagagatctcttctgctctgttccccggcaaattgatctcgggttttgatatgcgcactgacctttgatctttgaattatattattatgctttattttattagatgtcattccacaaacataatgatgggcaaatagttttagggggcagcgattgaaaaattataatttcacgttgttttgtgaatattatgctatatatctcaaagtagaggtcagaaaaagcaatccataatgtttctcgtggatattgaacaaaggccattccatttggttattgaacatgatattgaagtgtaccatcatgccttgcaaatgcattctaatctacaggaattttgctagcgcacttcactagcttacgacaagtattgattttcttttatatttatctcagggtacttcagatgttgtaaggaagtacttgtggttatttgagcaacataatgtgatggaaattctaattctttctgggtcaacatgttcctgctcgcagtgtcagagtgcgagattgcactcagcacggtgagg

SEQ ID NO: 6697 - DNA, 824 bp, Zea mays
  Intron number 2 from transcript AC190620.3_FGT004 (locus A C190620.3_FG004) derived from phytozome v7.0 (chr-ID 1; po s 161173960 to 161174783)
tcgcagtgtcagagtgcgagattgcactcagcacggtgagggattttggttttgatcttgttggacttgagtttactggaagctaatgtagtgccttctacctggattttccttgtaccactttgtctatgaattctcacgatttgcacaacttgagaattatatggcctcctccgggattcagtgggttgtatgagtaatcaagaaagtggattggcaggtgtatttaccattatggtactggaatggttcctatttcttttatttgtgttctatttggatcacttctgttccttcaaagacagattgagaaaagcagcactacttgatcgctcccgcatagatgggaaccatttgaagctgctcagcagtagaacatacaacttcaggagttcagagcttacattcagttggagagaacatatttggtaaaggaggtgtgatctactctcttctttggtacactccaatcagtttcatacatatccagaagtctaattttccctatctgtctctctctccttttcttttgacaaagagattcagcaggctgctgagataatccatgagtttaaactatgtactacctaaaaagtcacaattaagattatttttagcttagtggttatttaagaaatcgtaaataccaggattcattaaaacattagagcttgaaatatagaatcagattaatctgtattttatttctgaaaggtcagattattctatattcaaattcgtcatgtgtaccagaacatattaatttaccaatttcttctttcttttcagggagagatagttgaacagataccagaagaatctgg

SEQ ID NO: 6698 - DNA, 802 bp, Zea mays
  Intron number 2 from transcript GRMZM5G863465_T01 (locus G RMZM5G863465) derived from phytozome v7.0 (chr-ID 4; pos 1 85570165 to 185570966 reverse strand)
atctctctacagcctcttcggtgctcgaagcggtggtatgtttatatatgcatcaagaactagttcattttttaatgtaatatttctcatataacatgttgtccaatgtcctcgccctaactgttgtctcatatgcgacttcattcctaattacggaaaatacgattttttttgggggggggggggggggactgaaatcagttcagcaatttcaagacaaaggctcagcctactttggacacctattagttacccaggtcagatatcaaatcaaccaacaactgttccgaagcactagtcacagcataaggcacgaaaaggacaagaaaaagcactgcatgaatgaagtagttgcaatatgtagaagccatgttttagtacagtttttttgggtgggcatggggctctctattactccctccattcacttttgatagaatgatagtcctattctcaaaattgagttttccatttttgatagtcctatttgagttgtggtcccaaatctgatataaatggctgtttaggtccccgtgcagagtagctcatctagaaaaaagacttgtgcatgtatatgaaaatatcaataccgagtttttgcaaaaaaaaaaaaaaacaggagtgtttgatgatgtaattaattagatgataagcgagagttcttctccttggtcattgtgccaaggtgaaataagactatcataactgaatggagggagtattttggttttgagattagcaacttcatcactgtgagtttattttgcaggaacttctggcacaagggacactttacagaaag

SEQ ID NO: 6699 - DNA, 989 bp, Zea mays
  Intron number 1 from transcript GRMZM2G387480_T01 (locus G RMZM2G387480) derived from phytozome v7.0 (chr-ID 4; pos 4 7731425 to 47732413 reverse strand)
tcctgtccgccgcttcctccagatctctccagcagtgacgaattgtgtccgcttcctccgcccgttccctattctctccatccgcgaagttcgctacctcctggcgcaatcctctccatccgcgtctgtgccgcgctatccatgaaggcgaatcagacgccccagatcaacgcactggctctcgatccgcgctctcaagggaaggtgagtcgccttggcaccgaccggcctcgcccccatcaaaaaccttccatgtaggatgaggcagacacaggtacgtccggatctgtagtgagactgttcttttcctatgaatttctgttggtcagctacaatttcagtattttggtgtttcaataaggtttcagtatttttgctatttaactgttctagacaagcagtgttgtagatatatagaacctgcgctcattttgtccaagagaaactgttttctctgcctgatatattgtctaactgttctagataagaagtgttctatgtagagtagtttctgaaaacagattcaaatgacactaacataatcaagttcacaagaagatcatagatatgtcttccctcacgcactaaaaacatatgcacaccttatttttattttgttttgtaaactgcttcttaagaaattattcaactaggaatgtgtactgaatatgggatttaggttgaaataaagcgtatattttctgtttgatgttgaatgtaaatgaagataaatatgacatttgctcttagcctttatgtcattctttttttaatgtgataatgataatgtgagtgaatgatggcaacatgacctgcaagtcatcataacaagaaaaaatatttataatgtttcatttggagctacacacaagagcgtttcaaataacctcgcttggtctgtatgattccctcacctgatcccttcgttttttttgaaacatttcgttggattttgcattcattgctctcatggacgacgaatctaagga

SEQ ID NO: 6700 - DNA, 684 bp, Zea mays
  Intron number 1 from transcript GRMZM2G151193_T03 (locus G RMZM2G151193) derived from phytozome v7.0 (chr-ID 8; pos 8 4358755 to 84359438 reverse strand)
cgatagcgactggaccaaagttgtactctgctgcctccccgtgcctttagtgattcggtcctcggttttgcgtgcaattgtagctattgcacctccattcccttagttgtttttgggttttgtttgcttctttgttccaataacctgtttcttatggattgtttcatctggatcagatgaattacttacgcatcgtcgttggaattggatgacttagtgattgtgcttgtggtcctgttacgtggtcttagtaagtgtcagatcgaatttttaaggtgtagagctactgtagtttctgttttgcagatactttgctctgtatgtgtcttcgcagttcatgtgcagtaagagttgcaaccacaaaatatgaccagatttctgatctggtttatgtagttgtgtccaatttttactggctcaaaattctgtgcgcacacttgctagtttgatattttttctaggcctgctttgtgtttatattatgtcgtttgctttgttttttgtttgctgctttacattttccactgctgatatgtatgatgcttttcttaaagctgatgactgcggtttcaacgttagattcagttttgaccccgtctaataaattttgttagtgggagttgtttactagtgtttctaattattgattcgtatggcttaacagtttaagcttcgcctccagcc

SEQ ID NO: 6701 - DNA, 1004 bp, Zea mays
  Intron number 2 from transcript AC210809.4_FGT006 (locus A C210809.4_FG006) derived from phytozome v7.0 (chr-ID 4; po s 228416077 to 228417080)
gttattacagaacactgaccaaaccagaaagacaggtccgtcctcatggtggcctgggaggttcagtgcactaaataaattggctttcctcagcaagtatgtggtatcccatgacaaggtaataattattagcttctaatggcagtcgactaacatggtgagctattaactgttacaaaggtctactgtagagatgtgattgttaacctagtaattaaaaggagatcaagttgtggattgaattgaacaaaatgcttccaaatgcggtttggtgaaagtgccatctcgaaaggctagaatactaatgttgatgtttgagcataaactaagacaaaccattagataaatgattaaacacttctaaacaatatgatcacttacatgaacattgcccactcctagtctttctaatgatgaaaagttttgagccgattgggcagatttgtcggtagggaggtagctagggcaccaccaaatgcagcaactgggaggagaaccggaagcagcacaatcctgtgtacaccaagatcgatagccctggtacatcaaggacaagtaaaaaaataatgatcatattttgctaatagttgaagaaaattcgcccaaaaaatctatcaaacccaaaccaccaaactgaatcctaactatatcttttcaacagcctctctcctgcaaaatcgtgcaacccacatctgtagaataccaccatactgtaacctcacaaagcaacccgcacaccccaatccaagagtaaactgaataattgacttccccctccatgaatatcctagagtccaccacagcgcatgcataaagtcataaacagtagtgcatgacaatgctgctattttatcataaaaagtgaccaaatcaattcaaagatgttgaattttagtaattgaaaatatgagtcattacaccttattcatttggatctgacacaacagttcaacattccaaaatgctccatcagattcagacaaacaaaactggtgcaaacccga

SEQ ID NO: 6702 - DNA, 678 bp, Zea mays
  Intron number 1 from transcript GRMZM5G817651_T01 (locus G RMZM5G817651) derived from phytozome v7.0 (chr-ID 1; pos 1 44231963 to 144232640)
ttgcataaggtgattgtttcttctttgtcacttctggatatatgtataaattactatctattttgttatttcgatttttgtttgtggattcaacattgctgcatttgtttgaacatttggtaccgtgcagcaacttagattacctgaaatagctaaactgatggataagtggggttctatcatataattaggcacgtcaagatttgagaaaaggtctgtgggctttgaactatatagtatagcaatgttctacctcatggactgagggagaaaggcaagggaaacctaggaaagaggataaagcaagacaaaatgtccttttagattgtagcagtgatatatgcctcaaggaagtttaataaccattggcagcaaatcatcctctattgtgcaatctaaagtacaactcctttttcctaaaaatattcaatatggatgtaaagctggtgctaaaaatgtaactgagttcaatgcaatcatccaaatctgtctagtttaattttgagtgttggccatcatatatagcttctcacaaaacagatgatagattagggaaataatactggcatgattataggaaactacagttttgctatattatatcttttattattttaggggttgctgattctgctatctatgataaattgggattgcagatttacagctctagttatc

SEQ ID NO: 6703 - DNA, 530 bp, Zea mays; identical to SEQ ID NO: 6341
  Intron number 1 from transcript GRMZM2G702523_T01 (locus G RMZM2G702523) derived from phytozome v7.0 (chr-ID 4; pos 1 08586324 to 108586853)

SEQ ID NO: 6704 - DNA, 997 bp, Zea mays
  Intron number 2 from transcript GRMZM2G163988_T01 (locus G RMZM2G163988) derived from phytozome v7.0 (chr-ID 8; pos 1 50870165 to 150871161)
aaaaaggtacctgcgtgaatgagtgatgcttagtggcagcgcgccagcgactatatatatatgacctctctccttattggcttattgcttataatttccccagtaatttaaccgcattgtgagataaaaattctcgagtggcacgatgtagttagaaaggaagtttagctttggagaagctcttgcaagattgtagtgccagtacattttgttgaattagttttgtcttgaaataagcatgtcaatcagcttgttagaagggctccatttgtgaatcatacagcccaatctacgtgttgagtttgttcttggctgacgttaagtaatttttttgggttactttggcagattggctggctgctttatgttagccagtatttatcacgggctaatgtgttttgatttaggggcatggaggacaggggagctgaacagattctgagtttttttagtctagcggtatcaaaaaacaaaaaatgtgtcttgatttgtatttagatgaatattagaatgtcaggtcattattttagtataagtggaagtcaatattttgttattatttatgaatcattgccctcaaagggaaaaaacagcccaaggaaaagaatagacatagttaatgaatttcattccatgactagtgactatcctcagtagacccgtaaaacactattttgtattgtagactctactgtttataaagtgaagtttaagataggatgtagaataggaagtctgctagagtggagatagcattgtcttttgcgttaacaacagtttcttttgtgttgatgtaatgaatcttctgacacgaatgaaactgataatggtcaatggggacgagaatacgaaattccacttcttatgcggcaaccagtatcatcatgatttttgtacacagtttaagcatcgcatactctgctctatgaaaaacagtcataaaccgtttgctcttccatcaggtcttaagagctcttgaaaagcttaggaagaaacc

SEQ ID NO: 6705 - DNA, 922 bp, Zea mays
  Intron number 2 from transcript AC202172.3_FGT001 (locus A C202172.3_FG001) derived from phytozome v7.0 (chr-ID 1; po s 84815779 to 84816700 reverse strand)
cagtatacctagaaaaacaataggaaaacaacaaggtgggggtgtaaaacaatagaaaaaacgtcatcggggaagggatcagagccgtagctgaggaactggtggggtatacagctcgccgaccccatactcccaacagtttaaggcgtatttatttaaaaaattgtacagaatctaacaaaaatagttaatgtatggagtttgcatcaactgattcacacttaagatgatgttaagttgtagcattgacagtgatataagaaaattgaacacaagcaacaagaaggtacattgtgtgctagattgtttcctcctctgtttgttttatacttttttaaagctcataattcagttatgtaagtagttgatcaaaaggaagcaacttcgatacaaaaaaagtcttccctgcttgagttctctgttttgtacactgtactaatgttgtccatgtgccagtgtacgaaccatattactcagataccacaagccaatcttgaaaataaccaaaaggcgctgcatctaagtgttcagatctagaattgaaattcctttctaaaatggttatacattagtaattatggcaacaacttggtcatgaacccatgggtctcaaaggcacaaaagtgcaaaacttctctaatgacagctaggttcgagttttgctaccaccgaacaactgttgcataaatcaaaaccgaaatggatttatattatgtgaagcagcactatgcacttagggacagcaccacagcagcaatagcatttacatcgaactcgtcgctatacgggcaactgaatgtctgaatatatgtttcaatgaccaaaaatccagagagatggttgagatgttagcatccccaaatatatactgatatacctaaattgagggtcgtactcccgcctgtccgtgccgccgggatca

SEQ ID NO: 6706 - DNA, 985 bp, Zea mays
  Intron number 1 from transcript GRMZM2G139102_T01 (locus G RMZM2G139102) derived from phytozome v7.0 (chr-ID 1; pos 2 95018137 to 295019121 reverse strand)
aaaagtaaggtgtgaattctgctggtgaaaacatgcagctcaatgttggaagcataatttaccgatgaataggttcggcacatggttaaagttcctaatttcattaacattagtatgaagataatcaagacacagagatagcataacaatagcataaaaggcagttcagtcctctttcatgagaatctcgttgaaatgctacttatatataagttatatctaacaaactctccacatggagagctgcttgccagacatataggatgtctccacctgcccaccataacacaagtcgatgtaggaagtctgaaatttattcacatagttgataaattccttgcagagctacttccaacacataaattaaacctggaagctgaaagactaaacccatttgttcatcaacagctattaggagcaagaaaattaaagcatcctctatggcaggaaaattaaagattcggcgctagaagtactcaccagtgcccttctctatccaaggtgagatgagaaaggtgggaacacgcaccccaagccgttcgaacttgaagtagtatggatcaggcccaactattccatcaggctggggcactccaacgaccggcgtaggtacatggtcatagaatccaccatgctcatcatatgtgataatcagggccgtctcgttccactgcggactggctctcagtgtttcatacacctctttgacgaacctctgtccccttgccacatcatgcgagggatgatcatcgtttgctgggaacatctcgcaatcaaagtacctttgttcaatcaccacataatttggcagcttccccaacttggcgtgcaacttgaacttgaggctgtactggtggaacttaatgaggtgctttaggcggcggaggctctggtagaagagcgtggccgggatgttctggtagtagatgccaaaagacaggccattctcctcgaggctgtcaaagatggtcttctgcgggaaacc

SEQ ID NO: 6707 - DNA, 791 bp, Zea mays
  Intron number 3 from transcript GRMZM2G074423_T01 (locus G RMZM2G074423) derived from phytozome v7.0 (chr-ID 4; pos 2 39625379 to 239626169 reverse strand)
ccaggcaaaaatagaacctagtttcactgagatcggtaatcctcttcagcttttctattaccacaagtgacttcccccctgttcaatctgcacattagcttgtttcacaagctgatacaagattttgattttataaatgatgatgcatcatgattacaacactgtgagctctgctagtgtaaattcactaagcacgaacttcccttgaaattggaggaacaatggtttattgcattagcgtggtgtatatgctttttttaagcttgattgccatgatgatggtatctcactcaagaagtccttttttgtctcattggctgagaataaatattactgttcagtggggcaaaaacttaacttgtgtaattgatttttttgttgatgagatctcataatgcattattttcgtttttattagaccatcagtttatcacccccaatcttttataggcttggggcaaatatgcatgatctgtaaaccagaaacaaaaggatcattttgtatgtcctcagtcatggacttagaatcaatgattcatcagcagcaaaattgagaccatgactcagccaatttctgttctataatcaattcaccaaagtgcggctttgcaccgcgctcttattttattttatttttgtttggaaatgggatggtgtgaatatatgtctttctgattgatggaacttttcaaagacattaatttcgtctcatactataacataataactggatggtctatttgtttttggatttagtctggcagagactcgaggaagagaaccgtgatttt

SEQ ID NO: 6708 - DNA, 461 bp, Zea mays
  Intron number 1 from transcript GRMZM2G308959_T01 (locus G RMZM2G308959) derived from phytozome v7.0 (chr-ID 4; pos 1 2034241 to 12034701)
gccggctttcggcaaggtaactaagtttttcctcaacgcatgcgcatgttcgttcacggaaagactactatatataattaatttttacttccctgcattttgggaagcagagattttttatactcagttaggttttacgagtagctttggcctttgggtttgtatagggaagcgcattttttcggtaagacttcgctgatgaacggttcctcatgaatgcttcttgctaactaatgaagtgcttccttcaaatccaaacgaagaaaacttcgcagttagattaacttgttgatttttgtcgcctttcatgtatggccattggaatttttttgttgaatctatggccattggatttgattgcagacgtccagagctgaggtgattcattcatcttttgtgcttactttgcaagcaaacggtctgcaggtccggacgatttctccttcccgtacacgagcacg

SEQ ID NO: 6709 - DNA, 868 bp, Zea mays
  Intron number 2 from transcript GRMZM2G037617_T01 (locus G RMZM2G037617) derived from phytozome v7.0 (chr-ID 1; pos 2 80553663 to 280554530)
ctgctggccgcttcaccgagcgcacgtccgccacagtaaaaaacccccccgttttccttttgcttcacttttatttcccggttgtgcctacggctggattgccattcctcctactgttattaacctaaatcatgttaacctgaaccataataaccgatgcaaagtctcatgtgacagcaactgtgtacatacaaagttcccgagaactaggcagctagaccatgagccgagtagttatatggttggtaattctgtgatattacttctattcaggtcatgaatggtagcaagaaagttttgagtaatggcctaacttgattttactggaatcagatatcgtgtatgacaggagtcatcaattgctggtacattgtgtgcaatggccaatggttacaagtcacatcaaaggcagttgacattgaacaaaattcgatatttgcaaatttttagtgccatttaataaactttcaaaatgatattttggattttatggatctttgcattatctgattgcagcattaagtattctttagaaactcttaatgcataggagtataagttaagctgaaccaaatgtttatgtgaactgctaatcatgtgtcacacatgcagtgcgctctgcagtttatgactttattgccctgaacccatacatttatacacaaaacatagagagaatgcatgacatctcttttaacatgacactgtctcagtctcaacttgtgatgatgccattattgccaagaacttgtgctgccattggcataccacaccctagagcatggtgtgtgtgtgtgtatgcaggtttccttctggtttgccattcttttgttagattgtgataaccgtgaatcttatgtgttttagt

SEQ ID NO: 6710 - DNA, 878 bp, Zea mays
  Intron number 2 from transcript GRMZM5G860938_T01 (locus G RMZM5G860938) derived from phytozome v7.0 (chr-ID 1; pos 9 363881 to 9364758 reverse strand)
actgggacatcttctacaggcgccacgaggacaaggttactctgttgtccttgtttctcgctcgcttaaagtagataatacagatttagcttgagaatgagaagtagagtagttgaatttcgaatctatattcttatcgtgcgggataagttgttaggaagcattagtcgaggagggcagcctcactcttttgttcagtttatatatgggcaacgttacgaggtagcatatggtgctatagtaaaggtctgagccctgaacaaagtttgatgcaaggatgcatgacctatttatactaaataaatacctttgtctttcgtttgccgagtgccactggtgccacttgtcagtctcgagacgtcctgagaagaagctactagttctggaagatgggtgaatctggaaaggtttggtctgtcaggtggtatgtagaagttgaagacttagtagtttttatttctctggtgtgttgagttcctggtcagaagcccaaacaatgagtggtggtgtgcaccagcaccgaatactgcaaacagtctgctggtcttggttattctaagacttgggtttaatccctatctaaaaatttatgtgttaatagttaccaatttaatggctaatatttactttctagctatgcttaatgccatactccctgaaactgctaagtccccactgaatcatggacttatggtgatatagaacaatcctgtgaaactttgaaccatgtttcgcttgctatcgatggtctcattttctacttcaagcattttatcgcgtcataaacttgtccttgtttagatctgttttgtcatgcatttgatttgtgttcttgtacttcggtagttcttcaaggatcgacactacctggataaaga

SEQ ID NO: 6711 - DNA, 866 bp, Zea mays
  Intron number 1 from transcript AC155624.2_FGT011 (locus A C155624.2_FG011) derived from phytozome v7.0 (chr-ID 1; po s 8292289 to 8293154 reverse strand)
accaggacgccgttgcccaggtgcccaagactcttcccctctactcattattattccattcgcgcccgccttttgttgagctcagccgctcaggggaataaagcgaagcgattctttattacgttcttggtacctccgattcaagttgctgatttagtatttaactattaagaagccgcctggatcaatcgggaatgtgtgagaacagggattgttgtcatatattctataccaggactttccaaatgcagaagcaaatttttgtttatgaacgcaattcgtaatacagtagagggtaaggatgatgaatttacttatacagcttattaagttggcaaaggactggctgatcattggttcgtgcaccttggatgttggatgcatcatgcgtgatctaaggttatatagtgggtgaaaaggctatgcagtgcgttagcttagccctttggtctttgcatatctatggtggagatgatctcacaatcatttatgtattaccatactgaggtagtagcctgttccgtaggattggaaaatggagtaaaaaatgttgagaactttgttttctcatgttcctagtgctcattttttttatctgtcttgctgttattttttatgaaatttatttatacccttccttgttccgataaactagctctatttccttgttttcttctgcaagtcatactcttgataactacacttgcttgtggctgttcctcagaccctttagtgatttctgaactgtctatttcaagacagttttacaagtagttacggctgtttctcaagcatccaatctcacacgcttccctgttgccatatttgactcccatttccttcttcatttcaggtcgaagcagcct

SEQ ID NO: 6712 - DNA, 928 bp, Zea mays
  Intron number 2 from transcript GRMZM2G338313_T01 (locus G RMZM2G338313) derived from phytozome v7.0 (chr-ID 4; pos 2 06639462 to 206640389 reverse strand)
aagcaggtatcgaagcttcatttccttcatgccgacgaagcctcgcttctttctccatcttaacaaagtagacaatcaaaacatgtggaacctgcctcttgaaacctaattaaaacatcgagtttcgttacctaaggaccttcggcaaagtcttctccccaacaccgagcaacttgatatcatggccgctcaaaattataaggttgttccgaccctcaccatttgtaaaaacaaactaaaatttgggggccatggccccgaggtgtcctagacttcatggagcttttggacttattgtcaaggccacccaagaccctccatgagccctcaaacctttaggtagagccggcccaaggcccatgcaccgaaggcgaccgccgggggggccaaaaaagacaggggcccaatatctaatatgtagtaggggtaaggatgtaggctggcatgctgtttgtccctagaagcccaagagctaggctctacgtctccatgcacaatgcgcaggactataggagtccaggaaccagaacgtctacttgtctagatgcgccgcacaggagttcagggctagacgctgagacgcacgatcagccaggacagttggacaccagccgccgccgccactccgccaggctctcgacttccggccatcggcaacctgcaagtctgcaaccagccaaccaagaggccacaggccaagccgcccaagcgacgagcagccgagtcgatccgtcatcttccatagcgacacaatctaggtgaataggtgatttaatttactgatttggtgatttccttacaccgcttcatattatgtagcgtactagccgcttagattagatgtttaaaaaatatttttagtgcacatgtcatacatgatacgtgttctttaaaattttaattatttgcttttctgattaggtcttag

SEQ ID NO: 6713 - DNA, 747 bp, Zea mays
  Intron number 1 from transcript GRMZM2G109643_T01 (locus G RMZM2G109643) derived from phytozome v7.0 (chr-ID 1; pos 2 38022700 to 238023446)
gaagggcgccccgatctgcctcacctccatgcaagtacctgatctgctgcgcccaatctcttgccgatttcttcctcatgcttcctcgtgtcctctccagtctcaccggttttccatggagattgttccagggttagttaaggttggtttgagctggagtcggtaggatttggggctgtccatagttacaggtttggtttctaggcttgtttgccctgttggtggttcatgttgcctgctttcttgcgctgctctccacgtccgcctccagacttgttacggttgcagaactcttgcacatagattctgctacgccagtccaagttaaggacatggtttttggcccagccttgtctgaattttaggttcgtttgagcttccattgctacgtcagttaaaaaggttcgtttttggcccagccttgtctgaactcttgcgctgaattttaggttcgttttggctcttcttttctccctttttttatcaaatctattgcagttcaacagccatggtcgctagctacagagccaattaggttctcacttgagctctcgttcaaatgtgaagtattgatagtcacgccaatttatctccactttctgcatctaataaattccaagcatttttaccatctaaaaaaaccgaacctgcctgcctgttcttgtctcacaccacctgttaccagaatattattttgcatgaatcccttcctgattttgattctcagtttcccactgcattgcagca

SEQ ID NO: 6714 - DNA, 717 bp, Zea mays
  Intron number 1 from transcript AC205725.3_FGT010 (locus A C205725.3_FG010) derived from phytozome v7.0 (chr-ID 1; po s 23582777 to 23583493)
gcttcactatcaagtacattcctaggattacccggactagatttagctcttgtgattttgcattctactacattttacttgttctgctgcattgacagctcgagaagagggttccagactcccttgtgaagacccacaactagagaaataggatggagagggaaatttactaagagaggacgtgtaacaaataaggccaggaattattagaatgaatggaaaatgtcctcatacacctttggaggtatgtcaggatcttcttctaaacaattatacttgttctgctgcattgacagctcgagaagagggttccagactcgatagcattcagttgctacatttttacttgttttgctgcattgacagctcgagaagagggttccagactcccttgtgctaaaatgtcatttgtctggtatataatcttataaacatttagaagggatattcttgcaaaaccttcatgtggttattatttatatatgtattaatttcacagttctttaaacaattatactgcagtattaatatattggtcatgaatccttggtgagttcaaaaatccacttggtgttcaattactacatacaatgtgaagatagaagctacattttgagtttgttaaattaatttcattttttgctgcaattttaacttactatatatgctgcaaacactgcagattttatttcgcttgtgggcaagtggtgatcagag

SEQ ID NO: 6715 - DNA, 1051 bp, Zea mays
  Intron number 1 from transcript GRMZM2G308193_T02 (locus G RMZM2G308193) derived from phytozome v7.0 (chr-ID 4; pos 1 79819461 to 179820511 reverse strand)
ccatcatcatcctcgtccccgccgacatctggcaggtcagatcccttgccgcgtccctctcccaccttttcatccaccgtcccctgttccggccatcgtcggccccaggctccgccggcttggctgtcggtgttgttagatccaccgggtgtggctcgtgtcgtgttctagttgcgttgcaatcttggggtgtatgtaggaattgaatcacaaacttcgtgttactgctggagcacgcttatgaattgacgcgtcttgctacggatgaggtatgcgaagctgctgacaaatgcagtggaagccttgtacgagggacgaggcaaattgattgttactgttagtatgttaccctgggattaggagtagtgcatatagggcctgtttggataggctcctacggcgccgcagcacgcctaaggtgcggcggccgatttgggcgccacacccgcggcggccggagtgtggcgcggtgtggcgcccgaggcagcctaccaaacaggctcataatgtgcatgactgcaatttacttttagacaactctgtttctacactatttgagcctcaataactgagtaactgattttggttcaaccctctatagtcctgatgccaccttcgaatcttcatttctcttttatagttatggagttaattcagtattctgtcaaattcatgaatgggatttcatcatttttaggtttcacactcttgagtagttacattagccacagaaaccaggtgcagtataatctttggctaatgaaaaaccctagcagctaacttggcctaccttaatgtttctgtatttagtagtacagatttgagcatagatcaaatttttatgttctttttaatctttcaaagccacccccttccctttacaaaaatatacgtatatccattaaataatattgataaatttattagttgtaatgaaatgacaaatttatctaccgggcttgaaaattctctttttgtactcctttggttcaaacccttctatcattctatcgcagacattaactgccagtgcgaaggggggcattggatt

SEQ ID NO: 6716 - DNA, 278 bp, Zea mays
  Intron number 3 from transcript GRMZM2G139387_T01 (locus G RMZM2G139387) derived from phytozome v7.0 (chr-ID 1; pos 1 44548922 to 144549199)
tgcttgtactgaacacacatcttgctggactcaaggtggcattaacaaatttcctaagggcttgatatatactttgctagaatgtttatataagcactggactttctgtacttgttcatggaagattgacattttctttgtcttcattcttttttaatcaaagacctgcctcatgcagtgcttcttccctttgcaagtcgtcagactatgtttttactgttatcaaattgcgaaacttattcatgtaaatttcaactaattcccaatcaaatgtaggt

SEQ ID NO: 6717 - DNA, 989 bp, Zea mays
  Intron number 3 from transcript GRMZM2G009438_T01 (locus G RMZM2G009438) derived from phytozome v7.0 (chr-ID 4; pos 1 92648039 to 192649027)
aggaaagaaagcgcctagaatctgaggtagtatggaataaaatttcacgcccaggctgtgctgtgaaagttttcttctctagggtgtttgagaactatcttttactagttatgtgcaagcgcatgtgcgcatactactgaacattgatacaaaccagttattttgtttgtttgtttaaatttagctccaacatttaagttgtggcttactttgatacaaactaattattttgtttgtttgtataagtttagttgcaacatttaagttgtgccttactgccttcctattcttgtgatctttatctacttttattgtaactctagaaaccctctgatctctacaattgtcttagtgcaaccaatcttatgggatatcattcacctgtttttttttgtattttttggagagctattttgcaatcagttcatgaagatttgagtagtcattcaaatttcttttttactttaatctactattgattctgtggatgtttttgagttaatagtatcatcataatattcattatcttgaataagctaattttcccaattggcaattcaaatctggtacttccagcaaagcgccgcctgcctgcaagaaaatttccggcgctctgtgcgagttctgcagttccggcgttgctcttctttcccgcgccacctgcctgcaagaaagcgccgggggcgtgccgtcttttccccctccacgcttcagcagcagcgcagtaaatttcgtcggcgtgttgggcagcagcagcagttggcagccaacgtcccgctcccccgcccgctattactttcccagctccgcgacaagctaggcgcgcgtcgtcgtggtccgtccgcttccggtctctactccttgtgctctctgcagtaaaatgagcttccggcgcttcgggttcagtttgcgagttgcattgcttagtctgtgtttttaattagggaaccaatgaacacatgtagtgcattgctaattttagactggaa

SEQ ID NO: 6718 - DNA, 655 bp, Zea mays
  Intron number 2 from transcript AC186336.4_FGT006 (locus A C186336.4_FG006) derived from phytozome v7.0 (chr-ID 1; po s 43116571 to 43117225 reverse strand)
ctagatcttcccatgtaagtagccaatgtatagttgaggaaataacctacaaacatccggcaacggtagttgctgctactagcaaaacttaccattttagttctttaataagatctcatagccaagtcatagacatatttgaaacattgtgcgattgataaaatcctaaaaccatttaaatatcatacccaacaacacaagcaaaacaacactcaaagaacatgtgtttaattttcttgactttgggaggaaaacatcactattgtcttgacaattacattaagttgtccttggttacataccttactatatgtagataccaaataaaaaaccttgatttccaatgaagagttccaagcaagagacggtcgttgatttatcaatagaagccgagtacattgtagttttagaagctacaaaggaaattgtatggattagaaagtttgtttctaagttggacaataatgatgctatagcacaagcaaaggagccaagatcacataaaaatccaaacatatattgttgcactatcatctgatttgagaaatcgtcagtcaaggagatgtgaatatatgcaaggtgcacactaactctactgtgagtgggaggcttatgatgatatgtaccttaattgtttccataggctggtgacatc

SEQ ID NO: 6719 - DNA, 892 bp, Zea mays
  Intron number 1 from transcript GRMZM2G134072_T01 (locus G RMZM2G134072) derived from phytozome v7.0 (chr-ID 4; pos 1 56186938 to 156187829)
tgacgctcacagacgccgaggtggagggcggccaggtctgctctccattttatcgctcacagtctgctctccattttatcgctcacggtctgctctccatttccccctacatccattttttgtgtttggttttgatgtgtgtttcaaatattcaaatatccaaacctcatttggagttgtgataccagcaacctttgacatggattcaagatgctactgaagtgtttattcgtgtgagtgttatttagtacatgatccaactggtaagaaactttatgatactagcatatcacataatagatgagattactagaaatagcccatgttactgaatatagaagtttcagttctattgtttttacacaaatttgtttgtgatgcttcaaaccgctaatgcatttttaaaaaaagttgtgcaatgagcatatcacataataaatgagattcttaggaataacccaagttgctattgagtaaaatttcggatttgctttttaaaaaatatgggttcaagttgttcctaacattctgacaactgccaaatcagatgccactgcacaaatggacgttgtagtgatcacactgtcacgagagctaagcaaactacagcctgcaagagctacacgtggtagcctatactcctgccttgctataattttattatttttcttttgttaatgagtgcagtttctctggctaatggtaaaaataatctgttctacaggcatacttgaccacatcatggtggagaatgcaagtgttaaagttgcattgaatcgcattacccgttgtttctgtcatggtggagatagcctctgagtcatgtttctaattatctacactatgattcttcttctgttgataaaatattgttttattgtcctgtgagcta

SEQ ID NO: 6720 - DNA, 528 bp, Zea mays
  Intron number 2 from transcript GRMZM2G132686_T01 (locus G RMZM2G132686) derived from phytozome v7.0 (chr-ID 8; pos 1 45279513 to 145280040)
cgttcgacaccgagcttattcccgatgtgaggccaatcatctgtattctttagtttttatcacttatcagttgccgcatctgtttcagtggcctcgcttgtttggaataaatattactgttcgagaatgctgtcgggcaaatatcgcttttattttgtttctcaattggtcatgggcttagtcacacgcatattttttgggtttcctaggcgtgctgtttttttgatgtacagaaactgggatgccaaacttatattttgttggttgaatcatggtcagttgttgatatggttaatatgttgatttatcagtctgtttgagttgttaaacttaatctagtcctttagttcagaagatgcatctacttttatttagtgatgattcttcattccttctttaatcctaacctttttcccggacaatatggttctgtagaaaaagatgctttatcatttccctagtgacagttcttaaatactggagctaaaatacatatttcatgtatacagtttcaagtaccaggaatct

SEQ ID NO: 6721 - DNA, 616 bp, Zea mays
  Intron number 1 from transcript GRMZM2G052494_T01 (locus G RMZM2G052494) derived from phytozome v7.0 (chr-ID 8; pos 1 31531301 to 131531916)
tccgcgcacgcctaataagactgctcggtgccgctgtccgtgcagatcattcggtttctatccgtcctgtgttcttgcttctttcattgattgggggcgagtagttagttcatccgtctttcgttcctgtttcttactcccctgttccacagtagacaagttacaatctttttttttccctttctgaacctgtcatgtgttcttgcagtttgaagtccaaccatataatatagcacaagggacattaataagtaagtcaaatgtgcacacaagccaagcatacgcacttattacatcaacccatgcacgcaagggttcagaggaaagccacacagtacacagatcatcggcacaaccaaccattgccgtcaagctcgagcacacatgtacaacaacaagtaatcagacgcacgcgcaacgcaaaccacatgggcaccaacccttgttcttccaaaaggatgaaggggatttcccgacatcgtcgtcttggttcccttcttccttgtcttgattttctgacttgtagtgtgtaaaatggagtctatctttaagcctgttgacggctacttttacctctgcagggacagagtcaccctcgaccttgagctcgagctcc

SEQ ID NO: 6722 - DNA, 763 bp, Zea mays
  Intron number 3 from transcript GRMZM2G017299_T01 (locus G RMZM2G017299) derived from phytozome v7.0 (chr-ID 1; pos 2 87001606 to 287002368 reverse strand)
gcggtatagaaaatgaacttttatgctattagtgcatcgaagaagtggagcctatgattgatttatgttcacataaactaggtggatcatatttacaagcacatgaactcctggatactgctaatgatcttctcaatgaagatggatgtatttattttgttactgctcctctgacttaccttgatttccttttaagagttagttaggggctctcacatattgcaatggaccataaacttaaatgttagtttgatatggttttatcttgaagagtcattttttggaatcaattttcttatcgtttttttagtggttctgcataggagctacaaggttggagagaagggattttatacttgcataggagttgcgttttttacttgcagtttgaggattgcacccattttaggagcaagcttgccatatttataagcccacaactgttttactatgtatctatacatagtgcatatttagctgcataacaaaatctatgaaccttgaaaagataacgacttacgatttggaacatagagtacatttttgaaccttttgagttttatcaggccctgcgatctagaaagttttattggaagtgcttttctgtataagtcatgctcatgtatatcatgtttgttggaatttcttgtttagcgaatcatcatgttaccttttttttcaaaattgcatgcaactgcatttgtaattttttgatattctgtcagcaggtgggcttgagggctgtgtgcttcttggcttcgac

SEQ ID NO: 6723 - DNA, 1034 bp, Zea mays
  Intron number 1 from transcript GRMZM2G704088_T01 (locus G RMZM2G704088) derived from phytozome v7.0 (chr-ID 1; pos 2 83642885 to 283643918 reverse strand)
acaaagtaagtaaatttattttgttgaacctaagtgtttgttttttttggttctcctgcttctggatcattttatttttgcatcttgactttggaaataagattcatataaggtagcaggcagaagcaccgactcatctttattgttctgtagatcaatgccatgtattcatgataggattagtgtttttttatttcttgcatgcttattgctattgtttgaaggagttaaacttaggctctgcctggctcagtagtagccttttgaaagtaccttttttgtgctattgtattggagccatgactgtaagacattctaaactgcatcacgtgacatgaaccccaaactggctctcagcttctagcttctgacagcactatctgattcattctagctactaattattgcatcttaaacttcatcagtcgaaccattgccctgccacaaaactacttgtgtataaaccttattaattttgcttcaatattgctgtgcaagagacatgacaatcacatacgtaccattaagctgctacaatgatattgagcttaattatgcttagtggatcgagcaggacatgtctattctgcacttcagagttcattactatcgatattcttatattatctgattggtgatgacgttgattttcggaaagaggtatactgtatacaacttggcaccatgcattattttagttttggtttgtgttcatgtgaaacaggctgtggaaattcacaaaagagtaggagcctttgtcatggctttttagacaataaacaagtgcctgtctgatgcagtctgtgccatggcacggagtatgttagatggcgagagtcgtgctgctgccctaattcattctggcaataaaattttggagacagctagatactcttctgaagctaggttattttcctctcctattctggcactggtagaatgctggttattttgctgattgaatctgttttaatttgtcttgtgaaaacttgcttgcagcattcaagagaagatctcatttctgagcaacaaac

SEQ ID NO: 6724 - DNA, 915 bp, Zea mays
  Intron number 1 from transcript GRMZM2G006297_T02 (locus G RMZM2G006297) derived from phytozome v7.0 (chr-ID 4; pos 1 77041838 to 177042752)
cgccgcacgcagcaggaggaagacatcagcgcggggcgaagcgtcgagcccatctccgccgcgggaaccactggtgagcgatttgttcttggtggttttgccgattttcttcttcttctgctggcctagattcgattcctgcttacccggccgccgctggtaatttttttgaggcatctggtgggttggagtgcgcggatttccctcacccgcgtgaacactggattgatggattttggagtagtcaactagcaattctgacacagtatttcgacatccatgtgtgtggacttcgttataacttttttcccctttgggagcggcgtgcgaaactgtgaataggcatctccagactccagttctccacaagagctggtccctgtcactccgcgacgggaaatctgatattagtgtagaattatgtgctttcgtttgatttgctgtcgcttttaagattccgccatcgctcttgtgtgattctctcagaaaagtgggatgtgtgctcagtggggggtccttttagtttagcaaagtacatgcagttggttgttaggtggctttatggctgcatattagattgagacactagtttgtttcatgctgttcgttacccgttttagctgccatgttttggtgtttttttagtagaagtgaacatctaaggttctgtggatggcaggagttttatatgattggaattaggtgacccaaagcggacattgatagaatggcttacaatttgcttgttggatagatgctataactggaacatgaacgtgaccttggaagtttttcgtgctactacttcatgtttcctattgttgtgtgactaacaaataatgactaccatctgctctctcgatcacaccactgaaatagcaatctccgtgcttgcatgattaccaggcatttagg

SEQ ID NO: 6725 - DNA, 774 bp, Zea mays
  Intron number 6 from transcript GRMZM2G351747_T03 (locus G RMZM2G351747) derived from phytozome v7.0 (chr-ID 4; pos 2 36094568 to 236095341)
tgaaagagaacctgttgtctataaggtttctttcttaatattttattttatatcacgtatctaactttcttacagttttcagtaatgttccttaactaattttatttctcttagcacttgtggcatataggatacctgttttacagtgcttgatttattacaagattagtaaacttaagttaggagaagatccctcaatcatttaacatagtcgggtgcctaggacctaagccaaacctgacatggctgaaagggtttaagaattaagagttcagttggattcgtccaagttcaaattactataatatttgagttcattaaaaacaattgcacttaaaccttaatgctgctaaataactatacgtcaagatcgtttctgttcatctgacatgctaaagtattaatgaaatgaactaagcagttttgtaagtagcaacatgtacttttgctgttttgcaatgactgtatggtgactactaacatattcagaacttgagctccattctgctggactttatataatctgaaatcttcctttatggccataaagctgcctacatctcattacatataacatattccttaaggtcaacacaatagaaactacacagcaaaagtccagatgcctcttttgcagataaagctatgcgtttgtttcaagtttgaatttaaacctcatcttcatctgtgcacattcatcttctgcctttgaaagtttgccccagttgacatactatcgctcactatttttttgcagacaaccagaaatttgcc

SEQ ID NO: 6726 - DNA, 974 bp, Zea mays
  Intron number 2 from transcript GRMZM2G479987_T01 (locus G RMZM2G479987) derived from phytozome v7.0 (chr-ID 8; pos 1 23509516 to 123510489)
ccagaccaaaggtatagcgcattgcatcgaccatcgacttgctttccatttctgatatcacgattttgtcggcgcagtagaatgtttgtattctcaggcaggtacaggtctgccggagcttgtatgctacaaacaagtggatcttattgttcagctgaccaatgaccatacgcacagattgctaactccttgagagttcctaaatttgtgctcatccattattcgtattcctgcttttgggtaattgctaaccagccaaaaagctttaggtgtgctttgccttcatcattagatacaaggtgtatcagatggcataaatattgccagcgtataattcggatgcatagcaatcagttgtaactaaaacttacttattgactgcttccatattatttgttgtgaatgactaaggtgtgagaaaaaattcccaccaccttctagctgttgttaatgttttggttacttgtcacgttttcccttgagttttcatctgtggtgtctactggcctcatgtgtctaatgccccttattgttcttgatcttcatgttgtttgagttagatacttagattgttttattcaatgtcactttcttagtagtttctattactatgtgatattcatgcctgctcaattgttatagggacacttgcttttgcaaagtgctgaactgctggctaaaatatcatttttgttgtttgttttgttatggaggtatgccatagtttggttgactgagtgtgaatacttaccatgtacaaaatacttgcaacgttcccaagtaatgcggtatatagtatatactgtatagaatggtgaaagtaatagaagtctctcacctcccactttgttgataggttcaaataataccttcaaatacaacttgtagcagaaatacctcaagagatgtgatacatttgtgttttttttctcatttcaggagaaaaacagtggggtaaaggtgaactcagttag

SEQ ID NO: 6727 - DNA, 935 bp, Zea mays
  Intron number 1 from transcript GRMZM2G178955_T01 (locus G RMZM2G178955) derived from phytozome v7.0 (chr-ID 4; pos 1 73312143 to 173313077 reverse strand)
ctcaacccggggcctttctctctgcgccccgccaggtccgttcgcttccttcgttccatggcggctccgtttcatttcatccgatcctttcggaaggggagtggtcgattttacggtgatcgcccgctgctctgtaacattcgatcttttttttccccctcttcttttgcttccagctggtcgtgcgcggcgttgctgtcttccccgattcattcctttggcgttctgttctgttgctcataatctggcccgttctagttctagaaaaagttgggcctcgttgcctataggctggggttggccgttcaatttctcaccgtgtctgacaagtcgcaagtcgcattctttgtgtgcgactgctactggtatttgtgcgcgtttttttgttgttgtcaaaatctggtcatccagaaaactaccagtggtcacctgaagaaaattagacagctcgcaccagctccaacaccgtttgtttcttcggttggtaatccaccaactgatcaggtttcgaactgtgttccctttcgttttttagcatttcttctgttggagaccgtttatctgttccgaagcgtacgtacgttggtgccgatatttcggtgtctcattttctctctctcgtgttcaaaattattcaaagctgtggttgaaagctgtggttttggtgagtttggctttggttttatcagacgaatcgcccgctttctctttctcggtctcgaattctcgatgaaatttctgccttttccttgtccttttctctctcggtgttagatgtaatcaatttcgttttctacttctcccatgtttttttttggattgaggtgttcctttttttttgacgaggcggatttgtagttacagtattcactcttggttcttgttttgcatctgaatcagcccagctgctagcaacccagcaggtgaaggagaat

SEQ ID NO: 6728 - DNA, 510 bp, Zea mays
  Intron number 4 from transcript GRMZM2G027594_T01 (locus G RMZM2G027594) derived from phytozome v7.0 (chr-ID 1; pos 1 40804589 to 140805098 reverse strand)
cacttgtgaatcattgggttaccacaaaatcaaaggttaatggctaccttaacaataaacatttatcttgtgcatcttgtcaattgtttttacattatctatgtaatcattttatgttaggatataagcatggcgaatacaaataactgtgggaaaaaagactatccatacagccggcacaaagagttttcgctcggactagagaggatttggtacttctattccaactacacttgtgaagaacatgctttttacgaccatacttccctcactaatctttattacctcacttgtacaatagagggaaaaagatcctgagaagaaataccctcacatgctattttatatatccatacacataaaacaaacactaccaagaacacaaatccacatgtggtacaattttcttcaaatctttattggttcaaaatttttatgtacttgtgacatgctgataatttaatccttttaaaagagtgatttgaaggaactactagcagagcatccaga

SEQ ID NO: 6729 - DNA, 730 bp, Zea mays
  Intron number 1 from transcript GRMZM2G095851_T01 (locus G RMZM2G095851) derived from phytozome v7.0 (chr-ID 1; pos 2 96344428 to 296345157)
cgagcagcagctgccaccgacgcacgcagaccggggtaaatggactacgagccagtttcttctctgtcacctctcccttacgctcctactgccgattatccttagtccaattgcctgtctgtctggcacctgtagccttgtaggattgtggacgggatcatgtcctcattccctagtcgaatcgtctgtttggtcacttgtaagattgtggacgggatccagccctttaggatatatgatagttttattaatttcctgccatgtgcccgtttcatgttttctgaatttttttgattctccatatccgcatcctcttggtacagagtccatatccgtgcatagatatggtatgctatgcaagcgcttcgagcccaaattgcttttagttgattttttcgcgtctgttactttaatggtattttattcttaaagaatatcctaattgtagatcttggattaacgaggttgcatcatctgttcaactaagatacatcatacgtggttttcagttcactttgttcttagcatttttattaaatttctgaaatggttaataatttccatgtctctttggttcatgacaactatgttggttcattactttttgctaccgatcagtgtcgaagtttttcagtttagttattttctcatgttttctatttaaatcttactgatatgcgaacctccaatggcagcaataaatattggtattggtagtgtgatatctata

SEQ ID NO: 6730 - DNA, 682 bp, Zea mays
  Intron number 2 from transcript GRMZM2G095851_T01 (locus G RMZM2G095851) derived from phytozome v7.0 (chr-ID 1; pos 2 96345253 to 296345934)
tggaccgtatgttcagaacactgctctgtagcatatatatacatgcattgcttaacgttttcaagcctttttatgtgtagacttaatttgctccaatatttgagctctgtactgtacctgactgctaatacttctattcatgctgcattgtctactatagtcaatatatcccatgtatgaaataggcttattttttttgtcttgtagttaatgtattggttttatctaggtgttgtgttattggttcattctactttaaattgtaatgtactagtgtgttattaacttctgtgttttcaatatttaagctttgtacttacagccattgttttttttcttgctgcaaattttattttaggcctacttaactacgtaagtctagatatttgacccatgtaggaaatgggcttatccttttgtcatcttgtacctaatatactggttctctaggcattgttgtgtatgaagtatctgttaactgtatactctagattgtaatctattaatgtttttgttatcttttgatttggttgtctgtcccttaatactttaatgctctatgacacacatgttgaagttgctggtgatgttctctaggcttatccttttgtcatcttgtacctgatgctattattacttctttgcaggcaagtctacgcttacagattcccttgtggcagct

SEQ ID NO: 6731 - DNA, 1032 bp, Zea mays; identical to SEQ ID NO: 4444
  Intron number 1 from transcript GRMZM2G016999_T01 (locus G RMZM2G016999) derived from phytozome v7.0 (chr-ID 4; pos 2 27500944 to 227501975 reverse strand)

SEQ ID NO: 6732 - DNA, 946 bp, Zea mays
  Intron number 1 from transcript GRMZM2G068575_T02 (locus G RMZM2G068575) derived from phytozome v7.0 (chr-ID 1; pos 2 61131459 to 261132404 reverse strand)
ctggctcgccgccgtcttcctgaacacccgttccggtgcgctcctgtttttctgctggatagatttcgatgctgtcccgtcgtcataggaatttgggcaaattgattagggacatgacggtttggttggtctcaattgctgagatggtcggatgggttcctgcaggatgcgcttgttatttggcgacaatagatagagccttctgctgagagttgtatttagacgaattgtgcgctggttctatctagggtttatttatctcgctgttggtcgttggtcgagagctctgctgattttgatttggccggtaaaaattcggggcggattacatttggttcaactatcgacgagtttcgtaggttaggtaagtgttagattggaggttgctctaatgcaatgaagcgggagcagtttatgttagttatcttatcccttatgctgtctctttggtgttggcagcgagtttaaagtagatatttatgtatctttgcgtttcctcagtagtatgcattacgttaaaccatgtagacttgttatttttcagtgctcttctgtgtctttcttttgaacatgaagttatgtttattctcaacagtttgcatttctcagtaggctgccatagtttgcttaaaatactgggattaagtttgtccaataacccaggtgcctgaatgatgcacttcaggaactaaattctacttatgaatacatttgtagacatgtactacatgatggagtaatcatgcttttataccttggacctttagttgacatagaaatggctgctttgaagtttgaatttgactgctctaatcaacattatgtttacaagtttagctttattaattgctgacaaattaaactgtggaactatgtaattttgactgttatggaaaaagtaatccttgactagtaagtatctttggtgaattggtggtttttcagt

SEQ ID NO: 6733 - DNA, 776 bp, Zea mays
  Intron number 1 from transcript GRMZM2G430675_T02 (locus G RMZM2G430675) derived from phytozome v7.0 (chr-ID 1; pos 2 36918205 to 236918980 reverse strand)
ctgcggtatgctcgaacccaactaccgatccccttcctctcattcttaggagcagagcaggactggggttaacgccaccgcaatcggcctctttgcgaagttattcctgttgtcaatggacaccatggtgtccaatcgggagtttgtatgtgcaccagctgtttaggattaaaagaagaggaactcccagggcgaatgcttgaggggtttgcactttgcaggatttattcatcttcatttcgccgtagaaacatggaggggattaggccctcagcaaaagtatgtaattggtttcggatttttgtttatgctgagttgctggttaccaggaagacacccatactcagctttcattaaaaacgctgatagaagattctaccctctttcaactagtactaccgttttttcttttactgctcccttcatccaacttataatgcactttggctttttttttttctaactgtgtttatacgaaatgcactaatgtttgtaacatcgaactagttccatttgattctctagcttgtaagttctctaaatatttacttgaacgttaatatactttttctaaaaagtggatcaaaatctagaggtttgatttaggacaaagctaaagtgaaccgtaatttcgaatgtagggagtattatggaacatgcctagtattgtgcatatttttcattacagactgaattgagctacactcctgtctgttaggattcttatagcagatgttcatgaatatttcataatgacggttatctgtgcagggcaa

SEQ ID NO: 6734 - DNA, 445 bp, Zea mays; identical to SEQ ID NO: 4259
  Intron number 4 from transcript GRMZM2G023242_T02 (locus G RMZM2G023242) derived from phytozome v7.0 (chr-ID 1; pos 2 98331832 to 298332276)

SEQ ID NO: 6735 - DNA, 739 bp, Zea mays
  Intron number 1 from transcript GRMZM2G152442_T01 (locus G RMZM2G152442) derived from phytozome v7.0 (chr-ID 4; pos 4 8089326 to 48090064 reverse strand)
tcgtcgtcgtcgcgtaagccgccctccctcttgcctccaacggttcctccccccctctctctctctccaatatacccttttctttcttttctgttcctttcctccttttgtgatcctgctcgataactttaattcaggcctagttcggcctcgggacggggaaactcaccaaattaactaacctgcttgtatttattattaattaattaccttgtactgtagcatatgtactactaggctatcacccaagccgacttaatttacgattgatagtcatagcgtcaaccgtcaagaaaaccacgcacagatgcacatccaagctagtcaaatcggtttgaattcggttcgacaaaaaagaaaagaaccttcgaagtccacctacgtatcatcggttctgttacctttgtgtttcctttccgtccagttggctgttctggacaacactagaatcaatccagctgacatcggtgacatcgtcgttgggacctggttcccagcatgcaaacgagtgcaggatggctgcattgtttgctggattccctggtaactgataattgttgtttacaatcatgcatgctacctaatatgaagaagacgatcctatcttctggtggacaaaaaaagaagagataatatgatgttgtaaattgaaatagtttcttttcctttttacacaaaaaggaaactttcgtaacacatttttgtctcttcttgcagataagcgcattccagaaagcac

SEQ ID NO: 6736 - DNA, 911 bp, Zea mays
  Intron number 1 from transcript GRMZM2G095397_T01 (locus G RMZM2G095397) derived from phytozome v7.0 (chr-ID 4; pos 1 26343085 to 126343995)
gaggtggccaatgtgggtgatcgacctcccatgcagcatcaccacatgctgcttatgtaatgtcaggtgattggattgtggttcttcactgcatttgtgggagtgaaggtgataaaatcatttggattggtgggcagagaagactattcagataggtgcggttgtactgagtgagattggatggaatggagtgcgatgatgtattgaatgactaccaagtcgcgtgttgtacctaaatcgcgcacaatcagctaatttataaagtttccatggcatatatgtgaatatatgatgttccaagagagatgcattcatgcatcatgctcttcgtgctgttgtgccatggcatttttcaaatccccacgtgtcacctaagagagtgagggtgaacctcttttttgttttgtttgaaatcccttttatacccatggaaaggaaaaggacttagctgcttaagcttacaatagcttaataaatgtgaggaatagctgagatgttgacttgtgttactaaagttcagtttagtcctatgttttactgcatgctattcttaggtctgttaagcaaatctgatgcaactgctgtgtactggttgataatgtttgtttggaggaaatatggatttatcaaattgaaaattcaaatttaatgaggccatcatgtatgtatgaggcaggggtctatggattcgtgtaattcatttcagttggatctatcggttgcctatcggtcgctgtggtacatttatttttttctctcacattgtgccttccaagttttgatcttctttctcagtcatttatcctgtttagataaatctgagattttttaggctaaagtttgcgaattgcttcaccttttttgtctgcaaattagcatttaactcaaaaatttcccttgaaattcgagtt

SEQ ID NO: 6737 - DNA, 532 bp, Zea mays
  Intron number 1 from transcript GRMZM2G158316_T01 (locus G RMZM2G158316) derived from phytozome v7.0 (chr-ID 4; pos 1 85489109 to 185489640 reverse strand)
aggcggaggacgccgtcgacgagttcttccgcaaggtctcgctcctttaattaatttaattccgccccctcctctgcttgcttagttgcttgcattgcttgccgtacgtagttcttaccaccattaatttcatctattcatctgaagaaaaaggtcgtacggtaaccttcacttacatatatatagtggagagaaataaaccaaagatcacgtgaaatagtatcggttttgtttcaagaatttgtagcaaaacgtgtgtactagctaattaagtttatatgctcaaaatcttatgtttccaacattattgttaaggaaactttatgggttttttaaggtggtgcccttgttttggttggtgtccttatttttaacattagtcatattttttttgcttaattttgctcttcaagtgctatagactagaatacaaaactgagcaaaaaaaatacgactaaagttaaaaataaggaaggtggcaaaactaaacatctacatgaatttctggtgaacatctaattaacaggttgac

SEQ ID NO: 6738 - DNA, 774 bp, Zea mays
  Intron number 2 from transcript GRMZM2G131245_T01 (locus G RMZM2G131245) derived from phytozome v7.0 (chr-ID 1; pos 1 79341987 to 179342760)
tcgcctttactaattcggagaagctctactttcaggtaagaattggtgaagctaatgcagacttgttcttcttcaagcatatcaacaaaatcatgcacttcatatctgcagatttcataggatcaactgtaactttaagtcactgtaaatatgctctttaaaaatattgattccatattgtttacctgtggagagtggctgtgaaccgaggcctcaatatctcattcagatttcaagtgtgcataccattttgctaagctcttgctttttggcagggaatagaaacattactctgaaggttgttgaattgttgttacctatagtagttgcattttgattttcttacctctcagtgaatacaaattggtcatttaaccattcatgtaggcataacagataactaccccagctggcacgtttaatttgtaattggttatatgtacacatattgcatgttgctggttcaatactgtctgttgagtctttacactggaaaacaaactgaactgaaatgagacagtcaaatgctcgaataaatgtgcagggacttgcagctttacacattccatatattgctgtatatgtctggtcataaagcatagattgctcactgataatcatgctatttcagttcagttgcctcatcttcttcttcttgtgtttctgtatcaaaatggaatctgttcatcctttgataactcaccatgtcctttttcttgtttttttttggtgctgacagatagcagaagctgaaattcttgaagaccagctttt

SEQ ID NO: 6739 - DNA, 1053 bp, Zea mays
  Intron number 1 from transcript GRMZM2G064530_T01 (locus G RMZM2G064530) derived from phytozome v7.0 (chr-ID 8; pos 1 68571311 to 168572363 reverse strand)
gttgttgctacttccacgaatttctcatcgaattggtaatagtactctagctcgctactcctactaatcaattaattcgatgaatatattggatgaatattacccgcgacgttagaatcagatacttgtgatgtgctgtagtaattatctgtatttcattgtatatgtttgatgttaggttatttctctacgggataggatattgtatttcgatatttaatctcgtctggtatgtagacttgttaggtgttcgagaaaatgtctgaattagaaatcgttgttgttatcaggtgttgagtcaaatatggtcccaatgagctgtgccgtttttattgctattagaattgatgaatggttcgattaaatatattatcacgatgattctcttatttatagcacagatgcgcggtagcgatctgcgttacttagcgctagtttgtttcctttgtgtgtttgcgtgtaggttcattccctacgaggcatcaccgtttgcgctaagcacgtttggcccatctagttcacttgcacgctaggtgttcgatgaatcacctgaactgggactcgttgtcgtttccacgacatctgagtcaatttaacattagtgagccggtttgttaattctctagcttaggaatatatataggatttgtgttttgtattagcgcttcttgttcaagtcagattcggttaagttaaaatagcgcgaacgttgtacttagtaatatcccggtatctggtaattgcttttaaatgttatttgtgcctcgtcactagatattcgattcactatcgtgtagccaaaattaggctaattatattaaatatgtattatttgttgtttcatgatgtttgcgttaggttcgtttaatttaaagaagcgtaattattacgcgtagtcgaatatcgataactagtatttccgtatgaacttgtacaacgcctcgccgctaggtgttccgctatcgcgtagcactatttaggtgtgtgatattcttgtcgatatgcattcatgtgcataatccatttcattcaggtacgttaattaatcacgcg

SEQ ID NO: 6740 - DNA, 784 bp, Zea mays
  Intron number 2 from transcript GRMZM2G141707_T01 (locus G RMZM2G141707) derived from phytozome v7.0 (chr-ID 1; pos 2 19806392 to 219807175)
gcgcaggacatcgaggtgagccaccctccctgccagttttccatcatttggtttgcctgtgtgacttttgatatcttggccaacacaatgcctgtctgtgaagttgcaatcaatgggagttatgggaccagtggtataaacgagttctatgtgcctcgtcagtgacaccttcagcggcaaccatgctttgaaatggaaaggaatgcagtacacagctatgctttgcataggttctgctggattaagcaatatgtgaagcttctgagtatatttaaatactttcattgggcgatttagtctagattaatatcagactatattattttagaggaatttagacagcttggtagctggtgtagtctggtataggacaagttgacaaggcctacgagaggaatttagaatttggacagtttagaattttcatgcgaaatgaaaaaaaaatattttctgaaaataataaaagacttcccctagcaaatattagtatctttagcaattagtgattcttcttttgtttcttttgaaaacaatgtgaaaagatgaccaagaagaaaaaatcttgttgaaaaccacttttggatttctagcttttattaaatcatagtcaatcacttgagattctgtttaactattgccggtatcttgaatcttggagctgttcgcacttacgtgtgctcccttttttcaggacaagaagattatctaattgctctttctatgttgatacatcatgtagtatctctaataagtcctttcaatgtattgcagcttgcagttgagt

SEQ ID NO: 6741 - DNA, 553 bp, Zea mays
  Intron number 4 from transcript GRMZM2G396483_T06 (locus G RMZM2G396483) derived from phytozome v7.0 (chr-ID 1; pos 8 4064163 to 84064715)
aaaagttacactgtaagtatgtcgtcctgcttgcatttcttccatgttccttttctcactgtaagcttagtttttgtgatcagcttccagatagaagagttattaaagtagacactaaacgattccaacctcctgaatctctttttactcctgtaacacttccatttatatttatacataatggtattgtcaacagtacacatagtttccatcagtttgttaatagtgcacctttagattgaatgagcttcttgcagagcaccaaggattaggcattgaaatgtgtggataaaaatattagaggaccacacatcattattatgcaacattgtctatgcacatgaacataattgtatcggtagtaagccgccagcatgtttgaaagttaaaaatgtgaattaagaacgaattatcgtatcctgctatacttatgcaacctaccaagaattagggcattgtagaaaccatataaagtattgagatcaatttgaatttgtctgcctcatgattttttgatacctgacctttatgaaggtagaggacaacattaagg

SEQ ID NO: 6742 - DNA, 814 bp, Zea mays
  Intron number 2 from transcript GRMZM2G009871_T05 (locus G RMZM2G009871) derived from phytozome v7.0 (chr-ID 4; pos 2 37045290 to 237046103 reverse strand)
tccttgtcgacatcgccaagtcgcaggactccgaggtaaccatctagctacaaatctttgcctgtagctgtggaaacctgcctcattgcgatctattccacgcattactttggctatggtagttgccacttggggcagacagttaagaaaacaagaacactaacctgttaatcctaaaccatttcgtcacgtttaatctgagtgaagtggaatcgggttgttaaggcgtgatgggcacacgattttggtggaattactcacagatacatagtttagccatggatgggttgtgcagttgaggtgtaagccaaggaattgcaatttgaacagcgggaatgatgacaggcctaatccattgctggccaacccactgatctcttctgtttggactaagatgtgtccagtgttatctacaggcatttggctcaatgcaatagtgccgtagagcttttgtaccatgaaatgctattgtatttttacgttcttaaaatctgtcctattttttttttcttctgtcgcttcgttttgagtcatgcaatcctacgctaaactgatgcatttgatattcacagaagtttcttattttctgttttagtattgcttgcagtttttatttgcatgtatcaaatattatgtatcacaacagttgagtttacatctagttctgtgttattcttataaagcgacgctgttgcataatttgcttgcagttttggctttcattgttttttgctgtacctatgtttgttggtttatagagcttggacatgcatattaagctcaaccttaaatttcttatttgctcaggtcggcg

SEQ ID NO: 6743 - DNA, 673 bp, Zea mays
  Intron number 1 from transcript GRMZM2G452875_T01 (locus G RMZM2G452875) derived from phytozome v7.0 (chr-ID 1; pos 1 92764451 to 192765123)
ttcacccgctggtcagtgatacactatcctgttgctacttctctatgttttggtgagttctaacggaatggaggagctataaactcattgatcgatgtgtaagacatggaaatggcttgggtaaaatagtaacacttgttgaatcaaatactactgttgccgttccccatcgtttggtgtgtttagactggatgtgttgggcagatggtgcccaaagtttatgagacacggaatgagtacaaataatctgattgctgtatatacgggggtaaaatttcaacagaacatcggaagatggttttaggatagcatgtgatcgtgtgtataaatggaagaggaaatgtgtaacacatttttgcaaggatattacctgcttttgacaaacaacagtgaatcataggcatgttgatatgggagaattagtatgcatgttggtattttcaaagctgaaggtagtcttttcatgcacaacgatatgtaccatactaacaggtgaaaataaaatcagtgtggtgtttttcttttaaaaaacataggcctgctctaagtctagtgtttatcttctgtatatttttgttagtgtcatgatttccttgcatccgtatccatttatgagttttaacttgttttttgttgcaggaaaacctgcctgttgaatagttcgttgacagaa

SEQ ID NO: 6744 - DNA, 846 bp, Zea mays
  Intron number 2 from transcript GRMZM2G145380_T01 (locus G RMZM2G145380) derived from phytozome v7.0 (chr-ID 1; pos 2 91371204 to 291372049)
tcgcaacaggaagaaaaatcccgcattccaaacaggtagtttttttgtgctctgcaaactttgatcagcgacgctcctgttggtaccactataagaccggatgcctctactgccgttgatcaggcccggaacgagactaaaatagaggctctaaaattacaaaaataatatgtacttaataatgtatacttctgaactatagtgcttacctcatgttctactaaaaagcaacatccgtcttgtgtttcttgaaataaaatcttcaattacgccttcattaaatgaatcccatattctttgatcaaatatatcagactgaaaagaagtattaatatcatcgacaatattagcatctggagtttcatccaggcctgttgcaggagcctcgacaccttcatctatttctgtagcattaccttcattagtctctctcacaacatatctatgagactgaaaagactattagactaaaaagaagtattaccttcgtctactgcattgggagcatccacaacctatattgggtcagggtcatcaccatgatcgtcgtcgatattaacaccattagtttctctcacaacaaatctatcaagagctcccttttgagattgagccgctgcttctaatctttgtttctttttacgtttttcagcaccagaatcatacttcctatttcgtgaatacatgatcctaatccctatggtacaaaccaaaaaataattagttggatacataatcctaatccctatggtacgaagtagattgttcaatactcaatagagacgaacatgttcgcttgtatttttttcaggtcttcaaaactcaggaggtcctcgcgacgttcct

SEQ ID NO: 6745 - DNA, 698 bp, Zea mays
  Intron number 5 from transcript GRMZM2G077214_T01 (locus G RMZM2G077214) derived from phytozome v7.0 (chr-ID 1; pos 2 54990480 to 254991177 reverse strand)
tctacagattacattgatttgcttcagatacactggtcagtgtcagattgttccacttgtatagttatatgcttgacaaaaacaatatttaggttcacttttctgttgtcagtcttttaccaacatacatagaaacatttcattagacaccagtatggattttcccccctcgtacagaattatgccaatttttttaaggaaactgatgaatgtattgatcaggaaagtcaatatgccttgtataatgtaaaatcaggtctgaggactcaggtctggaggctgaaggtgtctttttctattctatgcttcacataaggttcagcatgttctcatattgctgagtaatagagataaaatacaaatgaatatattaactgaactcttcttggacttctgtttgtgttccttgtaaaatataggttagaatatgtgagatatttaaccaagtacatttcactatttcagttcagtttatttctcccgctcggtcaatttgaagtagccatttcttttttctttgcctttgacaccagctttctttgagtgcagttttatgtgttctttatctggccatgtaaattagtttgaatcggagttttttttctgttagattgatagatacctatttgcaattcaactgaatcaaataagcattcttggttccaaagttattctttatgtctgcaggccagataggt

SEQ ID NO: 6746 - DNA, 703 bp, Zea mays
  Intron number 2 from transcript GRMZM2G461793_T01 (locus G RMZM2G461793) derived from phytozome v7.0 (chr-ID 8; pos 1 61191327 to 161192029 reverse strand)
aaggtgatcaccagcaatcctttttgtgttaattgattaataatggtgtacatggatggcagtgccaccattttaggcagctgcaaaacatgtttcctagtccctcttgcttccaatgccacccaagcactaaactcagtatgtcatcacatatatggcatgacaacttgcaaacgagtcaaatccaaagcctctttagttttagcaaatcaatcaaattcggatgctgcactttcccttctatcactagattgaaaaaaagataatattaagttagttttctaagttagttttgtagttatttttctggaggtgactggtatttctgatgtaattagttagtgtgacttcgttgtgattaatcacaattaagaatactgctttgtggagttaagaatactagagtactgctttgtaactgtaagcctgtaagcttgtcttttctttctgcgagaacaaattatggtgggatgtggtgctatttggattaaatggcacgcaaaccatgaggagtcgcaacatttttttggtccatttggtgcatattttaatcttgtggtagcagaactgccagttccttgcaccattttttgtgctatgaactattaaccttgaagggagcctatgcttacaaaaatctttttctgatgctctcatgtttttttcttcctcaatcggttatgcaggtattttctatctgtat

SEQ ID NO: 6747 - DNA, 957 bp, Zea mays
  Intron number 2 from transcript GRMZM2G114570_T03 (locus G RMZM2G114570) derived from phytozome v7.0 (chr-ID 1; pos 2 24378881 to 224379837 reverse strand)
cgctctgccttcctgagctggcttcttgtccgcaggtcaggttcctcccgctgatttcgtttcgtgcgctttgtttctcggaggggatggatccatttgggaatgcaacggctcccgacttaggggcattcatgggggtctgcttcccatttcgttaagtttttcggattcatggggcatgggctggtgcttagctgccattgtcgtgtggcttctgatttgccttttgctgggaatctttactgtttagcctgctttgccctttatgctagaaggacatacttgccttcagcaagaagcataagtctgctggtttttatttgaggcgtgctttatcacgatctgagttttctcctctcgggcaaagcaaaaaccttttggagatttatcacgatctgaggttcttatcgtccatcttttttttctctgcctgcttcttcgaacttgtttttatgggttaggtaggtaatttggtgcctctttaatttttttgggcaaacataaattcaggtgttattcagaaatcaaaccaagcaaatctactgccagtgaatttcgttttaagttataaagtcagtagctaaccacagaaatttactgccggtgttcagactagttagttctgatctcaccaaacggtacattaattgtgctaaaaaaacctcgctgaaacagagactccgctgaaacatgacgatttactaagtttcaatttttgatattttcttagattcctttcactgctcacagtaaaattagttcatctgtcagtgcaaaccatgtgccttcatcttcagtgttcagttcaattgctcaaataaaaaatgcgtagcctaaatttgtcagtttaacccatctaccctgaactctgagatgttcctgagttggctgcctttctccattagatcaaattaaattctgttggcaccttactatgttcttggaactgcaggatcc

SEQ ID NO: 6748 - DNA, 925 bp, Zea mays
  Intron number 4 from transcript GRMZM2G348729_T01 (locus G RMZM2G348729) derived from phytozome v7.0 (chr-ID 4; pos 4 102033 to 4102957)
gtgctttagtaagttctagattaatacataattgaattacatttatagctttcttttgctgtttttctttactcaactaaatcttgatttattagggatcatcatgtaaggtcaggtccccttatatagaatgtgattgaatgattgacttagataagtatgtcaacaacaactgctttacaatggtcccttaattcgtcaggtaaaatagtttatgttgcccttcactaagctagtctggtctggtcatagagtttccatacttgtctaggatgtgataataccggcaaacactgtgattgaaaactctataatgtacttcttattaaactccaattgaaaactctataatgtacatccagttgaagtttggaaatgaatagcattaaaaaaacaaatatatgtctaatatgtattaaaggagaagagttcgactgaaaataccatggctttattgccaaagaatattaaaacaatctattttgaagaccacaactttgagattacataaaaacacattgtgaagtttaagcctgacctgatattcatattgaattgtaaaagcacacgaagacataatgatgatgaacatgaagtttagggccacagtcatagtttccagcatagcagtagtggtaccttttcccgagcaagatccgcaagaacaagaacatattgattcagagaatgaagtcttgtaatataatcagatggtttccctcgtctacaatccacagtggctctcactttctttatcaatttcagattgctctgtagatcacattagacacaattatttagtgccagctcgaacttttctatatacttccaacatttcactttggtattttgcaggctacttggaagtactatcatttatgtatggattaatggatacctttccctttttcttttgaaggtgaat

SEQ ID NO: 6749 - DNA, 951 bp, Zea mays
  Intron number 1 from transcript GRMZM2G139434_T01 (locus G RMZM2G139434) derived from phytozome v7.0 (chr-ID 8; pos 1 27881305 to 127882255)
gccccaaattacccaggtagcatgggcatgatgataagcttctatgctaattattaaagattgttacggctagcctatatagaaggttgtaaatacattgctttcttttaacaagaaacatacctgaagtttccctatgcaagggatctgtgaccagagcctcctccgtggcttatggctttatcaagtccaactgagttgagtggcatctaacttaccttgagcctctattcatattaaaaagttgtacaaacttcattttgaatactgtaaaaagattcttacttcaggccttattgtttgattattgattattgaatagtatgcattttgattgcttttttataaagttctctgacagttccaatgtagattttctccaaaaagggcatcactagcaaattctggttgtactgttcacctttcgtctttctctttacaagatgtaaattagtaatcactggttcattttaatgtcaaatgcagtctgggaagcagtgccactgcagatatactctccctaatgaattgagaaatggtttcttttcaaatcatgagctaaattcagatatttaagatacttactttgatttgaagatcacaaacatagctgatgctgttgaaggccgtataaatgtgacatgcagtaatggcttggtaggatgttcgtgtactttgtccttatgtgtcatagtttactccacatattattggtttataactgtctttgttcctttctttttgacaactatgccgttgacaaagggtgtgatacgttggggttgtgttttgatcttttgttctatattggctctgtgtttgttgtgctcattttttattattttatatggttcatagtcaaattaaataacaaataggaaaatgctattgcttggttttatatttatggtcgcagacaaaggtgagctgtacgaatccggttgctgttta

SEQ ID NO: 6750 - DNA, 971 bp, Zea mays
  Intron number 2 from transcript AC204000.2_FGT001 (locus A C204000.2_FG001) derived from phytozome v7.0 (chr-ID 8; po s 139931029 to 139931999)
gtgtcaagggcctgtgcgtcgtgggcgccattgacaactgtacctcccagctccccacctatgggagatcttctcccccataatgtaatgtcgctactctgctacttgtatgtgcatgctccaattctgcaaagttttggacaatttgtcattaacagtcatgaacgttgcttttctgcagtgcagataatataacacaagcgctcatgttcctctcgcacttcatcggagacatacactaggtactacaaaccgcaagcaaggtttgatgtgctctatttggtgtgtttgatcagatcaacaatgtggctgatcgctcatgctactgactgctaacacaactactacatgtactccatagccacttcactccgacaaaggagggaacaccgtcgacttccaatggtacgcaaggaagactattttacactatgtacgtacgtcaaatactggacatcatcagtcatgatcttgaaatatataggaacctggatgctagggcatgctctgttttgttcattaattgcccggtttggaacgccagcatcatctagccgactaaagacgacttctatggagacagcgtagccggttacatcgacacactgaagaaaaacataatgatatggaactaggataagagttttctatagatagagagaaagagagaagctaaatgttaattattcagacctttattcgctcggtagcacagagaatggtcggagaagtgtccagctgggaagcatgcggcaagaatcagactgtatgtctagatatgtatatatgctttgcttcacattcagattttttgtgcttgggcatttaattgatctttgtatgttgttgcatcgagtgttttttcgttgattaatacagtaattttcataattttctttatgtttcaaatccttcgtaaagtaagattagtctctgagtttttgactggttataaataaatatcgcaagat

SEQ ID NO: 6751 - DNA, 665 bp, Zea mays
  Intron number 1 from transcript GRMZM5G863970_T01 (locus G RMZM5G863970) derived from phytozome v7.0 (chr-ID 1; pos 9 9181721 to 99182385 reverse strand)
ttgttattgcatcactaagcagtaagttcccttttcaggtctataaagaaagtgtgcaagttctattcttcactgtttttttgctacatttactgaaatatgacctttgttcatatgatctactggtagttcttcgacctttcaatttcacaaaacttgcaactatttttatgctctgcatcctaccaaaagtatacattgtctttctactacttagacctaggtatgagcaagtctgttgcatttctattctttctactacttatacatgcactgcattatgtatttaacttttaagaagatcaagcaggtgcttggtaatcaaagcaccttgctcttccttgtaacaaggcagcaagggcacaagttatattccagacattatccgatgttatagtcaggatgtactaccccatagatggttgtttttcagtatgctgtttgatttccaatgacttcgctaaacttttctgtgcttcagtggaggtcgaaccatcatcttcactaagacaaaggattctgcatcatagctttctggtttgattcctggatcccatgccttgcatggagatgtagcgcaagcgcagcgtgaagtatgtgaattcttcttcgatttaataaccttggcaatcatttgattttcaggtaatactggtgttgctgtc

SEQ ID NO: 6752 - DNA, 671 bp, Zea mays
  Intron number 1 from transcript GRMZM5G861091_T01 (locus G RMZM5G861091) derived from phytozome v7.0 (chr-ID 1; pos 6 7865419 to 67866089 reverse strand)
gccacgacccaggtaaccgaagctcctgctctatgcgaaccaagtgcttctagggttggttcgtcacatctctcactgaaaaacagaatgaaggattagtttttcctagggttaattagttatgtgccattataatttttctggttttgatatatgccatcgaagattctagactggtaaccatgccattaaacttcttcttagatttgcaatataccattttataccgtttttgttgaatcaggtccagtacgcgcaagtgcaaaaaatgtcgtagtatctcaaatcatttttatttaaaaacatatatttgtttctagaacaaatgagaaacatatggttaagagccaactctaattctattcagactgataacatgtggagcagggaaatggtgttatgtgttttatggaggttgatctaactatgtttaagtgagttctgctttcagtagtttgcactttgcagttgtgagtgagtgggctagaaagaactatattttgggatgcagtgaatttttttttcttttagcatccaagcaatttttttcctgtagcagcttctatgtgcttgctgataatctgactgtaattattcaatcatgtgagattggagaataatcggttgatgttgatcagatcaaaatgcatatttcaaacagacggctactt

SEQ ID NO: 6753 - DNA, 976 bp, Zea mays
  Intron number 5 from transcript GRMZM2G165993_T01 (locus G RMZM2G165993) derived from phytozome v7.0 (chr-ID 1; pos 2 30954978 to 230955953 reverse strand)
tcattgaacgaaattgtaagttaaatttccctccgcgccttgtatgatcgatgaacattcactgctgttgtatcttccctcatgctaggggcggatccaaggggtgggccatggccccaccttaatttttttaacctcttatacctaggtttaggtacacaccaaaataaacaattttttgtatagttagcgtggacaaatctaataaaaactaggttttgatctatttttctgtcgacgcttcactgctcagtccactcttcacctgagccatttgattctcttccctagcgcaagcccagttgtggctcactcgcttcttcgatcatcgactgaccagtaagtcggtgacctaacccgcctgctgcagcgcaccttgccttctcatcactcatcagctcgtcgtctcgtcaggatcctatagacaatgttgatattttgactcctagtccgcaccagtagatgggcaagttgttggtgggaccgtggcgtcacctgtccctcgctgactcattagagtcccatcgcgccgttgcaacacgacaatgggtgtcgcttgccgtcaccgtcatctatcgctaccttgcttcctgcactcgctcctcctagctgtcgtcgtctcaccaacaccatctcacgacaatttcgatgactcgccagaacgacgcgccgatgcggctgctccgccctagtgcctcgtcctcagtcagtgcacctattttttttctctctagctctccttttggtagccaaaaaagttttttggtattcatatcattttggaaacactagatattatcattaatctatatttatggtctagtctggtgatttgtctcttgcactttcggccccacctagaattttgttctgcgtccgccactgcctcatgcagtcctcgcacatctcatgagtttttcctgcacatgttgtgttacttgtagctgtactgacactcttgctatacaggataaat

SEQ ID NO: 6754 - DNA, 757 bp, Zea mays
  Intron number 2 from transcript GRMZM2G450602_T01 (locus G RMZM2G450602) derived from phytozome v7.0 (chr-ID 4; pos 1 51737846 to 151738602 reverse strand)
cgtgctgctaaaattattggtaatgtccaaagttccctatatgtacaattctatgccttgatctgttatgatactttccaccatgttccgaccttaccttttgatatatcttagttagaataagttgtggacttaagaactgtgaacagagaaagtttatcttctagaatttacttgtttggatttggatgcagctttgaaagaacaaataaggccgagctaatagaaaagaaggttgtatgtttagtggacatataaatgggtcagttgtaaatccccaaatatcttgagtaatgaaggtgggacatataattaaatagcggacttcaatacaaaaccagattatgtagttggcgccgtagcttgaatcggattatttgcagctgcaataatgatgaaggttgaaggatataacaatctaggtgtatggtgtagttatgtgattgcacttgcagaatgtttttcttttttggattttcctttgatagcatgactttttctccctttgcatagtaacattggacaaaccaatgacaaattggtagatgtagatttgcccgacattgtgatgcactgctgcatcatattcaataacagatgtactacagtatatagataggggatttatgttgatttttgaatctttagtcataaatatatctcgcctaggcttgttgttattatgtcacagcagtgatctgattgcaatgccttttttctagggggcattgtaaacgattccctacgtcctcaaatt

SEQ ID NO: 6755 - DNA, 584 bp, Zea mays
  Intron number 2 from transcript GRMZM2G174487_T01 (locus G RMZM2G174487) derived from phytozome v7.0 (chr-ID 4; pos 8 6680142 to 86680725 reverse strand)
caaacgattatttcgtgcataggtgtgtggaattctgatgacatgttttagaacatcactgcaaacatgttgcatattcagtgaaatgagagtccagttaccttgtgtctcaaattaaggtactcgagtcattcctctattcagtataaataattgctgactttttttaagtaaatatattttgactttggtcaactgtatagaaaataacaatcatgttataatactaaaggtcatcattgttctattatataaaatatacgaatcatacattacctcttttattatgtgataatatacatgttaataatacaacactaaatgagcatgacaccaattccaactctttttgtgttttcgtgctctgatgcactgacttgctcatggtctattattgacttcagtctacctgtatttgtgttcgatgaggtcaggtggccaacagggttcggaagagggtgtccacgtgcgtagcaagttgggatttatagaaatcaccatatgagacacttggtacgatcctatgctctctgtagtttgtgcgatagctatactatgcatctgttttttgtgtgttagttctc

SEQ ID NO: 6756 - DNA, 776 bp, Zea mays; identical to SEQ ID NO: 5080
  Intron number 2 from transcript GRMZM5G876644_T01 (locus G RMZM5G876644) derived from phytozome v7.0 (chr-ID 4; pos 2 15684826 to 215685601 reverse strand)

SEQ ID NO: 6757 - DNA, 406 bp, Zea mays
  Intron number 2 from transcript GRMZM2G079098_T01 (locus G RMZM2G079098) derived from phytozome v7.0 (chr-ID 4; pos 2 3773203 to 23773608 reverse strand)
aagttatcttagccactgttgctttcatacttgtggtaattgttttgtttttctggtttcttctacattttctggaacacttatttgcacagttagcaccgggcatcatagactgctgaaacaccgttgcttttgagtagacagaatagtatcaatagacttcatgctcttatgttttcttctcttatacatgtgatgtgacacttaggtacaaaatgattatagtcccctattatggtatgaattaccttacaatttttggtatatagccatatcttacgaaattcaaatgtatgcatctgtgtttatcatagtgacaagcacacactccaggatgcctgctaaatcacagtatttttctaatggtgcagtacatccacataatcagaggggaggagctttaccg

SEQ ID NO: 6758 - DNA, 918 bp, Zea mays
  Intron number 1 from transcript GRMZM2G700390_T01 (locus G RMZM2G700390) derived from phytozome v7.0 (chr-ID 8; pos 1 2788662 to 12789579 reverse strand)
tagcagaagaatcaacatcttgttcaccctgtacatagaatgaaagaggacgtccaaacagttataaaagagtagttaattcatcaacctttgtgtacaattgttctgggagctaccaatttggtaaatggttaattaagaaaagttgaacagtgaaagacgggcaatgtaatgttctaaaaaaacgtgaaaaattcaacagtgctccaaacaaaaaacaactttgttgattaagaatacatgacaaatcatatgttctataaaagtaaaaaaggatgtgtttggcagatcaaccattcatttgcacaccaatttccaatgcatttgacaactgtgcacaattcattaaagaatggatcataatgatgacagttttaacatcacaagaattttttgatataatcttttgtgtgggtccaaaaatcttcaatttcaattaatgcataagaatgcatgcagaacatcgtttaacaaactgtataagtagatgcatccgctgataacattagtgccttaccacataggcatgtcatacaacacatgtttcttgaccaatactaaccatcatacaagttggtccatgtaacactacaagcactaaaactaaccatgtattcactgacaaaattggaaaagaaaaatgacatgaagaaaagaaaactgtgaatcatcatgaattcatgatcaactatagcagcatttattagagaaacaacgaaccagaagctctgaattaagaagtggtaacagtaaagaagggtcctagcctccaaactgacctgatagcatttctgaaaatcaggtgattgctcattggagaatatacaatgcgctggattgatgcagtcaacatttccattgcagcgtaagggtgctgatgcaccagagtagttgctacattgggagattgaagtgctc

SEQ ID NO: 6759 - DNA, 986 bp, Zea mays
  Intron number 3 from transcript GRMZM2G345725_T01 (locus G RMZM2G345725) derived from phytozome v7.0 (chr-ID 1; pos 2 23326024 to 223327009 reverse strand)
gaaaagtggaacccatatttaaggtatgtctagctgagtagaagcatgcatcttatctcaagattggatctgtgctgtcgcttctactaggaactttggtatgatctagtcatgcttcccaagatcatatttagtcgggtgtttcatactcaaagatgaatgttagggcaatcttcattcaactaaacttgatgctgtgattatgctacatgttccctgattgtattaagatatctgtttcaactgaaaaaacaatgaattacaaagtgcctagtcataccaacactatctagtttctagtaaaatacaaacgttggcagtgtgtaattaaaatggacaggtaggtgaagaattatgtataattcattggttcagcctgcttacagcatttagtgtgtatttttataatagacaatgttaattttatggtttcatactttaattatcgcactgggatattctttattatgtataaatttgagctgggacttatgctatgctttagaagcaccagcatgcatctagtggctgtaaaagaaccatgttatctatatcttaccaggactcattataaatgttctctggctatgtcatgtataattggcaaggcatctagttgttatcattcatatatttagggaaaatggtattgaagctttggaaagctgctccatgctcctaattatagttttcatccaagattctattggaaatgcaaccctagtaaactagttgagaaaacatggtgtataaatgaatcaagactttgttgccattatgtagatgtctgattcaattctacttagcccttgaccccttattatttgttcagactgttcagatatatttaggactattcttgacctgtggtgccagtcatagaatgctgaagttattcatcttttttttatatacaaagaaatatatatcactacttattattgttaatgcattctgtgttttttcagtatcttaggaactttggt

SEQ ID NO: 6760 - DNA, 1039 bp, Zea mays
  Intron number 1 from transcript GRMZM2G345725_T01 (locus G RMZM2G345725) derived from phytozome v7.0 (chr-ID 1; pos 2 23327984 to 223329022 reverse strand)
tcttgggacccttcgccggcgacaagcaccaccaggtactcccaaccccgtcttcccttccttcggtgccaaaccgagcacccaaaccctaactcgctatttgtattcggatctggtataattacaagtgcatatgcatatataatgcgcactagctccgattgttttgccaaatttatcgggtgtacatgtatacacccatgtactttactaggtccgcccctggtgtatgatataataagtgggattttattcgagtccagcgagtcgccgtttcctgcggtagggaaaatatacgcttttgttcttgccactaaatttcagcatgacctattagtttctgcaatgttactgtgaaacaacgacaataagatatttttgtgcttgtggttctcgagcaactgtaatttagactttggctgtgtgattggagcaagctcatctgtcttgtagctgtacctgagttgttggcgacacttttaaagcttggatgtgatagcgtgtttgttaggaattgcttggtaccttctaatatgaaacccttgccttcttgtttctaaagttcggtagaagaattgtttcttttctaatattttgaaaaaagccagcctgtattctacctaacatgttgtttctctaaggctactatgtgatctttttgttagtcacaatctattagttagaatcatagagatccttagaagcatagcaaaatcactttctgagtcttggtctttcctttcaagagtggacaatcagaccatagttgatatgcatcaagcactaccagtatcttatattgtttgtgtaatgtgtatgatttttttcatggcttcttaaactgtatgaccctagaaatctaaacttttggggctattcaggtgcatgtacatctactaacagtcatttaaaaacttataatattttagtcagattagattacatatgcttttagcatttgttttattgtttaataatttagaacatccttttgtcaagctgatgtccagtcacaaactcacaatttacaggttcagtc

SEQ ID NO: 6761 - DNA, 1014 bp, Zea mays
  Intron number 3 from transcript AC166636.1_FGT008 (locus A C166636.1_FG008) derived from phytozome v7.0 (chr-ID 1; po s 19981516 to 19982529)
tgaccggtaagttgaccgtctccaaaagatagaccgccagcgtacagtctgtgcctttgctttctacactaatgcagctgtaacacgccaattctgatttcttggaagagaacatatgtgctacacatgataatttagtacatatagtgcatatattaaatcatcatcacttatcttaaatctaatgtttcatatattttgctaagtacaccctctgtcgtggtgggatatagtggtagaagatgttatttgtaaattataatgattaatcaaagatgttagacctgatatgcatagtgatgatttaatatgtgcaccgtatatgtcctcttctttgaatagaaaatctgaagcttttttttcccgaaaatatggtgtattttttgtttagaaaatctgaatagccgctgtttttgtttttcaatttagaaaattcagcatgttgaataatctccagacgaaaggtccatgcagcaaggcacgccgatgatttccagcttttctgttttagaatactagtacgtcgtcgacttgtttgtttcaaatgacgttttattttgtggaggcctcagtcaatataatagaattaatagttagtagctaaaattagttggatacatctaaacatcttggctaatagtttaactattagctatttttaataaattaggtttaagaagcaatccagttttttaaaaaattagttttattttaactacgagaggttagcttattggtttttaagaaactataaatccaatttctataaattgagatataaactaatatgtttggaaccaccctaattttcataagccaatttcttaaaaactgaatggttccaatcagacccttagttaatagttagctagctaatttcactagtaatcttttagctaactatttattagatctagtgcatttaaacaccctctaaatataatagtatccagtctcatctcatgtcgttcttttgcagacaggcagtcattcttgaacacgtcaaagtggatc

SEQ ID NO: 6762 - DNA, 801 bp, Zea mays
  Intron number 1 from transcript GRMZM2G421556_T01 (locus G RMZM2G421556) derived from phytozome v7.0 (chr-ID 1; pos 1 93745034 to 193745834 reverse strand)
tgtttatcgttgtttttgtaggtgagaagtgcttatcaattgctatgagctactagcttaccacttctcgtaatttaggtgtttgataaaatgcatgtttaaggacagattagttgtgcctgattcttcggtaatagagtgtcattgattggttcctacatggcgtggtattggttctgtaggtctagatgagtgtcaagatacacaagcttgacctgaatcctttgctaaatctgaaaatagaggtgatcccgggtcctatccttgtgattggtatgctgcgcacatccgtccaaactgagcgtgtgcattgaccaaaaagcagccgctgtttgattaactgtataaagccaagctgaagctgcacccgtagatccagcataggtaaaaaatatattcctttgctgcatgcgcgcatacgctccgacgctcagtttctggcgggccaccctcgctagagctgagcgctgctcgtccgcccatccaatcagccggtatgtgtctcggttgatagtcgtcgagagtgtttttgccctatttcatttgctgaaaatgtagttatcttgttaataccaagcattctgttgtttccttttgagataaatattttgttactggttttaccttttgtcttctcttcttgattttgttccagaatctgcaggcggtcttagcacggtcatacttcgtcacaggtctcaatcttcttcgatgaactgtcacggggtacgtactagagcttgattaattatctgagaacggaacgcacgtgtttcgtagggaatctcacgctgagagctt

SEQ ID NO: 6763 - DNA, 829 bp, Zea mays
  Intron number 3 from transcript GRMZM2G115766_T01 (locus G RMZM2G115766) derived from phytozome v7.0 (chr-ID 8; pos 1 50000408 to 150001236 reverse strand)
gtccactgtaagacttgggtgtacatcagaaagagctacacatttttttcttctgaaccactgaaatgacgctctaaagttagctaattccatctgatactctgttcagcaatcagtaactagctctgaaatgacacgctaaagttagctagctaattccatctgattctctgttcagcaacaaataactagctagtgtggccaaatctacttgaaactgtgctgtactttctgtttgatttgcatgtcagctaagatgggtctgaaagccttcattcgacctccactggccaaatttcagaaatagtgctttctagtaagagtttaagatagagacatgcccctagacttttatgctctgcatgttgaccagtatgctccgtgtggcttatatgatgaaaatcatacaactttggatgcttggtgctcttgatggattcttgttcctgattttggacttcaattatatgttctcaggcacgttaataaaaaatgtactccaaatagcaacaggaattaatcttgttctgttccttttaagttatgctactatagctgacgaacaactatttgggaatggttggagcctagttatttgataattctaaaacaatccatactatttgccacatgcaagaaatcttttctagttttcttgatccaattgttagtttttaagcattgctgtattattttgtttggaaacataaccttcgaagagcatgtgtttcagttgtcatgcaaatgtatttccctttttatacgcctgtggtaacagggtatgatggttgcaggcagaaatctctacttccttcatttgaatctgcag

SEQ ID NO: 6764 - DNA, 622 bp, Zea mays
  Intron number 2 from transcript GRMZM2G118534_T01 (locus G RMZM2G118534) derived from phytozome v7.0 (chr-ID 4; pos 1 6629604 to 16630225)
ctcgcattcagaagcataggtatgccaattttttttcttaatctgtgagaagatatcttaggctccagatcaatgcccacattattcttatccacaacttctcaatatgttggactgtaaaagagcaaaagcgcctagctgcataatcctgcccaagacacacccagttgactgatactcaagttttactataaaaacattgttttttactaacttctccttgtagcatgtaaaccgcttacatttcgtatgactgagacaaaaacaaattatttatatacttctcatagtgtaagcccgctatcatattatttgtgatgcaaaattgtgctggctttgctttactgtaatctagcttagaatggcaacttacagttggataagcataatcaaagcaggcagttagcaacaaaatttccttgtgctagatattttgcaacactaaagattttgtatttattcaatctagatttgtctttgtagctttataggcagcactgttcgtcgattcaagctgttagttaaatcaatcagggtccatctcaaaagtttcatggtgaaaatcatacactttgtgacatgtgttatgtccctatcttgtttcagtgactgcatctaaact

SEQ ID NO: 6765 - DNA, 1051 bp, Zea mays
  Intron number 2 from transcript GRMZM2G078862_T04 (locus G RMZM2G078862) derived from phytozome v7.0 (chr-ID 4; pos 2 30932369 to 230933419)
gtcgtcgtcgtcggccagccgcaccgctgccggaggtaacgtcgtcgtctgggcgcgggtccggaccaagcagattcccctgatcgagagtagctagctagctggggcggcctcgccgtcgacgacccctagctagctccatcggcgatcgatgtcctagcttgtgacaattgacaagacgagagaacatggatgttttcgccaccaccacggctcttcctcgaacaagtatcactccaaactgaagtttctacacgtatatatagttccaaaaacaaagtaaattgcatacatataatataggcttcatgctagtgcgactatggtgcctacgaaaaattatgcaacagattaatgtgtttatataatggatgtacacatgtacactggtaaaaggaagaagagatcatgcttgtctcttacacgtacatactatcgattcaagttattcatttgaattagaaacagttttttttcatagtaaatgaactagaatcggatacaaacttaattgcaatttaaacctgataaaattaacattttttccagaagttctagacggtaactgtactgtgactgttctacaggatgaaactccagtaccctcaattgctgcggcagttaatcgacatagtcaggaggtttgtagtttaccagcggaccctcagccaagcgacactaacaactcgcagttgcacaacttcatcgcaaatataaccatgccaccagaaccccctctgattcaaacccttccacacaacaatttacccaacacagcaaatgcaatttgggtttcgccccaacagcatataaataggcctggccaagcttccacctccggcaagagatatagtgttagattggctgcaaagaaaaaattaatgttggggcgttctagagattcaatatccaaagctcaggatattctggtagctaaactatacaactcaacaacaaaaaataatctaggctctttggcttcttgctcatctaatgaagtcaatcattttgaacagattgcaaggctttttgcaagacctcttaccaagat

SEQ ID NO: 6766 - DNA, 833 bp, Zea mays
  Intron number 1 from transcript GRMZM2G181073_T01 (locus G RMZM2G181073) derived from phytozome v7.0 (chr-ID 4; pos 8 078877 to 8079709 reverse strand)
gaatccggattgctgtacttccttttgatgtaagctcttatgcttaaacaaagttcactgttacccacatttttttgattaatatttagttattttcatagtctaaatttcacatcactacctaactcattgcttcttatcagtatgttctgatatcttgatgttgattttttgttgctcaaatttgtcacacgctattcttgtagctatatatggcattcaataattagaaccagaatgaaagctttatccatgtttgagcatttggttgagcctgaccatcgtcgagttgtggaattgtatcctctttgtcatagttacactattttgtgtgctaaagagagatattacaacctgcagacagaattatatgacattatgatcatcaaattgacttgaatgtaattcttacgtcatatataatgactagagtctggagatagtattattacataaatacgtatctgcaacctggtcgtgccttgctctatttttcatgcctttattttatagttatttgtagcctgataaacttaaaatttgggttggtaaagaatgccttttttatattcaataaattagttcagttgttttggtggaatgcatatccataacattatttacttgaacgcacatgctactttagatgatatgattgcttcccagggtcagtttgttgatcttcctttgttatttgccttaatctggtcttagaaacttccgcatttgtttggtttatgaactagtttccaagatcggagatgcaatttcatactgtgcaaaagcaattttgctatgcaagtcacgcatatagaacctgaaaagttccaagg

SEQ ID NO: 6767 - DNA, 609 bp, Zea mays
  Intron number 2 from transcript GRMZM2G080889_T02 (locus G RMZM2G080889) derived from phytozome v7.0 (chr-ID 8; pos 1 05576171 to 105576779 reverse strand)
aagtgggaagttcatcatctgtttgtgagtatgaaaaccaaactttcagacttgtacacctttcttcttccgagacgacgtttggctcattaaactctagctttaaagccttaaaggtgttctgttaggaccccttaggcatatacagtgtatttgtactgtaaaagtaaaatagatgtgctaaagctatactgatgatagcttgcatatttatttgcactggtagtatttcccttatgtttctttatttattattacgaggtttacagtatggttgaaaggtccccaaaacacatgcatgaactttgtgtcatttggctcacttactactataccactggtgtttaaacttattcagtgctcctgttactttatagtaattatgtaaggttgttgaggttgtacttttttatgtgtgggtaaaatttgtcttgaaccagtcagcactcaaaacttggtttagtttagagctgttctgtgcatagccctttttgttcttcattgaaccaagaatattttgttttagatattgttgccatataataccattaacatttcttgattttacactaattgagttagctgttgccacaaattagggcgtgatat

SEQ ID NO: 6768 - DNA, 845 bp, Zea mays
  Intron number 2 from transcript GRMZM2G179504_T02 (locus G RMZM2G179504) derived from phytozome v7.0 (chr-ID 8; pos 2 520544 to 2521388 reverse strand)
ggtttcaggtaaggctcctgcttatgtccctgtcgagaagttccatttatacgcgtttgctcataaaatagcctggtcaattttctttggtgacaagtgcagcagattgggatcgccattttgtttttgcctgcttagaatacgcgcctgcgccctgactgaattgctcctttttttttttgcattccctgatatttgtagtttactaactcagaaagtcaggccttccatagttgcgcatgattgtataagatttaccgtgctcaaagccatatccatccaaattttgtgtgaatcatactaaatttgctctaaccctggcaattacctgtatattgattcaattcatagagtgaaatttaataaataaaaaatcctcgaacggtaagacaaccctcgtgcattttgctaagaagacgcccttaatttgaatagtgtcatacttctcaatagtttcagtgttagtcacatctgtatagacttgttttggccacttgatgcctctccaccttataccagacaaatctttagagtgaatccacatggcacaatgtcttcattgcgttattgtattctgatagggacatggagtacttcagcatgtagtccctctctgttgtctattgtgaaagattgcagaaagcgattatggatgtttttcttgcacatagctactgagattaatacagtagataacattcttcctaagtcatccccatatattttattctgaaactaaattctatttatacctatcgttcacataagtaataactgtgctccttctgattgaaattagcaatgatacatacaggcaacaacatttatagagcagcttgtagaag

SEQ ID NO: 6769 - DNA, 766 bp, Zea mays
  Intron number 1 from transcript GRMZM2G122850_T01 (locus G RMZM2G122850) derived from phytozome v7.0 (chr-ID 8; pos 6 7592 to 68357)
catcgacatcttcttcaaggtatacgtaccatcgccatcccaatccctacccccagattgagccagtaccccacaacaacactgttgaacattttcggcggcccatgcaattttcggtggcccacctttagccgccaaaaattatctgctatttttggcggcctgacacagccgccggaaataaggctattttcggcggcctctgacacagccgccgaaaatagccttactttcggcggctgtgtcaaagggccaccgaaagtaacgctattttcggcggctgtgctaggggggccgccgaaaatagtctttttaaaaccgacgtcccttcttcttctctgttttcctctctcctctcccaaatcagcccacgcgcgcctttgtccgccgcccgcacgcctgcgcgccgcccgcacgcccacctgcgcgccgccgcgccgcgccacctgctgcccaagccgctgctcgccccggccaccgccgcccgcgctgccactcgcccgccgcgccgcgctactcggccgtcttgctgcccgtcacttcgagccgccactccgccgtcgtcgtcaagtcgccgcatcgagaggtattttttgcatagtttatttcttattttcggcggttgttatttagttgccgccgaaattagtatatatttgtaaatgtttgtttgatttgtgtgtttgattagtgttattgtttaatttgatttcattaatatattagtggtatatgtggtttaggtattggcatattagatctagca

SEQ ID NO: 6770 - DNA, 849 bp, Zea mays
  Intron number 1 from transcript GRMZM2G423851_T01 (locus G RMZM2G423851) derived from phytozome v7.0 (chr-ID 1; pos 5 3949334 to 53950182 reverse strand)
cgggcacctggcgctcccggctctgcctcccagacgtgagtggttctcgtcttcttcatccggggactctagtctagggtcttggggttgggtttcttggattctgggccgtctttctgctctgttcttggttgggtgaggcgccttgtgctgccccgatggagggaatcagaatgtggtagttctagatcgtttgtccgttggatcaaactgttctccatagtaaataaaaaagcgcttaaattgaatcatttttattaatgtcgcgcattttgggtgttgggcgattcagaaattgccagatttctgaattgacggtcaattgctccctattcattcttgttcattggaattgtcatttgtttcgtccagaaaaaatagacttcgctggggcgcggtgatgtgtgattggatttgttattttcattaaaatagtgcattgggtccgaatcggttcatatcacgcgaacgattatgccatcttcgtttgattttttttggtggttggggtgggggaggggacttgtttgaatggacagtcttctaagtagaatgagaaatgccaagtctcatgatctgtagcccagagacgatttgatcttttgcaatggaaaatttcagagttttttttttaaaaaaaatcaacataaagggtgctaggtggcgaatttaatcaatcttctgctttgtttataccattattagatcaaggtgtacttgcagtgaaatgctcaagaatacaatttgctcatgtttaccagagtatactgcataccatgctattccattgatatgatagttcactgcaaatatgatatttatttcttcatgtagggctttacaagagta

SEQ ID NO: 6771 - DNA, 1018 bp, Zea mays
  Intron number 1 from transcript GRMZM2G420684_T01 (locus G RMZM2G420684) derived from phytozome v7.0 (chr-ID 8; pos 1 25392765 to 125393782)
caggccgaggtgagagcagctcatggttcgcttgcctttttttttcccttccttgcaatgttttggtggcattatgcaattcgtttgggaaatcttgctttcgttgagctagttttgcagtctgaggaaaaccgttttgatactctgcagcaaagtgtaattctcataccactaaaatcagaaggcaacggctacgtttgtcatctatcactatatttagtctgctgaccgattgttagttactgggatatcatgtatattattgtgtgattggttggatatcgtaatcctgaaacaaacagttaaatctaagagaatggctgtttactggtcaatgtggcttggattttatagtttccattttctgggtctgtatatcatctgtgtgataattgcgatgccactgtatgtagtttagtaacttaacattcattattaaacatggtgacgcgttcatgctttgttagctttgttacaggatgtttaggacttcggcttggtggctttagatccattataggactctgctcctaaagttctgttgaccatatagctagcagctcatatactaaaaggcgttgtcatttggcagttcggctggtgcatcaccttgcaaatagcagtcatagactggcctgtggcccgatgagcctacatagaagaaatgcattcatgtcctcagttatatttgctgagactacttttgtcgatgctattcaattataagacattgtgagttgtgacggccatcaacctagcagcacgtgctgtgtaggcatttcataacagttattgtactttgacaactgaactatgtttagacatgcttcgaatcacatcaaccaagcacaacatgataggttatgatgtggtactttttcctggatgctaccccgctatgcgttttgaaggaagttttgatcctcgaattccatggtatctgccttatgtcgtttactaatatgcgcattacaatcacacaggtactcaataagatcgttgaggacctgtttgaagg

SEQ ID NO: 6772 - DNA, 597 bp, Zea mays
  Intron number 2 from transcript AC194389.3_FGT001 (locus A C194389.3_FG001) derived from phytozome v7.0 (chr-ID 1; po s 80182176 to 80182772 reverse strand)
gcgctgacgttaacgcgcgcaactactgcggccaggtagtagatctttctgcgctttctgggttcaaaagttctcatctgtgtgttccagctatcttctgccagttcaaaccgaacaaatgctaagatctatcgtgcacaagtgtccgatttgtcaactcatatgccatggaaatatattgtggcatcaagattcagtttttatgtggctaattatgttgctctgctcagcgatggcataagaaaacctgaatctgttatgcatttgtgcctatgccccagagctgaaccaagattttttcgtagctcattttggcacttctgcgaagggcaggcctggtacagtcgtgaaagtgtgaaactgaccaggtcttgagttctaagcagcctctccgcatttgtggggaaggcctatctcggtttatctcttctacagaccccacttatgttggagcctctgacactgggcttgccttctttctggcacttctgcatgggggataggaattatatttttgttcattctacagtttttatctgtatcaaatagtctgttgattggttgcaattgttttgatgatggatcaagactgcgctg

SEQ ID NO: 6773 - DNA, 950 bp, Zea mays
  Intron number 4 from transcript GRMZM2G112596_T01 (locus G RMZM2G112596) derived from phytozome v7.0 (chr-ID 1; pos 2 53611792 to 253612741 reverse strand)
aaggtatctgttggaactctttcagcacatgccatggtgtacaccatatggcttcttatatatgtttaaactcatgaggctatacacctaggactggttttcttatatttttttagctttttctaccatttttagtgataatttgatttgtgtaaactgaactatatcggaataaatgaagaaatacttactggacacaaccttgctaaactaaaagtacaagtcaaaacactatgctgaaagaaccaaatataagcttgttcttagaacttggttgcccatttttctgtgatatcttttttcttgctacatgattaaacaaaactattcatgatcctttcatggttgcaccaacatttttttactaaatggtccttaacacgcttagggcttgtccggtttggtggtgattggcgggggattaaagaggattgagggggattatatcccttacaaatcaaaagccctcacatccccttcaacccccttggcaaggggattaagctaacaaggccttaagtttttggctagactacaatgatagtttcatttgttaaggtgattggattttgattaaatggacaacaattaattggccattgcactagtttggttcaattgaaactgcaaaccatcaaacatgataccttttgaccaagtttgataaacgccaggcagtccgaaattaaaatgggaaaacattttgtactggtctcaattttaatctatcatctatgagcagtgaactaaatatagctatttagaaatgtaattctttactattctttaatacacgtatgccaattacccttccaagcttgtttaacctctgataaaataattcctggatgctagcatcctataatacttgtaccttttttaactattacatttgctatttctttgtgggtttatactgaattttaattacacatatattttttgcagac

SEQ ID NO: 6774 - DNA, 926 bp, Zea mays
  Intron number 1 from transcript GRMZM2G150429_T01 (locus G RMZM2G150429) derived from phytozome v7.0 (chr-ID 1; pos 2 48467472 to 248468397 reverse strand)
ttgttgttgttgcttggatctgccaaaggtcagttagatgatctcacagtcacagtaacgatggtatgcacttctgtatactactcctacataaagagtacataaattaagattcaataattgagtgaatgctagaattgttgatgctcgtgatactgttctagaagccaccaaatggtttgctcagtaccagccaattcgtagcatattgaatttgttgcaattaataggagataaatattctctttcatcatccagtcgctatacctagattacatggtaaaaatatctaaaaaaacaaagcgactgactgaaaattgatttgtaatcccatgatgcaaatgttgacaataaactcatcatctttaacaattcattcacttctcgtatgatagataactttgtggcctgtttttgagagtgatacttctgaaattatattatgttatattttgaccattgggtactgaaattcttttcttatttctatttttgtggcaatggcaatgcatctatgaccaacaggacacacctcgagttaaagatgacgaactccaccagttagtgcaggatactcatgcacatgattctaccattaccatcaaagaaattgtggataaattataggatactgcagaagcaatggaaactactgcttctacaacacattcaatagatgaagataggcgatttttatgttacaacttgaacttctaaaacaagagcatgagaaacaagttgaagcatctttgcttagggtaacaattgcatacattgcaaatatcttctaatgttttttaattcttacatagttatgtactagatttagatcaccatgagcatggttcacgtcaatgaaaatatttgaagttattttttgtttcaattaagggaatcagaggagaaatcaaagttttgtcgaagag

SEQ ID NO: 6775 - DNA, 889 bp, Zea mays
  Intron number 4 from transcript GRMZM2G074775_T01 (locus G RMZM2G074775) derived from phytozome v7.0 (chr-ID 4; pos 1 33322147 to 133323035)
gtgtgacagtgaagaagccataaaacaagggaaaggttatcaatttgacatctttgattatatcctattatgcatttcaaagctcaagttggagtactcatagctcttcttatcattagcggttgcttgtgcaaattctttatcatcctgtttccatgtaacaatttgtcttctaccttcattttatttttgccataataaatccaatgaaacgacatatgaaaggaggtagcataagtgtttaagtctcaaatgacctgattttgttatatgctaatgtgaattttacagatacctttagcacactcttcaactgatttacatttctggatccagaagatattaacacatagaaacaacaccttgataatatcatgatcaattgctacatatattaatatcaagttccttccgatcagcctgctcggttttctcttcacttcattcagaacttttctaattcacggagttttaactattaactgcatggtgataatagaccaaaattgttcaaaaaaaagggcacatccaatgccggagactcccacatcagtgggatttggggaaagataaactgagacaagcctttccccgcatgcaaatgcagaaagaccgtttcgagcctgcaatgtggtgactcaatgagacagctccaccactgcaccaggcctgcccttctaatagaccaaaatttctctattgcaatgaaaagatgtgaaggcaacttggtttgatacagtagcttcactgtttttataggtggtaaacagtgcttcatctaagatcttgcacggagaaactttaccccatgtatttttttcctatcgattgtgttgtcttcggagcaaggttgaactaacacattcccctgtgtagcttttgaggaaca

SEQ ID NO: 6776 - DNA, 760 bp, Zea mays
  Intron number 2 from transcript GRMZM2G138131_T01 (locus G RMZM2G138131) derived from phytozome v7.0 (chr-ID 4; pos 2 00367215 to 200367974 reverse strand)
gatcaagtgaggggtcaaacctgtcatcagtgccggtatgtttctactcgaataactattttttgaatcagatgcctttgccatttgttatgcttatctttttttgaaggatgaacttagtaatctactgtgtgacattttatatagaaaaatgaacaaaatacttacattacaactttaataacagtataacaatgcaatttttgttcttctcaatctcaagatcattatttatatattggaactgttggagtataagtgaattgtcccttcactctatcagctaaagttttttgtttgaattggttgatgcatttaattaaaatggtattaaagacagttctcctggttagcgcaataataaaatttggtgcttttcctattcgacatctcaggccttcacgtgagtgggagtgttcaaatacaagtaaattgtctactctatatatcagcttacacttaagcttttcatatgaattgtatcatcctgtttagcgtaattgaataaaatatttgctattcacttttattccatgcctgaggcctgagggaagtctccatggggggagggggtgtcaatataaatgaattatccacatctcttactctccatcagcttaaattttaaaatctagaggatgccggatgtgtagactgtattggttaacatatttactatattttcttcacctttggtataatggcataatgcttctatgttacagtcagaagactcttggtcatcatacaagctgctgta

SEQ ID NO: 6777 - DNA, 926 bp, Zea mays
  Intron number 2 from transcript AC204552.3_FGT001 (locus A C204552.3_FG001) derived from phytozome v7.0 (chr-ID 1; po s 89096246 to 89097171 reverse strand)
gaggtaaatctaactgaattttgataaaacatgaactgtcatggttttagtttcaacaccaatataatgtttgattgtttattctaatgaaactcaaggtaagaaaagatagcattatcgactaagtaatacactgcacatagatttttatcatacgtcaaccgagcaagtttgagagatagctgcccccatttctcagacttttatttacattttactgacgaatgggcgggtgttgacgatgaacaggctcaccaagaacgtgccgatggtgaacgggatgcacaaggagcccacagtcgcacatcctagattgctcatgttgcccactgcgcatctgaaaagtgagtattgaaaacctggatattccatcgtgcttaggtttcaaagaaaaactaattggtgctttcattttttttgtggaagcatgatctaatagagaatgctcatccatatggtgaactattattcatgcttgatgctgatggtgcaaaataaaacttggcttgctattacaagtggaactaaagggtccatcatggttcaatggtagaaggcatcttcctctgaatttacaaatgatatgagcttgaagcccttacttcatcaaaagtttctaaggtatcagtgaagcccttacttcactgatgtcagaatatatgcttgtgcttctaaattacattttctttatgcttagtctcaatcattgcaaaataaaaattggcttacctgatccaactgacagtacatgtaaatcagttacatgtaaatcaatcagtattgaaaacaaaattagtttgtaagtaaaaattcatttagcaacaacatatatttatgcgtcgcactccacaagagtaactttgtagcagtgtctgtagtactactagcatctgtgactttcaattttatgtgttcagtttcagttg

SEQ ID NO: 6778 - DNA, 623 bp, Zea mays
  Intron number 1 from transcript GRMZM2G140600_T01 (locus G RMZM2G140600) derived from phytozome v7.0 (chr-ID 4; pos 1 96930685 to 196931307 reverse strand)
attgctggtatgtcctacattgtgaaccatctttcccatggtttcatcttggctagatgttcaagctggagatgaggctgcccacccgcattcctcagctaccttttgtcattgtgcgcattagaatccttcttgtttctctctcgagttgcttcaaacaatagataataagctttgaagaatgtttatgtgcaataaacttcttgcggattacaatttacaaagtgtacacgcactaacggctgtaacactctgaagctatgacttgccttttttcccttaacatttgaccttctacttgaatacctcaacattttaaacttttgtgagtccatgctttaatttccttttcttttttctagattaaaaatgatatattggtgaatgcaacattcatgttgacagactatggaagctcaagcttttagctcatgattcataccttatattgttcttgacacaatgattcagataatcctgtcactgcattttttttgttaaggatgaaacttatagtaaacataatcaaatataaatatcatgcatctctcccttttattaattgtgccactgattatgcaatggtagaaagcctcatggttcacttcttgtctctgcaggat

SEQ ID NO: 6779 - DNA, 448 bp, Zea mays
  Intron number 2 from transcript GRMZM2G110599_T01 (locus G RMZM2G110599) derived from phytozome v7.0 (chr-ID 8; pos 1 15463768 to 115464215)
cattccaggaggaagtgaagaacctaaacccaaaggtatgttgtctatttgataccaattatgtttatcattttaattgtacatgtttgacatgaaccctttggataatgcatttgccatacaataagttaaagtggattttttcatgttcctttgaagttgttggcttattgtataatttggtatatgttgcctttgcttttggaatcattcagacatgattccactataatgatcatttcgtcagcttctatattagatgttattgttgatccgaagaacaatacatttttatgtagatgattgttgccactttctactcaaattttaaagtggtgtaatgcttatccttttttttgatttgaaccgatcattctgtagcccctgacaacggacgattactgtttctacagtgggctcaagttatcgatagtttggaagtaggaca

SEQ ID NO: 6780 - DNA, 890 bp, Zea mays
  Intron number 1 from transcript GRMZM2G404056_T04 (locus G RMZM2G404056) derived from phytozome v7.0 (chr-ID 8; pos 1 71892101 to 171892990)
tcaacttccctccacgccccgtcgtcgctgagcaggtcagtttcgcttagacacaagcgtggttgttatgccaatttgtgtcttcgcgtaatggttgagtttaccgctgatgatgaccttatcgaaacatcatttttggaataattacatctgacatataggacgggttcaataattcgatgataaattctgtgaaatactgatgcttgcatgtcatcagaaatacacttccgtgcacattgtagagtgtatcttgagttgtcaatgggatacccttacagtttaaggggtgtttgaatgtactagaactaatagttagttggctaaaaattgttagtggaattagctagctaacaaataactacctaactattaactaatatacaaaaaatagctaatagctgaactattagctagggtgtttggatgtctcaactaattttagacactaactattagctctagtgcattcaaacaccccctaattctttgttttggttcaccttgagcatgcatcttaactcacaactcataattagtgtttccttgaaaaaaacaatctagcatagtttttttgctgctgaataatgaagagtgaaatctaatgtgcagatattggttgcttaagctgcagtaaccatcatgcctaaatgagtatgaattgggattgatgtcttattagtgctgccactgtgaatagcctgcaataaaatgtcaatagcaattagcaacttgtaaacagattgtctatgtttatgtttcatgcgttgaatgtactgaactacccaaaatagaaatcaatgtaaatctgtgattgtcggtacggtgcttatgtttcttattttttatatgcaggtgattgatattattcggtcacatcctgatcacga

SEQ ID NO: 6781 - DNA, 1045 bp, Zea mays
  Intron number 1 from transcript GRMZM2G700649_T01 (locus G RMZM2G700649) derived from phytozome v7.0 (chr-ID 8; pos 1 26438666 to 126439710)
cacgactccaaggaagacgaggactacgcgcgtgacggagagcgaggacgactgcaaagcctctcaacgtgctgccaggtccagtggagttcaggtaaccactgaaatcagcaccttctttcactgcaactctaatgttcagtgtctattgcatctcttttcattatagttctatggactgcatgatttatggtaaaccctagttacatactaatataaaataatggtctttcaatgggggaaaagagccgtagaggaatggatttgtcttctgtgtcttgcctaatttcataccaaagcctttaccaggtgcagtagctgctgtagatggacgacctgtagaagtattgcttgcagctagattcaaatatgaatcatatgctaaccctgtactgtttctactttctacatttgattggcaataagtaatgtagtcctgttgtcatacaaatcatgaagttacagtcacttattgataaggcgattgaactatggggttttagcagggagtttgaagttctatttggtgccaagctcctaaactgagaaggcataacaggcacacacgtaactgttatttctgtcctccaagcttagatgttctaagctgtccatggttaggataaaccaatatgtaagctcataacctgtgtttgggttgggatagaaattggatcacttccaaattagttcctccaaacatccaacaacctagcatggtctattttttggatctctgtacatacattggatccattatgttttcttgttccaaatttcctcgaattaattatgtggatattttattctggttgataatgcagttcatgtgcatgttagcatatagttctctgtgggtcttattatttagttggcattatgttttttggatctctgtacacacatttagatcagtagtattttgagaaatcttatttacattgtactaaatataatgtctgataaaatacattggtagtacatgatgttagtttagtgtcacttttcagagtcaagttcagtcatctacctctgttaaactatc

SEQ ID NO: 6782 - DNA, 769 bp, Zea mays
  Intron number 1 from transcript GRMZM2G164099_T01 (locus G RMZM2G164099) derived from phytozome v7.0 (chr-ID 8; pos 1 01511336 to 101512104)
cccgacttcgaccacgagcccgaggagctaaaccggttagaggaccgtcgcctccggttcctcgacgactgtaatgcaccaaaaatacaattaaactaaattatacaaacagtatactaaagtgtgtcgaaaactgaccttagacaagtgtggtataaaatataggacaacccgtgacacattaagattgtgagttcagatattgtaaactaaatctaaaaacaaaatgtatacgaccgacttggaaggaacagaacctagacattactcccaccaaggcatgcatcaaatacccctttgctgaagaatccatgcatcaaataccgcagccagaagttggtaatcaacactgctccatacaaatttttaaagcaaggtatagcctacacaagcttcttttacaacctggaaacatctcaggatccaaccaagaacgacgacatgtatcttctgataaactaaattatacaaacagtataattaaacagcccaggatcaagtactaagaaaacagacaccaaataaagcatctacaagcatgcatcttctgattccgattaactcccgttcccctcccaatattactggcaaattatactaggatggatgcacagtagatgagtagagacagacctttcaaagccggaacaccagagacgacgtgtggtgtgccacacgatggacaagagaacgtcggagaactagagccggagaaaacggtgggcgcgaacgagatccccaatcgaccgcctcaagaccgagaagggcg

SEQ ID NO: 6783 - DNA, 439 bp, Zea mays
  Intron number 3 from transcript GRMZM2G027726_T01 (locus G RMZM2G027726) derived from phytozome v7.0 (chr-ID 4; pos 2 38739786 to 238740224)
cccctcatcaagctcgccgtggaatttgacccaaggtaacgacgaaacgaacctacctagcaccgtatacctgtctcttcggaaactgttttaatcaaatcaaacactgcgagctcgatcacgcataagctgtactagtaaagaaatgtgtgccgttattgaccgcgcgcgacatactgttcctatgggatgtcagatgtgtgcgtcgctgtccactactgttcctcctggccgcagtttttcttccggtagtaactgggatagttcagaatgagtgctatagaggcagaaattcgtgattgaactgctgttgttactgctcatctccagctaattttacattttcccgtgtactgacggcagtagtttttattttctccctgtttctctgcttgtgttggcagcatcctggtgacagcgttcgtggggactgccattg

SEQ ID NO: 6784 - DNA, 731 bp, Zea mays
  Intron number 3 from transcript GRMZM2G300412_T01 (locus G RMZM2G300412) derived from phytozome v7.0 (chr-ID 1; pos 2 72494675 to 272495405 reverse strand)
tcgacgagacggaggtgtcggaggccactccagcagtaggtgtgacaccccttgttcgctctttctagctccaatccgatctgccttcttgaacctgatgtgcctgtgctgtcaagcaattggttgggcctgtcttattccatttttttaaagatccatcataatcaattcatcaatttctctttagtttcattagtaagcaactggcacattaggttgtgatccttatctcataagttgagtatagcagcgagagagtgtgaaattgacctatggatggtctcacacaatttttagacctagctaacatatgcaaggttgctgtcctgtgagtattaaagaatatatctgtacactttagtttagcacaagtcaaagaagtaaaggcagtctctctctctctctctaagttgcattgcgaatcatgttcttcagaagacagtaaaaagactttatgcctatagattctcagaatggttctattaattgtaatgaggtacttcctgttcatttttttaagttttgttgaaactcaggattgggtgatgtgcctttgttaccatcttggggcttcagttttactctgcaataatatttcacatttttttgttttatgtacaatgcccattgtgtacaggagttcatatttttctattgatctttgaacatttcatagtatgcatgtgactgttgcagattgatttgctgctggtaggacttttctacgagaa

SEQ ID NO: 6785 - DNA, 703 bp, Zea mays
  Intron number 2 from transcript GRMZM2G300412_T01 (locus G RMZM2G300412) derived from phytozome v7.0 (chr-ID 1; pos 2 72495500 to 272496202 reverse strand)
gctggtgtgatccatgggcacgcacaacacggagatcctatgtttcaggagtttatgggccgattactgcgccgggtgtgctcgccgttgtttgagatggtcaggaagactatatccaggttcgatgagttcatgtgcttctgtttgtgagtcattttagtgcttctgtttgtgactcatataaattgccgtcaacatgtgtgcatttgtttgtaatcacttgctaatacacaagagaatcctaggtttttttccaatttatcatactgaaaaaatgagatgggtttagttttctgcgtactgcaccattgctgcctcattggatttacatgattcatgtgcacaattaggtcttgttgccccctgacaatcacaatcacgtaggatcagtttaatggcactggtatttctgcagcttactattacaacaaacaaaatgaatatgaaacttaaaatattattgcaaatacagaagcctctctgtctactatagcaatgtagaatgttcttcttgcttagctggataaatgatttttaagtaaacccttgggttgtactttgagttttcatcccaaattttaatattgacataaaactcctactctgtcacggtattagtaaaactcttcataccaacattttacttcattttattttgcactttgtagtttgtacagtatctcatcaaaatcttcattttatt

SEQ ID NO: 6786 - DNA, 830 bp, Zea mays
  Intron number 1 from transcript GRMZM2G300412_T01 (locus G RMZM2G300412) derived from phytozome v7.0 (chr-ID 1; pos 2 72496290 to 272497119 reverse strand)
gagactccatcttaaacagttggcaaatattccatgtaagatattggttcatgactctgcgtttatcagttcctctgttgggatttatcttatttctctgttgtttcacgtttgtaacttttgattacctgagaattactattggtgttgatgacagcagtttcaagatgggacaaagaagaagaaaggtgtgaatttgatggctaattgttacttctgatttttgcaccgaacctaccgcttagctggataaatgatttttaagtaaacccttgggttgtactttgagttttcatcccaaattttaatattgacataaaactcctactctgtcatggtattagtaaaatgcttcataccaacattttacttcattttattttgcactttgtacagtatctcatcaaaaatcttcatttcgacccctctttcccatagctatatagaaaatatgtctctagacaaagtgtgtcaagaaaaacattacatatttccgcacagccattgcgattgatttccaaacctcatgttcaagtgcaacatcatcaatatgtgagatacaatatttttttctgctactaaggttggcctaaaggacaattataaacaggttccagaaagctactgtttgtgacaacataagtcgctcgccctcagatgctgccactgaggtgggcactattacccagacattctgctagacgctccaggaggagctctctgattattacaagctgctgactgttctggaatcgtactcattgaatccaattcccacacctggatctgattcaggtgtgtccagtaattacctttcactgcgccgtctt

SEQ ID NO: 6787 - DNA, 751 bp, Zea mays
  Intron number 1 from transcript GRMZM2G127181_T01 (locus G RMZM2G127181) derived from phytozome v7.0 (chr-ID 1; pos 6 4975162 to 64975912)
gccaagggccgcctcaaggaggacaccgcgcgcaggtacttccagtagctcatctccgccgtcggcttctgccacgcccacgacgtcttccactgtgacggtcaagcccgagaatctcctcgtcgacgagcgcggcgacctcaaggtctccgacttcggcctctcggcggcaaacaaatttactgaagctacactgcctgcagatgctgagaaaaagccacaggatgggaaaactctgccaaagttggtttctctttaatcagaaattctaactttaaatgcatagttgtttgtaacctagatataaattctgattaaaagcacattgtttcaagggtgattgcatggtcacacccacactatgcttatacttatgggtgaaatgaaggttgtctctattcatcctgttccagatagttgcctcctttattcttggtcacacccacaccatataagcttttgaatgatatattacttcaacttccgttggattgaaggacatctgagttgaagcagcacttgctgcttcaggaatgcaaactgaaaagtggacctagtttagcaggaatatttgtagataagccaactgatgtctagaaatgccttaaatatgattctcaagatttaaacctttaaactgaccatacagtgtgagagttgatggatgtagcatggatttccattccattttgttttaaaattattgccctcgttaatatttgaattacaacatcaaatttgtttgctaggt

SEQ ID NO: 6788 - DNA, 624 bp, Zea mays
  Intron number 1 from transcript GRMZM2G071873_T01 (locus G RMZM2G071873) derived from phytozome v7.0 (chr-ID 1; pos 1 72199377 to 172200000 reverse strand)
ttaaatttacactaaaatttgagtatggatttggctatgagtaaacaagcaggtgacaacagtacctttgtgctctacattaatatataaagtggaattgatagatttcacaaaagtatggttagttgaaatagtgttgatcttatccatgtatattgtggtttcttctatttattatgggtagaccttgtttaaacagtgtaccttgaattaatgttgtatacaagggaaagggagtggtgttcttcaatttctcatccgagtgttcttcaatttctcgggcgagttttcgatttcagcctaacagaagattcagctctctttttctttttattggattaatgttgtaccactatctgattagtacacatccaccctattgaagtaggtctcaacgtagttggagtaacacagattgtatcccgagtacatcctcaatcgtggtgttctccaatttctcagggtgagttctttcctttttaattttgattgctgtttctttttgttcatatggatttgtgtagtacaactgtccaaacattttttaattttgtttgctgtttctttttgttcatatggatttgtgtaggacaactgttgaaacggacagcacacaagctccaa

SEQ ID NO: 6789 - DNA, 815 bp, Zea mays
  Intron number 1 from transcript GRMZM2G129615_T03 (locus G RMZM2G129615) derived from phytozome v7.0 (chr-ID 4; pos 2 8830695 to 28831509)
ccggcacagtgattgctcacggcagatcaatttgggtgagtttttttttatgcttccagtaccgaatggtgtctatttctgaattctgatgctttgcgtgatatatgtttacagtactattattgagtattgttgtttgattatccacagtcaggtactattttcgtgaaatgggctgagacccagtatttcacttgcaacatggtttggactagttctgaaaatattctcatgtaatccaaatgctcccccgatttccttcgtctattatccacgtttataggtttctggaaagtccccactgccctagaagtaggaatcagtttttcctgtgaaatggatgtagaaattcatagttcaggggatatggagaaaatggtgtttggtcaatgtttaggtgtgttttaatcaatttttttagtatatttctaaagttagttatgttttgatcatatatttggtgttctgaacagtttgcgctaaaatcatactcactccgtcccaaaatattagttgttttagcttttgatttttgtgatgataaatctagacacatatataaaacaaatatattaattattgtatgaatcaacttaaaaggtaaaacagattttatttttggacggagtgagtagtataaagaactacatccgattccatattgtaggttgaaacacatgtgctgtgttgcatcgaaagaccattgttcttcagaatatactgttgcaccatttggggctatagataaaaaattgcatgccctggtataaaaatgatgtttcatgctcccagggaaaggtggggtaacacacaat

SEQ ID NO: 6790 - DNA, 955 bp, Zea mays
  Intron number 1 from transcript GRMZM2G089404_T01 (locus G RMZM2G089404) derived from phytozome v7.0 (chr-ID 4; pos 2 07283567 to 207284521 reverse strand)
gcctaatctcgtcaagtacctgatacaggagaaaacatgttcagtttctcaatgctcttaaaaaatactgatccatgagaaaaatagaaattataaatctttgaggctagttttcaaagtaagcgttaagggcaagatagatttgcttgttggtcaccatatcttctttattgctttgatcttacagatacgaagtgaacttggaaaatcacaaaaactaggcattgatggtcaccatatcagcactcagcagacagaatttcctattaatgatagcatgattaacatcacttcctgtatcactcgaaaagggtgcacggtgtaccgctgtagcacaggtgatagctgaaaggatgttacttcacgtactgaagataaggatgcaaaatctaaattgtttgccataacataaatatgtccaaaggcaggggcacagaagctagttgttatgatataaaagacaagttcgttcatacaatggaaatcaactaaagaacccgaggttccaaaaaacaaacaaccagaaaaacaacactgcatgagtgcaactacactgaaaagtcctgacctgctcctaccaaccaaataaatgaagtaaagcattctaccattgcaatagaactctccacaatatatataataggtaaagatgaataatttaagcctagcaaactggcataggagatggatcttaaatgtaaaaataactgataataacatcattatgcagtcaagacattgtagaaataaataagcacaactcatcagaaaactaggaattttatttacaaagtatactacatatttcagaagaatttgattttgttcaaggaaaattcattccatttaatcaaaatccaacaaaataagtcctggtttacttcagtaatccataagaatcaagtgacttttaccaatagaatatttggccaacaatagaacatttaccttttca

SEQ ID NO: 6791 - DNA, 892 bp, Zea mays
  Intron number 1 from transcript GRMZM2G067910_T01 (locus G RMZM2G067910) derived from phytozome v7.0 (chr-ID 4; pos 2 18667369 to 218668260)
atcttctgggaggtaaaggagaaaaaagaaccatcttttccctgctttcttgtctgtacttctcacacatcttgtgctgtgagattcttgatgtacttttccccactgttcttgatcagatctccccaagatctaagcaaccttgttcttactccggattagtttgcctgacatatcctgtgttccagattttttattcgacggagaagttcagattcagattttactcttctgtaatttgatcttaatgcaagcctcagggaattgtttgttttatctttggccacagcttatgcatgttcttatcgcaacatgagcacacaatatgaaactattcaagaattgaacttttactcaaatcctatatatatttgacactggttgccattggatgttgataattcctatttggtagtcttattcaaacctaataattggtgttgagttggaatacttcatggaggttggaggggctccacatgattctcatccttatccaatactagttttttttcccctttctccatctcctcgttggatgatcttatctgcttgaagccccatcctcccctttccaaatgcttgattaccaatttgactgcatgcccattgagtgacacatgtacggatcctatctaatttttttcgaactcatattttccctacatgagttatgataactttcacgatttgactaccatagtaatctctaacaaattgcataccggtctcactgaaatgataagcaactcccaataagaaaccatcttccatgtacctgtccagtttttcagggcacgtgtaaaatttgccactcctgctatatttctgtgcagcatatgtttgacttccacaactatttttactcgtgcacagaacttctgttctagag

SEQ ID NO: 6792 - DNA, 1051 bp, Zea mays
  Intron number 1 from transcript GRMZM2G062476_T01 (locus G RMZM2G062476) derived from phytozome v7.0 (chr-ID 4; pos 3 7344809 to 37345859)
cggacggatcccttcgcgcgccccagagatttcaggtctgtctctttgatttccccggccccgtctatgcgatttgccccatgatttcggttgcttgttcgtgcaagtctcggtgatctgcgcgacgtttttctgtagtgagggatcgtccgtttcgagtccgacgtgccgagcgacgctgggtccgtccgcttctctggctctgtgatcatttcgattttgttttttttcgggtagagaaaaccaactgcgtacggctagtgctgtccttgcggaaagcagaggtttgtcatggtatctgcttgtcgtctgatgcccgaggcacatactgtgtgatttcctatgatgtctgggtgatggcactggtagtagactactagcgcatgtcgggggaattactttatttatgcgtggtcgtagggtgtccgaaggcgatgttggatgcgtacgaagtcatgtgttctctgctctgcgtttcaccggcactgggttgacgagggagggatagtttcgcctgtctagcttagctgctgtatgggcattttggtggtggggaagaaagcctaagtaattgatcactaaacattgataaacagtaccaaaaattaccgtatagatagacagtgaaaattacgttgggcagcttgctcttaattaagctccgcctccggctgtaggtctgcttcctcgaaatggatagctgccactcttccagcactggtttactgcagatatgatattgtagagttaatgtcattgctgccaatgagtttttgggcgccatgtttcatcccctaattcatgaaggttggtcttgggacaaggagtatctggactccagttgattgtgtgatgttgcaattttcagttattaacactatggtttgctatatatttacctatttggaccatgctgccacttgtccatgtgaattgatgatttttgagctggagctcaggctggagttatgcgactgttatcttactgtctacacgacacacgattgtttaacacatgttgcctgtattaggtaaggtgctgtaacagaag

SEQ ID NO: 6793 - DNA, 542 bp, Zea mays
  Intron number 2 from transcript GRMZM2G178079_T04 (locus G RMZM2G178079) derived from phytozome v7.0 (chr-ID 1; pos 8 1583459 to 81584000)
gacacctgtgcacacagtatggcttcgtatactttgtttacatatcttttccccattgtaatgatactcatctcccttttatgtgtatactttttagagagaatattaccttgtagtctcattgtttcagtttatggtccaatttacaatggcttcactgtaaatgggaaaacaactcggtaggaatgcttttttgaattataaattatttatatttcatacaatgcttataggtatgtgatgagtcctccaatctgagaagtagagcatggtaaagcactccaagctgctctttcatcgggaaatttataggtgacacttgtgtcatacattgaactatggagtcaaacaaattacatattatccttcaacatttttcaccagtgggaactgtagttattgcatagaatagatggtatattaatcgttgagagccaatgtttacattaactgttatgcagaagaaaatttatgttttattttatatctaactgtactttgttgcagcttgtaggtactgatcacagcacattcaactccac

SEQ ID NO: 6794 - DNA, 944 bp, Zea mays
  Intron number 5 from transcript GRMZM2G353114_T01 (locus G RMZM2G353114) derived from phytozome v7.0 (chr-ID 1; pos 2 80540837 to 280541780 reverse strand)
gcaacacgacttcatctgcgtctgtcggtcaattggtttgtttctttaaccatcgtatcctttttctgatgtatttatgtttccattgcatgttcaaatgttgtggcatctaattatgtcaaagctgctatattcacacatctctgacatcatcagaactatttagtatggtgttccagttgtactattaaacaaatccatacattttggtcaaaaatttgtcccatcatttctgtagccatatgttctagagacaacttgtgccatgtgccaggtttttccgtggatcaaggccatgtcgcttgatgtactcagtattgctgtggcccatagatcatatgcagccttgcatatcttatcttacatatgaccatcataaggcatttatagtcttattttccttttcccttatttgaagagtggggagtgcctaactacatgtataaattcagatcattgttatagatttttggctgaagataaacataatgagtagctcttcttttctgcacttcaacatttgtgaagataaacatgcataagtcttatgccttacgcccataatcagtagctctaaactgcatagtgatgccaatgacgttaattacacgtttggcagagcatgtgcaccttgtgaaatacttccattccaaactattaagttgttttagcttttcaaggtacatagtttttactgtacactctagaaaagttaaaatgacctagaatttggaacggaggtggtagtagtataccttgggcacttgaatcaattgatcagtatgctagccagaatgaaatttagaaaagtttaactggctaagcattgaatcatagcaataatatttcatacaatgtggcattgcaaactgcgttcaatcaaaactaacttgtggcctcgttttacagggtggtggattcgacaagctcattttggacagctt

SEQ ID NO: 6795 - DNA, 714 bp, Zea mays
  Intron number 2 from transcript GRMZM2G008250_T02 (locus G RMZM2G008250) derived from phytozome v7.0 (chr-ID 1; pos 1 74846871 to 174847584)
ggtggatactccctggacgtagcatccatcatgccacacacaaaaagttttcacggtttcatctatttatgggaccgagtacatgggtggatacttcctgcttgtttctaattttgacttggtggttgctagaatgggaaaagagccatgtactattcttccccaataatcatggtatgctgcatttttagatttactccacagggggtgtttggatgcactagagctaatagttatgtggctaaaaactgctagtggaattagatggttaacaaatagctagctaactattagctaatttgctaaaagtggttaatacctgaactattagctagaccgtttggatgtctttagctaattttagcagctaactattagctatgatgcattcaaacagggtcttaactcattctgagctggtgtgactctagaaataactataacctgctgaatcatgggtttgctctgcaaccaaacaaggacacacacacacacacatgtaaaagatacttctacacttggacatatttggtttggttcttatgcaaaccataccaaatattttgtagcacccttggctgatgtggcatgtttctgctggctggattatttgctttaacaaacttcaaatgtttttaaaccctagagtctatctggtttgcaataaatttacatcataatattcctgcagttgaatccacagaccaagacatc

SEQ ID NO: 6796 - DNA, 329 bp, Zea mays
  Intron number 1 from transcript GRMZM2G331561_T01 (locus G RMZM2G331561) derived from phytozome v7.0 (chr-ID 4; pos 1 19815240 to 119815568 reverse strand)
ggataaatttgttcgcactaatacaagaacttcaagtaatgaagatcaaccaaatttggctatagttgttgtggcggaacaaccaaataccaacgaagaagaggaatggagaagttcatgatagaaaatatcaacgactatatccctcggaatttgacccaaggaatttgggtaatcttgataacaagtcgagggatatattgattttcatatactcattactctagaaagatgaggaatggagaagttcatgatagaaaatggttggtttattcaaaacatgttgataaagtgttttgtttttgttgtaagctttttaattcagaaaa

SEQ ID NO: 6797 - DNA, 569 bp, Zea mays
  Intron number 2 from transcript GRMZM2G013639_T02 (locus G RMZM2G013639) derived from phytozome v7.0 (chr-ID 1; pos 4 9817704 to 49818272 reverse strand)
gcgtcaacgtcttcttcttgcttcaggttgatggggcttacgcttacactaaagggtactttcgccttctttctgtgtcactacatctgcaccagtgcggatagaacgatagtggaggttgtagtgctctttatggccactcttttagttcagagacgttggataaccaatcagctactcctatattgttttaatgcacaaatccatcacgatctgtttgtcctttagcttcgacattgtcagttgatgaggcctatagatttatacatggttcttgactgctctgttaaatagtactaggatcaatgtagcttttcttattatgttggtattctttaaggcatgatggtgttttaactggattgactataccttggcatgacaaccccactcattgcctttgtcttctttacgacatgttgctggtttaatttgattgatcatgccttatgagaacgatttcattctcaaatggattttagccttccaccattaatttaaacatatagctctgtatctagtaacctgtgttttggttcacctgttcatcaacacagggaaagtaacaa

SEQ ID NO: 6798 - DNA, 886 bp, Zea mays
  Intron number 2 from transcript GRMZM2G014781_T01 (locus G RMZM2G014781) derived from phytozome v7.0 (chr-ID 8; pos 3 7241870 to 37242755 reverse strand)
gcataaacctgatatcaataacattgaccgaggaggtaaaaaatggttttccttatgcattctagctcttggctgctatcttcatcaactccattgaccacacttggaacacgccaagtgcctttagtatattttctgaactccatgatgcaagttccagccaaagaaaggctaaaaatcatttcctcaaatgttgagtgtgtctacaccacaaggatattcatttacctgtaaaacatatgggcaatttaatgcattagtctgctgaggaaccaagggaaagaataagaattttggaccaaacagacatggtgggacgatgtccgggcagatcggcacacagatctaccatgcattgcatttgcatatcatcagcggtgttaccatcttagaaatcggatagttcattcaggtcacctaccatttttaaataatcatcacagtctggttaatctgctacctatgtgcaccagtattgcattaaaaggctcaaaggccacaaggaggaataccttgcaaggacatacttcaggctaatgttctaaccatcaaacatgcagatagagttatcaaattgttatcagactccagtcattattaaaaaatgtgtgtcaacaatatcatcacactaacatcttaaagcaaagcggatctgaatgtaaccttcatgataagttcttttgtagttcagcttactatagtcacacttctttgaataacaagaatgcctctttgcttatcgcattctttatgttccaagatggagggagcatgtattattggatttagtgataaaatatgtattccaggacggacggagggagcatatataaagagaagaattatatagacaaatgtggtttttacccggtccagagatcctcca

SEQ ID NO: 6799 - DNA, 352 bp, Zea mays
  Intron number 4 from transcript GRMZM2G361362_T01 (locus G RMZM2G361362) derived from phytozome v7.0 (chr-ID 1; pos 1 82678999 to 182679350 reverse strand)
ttatacgtggaactcagattacactgtttgtaagggtatgttgatatgttcttctgataccccatgaaaagttttttcttaatagcagccttacattaatatgtcttctatagcctgatgagtattagttttcggacccttcaaggattcaaggcttagtaaaaaactactctcagtttgtgtctttccccatatacacatggcaggaaaaatcaagaactgttgaggtagggtcttgacaaagcttcttgcttattctcttggccatacaatttcttttgatctatgaatgtgtatggtattttatttatttcaatgatgtaagcccctcttgattgacaggttgaagagg

SEQ ID NO: 6800 - DNA, 683 bp, Zea mays
  Intron number 1 from transcript GRMZM2G024180_T02 (locus G RMZM2G024180) derived from phytozome v7.0 (chr-ID 4; pos 1 79662069 to 179662751 reverse strand)
acgctcggtctcgccgtcatcgccgagcgctgccggtatgtcgccctaccactcaccttttctatgcttcgctgcacacgggctgtgaatctaagcggccctgcggtatccagaggaagaggagtattttacctgctttccttactttcggagggtatcgtactgtgcattttgttcaatcctagctgcaccacgcaattccgccttatttaatgtgcgcgcctagcctttttacgcttttcagtataattggtccggccgtgccatggatcagaatctgatctcgccgaccttttatggtcgtattggttggtttctttctgatcgctacacgtcgtgttttgaaaattaccagtaaatcgattatttattgtgctcgactttctaatcatcagatagtgacacctgctactgtcacagccgattcttgccatgggaagtccgcgaagttctactgccaaactttgatcctattaccccgtttaggtccttggcagaacagtctcgttaattaattggttacactcagggtttggggcacttccagttgcacgctcttccttatcggggaatataggagcactaatagcagcatttaagtgtaatactggtatctcatgctcacggttggtgtttttggttttgtaggcatcttcgtgtgctggatctgatcgaagattacg

SEQ ID NO: 6801 - DNA, 1018 bp, Zea mays
  Intron number 1 from transcript GRMZM5G809417_T01 (locus G RMZM5G809417) derived from phytozome v7.0 (chr-ID 4; pos 2 5250556 to 25251573 reverse strand)
cactaagcgctcgtcctccctctccacccactccggtgagcagttgctcggttttttttctcacgtggattctttttggggcgcttagcctgctgttaggcggaaatgtgccaatgcatgcgaggggttgggaagttgggttttatataggtttgcctcttgttttcctcttcttagctgagttaccatttcagtcatgtgactccgtgaattccggttattaaagaaaataaactaaataattgggcaaaagttctatgtacatgtgaacttttttagagttgcaagaagcaacatgccaaataggtatgagttcaatacattgctctcaaagctccccctggcttccaatttcggctacccccaatttcgtcacagaacacacacacagatggattccaagatcaaagctaccactctgaaaacacatgttatttctcagttcccacaatccccacattatggctgaactgaacatattaaaaacagcatggtttttactcaactaaaattcagccatagtttcaaagcctactacactctgaatgccagtcagctcagctagagctggtgagtcccagggtctccatgccaccacacacccaaataataggtaatggatgttctctgcctcacctcaaaatagggatcaaggtctgagacatctcttgtcttggtcaagtttttccttgtgagaagcttgctcattgacagaagcatgtgaaatgagtgtgaattttgggttatttcataattgttaaggcgtccccaaagcgactcttaacgtcgcctaagaggcatggttattaaaacgtcgtttaaacgacgattaagcgtcgtttaaacgctaaaacatgattagcggctaaagcgttcgcacgttttacaaaaaacgcgtagaacgttcgttctggacgttttctctgttatttggacgttctacgcgcctatacactagtgggccttaatgggcctttacccagccgccagccgccatcgcgcgctccagctatcgcgc

SEQ ID NO: 6802 - DNA, 874 bp, Zea mays
  Intron number 3 from transcript GRMZM5G837018_T01 (locus G RMZM5G837018) derived from phytozome v7.0 (chr-ID 1; pos 2 82463167 to 282464040)
tgtacgcgcctgggtgctccaattcggtatgtgatagtgaagtttgctctgctctcatcagttattgcttcgcctgcttttgacattggcttcagtagctccacatagcatctttccggaatcttcatctcagcttggttcttcccgaccttctcatttcttgcttcccagaaatgatgcaatggaagaccaaaccaccaactcatttttatcatgaattgcttgaattaggcgtgtctcgtgctctggacagttgttgaaacaatactacggagtactgacatgtacaaactactggttgctggtactagcctactggctactaggggtatcccgtgcctgtacagttggagcaatactactggcatctaaagggccaatgagcaggttcttttcagtctgtgctgtagctaacccgtgatgtagactttactattaggtatctacctaatgcagacgtcttcaaggaagtagttttgttgtacggttgaattttgaattattgattactatgacccttgaacttcaattcagatgttttgtctagtgaatgtatgccaggacttcaagcatgtgctaaactgacccaacaaatcagatgtttgaacttttgttaatcttctaggtttacaaattaatcatattgttttttatttgtgttaacagaatagtagtaggaatagaaataaattatttattgttatagcataaggtgtagactaatctactctgggtgattacacacttgtgcttgccagctaattactggtaagaagtcacatgttcttgtactttcgacaccatcacattttcattattgtgaccctattcatgttcaggacgtgtataagaatatatcctctacaattgctgg

SEQ ID NO: 6803 - DNA, 864 bp, Zea mays
  Intron number 1 from transcript GRMZM2G417835_T01 (locus G RMZM2G417835) derived from phytozome v7.0 (chr-ID 1; pos 1 4385650 to 14386513)
accatcacccgcacagcaaggtacccccatcgatcttccgtgccgctctatatatgattccatttttatctctcattattaaccgtttcacaagttgcaagcaaatctgtatagtacgttaggtcagacccaccgcatcaacccgcattaacggaaaccagcccaccaccgtatcaacccgcatcaacggaaaccgtatcaacggaaaaagaagacaagaaacattttctttcttagttagcttagggcaccaatatatagatgatttattttacaaaataataatctaagtttaagttaatatatctacactataaagcaccattattagaaaaaaaattatgtacactattttttgattctcgcactgtcatattcatgagctatagtacacttatggagttacgttagtttgtacatgtacacataagtttaattctatacattttatcatttcattactcacatgagttaatgattgctattcttgttctctgatgactataatctcatgtctctctcacctagttttagcaatacatatagcacttgtattattacagaaaagtgcaacattattgaaattgtcacatatcataccctttttaagtgtagctatcgtccaaaagaatttgggaccaacaacaaacaacgaactaaataatcgataacagtgcaaggaggtaagggtgttgtagcatccctagcctccacgctggattcgtccttactaaactaggtctatgaaccataatgtcaaacaaataaaagcataaattgaagaaggaagaggaatgatgaactaaacctaatatgaatcaacaaaaaaatactctccctattttaatttataagttattttca

SEQ ID NO: 6804 - DNA, 537 bp, Zea mays
  Intron number 1 from transcript GRMZM2G407869_T02 (locus G RMZM2G407869) derived from phytozome v7.0 (chr-ID 1; pos 9 449532 to 9450068 reverse strand)
gtcggaggtggttgctgcaattctccgtcgtgcgggtgagtagagtagattgggcaaaattgtggtttctcattatctcacacagaaaacaatttggagtgttctgaaattccagatgatattttaatttccacacaacgacgacgtctccgtgtcggaggaggacctcgaggggttctaccgctggttcgtgcgctccaggatctagggcgtccgggttggggccaagtgcaccgtcatgtcctcaacaagctcaaaaagatcaggtataatttctttcttctccgtacgtgcattcctagatgcaatggataacagaaatacattattcattgagaactgcagttagccagataaatatgtttcatcattgaattaatttctaactttgcgaatacaatggtctgagcaaattgtgccattttttgtttgtttgtttttagtcccttattggatttcatgttttgttctggagagcaagtgaacgcatgcgcacttggaggagacggcgtcacgtgataaggttgttcaaggcgt

SEQ ID NO: 6805 - DNA, 903 bp, Zea mays
  Intron number 2 from transcript GRMZM2G046658_T01 (locus G RMZM2G046658) derived from phytozome v7.0 (chr-ID 1; pos 1 29017594 to 129018496 reverse strand)
tgtggtgagtggacttcccaacttttcaatcattgcctgtgctgcaaacaaagggcatctagagtggaaaccggttcactcagaaaagcaattgaactactgctatggtgtctagaattggcacttcttaatatgctgttatctggatctagtcctctgcaactttgtccatctcatccaccttactttacattggttttgtccacaagtgacaatgagcttgttggtctattgtccataggaatgaacatgctttacttatgttatgaaacttaaaaggaacacagtctagctgttacttctttacagtctgaggagaacagaataatctgggttccatggcaagaagctagtcgcgaaaggtttttgttttgctggtgcctatgctggaatatcagcttctcctttggatgcatattgtattatgccaaaagtcctttcaagaactattctgctgttccgtctgctagctttgaattaaagccagctgatccataaagacaaaacactgtataagcagtagaagccgatacagattaaagccaagcgaacaggccttggttttgaggatctgctccctaaatccttgcattatcttttgtatttagcttgacctattatgttgcctgattctattcattcggtagtttctgtgtccatcaggtaagaagatcggcatgtgcttgcattttaccttgggttctgattgtattacatttcaactttgatgggtgcatcacactatgcgctcctatttgttttgtgccaccagaaatttcagaatttaatgtaatggaactagtaacatctatctgcatattagtgtatttgcaaatctgttaggaaaggtactttttcctagaaattaacatctgtcaattcatattctgtaggtgaagaact

SEQ ID NO: 6806 - DNA, 865 bp, Zea mays
  Intron number 2 from transcript GRMZM2G019991_T01 (locus G RMZM2G019991) derived from phytozome v7.0 (chr-ID 1; pos 5 5149510 to 55150374 reverse strand)
aaaagagtttgtggcttcaaaaagtggtatgcatagatgcatgattagaaaactgtttttgcttatgttttcttttctgaagcttttattcggtacaaatgtattcaccattccatctttgaatcaactttcccaattacaactgccaacactcagtctacctgctttcgtagcagcaattgaaaagatctatctgaagcatatttgaatttaccattttccgatttacaaaattctactgtggtgtagtccctatgaagccatatataaaacattttgacttacccatgaactaagtataagtcgttttacaactttgaggtatatgactctagtttcttcatgttgcactctcaatcttacttaaagcattttatggtggaccatgtagcgacaaaagaaacggagggcagcaatgtcattttctcttgcactttaggccctgtttggaacatgggaaacatttactgttcctctgtttttgctgtaaaatggaactgattcatgtgaaatccttgcattcaaatcaaaccctcaatttgtgtttccattggtaaaataacttgtatctagtattagagggaggttttgtgtcaatgaatttatgtaatttattcaactattttaccctcggatgtctcagtcatgcatcatgttctgtatacaggacaggacacatcacacatgcgtatcaaagtagtttctgacatgcttgtaccatattttatttatgtccttatgccatatgtctatgtgcttactactttggtttgatgagttctgagcacatgcatattcaagtgctagaaccatcacataagaaatgttgtttcattccttcaatatccttctcctgcagatcacc

SEQ ID NO: 6807 - DNA, 995 bp, Zea mays
  Intron number 1 from transcript GRMZM2G175574_T01 (locus G RMZM2G175574) derived from phytozome v7.0 (chr-ID 1; pos 1 82623146 to 182624140)
gcagcgttgctactgacacattcgtgcgcttctttgtatgcacgcgtgtgcccagcccaactgtggggtgcttaattgatactgccaactgacgagactactagtccctaacctacttttgaaacgatttaggtcttgcaaattttttttgaatgtcaacggggaggaaaggttccccacctgcttttccattgctttgttctttttttggcccatggggcaagattgttacataaccgggcttgcagtttcttgtttgcttttctttgtagctcgctcagagtttggaaaccacattgcatgtgttcaagatcgacgagaacgtttctgtcagatgttttatgcagttcgttaaaaagaaaagaaaaaaatattttgacgagatgcagccatattagtatttcctatccaacattcctgctggagtagcaatcttttcttctgccatgggtgaactggccgttccaaaatttgactaacgagtgttagttagcagttttggaactgattctgtttttcaatagttatacaaggatcgcttggtctttctggtttgacagcacactgcagtgaaaatacatctctgcgagtttatatggctacacaagttgtcaatagtataaaacaagagataccttttctgcaacctgtttttatgtcaaaaatcatgttagttcccctgggactacaaaacaagcgattagcccatggaaggcatctccattcagattttcaaacttattcacttttcttcctaacaaattgacaatggatccctgcgttcattgaaaaaaatagtagaccctacttattgattgttactgataatgcatcgtttcaatagtttgttagtttattttcacagcctcatccttatctaatgcctttagttgtgaatgctgtagaagctgttccttggtcactgtgaaaaccatgaaaatttactctaagtgttctttttattattccgcatagagagctaaagaccctggagc

SEQ ID NO: 6808 - DNA, 589 bp, Zea mays
  Intron number 8 from transcript GRMZM2G055331_T07 (locus G RMZM2G055331) derived from phytozome v7.0 (chr-ID 4; pos 6 5265384 to 65265972 reverse strand)
ttcctgatatttatcgtttagctgcgagaacaaaagtaaccgagccttcttctttttttgatatgtttcaatgtgatcggagtggtagtggattccatcttatcttttttgagttattaatcctttacttcaaattttaagttgttttagttttatccaaagtcaaacttgtctaactttgagcaatattataacaattactgtgtaaaatacatgcagtatcaaaatatatttcatggtgtatctaatgaatctcgtttgatgttgtacatgtttgttcatttttctttatgaatttggtcaaaactagataagtttgacttacgacaaagctaaaaaagatttagcattttggaatggagtgagttttattttatcaaaatttaatatcagtatcaggtcgtgtgtgttggtgactaccttttgttttatcttatgtgttatctggagaactttggtgtttgctagtataaattcatttttatctcaagaaatctaatgattgactcttgactttcacaactcatgtttatttgagtttcaattattttcagggagtttttatcaattgtgcattggttgaaccatt

SEQ ID NO: 6809 - DNA, 677 bp, Zea mays
  Intron number 1 from transcript GRMZM2G162251_T02 (locus G RMZM2G162251) derived from phytozome v7.0 (chr-ID 1; pos 8 2581009 to 82581685 reverse strand)
gacagatccagttctggttcttgtggtcagggtgagtagtttttccctattatggtgtttggagtttactcacaatgaatatatgaattaaatttgtgaggttcaagtagataagtttaattgtgttaacaatacaatgtagatttctgttcgaatttttgatgctgtcttcggtgattcttgttgaatgctaaacatgtgatttaattgtaacctagtggttagctgtatgttgttctagagtcttgtactcacattaatttggaattgattgatgttctgttaataattggggttgattttcacaatgacatagttaaacaaattctctgttttcatgttgcattgggaactggttcaacacggatatacatttaggaggacaagctggtttggcaaattaacataatagtgatattccttgtaactcatactcatcaaatatagtcatgactgggttgctaggcattctacttgaataactccttgtaacgaaataagatggagtttactgtagattgatatggaaatacttgacatgctacatgttttgttttgtttctactgaaagtgatgtgattgaagtgcattctttgtttgctgtctttgatatgctttgctgaatataacatcacattgcaggtacagtgcatcactggcttgtgctgattgtggtt

SEQ ID NO: 6810 - DNA, 413 bp, Zea mays
  Intron number 2 from transcript GRMZM2G130505_T03 (locus G RMZM2G130505) derived from phytozome v7.0 (chr-ID 4; pos 1 97931108 to 197931520)
tcttccacctaatcagcagaccatagtccacccaggtaagttacttctactaattaacttgttcgacaaaaaaaattgtcttctacgaaaaactactgtcttcttgtaatctcaacgaacattattttggcaagtacagaaaatggggacatgtttgaattctcggtgtgtacgttagacatcatgaaaaatgaaaggaaacctgtagtttatttgatctggctacaagaatacatgcagaattttagtagtaaaaattaggttacgaaacaaaatgttatagctctgaatatatgaatgacccgtaggcacagagcaagtctgcaagtgggagtgaacgactaatttctatctaacaggtggtttacacgtatgcaggaatttttgacaaacagctgaaatacgacggtttt

SEQ ID NO: 6811 - DNA, 1037 bp, Zea mays
  Intron number 1 from transcript AC208907.3_FGT005 (locus A C208907.3_FG005) derived from phytozome v7.0 (chr-ID 1; po s 285019984 to 285021020)
tcgcatcctcaggacctccgcgtgcaacagcagcggtaagaactcgtccccttcctctccggtggcagtctcacgatcttcctctgccgccattgaactttaaaaatgagaaccaaaagcacacggtttctggcctccctattaggggattccacggagggactcctctcaggaaaaaaccaagtggtatgtgccttgcttgcatttcattttgtcccattttcaaaattgaaatgaacaaactgagctttttgtcatctaaaatttgtcttgtcttgtttttttcactaaaatttagacgcggtttggtgctcagctctgaagctttttgtcatcaataatatcttcctcgccctcgcaatatgttctggtctagattgtggccattccttgcagcaaactaagactaattactttttccttctttacacgtgacctttcaagaacacttaaatctgttttggacacttaaatcagttgtgtggttacctaactgctactgttcttactttgattttttggttgctcatggagtcatggtgcatatgctcatgttttcaggctatcatttttctcatcgcctacttcaatagcctacagcattagcaggttggttaaagatttttagtgtgctaatcttttctttttgcaaatagagactgctctaaaataaatgatggcttatgttttcatttcatttgttgaactcatatattcctcatctgtcatgtacctgaatgttatttgtttccctaattatcacatttctcatctgaagtgatagttgtgctgcaaatagtctcaggattacttgatgattgtataccaaaatgttatatggtgccctatttcgttgttgcgttacatgctgaccattcaatatttataatttaaggttaagcacatggatcaatttttctaaagcttctttcagttataatctttgttgcagtagtctatacacactcaaataagaattatattttgattttgctatttcagtaccgtgctttttacttcacaagaaaaggttggcc

SEQ ID NO: 6812 - DNA, 740 bp, Zea mays
  Intron number 1 from transcript GRMZM2G338955_T01 (locus G RMZM2G338955) derived from phytozome v7.0 (chr-ID 1; pos 2 37097622 to 237098361 reverse strand)
ttggatccccaccacataaggttacatgatgataagtccgcagactgcggattgcaaatatcgatgctcccgtccagtggaataccaacaaattggccaccgatccaaatgaactcgaccaccgccttttgtgtcctgttgttttgattaccaaaattatttctaaatgctatatttaagcaaggacgatttgtagcacaagaacccagtacttctcacaatgcataagcaaaattacctgacttgctacatctggttcaaaaggttcagatccaaactgcggacctaaaaaaagacagccgtcaattgcagcttatgcacatatcttcaccgacagcaatagttcagttgaacaaaaagatgtcggatacaaaagcctaaggcttaccacagcaattctctgttctccaggtgatagcataagaccatagcatcgatcagaaacttttgatagctgcatgcatattgaaaacccaattatatggaggaaaataattggacatcaagaataactaacatttaagtatctactactcttacatcttctgactcccttagctctgaaaattctgaatgcaaaaaaaattcttcaaggtggttttcgtgagagatccaacaacgtgcagaattgtcctaaaagaagaataaattgaaaagcatcagcctgaaaggtgcaactttcaaaatctgagtgatacaacttctgaggacgaagaacagagtgaattgcatagtccctg

SEQ ID NO: 6813 - DNA, 1040 bp, Zea mays
  Intron number 1 from transcript GRMZM2G027711_T01 (locus G RMZM2G027711) derived from phytozome v7.0 (chr-ID 4; pos 1 89811829 to 189812868)
aaactgctaggttgaacatcaaaaggtaaaagttgaagatttctatgaatatcttacatggatgacgtgattaaactgtactttgtagttgggaccctttgatatatttttttcttttcctcggtatgtgttaagtaggttgggtctactttatcattatggcagtcacatgacccatttgcgctgatgttaagataaacaacttggtgttcaaaagtcttaatcatgtaaccctgggatagggctcaactttcgccactaaggaaagaaccctggcacatggcttgtgctctagacttcttagtaagcagacaggaaatcttgtcgttgatacggtagttaacctacttgtttaatcatcattaccgcagttgccacaaaatcccattcagatgaatctgaaacctgcgcagtcatctttccattaatcaatctaatgctctgggaccatgtttctctgttctgtatctatatgtagcaaatgaatacctagctctcaggatacttacagtatcccgtggtctttaagctaagaactaacaagtccttgctactgagctacatggaacacttttttgttaagcatattatagacacatcatgcatatatttgtctctatctttgatgtgtttcacaaaccgaagctacagtaacccctttggcttattaccctcggttaagaactaatgtttcgcaagttgattctcctctaggtgtatacttcattttattgactggctgtctaagtaataaactgttgttaggcccgtaccagctatttttttgccccttctttgcataggcaacaaaagcaggagacagccctctgtttttcttttgatacatgctgtgaggaatcttcatgcttattggagttttgcggccttttgtgtcgaaccttgccccttagaccatcaacttaggcagcctttttcttagtatcctactagggcaattgatcccacttgcacacttaaacttttgttgcacctttccttccccagggaacaaaaaggtggagaccggctttaaaagatta

SEQ ID NO: 6814 - DNA, 892 bp, Zea mays
  Intron number 2 from transcript AC185448.2_FGT005 (locus A C185448.2_FG005) derived from phytozome v7.0 (chr-ID 4; po s 158450494 to 158451385)
ttctttcattcactctactcttcatcagagtaaaggtaatttttactctgattttgttaatttttgatttggcacccggtaatattaaattcacttggcaaaaatatataacttgtgataagccctcccatctatttctactaatttctagagtatgtcagtgcgaggggatttctttttttctttagaactaagtttgtctgtttgtttggcaaacatgatctatatactgacatgaactctgtgtgttccctatgttcatgcattatttcacattgacttactatgtttcattgtgctctttcttattaaaactagattaactaccatgactatttgacgttgaggaccagcgttgattttcttcaaactacgcaaaggtagtttgccatcctactaatatattggcagtaaatctcttgctgccttttttgaaaaaagaacatatgtagtcttcaaagtggtactgcactacgggttgatgtatgacatgtactacctgtgcgtggtgtccacaggcgaccagcgagagtttggcgatggagccaaagttgaacatgtcggacagattcattgtgtgaggcaaatgctggagggatgctaaatcttctgaacattggagtagcatggatgttagaatagggaaagttggctatctagatgtcaagaatgcatcagcaagccacggcaggacatagtgacaaaatgagtcttgctctcaggtgtgcaaagctatcaatttccgttgcggcttgtgtttttacctagggtgaggaatagtactgcatgaaggtcagcctaacattcaaattttgtcctgaggttcttcagttacatttgttaatcctgttcatactcatgatgtgctcatcaggacttaaggttagcttga

SEQ ID NO: 6815 - DNA, 975 bp, Zea mays
  Intron number 10 from transcript GRMZM2G428035_T01 (locus GRMZM2G428035) derived from phytozome v7.0 (chr-ID 4; pos 189381990 to 189382964)
tctgcactgtggaagcatcgacaagtacatttttggtatgattacgaagtctgatgggattaaccctttacctgctgcttaatggtagattcacttttctaaatgccataccccaccaaccatcagccaccaaagacgttctagttttatttttagtcagagcatcaagtttgataagtttaccaaaaaagtagaaatatttatgatactacataattatcattagatccattataaaatacactttcatagaatactgatctattgctaaattttgatacatctttctataggtttagttgaacttaagatagtttgaatttggatcacctacaatgactttttttcctaagagagagtatatacaagtggcaaatctgaactgttgtttgtttagtttttttatttaattaattgattgatctaacaagagaaaaaaattcttaaatcctctcatgaatggagacataagtggccgtgcgggcccttgttgctgtggaccacccttccttttggccatattttattatatttatgtatagttttatttatgtttgatatattaaatcactaaatatttactaatcaaatcaagtcatttttatagttgcaaagtaaaaaagatctaccacgtctaatagatcatgcatgcatcacttagatataggaaaaagtatttttcatatcaaactttgctttatttatcttatttaacaaaataaaaaattaaataactatatgtttcacatattacctcttaggaagtaatagatgatcctaaccttatgatatagttaaatgaatggttaacaatcgtttgagagtaccatagcatatatcataaggagaagaaaatcagaagtgccaaagatcctgaacaaatgtttagtgttgcagcagtcagcactatataaaattccaggaattgtattctttctcttgatttttagttctatttttttaaaggaaaaaacc

SEQ ID NO: 6816 - DNA, 922 bp, Zea mays
  Intron number 2 from transcript GRMZM2G107645_T03 (locus G RMZM2G107645) derived from phytozome v7.0 (chr-ID 1; pos 2 80465581 to 280466502)
ctgctggccgcttcaccgagcgcacgtccgccacggtaaaaaaaaaacacttcccgttttccttttgcttcacttttatttcccggttgtgcctacggctggattgccattcctcctactgttattaacctaaatcatgttaacctgaaccacaataaccgatgcaaagtctcatatgacagcaactgtgtacatacaaagttccagagaactaggcagctagaccatgagccgagtagttatatggttggtaattctgtgatattacttctattcaggtcatgaatggtagcaagaaagttttgagtaatggcctaacttgattttactggaatcagatatcgtgtatgacaggagtcatcaattgctggtacattgtgtgcaatggccaatggttacaagttacatcaaaggcagttgacattgaacaaaattcgataattgcaaatttttagtgccattaataagctttcaaaatgatattttggattttatggatctttgcattatctgattgcagcattaagtattctttagaaactcttaatgcatttcctaggagtataagttaagctgaaccaaatgtttatgtgaactgctaatcatgtgtcacacatgcagtgcgctctgcagtttatgactttattgccctgaacccatacatctatacacaaaacatagtgagaatgcatgacatatcttttaacatgacactgtctcagtctcaacttgtgatgatgccattatttattgccaagaacttgtgctgccattggcataccacaccctagagcatggtgtgtgtgtgtgtatgcaggtttccttctggtttgccattcttttgttagattgtgataaccatgaatcttatgtgttttagtatgtagcgagtcttgctggtgcactggcatactgtcacaaa

SEQ ID NO: 6817 - DNA, 848 bp, Zea mays
  Intron number 6 from transcript GRMZM2G060348_T01 (locus G RMZM2G060348) derived from phytozome v7.0 (chr-ID 1; pos 1 24665423 to 124666270 reverse strand)
ttttggtatgtgtgccctgcaaatattgccaagttaattcaatagtgtatctctgtcaatccttaaaagttgatgtcatagatcattttatacttccaaaaagttgtgtggcatttgtttgtgcagctgcatattcatttgtggtaccacatttttcgtataaccatataatggggaggtaggggataaatgggctttatactttgccaagagcttgagagacattacaggattgggtaaggatttctttgtttgattgattgcttaatgaactagagcacaatcccatctatatatagatgaggtagcttgacttctatgattgcttaatgaactagggcacaatcccatctatatatagacgaggtaacttgatttctaagaaactaatcgcaactaaggaaataaatatctaaaccctagaaaccgtagcgctgctacagtaatgctttagcccaaactggtccataactaaccactaaaatatttttgttacaaaaatgcaaacatatgtttgcatactcttttattaaagaaattgctacagtaaaaataatttgagctacacaaggtttctaaacctattcctctctacattgtgtcgtatatgatgatagtttatttgaacatgtatggctaagaatatttgtactgtgccattaactcccatacatcgattgcatgtattgttacacattatctgcgaacactttagagtttcttatgttttgtttagtttgtattgactttcagttgcctcagagatcttggttggtttagaaatgattggtaaggtcttgttttcacttttagaaagaagaatttcagcacacagcatattcaaccaa

SEQ ID NO: 6818 - DNA, 495 bp, Zea mays
  Intron number 3 from transcript GRMZM2G076848_T01 (locus G RMZM2G076848) derived from phytozome v7.0 (chr-ID 4; pos 2 00089088 to 200089582 reverse strand)
aaggcaagtgattttttatatatagtttctatttgattgttattcaatgcatttattagtgtatcaaataatctacaatttctcaaataatttaatctatcaatctcatgatctgtagtagttatctataatattgttaaaaagcctaagtacaaagatcttcatgtaacagagtgtctgtgtaggtaataggtcctgtatatgaagctttttagttctagaatgcctatgtaggtaacagatgcaactagtacttggtttttgattattaagttattaaacatagaacaaggctagagtaatgaagttgtatatttgtctagaaattattatatgttctgctctgtctaagaaaaatgcacacatgcttcagaacccatctgatctttgtcattcacaagatttttttgctagtttagtaatttaatatctttttgcctgttatgatgttaatcaccagaattggtaccaaggaaaagaagtaggggcaaacaa

SEQ ID NO: 6819 - DNA, 779 bp, Zea mays
  Intron number 3 from transcript GRMZM2G090422_T01 (locus G RMZM2G090422) derived from phytozome v7.0 (chr-ID 1; pos 2 77739919 to 277740697)
acaccatcagggtaagcgttttcccactcttgttcgtatgtagcttcctgctagttagagctggtaactaattagtatcccgattgtaattggaaacgaatggttttcccttttcttacataatattatggttggtctgttgattaaggcattactggaaattctagtttcgtctgtgctgaacatcttcattgatttagtttcgtctgcgctggacatcttttattattgagaaattcttcatatttgttgttgaattcttgttgctaaatagtcatttatatgttggcggaggtattatgctgagctgtgcatgattctggatgatgaagaaaaatcaatcggattcccattgattttacaatatgattttaacaaccagctacttctgacaaatcatgccacatcagaatatacttgcctctggtctggcggtcatggctcactatttgatacatacatttgttttgttgatacaccattttaacatcattgtatcattttaacaccattttaacatcattagatcgttactgtgattctcctatgatgtgatcaaaatatttgctactcttgctggatgttcccattacatttcaattagaaaaaagagagtctttatgtgagcgcctaaaggcggcagtagcagttgctaatgttttcatggcctttttctttcacactggaattgtatcctaccaagttctgatagctgactgcacttgcccttgtccgctctatcaggaacttgaggagaagaggaaggagaaggccaaggt

SEQ ID NO: 6820 - DNA, 348 bp, Zea mays
  Intron number 1 from transcript GRMZM2G043513_T01 (locus G RMZM2G043513) derived from phytozome v7.0 (chr-ID 1; pos 1 84288487 to 184288834)
ctaaccaagctggaaccagagcaggggtttctcaggtgcctatttttttcttcgcttctattctcatttttaaggcactacatctgacttacgtgactagatcatgatgtgataaaactttgtgtaccgtattgttctctaaaagccatggtctgtttgagtaacactctaaattaatgtataatattgttttatgttaagttttattcctttcaagttgatatatgtgtattgtttcttctgttatgatggtatgaagattgaatgtttcagtagtgactccatcagtaatttgttttcttttaaatggcagtcaaatcagaagttacaaggtttaagggaagaatt

SEQ ID NO: 6821 - DNA, 930 bp, Zea mays
  Intron number 1 from transcript GRMZM2G002492_T02 (locus G RMZM2G002492) derived from phytozome v7.0 (chr-ID 1; pos 2 3937455 to 23938384)
cgtcgcttgcctgcacctgcaggttcaactcgcttgtgcgttcctccctcccgtttcctctccgtaaaaagttgcttttaccagcaggcttggcccgtgcccgtggtttctgcgtgaacgcgggtcgcatgccaagtattcggggaaatgtgcgtgtgtcatttgaattccctctgcctagtgtttgtgcatctggcatttgattttcctctcggccctctctcatgctaccacgcgtttggtgtcgtttcacctgctgcagccacgtcattgcgaccctcaaatagctaaaccgttttagaaagaataatagtagtagtacgtaagtggagaacctttatatagaaaacgaaaagggaaggtgaattatttatcaattatgtgaagcctctctctgaaaacaaacaagggatgtcaaaactcaacaggacaaccgggtcacgtcgatgtgatatgactatatgaggcaccagcttatggatctttctgtgcctactaccgtttttgcctagtccagcagtccagccctggccacaattaaggtttctctaatttgactgccacaggcacctggttttcttgctgcttccgctgtttcttcctcaacctctccagctcagctgccgcaggctgcgactgccatggattccaaatccatgttagtgttcttgcccgtctccctttccgtttcgtttctctttgcagtttgctggcctcccttgtttgtttgtgttaatgttgattcgatctctggttgagaaaataagtagacaggtggaaggaaaagttcagtacaatttgcaatagtttggacattcatatatttgggtattgatgtgccctacctccattgcccccttttcttcagaataattctctcatggttcttgttcagggaagcatttgtggcaagtgaggcctccgtcttca

SEQ ID NO: 6822 - DNA, 820 bp, Zea mays
  Intron number 3 from transcript GRMZM2G171660_T02 (locus G RMZM2G171660) derived from phytozome v7.0 (chr-ID 4; pos 1 86605075 to 186605894 reverse strand)
ggttcctcaagtgagtactgctaatctgtctttgccatgactagctaaatacactgcctagttccaccagtcgattgattgactttccaccattgaattcatgagtctcctgagcttagagccttaggtctatgaattatcagtatatgtcatgtgattgtttttggatgtggtgcatttttttttcaatttatctgtcactatgtggtacaatggagtaatggaaaatatcacccgccactcggtaaactcagaaattcttgttaaattatttatcttttgaacgactatactagtttggaaattaatgtttggagaacctttagtagtattctcactcacacaagatttgcaagagctttaattgacctgagccctgttctttagtgagttatgtttctgaaacagtctgtctcataaccttgaggactgaagccatctatttatatacactaacctttctttattctcaagcttactatctcgttggtttcttgcgtctcaccatgatacttgtagtttgctgaagattgaagacaccaatgggtgtgttagttttcagttttcacatcatttggaagttccaatacaaggaaaaaccctactatattctgtcccgccaaatactaagtcatggtttagtttctaatgtacttaggattgctttgattatgtcggcaataatagtggtatatacattgagaattttgcattacatttcatgttcagccgtattattttgaggggaaaattgccttcttaatactgttcttcctctcataattttttacaattgcctcttcctgtatgtatttataga

SEQ ID NO: 6823 - DNA, 767 bp, Zea mays
  Intron number 3 from transcript GRMZM2G361842_T01 (locus G RMZM2G361842) derived from phytozome v7.0 (chr-ID 1; pos 1 73319108 to 173319874 reverse strand)
cagtaccacacttgtagaactctttacttatcgatatgtacggttcttttcattgagttatgtctaggaaaaggtagaggttcggtcgtagcatgatgtctaagtgatagcatatgttgtgtcacatctccttccctgctccaaactctacttcaaaagtaacaataacagaacatatgaatatcaaaactataaagtgaggaatgcagttatacaccattccctgttggctgaagtgaaaaaaagtgttcctctttggctcttttaatccagattccagaacatttttgctaaccagggaagttatatttcatctcaaagtttctgctatttccatgccttagtgtcactaaatggctgactatcatcacattcaaattaaaatagcaaagcttcttcattgaaactttgcacacctggttggtaccaaattttccccgtcaaatgcatattattttctaacttcatattagtccaaattggtacaccacacatgtgttttggacttttggtcgtaccttctttattgtgaatggtcattagttatttttaagctaatgaccttctagtttcagcattcttttaggccttcgttggagtgattgctgctgtgttctattttatttttgtcatttcagtttcctcttttgtacaattttccatcaaagttcattaatttcaatgagtatggtgcaacctatgttttctgatttcacattttgtgtctggcagggtcaatacgcttatccaaatattgacccatacta

SEQ ID NO: 6824 - DNA, 871 bp, Zea mays
  Intron number 1 from transcript GRMZM2G332829_T01 (locus G RMZM2G332829) derived from phytozome v7.0 (chr-ID 4; pos 7 6079382 to 76080252 reverse strand)
accaaaattttgaccaggaattgcagcaggttccaaaattttggccgagaaacaaatacttttggggctatctctttctccatgtccttcttgcttgagtcctcttcctccaccttctccacacttcaactgacctgttgtagcaaaaaaaattacaaggatgtgcaaagataagaatgcagcagtgaggctccagacttccagagaatgcccatgcaactatgcaagcactacagcacacaggtttcagcttttagaactgtacataccaaacaaatgttgatcatttcctgcatgatggctttgacagggttcctgctcgaattctgatcgattcattcaacgtgatcaattttctcaacatgttcattgtcctcacactaaaacccaaaagaatgaaaattaattaatataaggcacttgcaacaaccactgcacactgatctcgacatgcttagcaaacaagaaggctatgacaatagggtttcaacgttcacagttatgcttagcaaacaagaactaaccatatcatgtgcactgatctcaacatgcttgctgcttgacttctggtcaacttcctccacatgttgatgttctttgtcctgaaactcaaattcagaagaaataatgaacacaaggctatgacaatcacagtactgtgaacacaaggctatacaaatgatatcgaatggggaaggaatccccttgctattcaaatccatgggagaggaatctccttgctatttgaatagcaagcggaattcctctccatggataccctcaggatccctgatcaccaaatcaacccttaatcaagtactgtgtgaaaacttaactaagccagttcctatgtccatgatagggtttcttt

SEQ ID NO: 6825 - DNA, 618 bp, Zea mays
  Intron number 1 from transcript GRMZM2G061078_T02 (locus G RMZM2G061078) derived from phytozome v7.0 (chr-ID 4; pos 2 38279869 to 238280486)
ttcattaaggttgtgaggtgacatgtcagctagcatttttcttgattttgattgtaactagtcctgtcatgggttgttctcttgtatcttctattttttattgttttttgcttgattagttctgtgtttctgtatgattaatataccatgagtcaatattttgagtcaattcatgcttttgtctgtattatcgtgcttctagtagacctctactatttgtttcatgcactgtttatatcattagttatggatattatgaacatattgtgaatcgtagtgatgtttttaccatgcactgggcttagtgacttgagaggcacatgttatttcaattgcattgtgatctgactggtatctgtttagtgtttagaattgcaccacgtcagtttgtgttcattccattgacaaaccatgttcctttcatgattgttgccgctttgtcagctgatgtttgtgcaggactgatgtttgtcatctgtttagaatcttctttcatgattgttgccgctttgtcagctgatgtttagaattgccgcatgtggttatgcttattggtgtcttcgccatctcttcctttttgcaggcacatcagcagcagcaacgcccaccaccgccacg

SEQ ID NO: 6826 - DNA, 948 bp, Zea mays
  Intron number 2 from transcript GRMZM2G034360_T01 (locus G RMZM2G034360) derived from phytozome v7.0 (chr-ID 8; pos 1 66482308 to 166483255)
accgcgcaggtgcatacacacgacacgctgaccgcttcgcttgcacattaaccgcgtggagttattggttggaagttgagggataggccaggggaagttggattgacgaattctcagctgggagctcaaaaataggagggtcttggaggggataattttttttaggcttttaaactagtccttagtgacataaatgccgctttggtttaaatctagcataggaaattgaataacggaaatggagaatttactgctccgccttgggaactcgactcgtttggaacacgtgcacgggcacgctcttcgatcagtttcgtggaattattactgcgctccaaactggtcatgggaaacggctagaaaagcatgcatgtttttagtaccgctttgtgtgtttgctttaaatgaaaactctgttaggttttgattcattttttttaaaaaaaatagattaagtttggtccatatgcggtttcagttatttaaatttgtttggtccatatatgggttccgttatttaaatttgtcggcgtattagtcaaccggcactcgcggtggtcaaacacacagacaccaaacatgcttagccgcctgctgccggccccataggcccagagtattccagaggctgtcgtactgatccagcaactgcaactgtgcaacctttctctctgccatgattgtagtcgacacatataccctgtctactacttcctgttaactgagacaacgcaagcactctggctgcctgcaatgatttgcaattgtttttctagtacaatgtaagatcaccaacccctacctataagtcaaaccaaatcacagcaccttccatcttttctctcttctatacccatgagtgaacataacaaatgtttctttaccacggtccacgggttaattgatgtggcaggtgacgaggttcaagtgtgggggcttcgcgctcgg

SEQ ID NO: 6827 - DNA, 567 bp, Zea mays
  Intron number 2 from transcript GRMZM2G338406_T01 (locus G RMZM2G338406) derived from phytozome v7.0 (chr-ID 4; pos 1 11256741 to 111257307)
tcgacctcctccagtttggctccaacacctccgaggtaattgtcatcacgaccgggcgcttcgctttcctccactcatgtaggtctcgttgccaaatcctttaatcctgttgatgcattgtaattgcccaccaaactactaataagggaaagaaaaacaatcacttgtcgccactgtcgttcaggaatcaggattcatctcttctcccatgtaatttaaaccggatagttagctctacttgtagcaaaatcagcacaatatttgtgtgctatttaatttacccctgcacgatttagtattgactttcgattttttggggaagttcacgggggatccccacctgaatgttttgatgtcatgtagtcttatttatgttttttctaaatacattttgttttccttattttgccatgcagcttgataaccaccataatcagttggtttaggtataatttacaataatcttgacctctacatgttactctttgttagagatgtagaaatttcagaattgcaaatagattttagtcacttttagtagtttgatgtgtaatcagttggtgttga

SEQ ID NO: 6828 - DNA, 952 bp, Zea mays
  Intron number 4 from transcript GRMZM2G338406_T01 (locus G RMZM2G338406) derived from phytozome v7.0 (chr-ID 4; pos 1 11257524 to 111258475)
ttagactgtgggtgcgatggtcgagtgattttaagggatgatgctttacagattggttcaaaaaaagcatatcctctttcaggttcttcagtccagtggggatgactgcaggggttgtgctattcggatttggcctttccaaaagggttttccctatggtaccgcttgctttgtccaaacctccattttatattatcaacttgtgtgcatgaccagacaagatgtgaatattgtccatccaattgatgtttgatgcgatgatacttcatcaggctgggttttccctatggtaccgtcggcttgcaggaggggttcgccagcttgctgttcgccaccgctgtcgtcttcgccttcgtggttggttcccctccccgctcccctctccctttcgacaccaaaaaaacatgctgaccatctttggcaggcggtggatctgataggcagccttatcatcttcagaaaatacagtattaacctttatattcacttatggtttccaaagatcgtgattcttctgtcctacatattagattgacatccacttactaaaatctaaattttattatcctaaaggtgtacttccatattttttatttgaacccaacatgtgcacaaagaaaacacttaatctaaggggaaaataatagaaaatgactacacattttcctatttgatatgtttttttcttaaagggaaaataccaacctgaatactttttttacagggatgtggagtggagttattgcagtcattgcacttcgttttttcttaaaaaatatacaaacatttttgtgatggacaaatattttgagacactgcttcctgaagatttgagttttgacaaaattgtacagagtagattttgtagttcatttcaatcaaactatgaacttgtgaagcataagctaaagtaatttttctaagtaaatctgaatgaaatctctacagttct

SEQ ID NO: 6829 - DNA, 499 bp, Zea mays
  Intron number 7 from transcript GRMZM2G109651_T01 (locus G RMZM2G109651) derived from phytozome v7.0 (chr-ID 8; pos 6 2981373 to 62981871)
agatcccagccttttcatccatcgctttaccaaatgtaagctaatgccatatatgttgcattgtatatggctgtcagattgcacatgagtggttatctgcaggtttgattaatggcattgcatgttcggcgaatctgtttagtgcaatctgagactcatcttcagctgatctcacctcatggctaattgaaaactgtaccattgaacaatctgtagactgcttctgtttttggtgccaatgttgtgatttaaatgccgtatgggaaatgtttatcagaacatcctaagcgtgctattctgtttgttgcaactaacgagatccttatgtgaggattgaccaaaattagttcccatatttatttacatggggctgattatttgaggttttcacagtatatattcattttgtttttaggtttgctgggaagaagagataatgctgtctcagacacagctttttctcgagaagtctcagacacagctttacgcattgtagcta

SEQ ID NO: 6830 - DNA, 534 bp, Zea mays
  Intron number 3 from transcript GRMZM2G311182_T01 (locus G RMZM2G311182) derived from phytozome v7.0 (chr-ID 1; pos 5 6759747 to 56760280 reverse strand)
tgtggccatatctggaaacatttgctgaggtgaatatctttggtttcttttggttcttaccttgaacattgaccatgagatggctctgaactgtcttcttttaatgaaaaaaaactgaggaaagtatcttatgacttgcatggtacaatgtaaaatctgtgaatagttagttaggagacgatatttgataacccctcaatttcaaaattgtaagtcgtttggttttttctagatttatagttttactatctatatctaggtgcatagcgaaaactatatacttaaaaaagccaagacaacttacaatttgtaatggagtgagtacatattaggaaaaggtctcaacactcaaaaggtaaaaattcaaattatttccagcagagttgcataaaaagtaacatttctccttttgtaagtgttgatttcttatatgcaaaatctctgtgtgtactggttctttttcttacatgacattttctacttcaatggtcctacctatttgataaaaagctgtatttttctattttatacagg

SEQ ID NO: 6831 - DNA, 550 bp, Zea mays
  Intron number 1 from transcript GRMZM2G311182_T01 (locus G RMZM2G311182) derived from phytozome v7.0 (chr-ID 1; pos 5 6760514 to 56761063 reverse strand)
tttttctccagtcatcaggcttcttgaattttgaagcaaaaaaaaaagaacttataaagcaatggtggccgcatgttcttgtatggattagcaagcaaaaagttaaaaaaaaaacacaagctcataaagcaatgatagtggcatgttcttgtatggattagtccctgtaacatcaaatgtttaaatgataattactggtattaaatatagtctgattataaatctaattacacagatgaagactaaaatacaagatagatttattaaacctaattaaacatatatttaatatctataattaatattcaaacatttgatgtgacacgaattaaacttcagtgaggggaaccaaacacccgctaacaagcagagtagttgcacagacgatgttcttttctggtcacatgcatggaagcgcatgcacaaactggcctagcgtttccagtgagatgggatgccgttcacctaaaattaggggatttgtttttattttcttggtattcgcttttctggtctcttagttattttggttcataattttcaaaaatca

SEQ ID NO: 6832 - DNA, 1044 bp, Zea mays
  Intron number 1 from transcript GRMZM2G058441_T01 (locus G RMZM2G058441) derived from phytozome v7.0 (chr-ID 4; pos 1 29000510 to 129001553 reverse strand)
ccgagcttaggagaagaagaaagaattgttttatatctcatataaataaatcatattgtctcgagaaaacaacaaggtaacattcttgctattatcacaaacgacttctgttatcatgagggcttgtgttactatttctgtgatgcatagcttcactttctttaatgcaggtgctataaagctgcaacactggacatcactgtacccttagctgacgaggcaaaatcaaactcattagctgcagccaccaatgagttggacaggcttttcagtaaacatgattttcgagaaatggaggtgcttgatatatattttctaatattgctgctcctttttttaatgttccatgttagttttttgctattaaatgaggttgaaagggatatatgtcccttccaatgattttgtaggaggaagcttaggttggctaaccccaccacccatgatgctagtaaacttactccaggtggctcctcaaattatactgtcaggatatgttgggccattggggtacattgatggaagggctttctactcattgatcttttcttttctgtgtcaaatttggacacactgacagctgtcaatcatttcatggctttactgtttaagtgagcactgagcagtattgccaaattctaggatacttggaaagtagcttaactgtttaagtgtaaaatagtcgttgctctggtttagggtttggtgagtttcatatactgcatatatccccatcggggaccatttagtacatggtttttaaagcggtaaggcggtccaaggcgttggagcaccgcctggacgcctaggcgaggtaggcgggcaaggcgcctaggcgttagaccaccgcccggacgcctaggcgacgccttaagaacagagtttagtacacataattatccatcctcctctcatctttatttgctttatgcatattcattttttttaaattattggttgtatggaatttatatgatacttttggagaactaactatttcgtcttttaggttgttggacaatttaatcttggttttatcattgg

SEQ ID NO: 6833 - DNA, 515 bp, Zea mays
  Intron number 3 from transcript AC206432.3_FGT005 (locus A C206432.3_FG005) derived from phytozome v7.0 (chr-ID 8; po s 133339323 to 133339837)
tgaagatatcagaagcaaaggcaatttttaatcaggtatcttgctatccctgttgctactggttgattgcttcatttaatttgatgatatttttcttttgagaagagtagtctatggttaaataaagttttggaatcctaatttatgtctgcttcctttaacctggttctgcctatcttgtaccatcgcgcttcttgtttatgaatagagtatattgactttacacagtgtaaagttccttttagggctgaccaaccacaatttgaggtactaatcaagaaaaatggctagagttaaataatatgtattcaatgtcaaacttgttccaaaatagtgctgatgtgagatgatatgtcttttatagatcacttttggtttgtttctgatggtgaatttgtttgtaactttataagtaaatgcatgatgccattgtcactagcaatgcgtcacctttctaatttttatgtcatgttaattgttttcttgctctttcccttttttaggctgaagataaa

SEQ ID NO: 6834 - DNA, 933 bp, Zea mays
  Intron number 2 from transcript GRMZM2G300082_T01 (locus G RMZM2G300082) derived from phytozome v7.0 (chr-ID 1; pos 1 99007605 to 199008537)
tccatcgccaacttcatagtctcccactgctcaaggtagtgtcttcatctgacgcgaatatactctgctagcggttgtctatagaagttagatgtgagctatccacttattattcaaagaataagcacgaatgctttttgtgatcgtgattagtgtgtataccacgtcgcattagaactatgcctcaacgcagcagattggtgttgtccccaaacttgattggtactagaagtatagaattaaagtacagagaaacccattgagctattgctggaaaatatagatcaatctcaacattttgctagcctgagcatttaattggtatatttgtcttgtgccaaggcttattcttcctaccaattagtgaaagcattaagtttgggcatgttgtgagtggaggtggcaaagtgcataaagtgggtacaattagatcaacttaatctgaattcattttttaaagttgccaagttcacactaaatttcagcatggagctttgatattgattttccacacaattgttatgaggctaatacatatgcaagataccttttaaagtattgctgccataaagctcttcataaagttacagcatgtctagattatttggccgataagaatcttcgccgcttgatgtttgatatcatgcttgcatgggaaactccatattgctgttttgactagcttttcaagagatggatgtgagtatctgaccaaaattcggaacgttgtcttcatgagcatagatttaaattttgacaaattagagaaatccactttttggtagaatcattgaatgcacaatatgcatgttgcttttctgacttctatcaatacatagagatggctaactcagtctcttctctgactattgattttccacaccgcgctcatcttcagtgggctggacagtgatatccagcgacggtggtgta

SEQ ID NO: 6835 - DNA, 704 bp, Zea mays; identical to SEQ ID NO: 6592
  Intron number 2 from transcript GRMZM2G003930_T01 (locus G RMZM2G003930) derived from phytozome v7.0 (chr-ID 8; pos 1 0290441 to 10291144 reverse strand)

SEQ ID NO: 6836 - DNA, 631 bp, Zea mays
  Intron number 1 from transcript GRMZM2G139872_T01 (locus G RMZM2G139872) derived from phytozome v7.0 (chr-ID 4; pos 2 852986 to 2853616)
cccaactgcgcagcctcgatatctcctacctcaaggtagggtggcgtggcgcctcattctcaaatttagttagtagcgtcagttaggctgaggaaaaaaaaaaccaaacaaactgagattgctctaaatgatactgattgtgacctgaacacctgacttcctccagaaccggtactgttcaatgatgcccagtagaaattggttgtaggagtctgtttcaataaaaaaaatgttcttcttagtgtttatactggtcccctcataaatatttgatgcattttgagctttcttccttgctggtaaattgtcgggttaacattggttgtttcttacaacaacagcagtaaccaagaatgttttatcttggttactgcgtgatcagaagctctgggatcccaatttcttagccccttgacattgggttagttggtcaaattttgtgtatatgtagactaaatttcacttacaagggtagggttcactcgcccatttgaatgcacaacatgtgtacacccctctatctgcctacattgtatatagtacgtacttaatgtggctcgacggttctgattgtttcttgttcatagccaagaatgctcaaattttttatgccttgttccccaggtgacca

SEQ ID NO: 6837 - DNA, 926 bp, Zea mays
  Intron number 1 from transcript GRMZM2G049762_T01 (locus G RMZM2G049762) derived from phytozome v7.0 (chr-ID 1; pos 6 5348736 to 65349661)
cggcggcgccggcgcaccgccaccaacacgtacgtacgcgcgcatgacgattccgacgcaacccactccactccactccactctctccgcgttcacgattcctgatgagaaaatgaagagagagagagagagagagagcgagcggctttgatctcagcacaagaatttatctacaggtcgtcggaaatggagctgctcatcaactgcaaatggccagagggtatttgactccgtattacctcgcccagcattactatgccaatgatcctttgaccagcaggcaagtattttttttactactcctacacagttgcatttgtgtaatgtaatctaaaccatcatacatgatggttatatgtgcgtcgtcgccagcaggctgtttacgacgaacggcggcggtcacccttcgtcccatcacaaccatactcgtcaggacgatcagatccagagcgctgtcactatacaggctgcctcgtctgaggtatctgtttttcttcttctcaaattataaagctattttaattttttaagagtcaaaagatatactaagttcgactaagtttatataataaaataatattatttacgatactaaataattataataaaatttattgtttacagtataactattcgataccataaaaaaaatatttctatatttgttatcgagatactttgacttataaaatatttaggataatttaaaatgattaaactaatatatatatatatatatatataataaaagatacctagaaaaattctaaacaaatagaatttagagcggagcaagtaaattaccgaacctttatccccgtaatctaccgattcaattttcagtggcgagaatgttcattacagtacggttttacccggtctgacgtgcagagctcatcatcggtgagccagtggcagcagggtca

SEQ ID NO: 6838 - DNA, 1043 bp, Zea mays
  Intron number 2 from transcript GRMZM2G122148_T01 (locus G RMZM2G122148) derived from phytozome v7.0 (chr-ID 1; pos 2 95060718 to 295061760)
agtatcaggagagagtccacgacttccctgacgtatgacttccacgattcggccgtcttggctcgcatatgtaggaacggtgctcctctggaatccggaaaggcccgggtcttgaagcacagtattatctaggtttcttgccttctcgggtttcagtttggattttcctaatattagagaatggatgaacaagtaatacctagatgggcagaaacgagtaaagaatattttggtatttcgacgtgctgtgttctttttccactgaggcacttacattatgttatgcaaaacgcagcagctatggttcagtttagtaatcctccaattgttaaactacggacagcttagcttccccatgaagtatgttgcgccaaactctgcaaagtataataatgaataagaaacagagtggttgttaattcagtacgaagcatacttactatcatgatcctgtaatgggcagaggaagatttttatatcgttaaatatttgggctggactaattgatgttcatatttggttaggggcttagcatacttttcaaaagtatatgtatctggctatctgttgcttgctcaatatgctgctacattcttggatgcacttgaattttagcctacgttagagttcatggtgctgtgtcagtaaatccacatgcttaaattaaaatggagtggctatttcagttctactatatcaaaggttgcttggcttataactattgttcaacaaaagtgatgtgagtttattgatttcattttcattatggtcatttcttattgcattattatatttttctcaatctaggttgagccattacgcagtgaaagctgctgacttgtgaccacaaggtcctgtgtctgagttgtggaagcctcttgcaaatgcagggaaaggccgtgtactatagacctaataggtctgaccctttcctggaccccacacaagtggggctgccctaagttgtgttttttctttaatatctatctttttgttcaccattcaaaaatcgacatacagaaactgagtgtaagggagttctc

SEQ ID NO: 6839 - DNA, 618 bp, Zea mays
  Intron number 1 from transcript GRMZM5G898434_T01 (locus G RMZM5G898434) derived from phytozome v7.0 (chr-ID 1; pos 2 67672980 to 267673597 reverse strand)
acacaccgctcggttaaggacccttcgactatgtcctgggtggcccaaggtatcgagttcatcacgccgcggggaaggtaatgggcgcaaagcagctggctgaagccactggcttcgccgaacaactgggttacccttcagggtccattatttttaggggcggacaagatgattatctatactttttccctgatagcatggagatagatgtgtgccgctatatggccgataatgttggctttccgaagctagaagcaatgctatcaactatgtcttatgaagacttttctgattgtctggcttatactcatatcaaggtgttaacctttgttttttagcttcgggttgctttgatgaaaaaaactcatcctttgtaccttcgcagggcctgctcttaggcaaagccttgaagaacatgagaaaaattgagaacgaagttgcccagaatgaaattttaaagcttagatccgaagtgtttaggcttcagtttgattgtgaagaaaacgagaaatctttcaagatattagaaagggactttattgatagctagacagaagtccagaggctcaaaacttcaaatgctaaacagaaaagcgcatctcaacgctcgaagctgag

SEQ ID NO: 6840 - DNA, 583 bp, Zea mays
  Intron number 1 from transcript AC201872.4_FGT003 (locus A C201872.4_FG003) derived from phytozome v7.0 (chr-ID 4; po s 193522850 to 193523432 reverse strand)
cactgcgaggtgctggcctgcagtttttacacatcgtataagagggtaaggggaattcgtggtttaacaaagcgaaaagaaaatcaggcaaacatttgttcaaagattgaggaaacgtagtaggttaacagaaaactgcaaggccctatgctgttcttagagatcttttttctcgacaaacaaagcaagggcactaaaagaatccattgggagttggaactatagaaaacatcctgtaaaaaaacgaagcaaaattctaattttaaggtgcctacaagaaaaaggaaaagaggtactcgatgaatcttgtataattcttaacatattcctcttatcgcctagtgcaactatactctctcgacgtattgtcgtattttcttgtgcatcgaaaccagggcttttcttttttactagaggataagcatgtgccgcacgcacgcacaagatatggtttttgtgagacgataagctctagtacacaattaatatattgctaaaactttatattgttgtttatcatcttaaatatatcaaatggaaaaactcaggactacaaagttggaggcaatagtggtagcacgca

SEQ ID NO: 6841 - DNA, 592 bp, Zea mays
  Intron number 3 from transcript GRMZM2G446189_T02 (locus G RMZM2G446189) derived from phytozome v7.0 (chr-ID 4; pos 3 5221628 to 35222219 reverse strand)
ggcacggggaagtcttgaaaatcatcttttcagaagtaagcaatcacctaacagagttaatgctttaagttgagtagatttagtgcctttattactaatttgtttccccacttaggcctaaccagtttttttcttcactaagtcttctttcatttttctgagcaaccttggattttttcgttctctatcctctgtgacatcagagataattacattctaacttgatttgattatggtaatgtagacctgaacattttagcctgccttattaagtttgatctgtgccagttacacctgttgagatcttcttagttagagctgtgcaatagtactgtagtgagcaaggatgcatgcctactaccaatggtggtgttcattctattgctaacttctatattggtattaggtcatacccatgtaacaattattattttgaagggggtagggacattaccagcttttcacaaagttgattttattttatgtgcttaatcttgtcaaccataatctttctatctgcttgttcttatgatcctgtcatcttactttgtttaatcttgaaggggctcttcccctaccttggtccaacagg

SEQ ID NO: 6842 - DNA, 997 bp, Zea mays
  Intron number 1 from transcript GRMZM5G853609_T01 (locus G RMZM5G853609) derived from phytozome v7.0 (chr-ID 8; pos 1 59091334 to 159092330)
gtctcacggaagcagtccagataccgcttcacaaggtattgggcctgtttgattcagcttttttctgaccagcttttctgaaaatctggctgtggggagaatctagttgtggggagaatctgagtatcattacgattacgtgtagaggaagataaagttgttcatagggctcagaatctagaaagtgacggatttctactactacaacgactcaaccgattatgtgtttatgttgattttggatagtttttgtcccaacgaattttatagaagttggctgaaaagctggacgtttggtcgtccgcagcagcttttggtggccagaagctgccagaagccgaaacaaacagacccattgtatcaccataataattgtttgcgctgtctgtagcaacttttgtttatacaacctccatcccaaaacgggatgcaattctgagtttgggttgggttaaacttttctaattttgactaagtctatagaaaatatttttaatatggaacaattggatctataccattaaaagatccaaactttagatatataccatggaccccacatgtcatttactcatgtggacccacatgtaagtgagatagtaatggtatggatccaaagtggtgatcttttaatggtatggatccaaatttcccttttaatatttatgacatcatcgttctaatgatacttactcgatatgataaacttcagtaattttttaggggagttttggtcatacttaaaaatatttgccttatcagaaggcgagagttgcgtccttttttggactgagggagtactagttagaccttattcagttatttctattacatatagattggataagattaaaaaaattaagaagtttgatttgcttggatttaaacccacctaatcccactcaatctacatgaattgagagctaaccgaaaagccgtatgtgttgcattgcccggccatcagggatctaatttattatcctaattgcagataata

SEQ ID NO: 6843 - DNA, 721 bp, Zea mays
  Intron number 1 from transcript GRMZM2G106137_T01 (locus G RMZM2G106137) derived from phytozome v7.0 (chr-ID 4; pos 1 61148168 to 161148888)
ccactccccagcacggcgacggcctgctgcatcaggtgatctctgatgtctgactctcttctccagttctccccagtccccgtttccccgacttcctgttcagtgttcaccgtcgagtggcctgctaccctgctgtgctcatgtgatgtgctcgttgtgaacttgtgattgtgaatttgtgatccgatccgagtcagtccccagtccccacccagttattaatgaaattgacatccttgaagatgatgaagaatctgaggaaatgcaaatgaatggggaagatggttctgggccttctagctcatttgggactgaaaatgcatttcaagtggatgaagatttactttagctagtagatcatttatcacttatcaagtggatgaatatttgctcatttgtttcatgtttgactttgctgcagttggactttgattttagaactttaaacttatgtcatttatgttgtactcttttgctggacaacctgcaacaatacagttttacttatgtaatggcttattaacctgttcctgtgagtttagaatggctggactgttttttttactatgttttacttttacctatggtaatgtctgacagccatacagtgcaggagaaagcagatggtacacttatcctgtgatttttgttgtgttcctaactttgcttggatgtttgtttgattaattgattccattggtttgtatgcttgttgctgcag

SEQ ID NO: 6844 - DNA, 596 bp, Zea mays
  Intron number 1 from transcript GRMZM2G469523_T01 (locus G RMZM2G469523) derived from phytozome v7.0 (chr-ID 1; pos 2 20099389 to 220099984)
tgcattgcagaagctttttgagaactctagcataggttaacacttgacatcaaccgatccttgaatttctttccatcatttcacgtgtactttttttaaaaactagaccaacctaggatgaactaggtggcattaattaagaagataataggctcccaaattcactttgacgaggatttgaatctgggtggtttggacatacatcatcaccctcaatcgagttagctcagcttcctatttcttgtatgcttatttcattgtggtaacacttctgtgtgttgtattccctttagatccacaaatttttattttgtttccctaggtttgtttaacacaaaaggtaggcttgtacaaggcacaatactgtttggataaatatactttttgcagcttgcgtaacagatatgcttattttatgcaatttgcatatgttcactacaatgaaactttttggatacatgggtatctgtccatattttctatttccctcatgtgcgaggtgtttgattcatttgtgtttgtactttggaatcttattttaaaatttgatactatttgcagggtgtgaagcgtacaaccttggaaccggaagaggt

SEQ ID NO: 6845 - DNA, 410 bp, Zea mays
  Intron number 8 from transcript GRMZM2G088231_T01 (locus G RMZM2G088231) derived from phytozome v7.0 (chr-ID 8; pos 5 679237 to 5679646 reverse strand)
caaatattactgctggaaacaaagatcagatacaggtaacatacagaaagtcctatgccacatttctactaatttgtttttacagttactaagtggatgacatcaaatttttctagtccagtggttatgatgcaaatgagtgttgcaagtgggtgtacacagcacatatttcttgactggaattagcaccacataacctcttgttagcgcagtgttctttcatatcttagtgtcattagttagtacatctgtaaattaaaacttgttcggctgtcactattaataatttatattttctcactacatgcttctttgcttcatgtgttcaaaaaatgttagtaattgattactcgctttgctgtactcaatttttaggctgtcataagtgccggtatcatcgctcctttgtt

SEQ ID NO: 6846 - DNA, 571 bp, Zea mays
  Intron number 4 from transcript GRMZM2G417746_T01 (locus G RMZM2G417746) derived from phytozome v7.0 (chr-ID 1; pos 1 26945795 to 126946365 reverse strand)
aaagtatgtcttttattctgctacttatcttctatcaatgtgtaaagatatttttacttaaatagaagtaccgaactaatttaatgtgcattttgtttatgttattctgtgctgcatttattcttcttttttctaggctattttaagtctctatttgagttggttaggtggcttgagtagcacttcttctgagttcaactctctatgggagcaaattttcaagttagacctgtgtgagctgttcttaatgcaatgttcgggggctgtcttccccctgcaggttgagtttttttaaaagaaatcttgtgttttcctggctatgacagtaatgaccatataaagttctaaacctggcttttgcattcttcgcggttgttgtactgtgcaaaaaataccatgctgctgaaatatgcatgattttttcaaatacaatttcacctccatttacggacttcagtagtgatcaaagcatgacacattgtatctcatgctgctaagttctgagatgaccatacacgtctcttatgattgtgcaggaattagagaaatcgaagcctgtcatactaactgg

SEQ ID NO: 6847 - DNA, 487 bp, Zea mays
  Intron number 2 from transcript GRMZM2G417746_T01 (locus G RMZM2G417746) derived from phytozome v7.0 (chr-ID 1; pos 1 26946608 to 126947094 reverse strand)
aaatctcaaaattgaagagacaggtgtgattgttcctaggtaagagagcttgctcaagctctcttacctaggaacaatcacacctgtctcttcaattttgagatttcagtgttttccattctgaaatctaaagcaagcttcactgtgagatctactttaatgaaaaagtaaagaaacatttaaaatatctgattaatcactgttagtttcctcttcccttgggttatattggaacctgattaattgattgtccatttcttttgatatttagtccaatactacacaaatatattcattgtttttgtgatcatgtgtcctgggcttgtggcctgatcattgttaacctttattctccaatattacatgatagcctttggcataacttcttcatgaatgatatattctagcattgcaaggtttctgtgttttatatttttctttttattcatcatgtgttgcatgtaggtcaaaccactatcgatcaagt

SEQ ID NO: 6848 - DNA, 324 bp, Zea mays
  Intron number 1 from transcript GRMZM2G421495_T01 (locus G RMZM2G421495) derived from phytozome v7.0 (chr-ID 4; pos 5 786990 to 5787313)
gagaggtgattactcagaactagctcaacttcattcttccttattagtcattgatcacacacttccgaaaatttcagaagcatctgaagaatgatatgcacagccatgagaaaactgtttgattttgcatgtggcacaagaaaaaataattgatttttgaactatgcgatactgtcatcagaaagctgccttattgtgcagctaatttgatttgtaatcatatgcactcaagtcgtcttgattttccatggtcaatttctaaggatgtttttttttcttatttttgtagagttgggattcagaacccaacaatagaagtgcggt

SEQ ID NO: 6849 - DNA, 965 bp, Zea mays
  Intron number 1 from transcript GRMZM2G318948_T01 (locus G RMZM2G318948) derived from phytozome v7.0 (chr-ID 8; pos 1 58417551 to 158418515 reverse strand)
aggtacaaatcatattattctgtgtttctgactgcatccagtttcttcttctcaggtttctgcaagtactaaggggacaacgaatttgataatttggtgcatatcatgaaatggtggtaagccaagcatagagctaactataggataaaaactacgggctctaattacaatcaaattttaagtgcatcattcaccaatcactattcttaacttgcagaaaaaatttgttgttctatttttgtcagggttaaattaagttttctattacaaaatcacaccattgtttgctcgtcaaaatgtaggcctctctgtggacatatataataaaagtttcgatgcacacagggacgaacatgacacagtaaaagtgggggttggatgtgtcttttgctggggactatacaccagcttcttaatcctggatgcttgattcttggctgctcacaaacaccattgtgatggtcttcatttaggattcaaagaaggctagataggtgaagtttttagttcacattgcattgttgcagtgattatttttcttattcaatcaggtttctgaaagttgggttttggtcactttgcattttttatgaagggaatgtgcatgcttgctgctttggtttgtgctaggagcatgcgccgggcgcgcttcttgaggagaacatagattattcgctattttgtagtggctcatgctacccgagacgaccaagctggtatccattcaacatgccctcttttgatgaagttagagtttaccccattcctgtaatgctttacctggtcaagaacttattgcaagtatgtccagttgcccactcattctgttgtatgatttttttagaaaaaaacaaaaacaagcaaaacataaccatgtttccctgcttctatggttgtcagtattatattttgaatatgtggatgcaccagcttaccagattctgaagaacttgaatattatcagc

SEQ ID NO: 6850 - DNA, 749 bp, Zea mays
  Intron number 2 from transcript GRMZM2G000632_T01 (locus G RMZM2G000632) derived from phytozome v7.0 (chr-ID 1; pos 4 7475496 to 47476244)
ccctttaaaccggaggacaagcctgcccagggctggtagatctcgatgtcctttgtctcggttattactgttgctttaaattactagtgactaacgatatgccctcttaaccccacggtcctttaagcatatgtgctcaccaccattggcctttgtttatgtttatttgaaccatctaatgcatgcccccatgaaggaaactgaatattttttagtgtttcactcaaaaagttatcctttttgccttacaatgggcttcacttggtgtacaagcacatgctagcttttcaaaggtgctatttacgtgcatttatgagtgcaactttgattttgtatggcaaatagtatattttctggcagtattttcctttgtagaatgttcctgagcaatagttcctttctgcaatccaaaagacgtgtttcttctgcctgaagtaatgcttgttatgtgcacattaagatttcagttgctagaaagacaggcaagttgagctaaagctattaggtgcaatatttcagtcgaagtcaggtggatgtgtatagctctttattagatacatctctaagcaaagagcagccactttgctaagatcacattccaaggcaatgccagagtatacttgtactgcatgttataagtaacagcaggattatttgggtatccatctatctatctggtcatgagtgtgcttcatttgtaatcattgtatgtatgaccggtcccttgtatgttgctcttgttgacaggg

SEQ ID NO: 6851 - DNA, 612 bp, Zea mays
  Intron number 2 from transcript GRMZM2G122316_T01 (locus G RMZM2G122316) derived from phytozome v7.0 (chr-ID 4; pos 2 2528380 to 22528991)
gtcaagcctgctcctaagactaggagcgtttgcaagtatgcgtggtgatgcgttacaaataatttttttacctgtgaatgcataccagcagcacaaatctttcaatgtagttttgtttatcaagaccaaaagcaaagcacgtaattatgcgcatagttccgttctgcatactgaagcacaaggtatactaagcacgaggtagagtacgagataagagaagtggaggtaattgttctaatatattttttatttttaaccactggtgaaaaaaatttgtgcatatgtggaaaaggacccatggagcaaccacgtcatcaggaagatcagcgagtggatcaaattttccttttcgaagaaacaaaatgaatgttggtgcacgttcatgcatgcatatgtgttcttgctgcccctaggagtttttgttgcaattatgccaaagttgtcaatcaattttgcaaggcctggccaatatgaatgtattgccctccatctcccagtcctcattttgtcagttttatccatgttctagatatgcttatatctggatgctattttttcatatgcttctttctcaagttgtggcttaggttgtctctggagaagtccgatcct

SEQ ID NO: 6852 - DNA, 848 bp, Zea mays
  Intron number 2 from transcript GRMZM2G084791_T01 (locus G RMZM2G084791) derived from phytozome v7.0 (chr-ID 4; pos 1 54851656 to 154852503 reverse strand)
aatttgattttggggaggggagctttcaagactgtgtatgccctctgctcctcagcatcttctttttccattttatatttctttgttaaatagattcctttgctgcaattggttgtctaactttgacaaatatattgggggaaaaggccctgcagacctgcaagatgcagtagaacatagatgcacgtttatctaactgttgcatgacaaacatggtagttatttactgcaattcagcagggatatgcttactagaaatttgctgtacaatcgtaatgacatatgatttactccctctgttattttgtattgtcgcgatttagttcaaaaatgaactaacgggcgataaatattcgagaacggatgtagtattatgttttcctgaattgccaactttttagatttgtttatttcgtttctctatgtacaagctgaatttcaagttcatattttttgagatgatcgaggacatcataagttcataacttatgttagaaaaatatgctaatagtttatcatcattattttatatttagttctgaatcattaaatttattatcttatctgattcctaacctatcaaaatactttttaaaaaatcataaattctagtttaaattatactattagctactaaccaacaaaatttaaactgaaaactagtttgtacataaagaaataaatatgacaaattttgttaaaaggtaaattgaaccaacttaaagtagtgtaggggtacaatgaactaaaaaaatactttagggtgttactgttatttgaacattgtcaataggtgaggggactaatttgaactttttccttaaatttatatagttacaaggcatttg

SEQ ID NO: 6853 - DNA, 499 bp, Zea mays
  Intron number 2 from transcript AC234189.1_FGT003 (locus A C234189.1_FG003) derived from phytozome v7.0 (chr-ID 1; po s 283135276 to 283135774 reverse strand)
aaaatccaggtaaaatatgtagctgactatggatggcttgatgctataattttagccatgtttgttttatgcgtgtgattcaagtagtatctgatgtgaattattttaattcacatcagcttgggattgtcccacagcttgtctaggtataagctgaagttcagccctgagaaggtgagtcttgtatcggtgccactgccaatcttattattcatgttgttatatgctctatttctggcttttattgtgtcatcatttgtgcttggcattatgtaccggtttccatattgtactcatgcacttttattctttgattgcctgttggtgcatctatattatcttttgcagcattcaaaatacgtaacatcttatgagtttttgactatttaagattcttctagatttttgctattaaagaattattttgacatgttaagtgattttttattgtttgtgttacacaggttgatacaattatcattcaagccattggattatt

SEQ ID NO: 6854 - DNA, 947 bp, Zea mays
  Intron number 2 from transcript GRMZM2G134985_T01 (locus G RMZM2G134985) derived from phytozome v7.0 (chr-ID 1; pos 1 21497374 to 121498320 reverse strand)
tattcaaccttttgacatctgctgctcgttatcaggtgttgtttcttccatagtgttcatattttgagtatgctgtacataaatgataagtgagatggtcgatgatgtcaaactgttatcccttcaggctagtggagaaatactctcttgaatatgtttgtgattcaaattccatattatcattatttaatgatcaccacttttgtgaatcttattttttcacatttatttatatagtatgcctgatactgagtctgactttatataatttgttgcatagactatcaaatagagttattcatatgctatattttgacaaataattccttaaatttcattactaattcttcaaatcagcatctgttgttacaaaacaacttgactgtttcatagattattcatatgttatctttcagcagaagtccttaaatgtcattgttaatttctccaaatcagcatctgttgttgagtcctgctacacgtacaaccagttgagtacaactcaagatccaaaatttgaagtcaaattaatagaaagattataaatacaatgtttggtttatacagtacatgagttgtagctaaatgattttattcaaacttcaaagcattttcaaacaacttatatccactacataccatctgtatggtcgagcatgagattttaaccgttgattgtgttatgtcaagcttgtaagttgtataaactatctttattatcttgagatacatgtaatcattgatcatttctagactaatttgaactctatgtgctgcaaactgttttctcataacctccacattcctgaacttattatgttactgtgttgcatctgacatgcttctgttcttcatatacaaactgttagacaattcacatgtgaattaacctggtatatttgttttttgcagcctgcttttcttatttccttgatagagcagagtac

SEQ ID NO: 6855 - DNA, 853 bp, Zea mays
  Intron number 1 from transcript GRMZM2G417417_T01 (locus G RMZM2G417417) derived from phytozome v7.0 (chr-ID 1; pos 1 3693262 to 13694114 reverse strand)
aagtggtgttaccagaattccagaagcattgcgtatatatctcaatatttgtatgccgataagtttgagaacaatagtaaggttacattgtttactaatacatcttaatttgcaatcaagagagcagatatttttctttagagcttgttgttggtcttgtttcaggctattcttcctgttttgtctagttttttaggttggtatgcaatcaagagagcaaatatttttctttagagtttttatttagagcatcagttctcaaattttgaattctcgtcttatttacattaacctcatttatctattgaatttctaatattgaccaattatatatttctgtatagtgcagaggagacccttgctagagttctagcgagattgggatcgtcctattgtaagtaaaaacatttctgtatattattgaacaatcccctttcttaatcatggcatgatttatggattgccattttagcagtttttacttataaaaatgtatatcgcaaatcccataatcatcaacagcagagcctgacagcttgttagttccaaacttggaccggctatgttgaaacaacctagtccaaaataattgcattatttttttttagttttttaatatggttaattttctggactatagtaaattcaaacttcctaataattatataatttagtttttgatgttccaaaataaaatagtgacagtattatgcttgtacatcaaaatactttccaaactctatatttgcatttatttgtgtctacattatagtattttacaagggaaaatcagttgataattatttttatttaaatttcatttatcttctctttttttgcagtctgcggaggc

SEQ ID NO: 6856 - DNA, 844 bp, Zea mays
  Intron number 4 from transcript GRMZM2G435244_T01 (locus G RMZM2G435244) derived from phytozome v7.0 (chr-ID 1; pos 1 11128333 to 111129176)
tgctctgggtgtttaccttctaaaggtttctggtctgtccatctgcagtgattcagagctgcttctgtgaaaaaaaagaatataaatttgttgtactgtgggagcagtagaaatgatatcatcatccctcgagctttatctagtctacacctcaatgcagtattacttttttctgaccatggaaaatgaagagacagaagtgccaactccaatgagaaaagatcatgtagtagagtactcagtactgttgcatgtgaacatgctctctgtgatcttggtaatgcaatgcaacctctctgactgacacagatgatctggctaacatttcctgtataaaatcaacccacttagatctaaccagcgttcatccttccctgcacctgtctcagatccgcacaaagttactgtagcagtttgccgcaggtagcacatatattgcatttaggtagcacctatattgcgacaacgaaatatcgcgaaaccaccccaatcggattggacacattgtatatggaaaactcctattattctgttttactttcatataaaaatgaggggtaatgcatattatctgcctgtaagattcactctctttggatcggtcttgctgccctcattctggtaaccatttcggatactgggtggagtaaaatcttaggtttaagatctctttcaagtcacctggcttcgaacaattacatggttcacatgctggtttttagtgccctgctttggatttaccaagttaaaaaatttgactccatatgaaaattcaggctgaatggatcaaatggatgtttgttttacagagaagatcaaggactggagcaacgtagttgttgcc

SEQ ID NO: 6857 - DNA, 725 bp, Zea mays
  Intron number 1 from transcript GRMZM2G310331_T01 (locus G RMZM2G310331) derived from phytozome v7.0 (chr-ID 1; pos 2 07643803 to 207644527)
gggatcgcagcgcctcgtgcccaactcgtcactaggaaaaggcggcggcagcaacctgaacttgtgaagactttgcggacgaaggatatgttgtccgtgtctgcccttaaaaaatgcggaaagagaaaacatatttagctaaatattccaactgttgatgaagatagattaatagcctagtggtttaagttgtactcgtggtactctagatcacaggttcaactcttggttactccatgtttttttgcattttaagaaaaataacgcagccacaacacctaaattaatggcacccttttcatttgaattgttttcaaacctaattttactactacaaagaaataattttactacccaaagaaaagaaatagtcccaacatggaatatatatagcatttcttttaaaaaaactaaatcaaatatttatgacaaacatgtgtagtcatgcaatgtcatcacgtatgatgtatagcaatttatgacgattacctcatatgacgcacccatattgtcataacatattgtcataaacatgatgctacaaatagttatgacattttttatgacgaggctcaatttttcgttactaaattgctttgcttcctagaaatcgtcataaacatagtcatctagtgacgaattctactattgtcattgagcatttgtcataaaaggccctatttgttgtagtggtggtgggcccccagtcctcgggcatcgcgcac

SEQ ID NO: 6858 - DNA, 325 bp, Zea mays
  Intron number 1 from transcript GRMZM2G704000_T01 (locus G RMZM2G704000) derived from phytozome v7.0 (chr-ID 1; pos 2 58208844 to 258209168 reverse strand)
tgtgaggcttgcgccttttatttggtgacggcaaggtgagatattttgcttccttctttgaattcatcaacttttctttgcaatgaccgagtccttcctaatttgtgacccctcgaacatttttctagagctcaattagagattaggaaagaaccggctcagtacttactacaatattatctttcaattgaaataagtcacttgttttttcttttggaaaattgtgtgctctgtcttaggggtgactcaaattagtggcaaggaagatcgctacattttaggctatgtatctgcttgctgctaatgcaggggtcgccctagagga

SEQ ID NO: 6859 - DNA, 923 bp, Zea mays
  Intron number 1 from transcript GRMZM2G395121_T01 (locus G RMZM2G395121) derived from phytozome v7.0 (chr-ID 1; pos 2 5876201 to 25877123)
ctcgccgccccggcacgccacggaacgctgcccaggtgatcggacctttccttcctctctgcgcgaccgctttgcttttcctcaaatcgtcctgccgatcgcggttcccttcggtggggttttgttggggtgaagtgaaatgcgatgcttttttttttcctgggatgctcttctggctctctgtttgccgtgcgggggttttgtgttcgcgcttgcttgtgcgggggacaatgaggaaatattttattttaaacttcttatgacttttttggttgttcctcaatcctcatgatccctcgcctatagtttgcgcaatgccacctggctttgtaatgttgtcatgtcctgcctgtcctgtactgtgtgtactaataactactggtggggttttgatgccagtggctcaccgaaatttgtgctgtttttttaatcttttagagctagtttggtaaatctatttttttcgaggaattctaattttcctaaagaaaaataaactaatttttcttgtaaaaatggaaatcacttagaaagatgggtttgacaaactagtcctatattgatagtttccatggtaccgtgaaatttgctggtgcgacgtcatttgttcaattaggcagacagtgtctgtgatgtgatcctgctctcggctctcacgtttatgttatgcacttatgttctcgtacatgattgtctggcgggcttcaagcagagcatctctgtttctctttctccatcaattgattttctggcatgcagtcaagaaactaaatccacctcttgaattagatttgatcctcacggatgttcgctgataatatttatgttgtcatttatatcttctatgatgctttggaatacatgtatttgaaacagcttttcgtttgtttttgctctactactcagggcacagtttgtgcaac

SEQ ID NO: 6860 - DNA, 794 bp, Zea mays
  Intron number 2 from transcript GRMZM2G466118_T01 (locus G RMZM2G466118) derived from phytozome v7.0 (chr-ID 4; pos 1 90267163 to 190267956 reverse strand)
aaaatctttgtggcctgctatatcttgcccgacaggtaatttcacaactttgatgtatcaaatattagaattatctgtactagttcaacacagaatcaggtattgcatatggatcatttttctccactgctaattgtcatccgactgacaataaacgatcgccggaaataatactgccatttgtagtgttactcccttgcaacttgcaagcgcatcggaatgatgtggttctggtcactgtttaaatttcacccacgtgagcactgtatgccctttccccttcactcacttggcaaacccctgttctatggaaggatccttgtgccaaaagacataagttttttggatcttgatagtgactagaagtttgggactaaacctgctttgtcgtttaatccattggctgctagagcagccacaataagtctatcagcatttggatcatttggttttggcttcttcaatggcaagggcaaaaggcagaacaagaaacccaacaatctagatcagtcccaccagaagcctatattgcattgtacttggccttaaaaatagttatattatattttacttgaatttatgtttatctttttttatctgtttggacagatctctattaaatgtcatgtgctacaatcgttaggtctattaatagatgttgctctgtctatctatccatttacatcgctggaaattcccatgccctttcatagtacgccttgtgaaatgctcactgcttttctattggtttgtgtgcagttcaagctctgcaaggtgaggtctgttcagtttgg

SEQ ID NO: 6861 - DNA, 846 bp, Zea mays
  Intron number 1 from transcript GRMZM2G124550_T01 (locus G RMZM2G124550) derived from phytozome v7.0 (chr-ID 1; pos 3 178843 to 3179688)
agtgtctggatctcgatcgggtcaacagtaacctcgtgagctcccctcgaaacctcattcattcttcgctcgattcctagggttcgatagtgactgttgatttatgttgatgatggatgcagaggtcggatagaagcacctgatgttggtgcaattagttgaatgatcgatctaactgtactttttttttgccgaagcgattagctcaacagtcgggctcttcactagttcactctggttacgcgttagagagttggggataatcaggaaactcgactgcttcaattcttacctttgttatcagtctcagttggctcgcttatacagttggtgctggtcacttgcaattacggctgcggctacctggggcttctaggttgggatgtgattagtgatctcggttagtcttgctaaaaacatgctatatcctttctaatgtagcttttgttctgaaaaaattgtatccccattggcgtggattatagcagcacttgtgttagctaggctaacatcaccggaacctgttcatgaaatcacttttcagaatcagtaataataagggaattgctatgaagcaggcacctgtattctttcaaaagatcagacaacatatgttggccaactaccacacgtcttcttcattctgtcagctcagcagcaaaccagtaaaccgtgtcttgaacttgtcgcctgagaggtcaggcaactgaagtctaggagatgtgtaataataaataagcacatttgtagtttcaagcgaattttggttctcttgctccgcccctttgtaaaaacaaacactgcaattaatgtctcactgtagtgcatatatctattgtatgcagg

SEQ ID NO: 6862 - DNA, 785 bp, Zea mays
  Intron number 1 from transcript GRMZM2G165747_T02 (locus G RMZM2G165747) derived from phytozome v7.0 (chr-ID 1; pos 2 59217001 to 259217785 reverse strand)
atctccccgcgcctctcggatcgcctcggcgcgcggtgagtctggcatgctgctgcccccccgcctgcctgctcggtctgtctggattcgtagccattgtttccttccctgtaggggttgctttgctgcgctacgctgtgcggaattggtggttttggtggggctcgatattttttggtcgagtcgttgagatcgccgctgggttactgcgggattagagtcgattgccccccttttgtttttcgaggagatgtttcgagtcgtaattatatgaaatccatcattgtgatttgagttggctagcatctcaggcccccagatttttgttagcagcgtaacgcgctgttaatttttagatcgtttccgaagggcgggcgggctctgttagatctacgggaacatttaaaatttcttcatgtatgtatgatccggaagttagttggcagattcactgaatggacagtgatagttttatactgatcaatttgttttctgtggctgtagtttaatatatcattgcttcctgtagaactgtacaagtgcgcattttatttgcagctttgttgagacaaatattcagctagcttcttgttgatgtgaatcaagctgattttaacattttgctgttatatagaaagatggtgtcccatattgttgcatacgcttgtatgggcccctagagctagagagagctcttttagcttatttgcagtttttttttgggacaaatattcagctagcttctctgtcaacctgattttaacatttttctgttatatagaaag

SEQ ID NO: 6863 - DNA, 795 bp, Zea mays
  Intron number 1 from transcript GRMZM2G359599_T01 (locus G RMZM2G359599) derived from phytozome v7.0 (chr-ID 4; pos 6 13166 to 613960 reverse strand)
agcaactcaagcacttgctgtttgacagacttgaggtaggagctagccacggaaagggaagaagaagaggcagtgatgacggttttgattggccaccgcctcttattgaagaacacagctgggacttcgcgcagggctggagtgctacttccagtattgcttgcaggtcgaggagttgatgagatgcaacggccgaatgccaaggtgattacttgtatgctatgcaaacatgcataaaacattgtatataggtgattcccattacgtaattaggctatatggttggttgctagctacacagtacaaataaatcaactgggttctctataaatcaatagtcatgagcctggggttgtgttatccacttttggttaatggcaagtaataatcttatcataattagctagtgttgtttatcaatttttcatatatatactcgtgctaatgatatttgttgcttcattctgtacaattatgagacattttatatatatatattggttatgcatatatattggtttttagtgtatatatattatttaagtacataacattaaaaaaccaaaacatctttgagtttttctttggcatatgctatcactttggaactgtaattaaccagtgcttactgctttgatcgcacttaatgaaactaagcatttaaagtctggttaaaaagatttgatattgttaaatattgttatgagaaggtctacaacaacgcttaactgctggaatttcttctggcttcttatttaaggtctatttctaaacaggtcatgtaaataattgtag

SEQ ID NO: 6864 - DNA, 929 bp, Zea mays
  Intron number 1 from transcript GRMZM2G048740_T03 (locus G RMZM2G048740) derived from phytozome v7.0 (chr-ID 1; pos 7 699575 to 7700503 reverse strand)
ggttgccgtcaaggcggaggccaagtctgaggtgagtatgcttccggacctcggttggagtatttgttggaatggatcgcagcttgcgcttttgtttgtgccatgaagatgatgaattaaagctatgtttgttttgagtggcttttaattgccatcagttttcttggttttttgggcatctttttaagaacccgcttgactatattttcgtttctggtggcaacgcgctagtatactactagtaacctagagtatttgatcttttttccttctttacctcaacggtagagtggattggtcacgataatttattggctaaacttagttgatgtgacaaaaggaactgcctttaaaactattggttggagtgtgtaatagtcgtggtttcagcttatccatggaaatcaagaggccaaaaatggattggatttcaaactaggtgaattattttctaactatatatgtccccatgccattgtgtttgtaacacaacactagataaaacaaagaataatttgctggcaactcaatttggatgatgctgtgatctgtttctgccaaaaagtcatgtgaagttgcatctcttgcatgtattatgtaggaagctttgctcagttaagcttcaaaagcagtaacaaaatccagttcaatgcaactaacattaagcataactacagtctacttcagttttatgtctacctaatagatgaaataacaacccctgtattttttttaaaatatgtaggaagcttgatgtttttttactcatactagtctaatgctatactctcacggtctcacctctttatgcatggtcatgtttgtcatagttttactgttatattggtaaactgatggccggcagtgtgatggactgatggtcatgctccacaggcagaaaaggaacctattttgagtagcttcttgta

SEQ ID NO: 6865 - DNA, 499 bp, Zea mays
  Intron number 4 from transcript GRMZM2G036905_T01 (locus G RMZM2G036905) derived from phytozome v7.0 (chr-ID 4; pos 1 63013970 to 163014468)
aatctgtcaggaaaacttcagcacaactgttagtatgccaaacctatgtataaaactgtaccggttgctcctaatttcacttctatgaactgtactaatttgcatcgaagaaagtttggtcccaaacaactcgtgaactcgttttcttattattgggctgatggacaaggcaacgtgaaatttttcatggtacctgggaacagaacttagcctacaaactgcagaaccattctcatttcatcttgtagtcttgtcttgctaataatggactttgtgggctgtctgttccctgtgtaattcatttggccatgacagttcttgatcatgtgatatcatagaatgtgtcaaaaaccgcatcacatcaaaattaaaactggatacaacactatacataggtaatagtagaattaaatgataagaagtatttctttttgtttattttaattactaattgtcttatgtgatctcttttcttgcagcactcactgagcctattgat

SEQ ID NO: 6866 - DNA, 627 bp, Zea mays
  Intron number 3 from transcript GRMZM2G108435_T01 (locus G RMZM2G108435) derived from phytozome v7.0 (chr-ID 1; pos 6 2438715 to 62439341)
acctgttatttttcatttgagaaatgttagaaaagtctcagtaaaccacaactttccattatttgcaccaattctgcgcatttccacattcatgcataaatgtagcactttatagtaagcatacacaaccagaaacactacattaagcatacagtaatatagcagagttctagaagtatcgaatggacaaacttattcaactgagcagaacactggcgaaaagatagtaaggctactagaaatgtggagaattgctgcttctgtagttcaaatattttacactttcttctgacgaagatagttcaaaacatgaccttatccaataatttgaacgtatacaaaaaaataataaataaaaggaaccgaacctacttcctactatgtacccaagtccctctatcaaaataaaaacaggtagaatcatttctactattttagaacctaaatttatccactaaatatcttatcttagtagtatatataaatgtgcaacataattcaaatattgtgaaacaacttcagcctcagaaagagtactagtgcacaaatagagtttaggaggcacttgtgtagattggccccagttgttccaactggaatctgattatactcacagttgctcgcgta

SEQ ID NO: 6867 - DNA, 1011 bp, Zea mays
  Intron number 3 from transcript GRMZM2G087275_T02 (locus G RMZM2G087275) derived from phytozome v7.0 (chr-ID 1; pos 3 4824256 to 34825266 reverse strand)
ttggaaaggtttgcactatagcttggttttcaatggagttgtaccagattgttagttcaaatcagtagttgacccattggtgttggaaatttagcagcctaaggaatttttgcttaaagtaaattcacaattaaatagggtatgctgtggttgttgttgcatgagtaaccctacattatcatttcatatctatggattaactgggcgatctcactcttcaagttgtgggagcgttagttcagttcttatactagtttcacttaacttaatagtgccatgtgtgggacctattgttttggaacgtttactttctagattatatgacatttaaaccatttacttatgaataagcagcaagggacacattgaaccacaaagaatttcattttcccttgctacccagatgtctacatagctacatgcttcttggattgtactctctcttttctgatatcagtatgcatctaatgtaataatgtatacttctggatgtatattgctaatcttatttcttaggagggattcatgacatcacaatataagcttgtaccttcatatagttgtcaatgtaatgttgtttctttggatacattgcactaataaaacagaagtttcattgatttaatgttgtttcttagctcttaggatgtattgtgctaataaaacagcaatttcgtcaacgatatgctccctagtctgtagttataggaatagctattgaacatcccttgtgatagcagtgctctatctgaagatactactatacatgggatattctttttgatgaatatctcctgaaatccatttgagttatctatgtatagcatttaagttgccagaacttttcttcaggcatttctggttttgtgttacaaacatgcatgcagtatgggttacaaatgtttaccatgtgaagtagttgtgattgcatcatatatgaacttctgaggatcagcattaacccttctattctgcttttatatagtgctgctggaccacatacgattgttg

SEQ ID NO: 6868 - DNA, 481 bp, Zea mays
  Intron number 2 from transcript GRMZM2G046816_T05 (locus G RMZM2G046816) derived from phytozome v7.0 (chr-ID 4; pos 2 14376035 to 214376515)
ggttggtggtgggttggtggccatactaggggaaggtacgtgtttgttctttatagatggtgacttggtttcaacctgagggttttgcccttgatgataggttgtcatagaattagtgggatatatgatggtttaatcacagtgactaaaatctggattctaaattgctaatagtagaaacagtagctatctagtgccggtagtgtttgggggtgtcttttgggctatgctgatgtggtgggttggagttgatattgtggttgttttgtatggcacattgttcaaatactgccaatatgagctactttttatgtttcatttttcctcgaggtaggttagtagatgtctggaatggatattgccaactaaatgtttttcctgtttcttaatgaaataaatgttttcctgttccagggatatttttgaattgttactaacagactaattttatcttctagatcttttcttgagtttaaggaag

SEQ ID NO: 6869 - DNA, 856 bp, Zea mays
  Intron number 1 from transcript GRMZM2G106752_T02 (locus G RMZM2G106752) derived from phytozome v7.0 (chr-ID 4; pos 1 24927322 to 124928177)
caaggtgatttccttcctctgttttcttctccgcctctgtttcgttgccaagattcctctcagcgtcgtatgctctctgccatggccccatcccatggcggcaattcttctcttgttttgctcgtttcgctgtgcagctacgtattattattaggctataggcatgcatgtacgctgggttttgagggcgtgttgttgattccgactgctgattcgagggttttgaggtttctgccattgatgccctcggctaagcagttgctgttcggttcactcagatctgtactcctgtcctttcctgtttgttgtgtaccacccacggctcatgttgctggtcaccgaatgctgcatgaattcagtggggtctgaggcccgtcctgctggagctctcgactgctcttcgatcgggttttggtctgctctcctgatactgttcgcgttttctctcagaccaggttttggccactggaatctctctctgcgtctccgacgaaggtgtgcgagacaatgatctgaggcataaagattcttctgaaacctaaatcatcactacctcttttttttttcaaaaccaaagagaagaatctttataccttctccatttcctgcaagcgtcagcatgcatattttaactagtaaactttgtccatggcatgtgtcggtaggtagcccaattcagtgctctgctcctgtttccaaataggctgcttcatatttttttttcacacttccaaagatttttagggggaacaagtgctacgtagaatactactctactctagatttttcttttgagacattgaaatttaacatgattcttcttttttttggtcctgcaatcagcatatttttttgc

SEQ ID NO: 6870 - DNA, 959 bp, Zea mays
  Intron number 3 from transcript GRMZM2G129979_T01 (locus G RMZM2G129979) derived from phytozome v7.0 (chr-ID 4; pos 1 72693675 to 172694633 reverse strand)
cagactgtaagctgatcacaaagtggaaaaaggtaattatccttcattaatatgtggtttgactttttatctattttctgtagccacctttgcgtcaaacccataactgaatttaaagagtggacaccacacattcttacatatcctccgagttaacagtgttgcacacaatatattgcttcagtagtaagtagtgatatcaaaatagaccatttggttgtgatgcagtttaggcaatcccgacgatgaaaatttgctcaaatatgcaaactatgcacaattagcaattacctaaaaggctaaaacaatcatcaggagcatgtttgtattgtttgttactcttttcaatctctgactagcctcatctctttttgactcattatccaggatgtttccaaaaagttgtccggacctaatgggatttcggttaatcgatcgagagatctactagatcaaattgtaataaggaacatgctatcaaatcaaaagcaaacacttaagggtgatttgtatttaatttaactaaacaatgacacctttaaagtagaggtaagtattaggagagtacaaacagcgagacgttgttgtcatccatcgtgttgtagtcagtcgtgtttcagaacctcgtactcccaaaaggcattaattgaaggacttgtcctggagatcaaaggtaacttgctaactgtaacctcttattttccctacattttaggatttggtgtctacaactcttcatttttcatatttgaaaattagtcgaggagcatcaagggtttgtcgtgccgagagtgataaggatcccagttggttttttttgcgtttccaagaaattccattcattggacacctatttccaaaccacaagcatgtaactgtttcatgtgcatgtgtgtagcctgtcatatttatttttagagtcgtagtaggtttattctatttctagagtcattttctta

SEQ ID NO: 6871 - DNA, 710 bp, Zea mays
  Intron number 2 from transcript GRMZM2G165944_T01 (locus G RMZM2G165944) derived from phytozome v7.0 (chr-ID 1; pos 3 3721064 to 33721773)
ctgaacaggtttgccaatctttcttgtataatattgagttagattgatctaagtctccgtgctatgagatagtattagcctcctatattttctactcccaccattccaaattgtaaggcattttgacttttctagatacattgcttttgcaaggtaattatatatattatgtctaggtgtatagtgaaagcttttgtccagaacgacttacaatttgaaatagagagtacctaaggatgtcagaagaaagatttgataggtgcaattgcataggggagtaggggactgttctgagttaactgatggcacttggttgttgatcatgcaaccgtgtttctttagtttgtttttttccttcagtaatagggtacattgtcttgactcattgaacatgtgccttctaatcttgtgccaagatgtcccttgatatgatttgttcatctctctctctctctctctctctccactttctttcataaaccttggtggtgtggcaaagggtcacacaccatttggaatagcaatggctagaaccagttggccaattttttttgtttcgcctttatacatcaaacgctggttggcaggtatcctgtgcattatgggaatctgattcataagttttgacatatctttaaagtatacttctgctaaaacaagttctattctttgcaggaagataaagctccaaagtttgtgcaaatttcacc

SEQ ID NO: 6872 - DNA, 1014 bp, Zea mays
  Intron number 3 from transcript GRMZM2G445588_T01 (locus G RMZM2G445588) derived from phytozome v7.0 (chr-ID 1; pos 1 6827379 to 16828392)
agaaattcttaggtaaggttcgttcttgatattagtgttgttacggttcttggattagatacttgcgtgattactagttcttacctgttaatcattgcctcggtcgatgggttctaaattatataacctaatcatggctcaaagaagctgcaaaagcttatcattgacatgtcagataaagaggctgatgctaaactgccgagtatcattcctacagtggtacttgctaaactctctatccgcacatgcaccgaaatgctcatggtgttttggtttctgtagcttgtaatggttactcccatgctgtaatgcttgcgacatttacttttatgtttctattaatggtcaaccagcactactgtgatcacacctttgttgatgaactaaaaaaatatctaaaaagagtacccctcttctgccaactgcagcaaacctataagatgtttctgcttaaaagctgtcattgtgtcattctactatgacagtctttggtgacctcatcaatggacccatcgaattaaagtttaaccatcctgcataggcattttttaaagaaaccattccacataaacatgaagggaaccttttctgccatttgtgtgattctattctcggtttatttgataagagacaaaaatcaaacataatatgttgatatatcctcataggtgtcaactaatttgttgacaatgttattcttaattccttttttgcaatatatagatacttttcttggatttctaaacttctttgacttaataatttgttaagaagtttttatagttccggtagaccgtgaaaggcaaatatgtagtggtataactgcaaattttcatggccgacctatatcagctcgtccagcaaagtttgatacatataattcacaatgtttttcccataaatagataaaatatttaaccctggttctaagatatcattgatttgatttcctgtgggatacagtttccatggtgaatagggttttctgcagcagcaggtcacaagatttgacgc

SEQ ID NO: 6873 - DNA, 679 bp, Zea mays
  Intron number 2 from transcript GRMZM2G703978_T01 (locus G RMZM2G703978) derived from phytozome v7.0 (chr-ID 1; pos 2 52194252 to 252194930)
cttagggttttcacaagggtaagcattcttatgtcttcttgtttctatcttaatgaatttatttattggttaccctgtgctgattagcacttcacttcagtttagatatttataaattgtggcatttttctaggacttcggttaacatgtttagacattgttcttgtgtttcgtaatgggggtgcttagatccagttgagatctatgtccgtgtattggtcgttatttgttttctctaattactcgttggctctgcataatgctgtaggatttaaagttttcatagtatgctctctgctttaaacatgtaaaaatacactcattttttatccacaaatttgtaccagttttgtttgattacttactttgcttatcttgtcatgcttgtgcttgcttggcctgtgatcacgttgttgtatattagaataatgcaaaggagatgctatgctataaacttataaactttacctatcaatgtattcattcacaaactcaccatcgttgcatacatatttggtttggagaaatcaagtgagatcctcaattcagctctaacaattctccttttattcaaccgatgcactggtcaacactagcttggcgaaattgggctatgagtatgttattatagttctagatcatgatccatagatgaaaggtttttcatatcttctttcag

SEQ ID NO: 6874 - DNA, 551 bp, Zea mays
  Intron number 2 from transcript GRMZM2G150648_T02 (locus G RMZM2G150648) derived from phytozome v7.0 (chr-ID 4; pos 1 70515941 to 170516491 reverse strand)
agctgctcaagatatcgccttctaccaacaaggaggtaaattgcgtggaactgtttgccaaatactacattacaaaggaaaattgcattatgttgtctgtatcatagctgctgaccttataaccaactactcccgacatagcttctgttggttttcttctctattttctgatattgtttcttgttgtcgcatcatatattcatatcctgtcaagcatgctttttttttaagttgcacatgccagcaatgagaacttcactacgaatgggccatcatgcatgctacagctctagaattttgagtgtttactagcaggctagtgtattcgtttactagcatgctacagcaatgagaacctcactactgccttatctgtttacaaacaagctagtgtatcagtttactagcaaccacccaagtcatacatgtgatggggcctcaaaatgttggagcatccctcgttttttaatggcgcctgcaaatgctaatgaacgcacactcttctttgcgtttcagaaaatcagcgacgcggttggaccgttaaaccgcat

SEQ ID NO: 6875 - DNA, 603 bp, Zea mays
  Intron number 1 from transcript GRMZM2G400126_T01 (locus G RMZM2G400126) derived from phytozome v7.0 (chr-ID 1; pos 2 09230352 to 209230954 reverse strand)
ttgctggtgtaagcgcgatgggtggaggcggcggacgcggaggccattggcggccgcccgaaaccagacaaggagacagatgtgctcaatcaggaggaatcgaaacggaatccagagacgacgaaaaggtctggcacccggacgtacaagattgttgttatcatttttaaactataattagtttgcacgttaatgtatgagtcagttaaatgtaaaaaaacaaagacctgaaaaaaagttaggaggatggtatggtaatggtatttggaatagaaatctatatctatactacttattaagagtggaagggtagcctgcctttttatgttctgccttccagcgatctggaccgtctaattgtatcgtgcgtcggacgctgcccacgctcgtgtgctcgctcctcgcccagcagccgtcgcactctcgccacgctcgctaagccccatctgttccgcctcttccgcatcgtacacatgaccctctgtagctcaaccgcctcaaagctgtcgccctccccaccccaaaaccctagctctgttccaccgctccccttctccctgttgccgttgtcgcggcagttgagaatagtggcggcaagatctc

SEQ ID NO: 6876 - DNA, 591 bp, Zea mays
  Intron number 3 from transcript GRMZM2G077253_T01 (locus G RMZM2G077253) derived from phytozome v7.0 (chr-ID 4; pos 1 94515793 to 194516383)
aatatcccaagtaacggtaaggttacatttgaatgcctttcaactattggttccctcttgttagggtcttgaactaggaagttgtcaagaacttgagattttctgaacaaattgtctattggactgttagataggcataaattgtttataaaatccaattggtctttacagcattgttaaactgcttttatttcttaatgataccaatttattatagtttgtttgagataccggatatttacatctcctattcgcttttaatatcatgaactggatacctcataaaccttatgtgactgatgtgctggcatgattatacaatacttatatttgaagttcaaattagtgttggttgtagtctctttcagatatgatgtgtgtcatcaatgtacttgctagattagatgctctgttcctgagtatcttctggaatatcctggagttcatttgcacatggaaatttatattattttgctaactaaatctttgattcttccacctttgtgtttagctggtttcctgtaactgatatttcttttctcattccctaacttaggtgcatctgcaacaagtggttcagctgctggtact

SEQ ID NO: 6877 - DNA, 674 bp, Zea mays
  Intron number 1 from transcript GRMZM2G148959_T01 (locus G RMZM2G148959) derived from phytozome v7.0 (chr-ID 8; pos 1 74256439 to 174257112)
ttcacccgctggtcagtgatacactatcctgttgctgcttctctatgttttggtgagttctaacggaatggaggagctataaactcattgatcgatgtgtaagacatggaaatggcttgggtaaaatagtaacatttgttgaatcaaatactattgttgccgttccccatcgtttggtgtgtttagactggatgtgttgggcagatggtgcccaaagtttatgagacacagaatgagtacaaataatctgattgctgtatatacgggggtaaaatttcaacagaacatcggaaaatggttttaggatagcatgtgatcgtgtgtataaatggaagaggaaatgtgtaacacatttttgcaaggatattacctgcttttgacaaacaacagtgaatcataggcatgttgatatgggagaattagtatgcatgttggtattttcaaagctgaaggtagtcttttcatgcacaacgatatgtaccatactaacaggtgaaaataaaatcagtgtggtgcttttcttttaaaaaacataggcctgctctaagtctagtgtttatcttctgtatatttttgtcagtgtcataatttccttgcatccgtatccatttatgagttttaacttgttttttgttgcaggaaaacctacctgttgaacagttcgttgacagaaa

SEQ ID NO: 6878 - DNA, 344 bp, Zea mays
  Intron number 1 from transcript AC186579.3_FGT006 (locus A C186579.3_FG006) derived from phytozome v7.0 (chr-ID 8; po s 159029456 to 159029799)
ggcgagtggcttggtcttctgaccgtcaaggtgtgtgcgagtctatgcctttcaggcatggtgtatggtcatttctctgactctcttcttaatataaagaattaaagatatgcaactctcctaagtgctcaagaaaaaaagggttcacatgatgaattatcacctattcaatattctagaagaattgaaaatcaagacgtatgaagttcataaaaacattaaatctcatgataaacaagtttgaattgaaaaaaaattaccaagtcatcatattcttcagtcctgtcccgttttttgcttggtttctagcaagagctgttctttgtatacttcaagccgagcac

SEQ ID NO: 6879 - DNA, 938 bp, Zea mays
  Intron number 4 from transcript GRMZM2G144716_T06 (locus G RMZM2G144716) derived from phytozome v7.0 (chr-ID 8; pos 1 55970803 to 155971740)
gagctgaaaaggtggcatttgtactcagattcagagtatggaggtattgtatcacttttgagttgtgcttttatagaagttattaatttctgcagtttctctaaatacggatctcatactatagtataatttgtccttgtgctttgtgactgactggttgggagatacttatggatgattgccttgtgttgaaaatgctcctttggttttgttctcagaatatgtttataagatgctcctttgagtttctgatggttcacagtggaaaaatgtattgcaattcaatcttgtcctggtagttcccagtgtattacttctagaatcatcctatccccgagtcttcctaatgcagactccttttaaaggaaacatattacaaacactgaaactagtatagtacatggagctatagcagaacatactctattgattcactcctttctttgccatcagcatgaaactagtatagtacatggagctatagcagaacatactctattgattcactcctttctaaatgggagtcgaccaccccttgtgtttatcaccacagaatacttaatactgcataaactggtgcactactgtattatacgctgttagtttcagaacgaatggatcagatagctgatgaagagatggtatattttacacgggcgaaccttttctgcaggaacaggaaactcattaacactttagttttctgtgcatttatagtttcatactgttgtgcattagaatgatatgggtggacttgtgaattcaatagactatatgtccctacaacagataataccttacatgtagtaatttcttatatttttaaggacatgttcagctttgctgcaaatacctagcttcctgtttacatctatgatagaatatagtttgacaaagttgttatccaggtttgtcttctgcatccttagaaataactg

SEQ ID NO: 6880 - DNA, 870 bp, Zea mays
  Intron number 2 from transcript GRMZM2G088138_T03 (locus G RMZM2G088138) derived from phytozome v7.0 (chr-ID 4; pos 2 22475580 to 222476449 reverse strand)
gtcagcaaacttcccagtgcagcctccatttctcagtacctcctcttcaattctagtgtgatttgcttcaaattgtcccttgcatgatgtaggatgttcagtgacacaaaaaagtgatgatcatgttcagtttcttgttattaacagtatatcataaataaaagcaaaggaaatgagtgatgatctgtgcatgacaaaatttcaaggagaaaacagaaattttaagcttatcttagctttgcatattatctcgatctcactggtgctctatgtactctgtagcgaaagggcatctagcctaatggttaaaggcttccgagtaacacctctaagtctcgggtttgattaccctcgggggcgaatttttcattaaaaaatgctctcggtgcaccatttgctatcgggttacgatgtcctatacatcaccctccggttgaatcgttgcagagtggacgtttgacgccagtccgttagtgttgggaggccagggttcgagaattttctcgactgtgaccattgcttcggtctctttttaatataatatcggctcttcccagccgagttttttctatgtactctataatatgcttaacctgacatgcatatttcccatctccttttgaaacctcgtatccatataaacacatgcaatacatgttcattaaactaatttcacatagtgataatgtacaagttttcctacaaagggtctggaaaactaaattttccaccatgacttcattgcaagtttgctacgtagaaattgcgttacaaattcattcttcacaagtgaatttaatttgcaacttgtttgattgagtacccttctttctagcttggaaggaaatcaacggctagagcaactgttgt

SEQ ID NO: 6881 - DNA, 997 bp, Zea mays
  Intron number 1 from transcript GRMZM2G459535_T02 (locus G RMZM2G459535) derived from phytozome v7.0 (chr-ID 4; pos 1 8842458 to 18843454 reverse strand)
gcgagcgagaccatctccgaggtactatgcttcaccctaaaccctggcacctcctccctctcccccttctcgatcgctcctcccactttgtcggcgacgacgcacacctctcgggcagtttctcgatgacacaggtgcggggatgaggtgagccacagaccgcgtggtccccgatgtggaggacctagacgtcgccatgaaggagtgggaccggatccctccaccgctgctccacacgggcacaccttcgcctcgcccaaccgctgcctcgctcgcatcctccattccccagacctcgagagctactatctggtacgatctggcggatcccttcgcgcgcgcctgagatttcaggtctgctgctttgatttccccagccctgcctatgcgatttgtgcatccccctgattttggtctcagttgcttgtaagtacaagtctcactgataggcaaggatgaatcttcctgttttcttaatcatattgtccatatctacatgccttcagaaattcgtttagatgcattgacgtggcactgtctgtaagagaatcttagggaaactaatgatggggtttagccagttgaggggataagcgactatccggatgttgctgtgataattacttctttactattataaagcacccgtctcaatggttcaacgatcgtccagcgtaatccttttacaaccatggttaggcttctaaagttttattacggatctcactactctagcatgggaatcgttcttcattacatgcttaggcttgagccatttacatctctgtatctaaattttcaggttgtcattttgctcatagctatcactgtttccttaaaattcgagcacgtagctattattttcaaaacattattcatgaatttgtcaatacataatttctcttgttgtatttcaccacagttcaaaataagggatcttatcatattatttacatttatgcctgtctgacacttgtgcagggtggcaagtttgacc

SEQ ID NO: 6882 - DNA, 643 bp, Zea mays
  Intron number 1 from transcript GRMZM2G108861_T01 (locus G RMZM2G108861) derived from phytozome v7.0 (chr-ID 1; pos 2 58655607 to 258656249)
acgccgtggtaagcacctcggccccgtgctgtctttgaattcgcaaagcctctctgttctctgctctcccctgcctctgcgtgtgatgtgcctgtgcatgctcgccttcggatcggacccgcttgctgatgttgcttgattgaattggaagagcgcaccttgaccttggtgttcataagtttttcgaagaaggaagaactttcttcgctttctccaacgtggaaaagtcttggtccgaggcctccatccaagacgactattctgctatagcctatagtatccagtttggatttgcaagtggtcaatagtaatattagtccaaattccattccctcgtgatcagaattttatatgaaacatgttgctctaccagaaccattaaacattcccactaaactaaacgcgaaatactaaaatctgtacttgcacatgcatgctgtccttttttgtgctttattatctataatcacaatcagttgtgattatagaagaatttactagcacatcagtagctgcattagcttacgcttatctataatcacaatcagttgtacttgctctagttgagaaacgaagctaatgttttttttttgtgcgcccacgtgcagcccgcgagggtgcaccagcagaagcacgcgtgccc

SEQ ID NO: 6883 - DNA, 594 bp, Zea mays
  Intron number 2 from transcript AC233922.1_FGT005 (locus A C233922.1_FG005) derived from phytozome v7.0 (chr-ID 4; po s 238056437 to 238057030 reverse strand)
gcatcttggttcagttgcccttaccaagggtgagtgtttgattttcatgactctgttgggtagtatatgtaacccatatgataggaacctagagttacaattctgcttctagtaaccaccaaccagaatatttatgttttactactttattttgcctcttaatgattaccgacctagacagtatatggcataccagggtaacatgttttgttcatgacacacccagctcagtattcttaaatggtagaattttcctatggtgcacgatatgcttctttgcttgtcttactgaataacatttcttatgtcctgaaagaagcgttaaacgtagccctccggcaacttttgcaatggtacactgtataatatcatggattctgtggtttcctgagttggttgtcaccagtcttatgataatcattgctttatgtagatgctagaactttgttacatgcatatgtgctatccgatgctagataataagttggaacatgcaaatgctgataaagtattgattgctgttagtataaagtagtgaatggtttcttgcccaccaaacattcacatgtctgttgtgaaatcgttttgcagcat

SEQ ID NO: 6884 - DNA, 977 bp, Zea mays
  Intron number 1 from transcript GRMZM2G389342_T01 (locus G RMZM2G389342) derived from phytozome v7.0 (chr-ID 4; pos 9 6738270 to 96739246 reverse strand)
caacaaaagtattgtgagttgcaaacatacccaattggttaatcacaggacctaaaacacactatatgtctatttttaggttgaattagagaacaatttcctcatcttcgttgtacaccacatatggcttgaattagggtgctgttaatcaaacaattcagacagaccataataaaagatagatgtcacaaaattaataaattgacaagtgcacatattatggatggggtgtctgctttactccatggagtgttattttaaaaagacgtggtctgtctcatgcttaagtagtttttatttatacagcagtagtcccataccattcctaaaattgagttatttgttcaggaatgaactgaaaacaaaaaggcatacaatctaccacatcaggtgtgcaaacactggacattgaaaagaagtcagttccttttaattcaaaatgtgcccttgcatatacaattgaaaccatgaaatcagataatttagatgaatgctaaattaagtgtgcttcttgatagttggccaccaaataatttattgctgataattagttcttgaaatctgtggacatcatcttcatacaagaaattgtattcaaatatgacgtgttcaaaccttgtattcgtcaaacttgtcttgctcaggcttctatttttttgtctaatgaacacatcaggtgctatggggttgttcaagaaattaatgttggtccactcgagcttggggactatcttgattggatatatacttgaccctttccattccctgataatctgattagaccatggatgccattgtcaatttgctaatacttgttttttacccatgtttgcagcaattggtgctattttctcggcaacatattttgtttgcaccttacaggtttgttgttgaagaatctgccatttttatcttataaaaattgagataggaagccaatttaattggaaattcattacttgcaggtgttaaccagg

SEQ ID NO: 6885 - DNA, 1070 bp, Zea mays
  Intron number 1 from transcript GRMZM2G092038_T01 (locus G RMZM2G092038) derived from phytozome v7.0 (chr-ID 4; pos 2 16707404 to 216708473)
tcgaagtgctcctcaaggcccatcacaatctcaacctgcaacgaatttgcaaggacctttagcaacgtctttcattcgcctgtcaagttatatccaccctccggcctgaataaatccatctctagagttgtcctaatcctttttttctttttaagtttgactgaatttgatagaaaaaactgatatttatgacaaggaatttgaatagtcagatacagcacgaaacatattttcatggtattcctttttgttgtcagagtttttagtaccttttgtatgaaattgatcaaactgttgcaactctagaagttgattcatccagagatggagtatgcattatctgtggtactacacagaacattatttcaaagtgcttctttagtccttatagggaataaggaattacagactgactgacaatgtcctggaggcaagtgtggagtacagcgattatattgaagcaacaaagttcctcagtatgaagtagataggtcaaagtttacttactgtttgcagtctctctaattattcaggccaaaagaaaaaaaaatagggcattgtagttgcattaggctaagggcccgtttgtttcccatcatttcgaagaattggaatctaactaatggagtaagctatttttttagaatgtgacattccataactttccaaagtttatatataagcctatctcaaattcatagggtgagagataaaattggttctataaatttacatgctacttttctaatatacaacttataccacactcttatacttacttctctatagcatacgtgtagcgtataactatatctctcatatgattcaggataatatactaatatattaaatatataaatatattaacttaattagtttgtctaaattatgattattataatggaattcaattccaacaaaacaaacgggcctaagtataaattgacaaattcacaaccatacatttccattaaaaaatcattttacaagtgacatatgtagatgacatcagcgaaaagaaatattgtgatttaccgtgtccagcgaatccgcaccaagttcagagaatt

SEQ ID NO: 6886 - DNA, 926 bp, Zea mays
  Intron number 2 from transcript GRMZM2G089631_T04 (locus G RMZM2G089631) derived from phytozome v7.0 (chr-ID 1; pos 2 14487359 to 214488284 reverse strand)
cgtgagaaaccaaccacctcgtgtttatccttattttccctgtttgcagtgttcttgttgcgaagatgaattatctagcttttactgcaggtggtgacacagtattacatgtgcaatttagatatggatttggacgactaaaatcatttactgaaatgtacctaaataatgttctgtttgtgtagcatctttgcatgccccgcctttttacacggtgacacagtgttacatgggcaaggtactttgcatggcctgtcgtcatgaatttctttctgacaacatattggttcaacttgttttcttgccattagccataaaattgtttttaatgaattgttattcagttttgcgtcacaatttccatgttctcgcatgaatatgtagctctacattggccttgaaatcttatcgaggtcttcactttggactatggaattagaaaagagtggaagaatagggtagggagtaatttctttttctacttgtatagtgagctgtgtaaaatctcattactttaaccactccaatagttgttagctttgcacaccagtttggcatgttggacccatggatcagctttgcgtgacgacacaacatgcatcattatatagcacctgaaacccatgcaagatcagtggctgacatctagaatccacccacagcttctcatcttttcaagatctcttatctatttagagagcatgattggcctttttgtcttctactccattcgttactcttttgtataaaatgtttcgtttttagttctgattttgtttttgatgaatgatgatatgctcatttcaagttcttttcatcagatgctactcacatttaagattcccataattttgttatgttggtcttatttacagttaactttttttgtagtggggaattgcatattgtgtcaagggtggtccaga

SEQ ID NO: 6887 - DNA, 676 bp, Zea mays
  Intron number 3 from transcript GRMZM5G869779_T03 (locus G RMZM5G869779) derived from phytozome v7.0 (chr-ID 1; pos 2 26003460 to 226004135)
tgaaagtggttcacgttgctgggaccaaagggaaggtaaccgctgcttgtgttgttgcaccgtggggttagctttcttatacagttctgaactgcttccgatggagttagctatatatgcggttttcagtaacacacttactggtgatcttgcacaatcaccattcatgacggtagttgttatggagttataacaatatctcagtgtgacagtgaccagtgctggattcaatttttttatggaacacgcgggagagctgtgtatgtttgtattaagaagaggatccagaacatttgtttctgtttgtcctgtgtttccctatagaacagtggagccagcattttactgtcttgtcattaaaaagaaaagagacatacaggaggaatcatgcgtctttaatttctgggatacagggggtatctgaaatcataattgcaaccagcaaaatctttattgtagaattggaaacctccatacctgtggagtttctctttcctgataaatggactggactgcaaactttgtttgccagaccaatgtaaatgaatggaagctcttttgagattgttctagcgctcaatatactgtggaaactctatgcctgtcttgcaaaggaaaacgtttaaatggatgcatcatgagatctctttatcttttctatcctttagggttcaac

SEQ ID NO: 6888 - DNA, 589 bp, Zea mays
  Intron number 3 from transcript GRMZM2G458533_T02 (locus G RMZM2G458533) derived from phytozome v7.0 (chr-ID 1; pos 2 95461559 to 295462147 reverse strand)
gttcagttgatttcagcaaatacccgtttcgagtatgtaacttaccttcattcatttagggtcttctcagaagatagattttgcaaccatgatgattctcggaacctgaatacttaccactttagccttcaacaactgattctgctgatcctttaatctctatttactactgatctatatttgtctgcttgtgatactatcatgtttacctaaacatactgctgagtttgccagtgtaaaactggaagcaaagcattgatctcttactagctattgtgtctcattcttctcaataaatattgcgcttttattccaccaactttctgcttaatcaataagtggtgtgtgtttatgtgctcactgcttacactttttagaacattggttccagaagttccttagtatgcacatgcaaatattttcttccattagtattgctgtttccctttttattcttttcataagtagaaaaaatacttcttgataggaacacctgatctttcatgctttctcattgttttttgtttctcaaacttcaaacatcatgttttcttcatgcttttgtataacattcctattctttaggcat

SEQ ID NO: 6889 - DNA, 975 bp, Zea mays
  Intron number 1 from transcript GRMZM2G141244_T01 (locus G RMZM2G141244) derived from phytozome v7.0 (chr-ID 1; pos 2 88013775 to 288014749 reverse strand)
aggccttcaccgatcacaggctgctgtacaactgtgtacgtcactgtttgttttaaacgaaatgcaggatcgatcgaagatcactgcgcacttgtagagagcctgatattgatcgtattttattttgttttcgtacttgtaggggtgtgatattgatcatatttatctgtttccttcatttggttgcagtatgtttaaattcgttgcttttattattggaacctccggtgaaattttattatctacgcaacgtatctggtgcatatgcatgtgatacacatgttaaatcaaaatcatctatattagatctaacggcttattcaagaaaaaaaaagttcacatacgtatcagggcaggaagagaggttgcgggaggatttttttctccaaaaccgaagctgtttgttggatctgatccgatggacatgatttaatatgtgcaccaaatatattgcctcagtgatatagactgattaatacatcactagatatgtatcagtgcattgacactggatgggagaatatggggagcggcggctaggctgtaaatataattattgtttattttaaacattgaagtacatatagtctggtggttagccacaaatttctagagcagagaggtgtgagttcgagtgcttgttttgcactatttttgcatgtgctgggcgtgggaagtgaagccatagttggtagtaggacaggtgaccacattagattcttaatatgttagattcacatgctaagttcagtgctggtctttcatctgtatcctcctgtgcacagatcatgctctttcttgtttagataaaataatctgagtatatgtaatgatgtaaactccagggctgaaatgcttgaactaatatttcattctgtaacataagactgataataggtactatctcgtatatagaaagatacactgcacgttcttccaaacatccctaattaacgccgtgttttatactcgcag

SEQ ID NO: 6890 - DNA, 1008 bp, Zea mays
  Intron number 6 from transcript GRMZM2G082573_T01 (locus G RMZM2G082573) derived from phytozome v7.0 (chr-ID 1; pos 2 00421919 to 200422926 reverse strand)
ataaggagattgatccaaaatctcttatcgtggaggtactgcttctctgcattaaactcattggtagttggagacttggagttccaaaagctcccttaggctgtctagatcctttatttagtattgctctatattatttaatatgatatttctgtttcacctatgttttttggtaaaatttatgtgcttcctgaggtgtacaattcacttcaatcgattcaatttgtctgctcaaaatctttggagaattttttcttcaggcatatgagaaaggattgatgattgcggtcataccattcacttcaaaggtgtccattcctgctaacttttttgtaaaatatttctccaaagattacaatctgattaaactagctcaaagaaaatccaattattaacttgggtgcatcatgagtcatgaccattggctgctctgcagatccttgaaccttgccagtcaagtatcgcatatcgacctccaaatccctggaccatgggaattctaagtctacttgctgaaatttataattttccaaacctcaagatgaatctgaaatttgatattgaggtcctcaacattcctttttttgatagtttctttattgactttgtatctgccctagctacccatggccatgctaaatgttcttttgggattttaggtgctatttaagaaccttactgttgacattctaatggagttgtcagttttctggacatctgacaatgattactcaaagataaactaatgccaactactaccttgctttctcgtttggaacatttatgtttatttacatttggagtggctagggacctatggcacatgcaaattttgttcaaaaagaagtttatttggaagtatgtaagcttaacataaatataagacgattgtttttaaattttctgatgtgtcacattactgtttatgtgctataatcctacaatctgtctattagttgttgttgttggtaattgagctttacttgtcccgtggctgtcaaagggtta

SEQ ID NO: 6891 - DNA, 987 bp, Zea mays
  Intron number 1 from transcript GRMZM2G311151_T01 (locus G RMZM2G311151) derived from phytozome v7.0 (chr-ID 4; pos 1 2255580 to 12256566 reverse strand)
tctgtgtttttcaggcctggtatgttttcacggacaactaatgagcaatcaattcaattaatttctggacgcatggcatttgttgtgcacttgtgcctatggaaaacaagaaagatgagtgtttgtatgtagtttagtttcccattatagtgtgcttcatttcccagcaaaatagaaccaacttcattgatgcagtatattggacatatgcatatctttacataatagttgttggctttcacatttaggtgagcgatttatggaaattgtaggcagtccatactacatgcccccagaggttctgaagcgaaactatggccctgaagttgatgtctggagtgctggagtgatactttactagtgtgtttggtttgagaaaagaagtgatccatcttcttctcactcctcacttttttatttggtttgtggaatagaatgggttgatccatcaccaccccattcctcataagctaataattagtatatacatgaggagtgagttgattccaccaaaattaatagaatgaacttatgatgcatcacctcattaagcatagagtgactacacaaaccaaacacaccatacatacttctttgtggtgtaccaccattttgggcaggtaacattcgaactctggtctggaatgcatgcacgttaactgtaagttagaacaccatcgtaatcccatattcatgatgctacgcagaaaccgaacagggagtagcgcaagcaatcatacgatctgtggtagatttcaaaagagaaccatggcccagagttaaagaagaaagcactaagggtaagatttgttgcatgttggtagcagacataaccaccttccttactgaacatagaaggtgcacgcaaaatacaataagaatggtacattggggatcatctttttaaagtggtctgattttatgcttaaccatctgcagggtgattgctgagcatccatatatctgcggaggaagtagctgacataa

SEQ ID NO: 6892 - DNA, 986 bp, Zea mays
  Intron number 1 from transcript GRMZM2G017584_T01 (locus G RMZM2G017584) derived from phytozome v7.0 (chr-ID 1; pos 1 66919922 to 166920907)
agcacggaccagatcaagggtcgtcgtcgaccacggtgagtgactggtttgtgagtaatggactatttattgatttctagtttccatccactgtatattcgcattctgaaattctcttcaaaaaatgccaaagtgccaatgtctagtttttatttggactcgacgaatgcgacagaactaatgttcacgtttgaggcattgggctagacatacaaaactatgtctgcaatcccagatattttctcccagtcacaaacctgattgcgtttcacctcgtgcattatcacttaaaaccacttttgtgtggaactatgttttttttaaaataatgtagaattatatatggtcaccaaacttatgtgaaattatgaaggcatgtgaatatgtgatcttttagtcataagatgttcttgttattttcctatccacaacgttctatatattctttaagcattttgaattgatatcactgttagtgttcttggttatatctattataggttatagtgcatcaccagtaaaatttctaggcttcaattatcagcccccttgcagccttgcctcgtttctgggtccatcacttagggagtatctgttcatcacctagatacacaacttgtgggtggggtgttctactgtagggtgctgctaatcccttggtatccatcaggaagccaccacaggctcatagcataagttctgtcagcgttcagcgccccctcctgtccttcccttgtgattctccagcaattggtccctgatccctgtccatcatttgttcagatactgaacaactattgccatgttaagttagtcaacacaaggattttgcgtagtgttgtcaccatggcgctcttaggttggtggttgttaaaattgctttatttatttacatctccattgcacgctgctggttgttggtgatttcttgtttttatctccaatcgactgaactttagttttcttatacagtttgaggcttggcc

SEQ ID NO: 6893 - DNA, 357 bp, Zea mays
  Intron number 1 from transcript GRMZM2G102365_T01 (locus G RMZM2G102365) derived from phytozome v7.0 (chr-ID 1; pos 5 3271935 to 53272291 reverse strand)
ggacgaggagatccagggccgcgtcaccgacgcaggtgaatattcaggatgtgctagttatcacaggcttttctctctctattttttcgtagttcacgtgtatcttaattttttcttcgaagttttgcgattaatttagtttttatcccatccgaaaatcattttagttttcttctgcttaggtttacttttagcagtttctagtccgtttgaccaccccgggggagttttctttgattccggagctttaattttataaataaaaaaagaaactggattttcatctataaaaattaaaaataaactggaacgataaagactaatatgatctgttttttttttggttcggttcctcag

SEQ ID NO: 6894 - DNA, 479 bp, Zea mays; identical to SEQ ID NO: 6515
  Intron number 2 from transcript GRMZM2G010466_T01 (locus G RMZM2G010466) derived from phytozome v7.0 (chr-ID 4; pos 2 40222121 to 240222599)

SEQ ID NO: 6895 - DNA, 966 bp, Zea mays
  Intron number 3 from transcript GRMZM2G017254_T01 (locus G RMZM2G017254) derived from phytozome v7.0 (chr-ID 1; pos 1 6597984 to 16598949)
agtcagctggaggtctgtcctcagtgtcttcatttatcaactatgctttttgtctaaagttgttttgtcccatgtggccatgtttcttgtttatccactatgctgtctatcaaattgttcttttcaaagttgcacctactgtcctgaaactgtcatgacgctgacaacttacctatctatgcgaaagatcagcttaaagagatgctactgtgcacttaatgtaccaatctcactaaccagttctatcttagatgattggttctgaaattcaaaatattgcttaaattacgttttttattttggatttccaagaacactgtgcgctggcttgttttagtgcagatcaatcattcatactgtatgtcaaatgtaggaaatttcttaacctctagtagaaggcgctgaccccccaccccccctttcttcaatgctacctattcactgtggggaacgactggtcgactgctgtgcaagccagcctcctgagtctttagatcatgatcgaaccgtaggtcatactccctccgtttcgttttagttgtcgctggatagtgcaaaattgaactatccggcgataactaaaaagaaacggagggagtatttaacacttaaacccttccaccaccaacttgcgcagctttatgaaaacccccttgacaaactacagttgcatctacggttggatcatgatctaaaggcccagaagactcgcttgcacctaaagtctgcttgcacaacagtcatttccttcatggtgactccatccatgtacttttgagcaataatgaaacaattcttcctttgatcttccttgtgctaagaaaatcgcatgcatcgtgcttgcacacaattttattctagttttgagcatgtttcatggaaatggctattgtattttttactgcatggatttttctacatacattttctaagtattgtcgtatgcctaataacagagtaaagtcg

SEQ ID NO: 6896 - DNA, 427 bp, Zea mays
  Intron number 1 from transcript GRMZM2G065317_T01 (locus G RMZM2G065317) derived from phytozome v7.0 (chr-ID 1; pos 1 7991400 to 17991826)
gcttcagacctttgccgcaccacgacagcaagaaggtgatgagcatccatggatccacctagacagcccactccttcgcctcatcctccgcgctcgtttcctaaccacataatgtgttatagctaatcaaataaatttaattaatggaagtagacaatattagtggaatccaacaaaaaaagaaaaaacaaacaaaataaatgaagatccaagctgcctccgaccgtccatccatccatccatccatgcatccaaagatcacgaattcaattcattttttagtgcaagaaagaactgggtcactttcattccacgcacataaaaaaaattagagatttcaaaactacagcgagatagaggtagctaaccagctactgtaccgcatagttcagagaagaaggacctggagcgcaaaggagagggcaac

SEQ ID NO: 6897 - DNA, 549 bp, Zea mays
  Intron number 2 from transcript GRMZM2G118098_T01 (locus G RMZM2G118098) derived from phytozome v7.0 (chr-ID 5; pos 1 30495848 to 130496396)
gaatcaggtgttcaatcaattcctcctagtttatttgtattcccatgagtgtacatttttcatttggttcttatgatagcgattggagttgttccggtgaaccatattcgtttccccttgacttttcttttttttttcagattatttacactgtcaataaacagtttttccgaaatcaatgagttgagatttttctatggggtttgttggcatttgatattatcttaacaattggttgaataattttgctacagcggtcatggatagctaatgacgtctgttgcagttagttctgatgtccaccattgcttggattagcttttagtctagtgagggaataggttgtgaatctccaatggttctgatgcagtgttccgttttgagctcattttaagctgccttactgctgggaacttctttgaagctgttgtactctgtaacaatttcttagcctgctatatctagtcttgtttttgctatatttgccctatggcatctgatactgattgccagattattgatatccctgtacaggcgataccaaatttg

SEQ ID NO: 6898 - DNA, 826 bp, Zea mays
  Intron number 1 from transcript GRMZM2G039089_T01 (locus G RMZM2G039089) derived from phytozome v7.0 (chr-ID 5; pos 1 69578687 to 169579512 reverse strand)
gagtccagggcgtccggggacggcggcctttccaggttgcttcaccttaattcgctgtcgaaatcccccttttttcagttacaaaatggttcgagagacggggttgttgttgagctttgagttatcgtttggtggcagcggcggcggtagcgttagcatccactcgtgaagtttaagactttttgcacaacaagctgcttactaggaagatataagggttgtttggtttctaaggactaatgtttagtccctacattttattttatattaattcaaaaattaccgaatatagaaactaaaactttattttagtttctatatttagcaatttatagactaaaaaggaataaaatgaagggattaaacattagtccctagaaaccaaacacccccatagtcccagtttagcttacagcatatccaattctaatggacatttgctagggacatcttcccaagatatttcgattccgagcctcctgctctagttctaaaagtagagcttacaccttagagggaagatcgcatcaaagatccagcgagatatattcatatcatatattagaaatatatcataaagaagatatttatataccagatcaaactgatagatctgtactacattattaaccttgtagtggaggagtattaaaaagcaaaagctaacaatcctaattggtgtgctagtagattaagcttcaatatctttctatgggagcttagttgaacaataagtatgctaatccgttctggctcagccttacaggatcattcatgtttcttttctacagcttctgtataattgaaggtccagagacgatcgagg

SEQ ID NO: 6899 - DNA, 921 bp, Zea mays
  Intron number 6 from transcript GRMZM2G042927_T03 (locus G RMZM2G042927) derived from phytozome v7.0 (chr-ID 5; pos 3 4307500 to 34308420)
aattggtgttaatacaactacattaacacgtaaaggtgagtcaagattctctcattaaaatatttgtagtcaagattcttttttgtgatgttccaaactgaaagagtgcatccgggctgttgctgtgaaagaaagtgaaagatgatgaggtcaaaaaatgtctttacttggcaaatatacttgaaacataatttgttatattgtatctaaaattgagaaacagatggtggtgagaaaacattgctctcgcatgattggatatttttgatcttctaatgctgaaagaatgcaacataatattctgatacttggaatttatttgagtaattttaactaaacctgtacgtgctaatgagacatgcatataattactgctatatagtttggtagacctgactttgtgatcattgtttcctgggtatgcttatgatttttctgcaatttatctgtgctatactagacttaatcagtagttccactgatttttagtcgttatattaataatctgaatgctcatgaccaaaggccgttagttcgctgatgaacacaattttcgatgttagaagtggattgttgtttgactctagttcttacattttgtctttccttttgcggatcttttttacatggagaatagatatccaggctatcaatgttgtaatcagttttgatttgattttgatgttcaaattgtaaatctttgttgcaatatgcattttgttataatagaaacaatataaagaaaatagtatagagaataaatgtcatctggtacaattgtattagtcttatccctgttatcatagcttttgcttttccttagccataatgaatgagcaaattagcatgggtaccttatgctgatttgcttctgtcttgatggtttattctctcataggttggtagatctggaaggtcttg

SEQ ID NO: 6900 - DNA, 752 bp, Zea mays
  Intron number 3 from transcript GRMZM2G155949_T02 (locus G RMZM2G155949) derived from phytozome v7.0 (chr-ID 10; pos 141671095 to 141671846 reverse strand)
catcgttctaatcaaacttctgcccctcaatataggttcaatatttatttttatgaagtatttcttgtacatttgaattttgattgcactctgttggctgctgcacttcacttggatgaggattttgtggtattgtttccttgaaaatgaagactgaaagggtgtagaaccagatcggagttctttggaggaattgaaaaaagcacctgcaatgataactagaagttagaacatgaacattgtcaacaatcgaatgtaggtgcaggactcctttttatgtgctggtaactactgatggctgccgactaacctaaaataattaatgactttttaaagcattatattatatgcagtaatatgaatgacagtctctatttgttttctcatatgttggaatgcacatgagattgctttatcaatattggtttgttatataaccagcaaatttatgtgcagtcttatttagttgtctatttggaaatattttttttcccacaaatgtgatgtcagagtagttgtgcatcagtcaaatgttgagataatcaagtgaaccgttttttttagtgtggggaaatattgtttaaaaaagtggtcgtggctccggtctcagttgtcacatgtttgattaatactaattcacattgcaaactgtttcaaatgatgcatgaaccagataaaattgtttatatatctgaaaaaattggacctccactgtaggcttctttttacaaatcttggtggtgaaaagcgat

SEQ ID NO: 6901 - DNA, 943 bp, Zea mays
  Intron number 2 from transcript GRMZM2G086497_T01 (locus G RMZM2G086497) derived from phytozome v7.0 (chr-ID 5; pos 6 821330 to 6822272)
tcgccgtactcaacctcctctggtgcttcctgcaggtgcggattggttgccggcttgccgctgttgcttgtcgctaaatcccgtattgcctggttatgaaactctccgtgctctgaatttggtcatttgatgtttattaggggaatgctttccatgaaaaaatgctatgctgtgcgtgtagtttaagttacgactagtgaaaggcagggagaattccttcttgaaaagtaggggcaagtggagctaacgagatatgaacttgttggtgaaagtgagctatgaaaaatctttaccagatcatgaaacttttgaattgtaatatcaggtttgaatgataatcagtaatgtttgtatgtttttctagtgttcaatggctgagtagaatataagtaggtaagaagactggaaattaggtgaacttttggttgtacccgagtagtcttttgatgtttctactcgataatggaataactgaataccacatcgtgattgaatcctatgagtaggatgggtaggcaaagagcttatcaatcgccagagagtctcaatgttgagccagtagcaagctttggtgggttttcaaaaagcaaatatcaagctcctaggatcaagttatagctggtaacgattaacaggtgggaatctcagctgggtcaaggaaaacaaaatccctgatggttggttgttgatgtcaaatatgtaatatgttggttggttattaggcttagatctgtggcacacatcttggtattgctactattataagtggattcattcgtttttagatttggtattgtcctgttgtacgaactacagaaagaaaatcagatgatactgccttatgaatccaaactttcatttttatttttttacattgtgtattacctatttacctgtatctcttatgtaatcatggaacatttttttttctcaaatggcaggc

SEQ ID NO: 6902 - DNA, 716 bp, Zea mays
  Intron number 1 from transcript GRMZM2G161418_T05 (locus G RMZM2G161418) derived from phytozome v7.0 (chr-ID 5; pos 1 5327557 to 15328272 reverse strand)
tccaagcacccctctggcatcgtccccacgctccagtaagtcccggatcttggtcatctggggttgggggttgcggagagatcctgtaccgtacgtgctagggtcgcgcggcggatgagtttcttgggtgtgctggagttgtcagggcttgggtctgggcaacggggtgcctccctgtctgtgggtggtggtgtggtgtggtttggtttgtgtcgtgttttttttcagcttcccggtactgggtacatcgaaatgagctaatattgtgcatcgagatgagctaatatcgtcttaaatagttgtggctttgattggaattatttagttgtcgtccactcgcggagggttaatttcaggtattgggcttgtaaaacgagacaggaccaaactgcagagtagatctgttatgattgaagtttattcttggtgtaatagttgtagcaaccataatctcttcttgaccgtattttccattccatgttttgattggtcggtgcataaattgtgtaatgtgataatcaatcagcctcgtgtactgagatttcgatatgtcatctcatgggttaaggtaaatgctttggttgatttgagttgatcataaaaaataggtgtctaaggttgcctttggttcgagggatgtaccagacaggatggggcgatctctttttcatcagtgtttggggatgagtttatccctgcagtggcatattcctgaa

SEQ ID NO: 6903 - DNA, 788 bp, Zea mays
  Intron number 2 from transcript GRMZM5G872992_T02 (locus G RMZM5G872992) derived from phytozome v7.0 (chr-ID 5; pos 6 2888282 to 62889069 reverse strand)
gccagagggtatgcaccttctacatatttcttagtttttgacaattattggttagcctacatgttttttggactgaaaagattatgtttctatctgggttgaaggtaaggctaaaatgtcgtcatacacccaggacaatttgtcttattctatcaactatctagggataaacaaatctagcaggtacatctgttagtttgggggatgatgaggttttaatgtgaagtaaaaagcatgatactgaaatggcaaaatcaaaatgtaattctactttgagcatgactatgtctgttcgaaatcgacatcctatttgaatacaccaatttctgctcattatatagtaaacttcttttgccaagatgaaaaggacctccaaggaatgaaaagcccttcatgacagtggaacttcatatggtaatatcaaacatcaagttttacctatataaaagttaagttcagtgagtaaattacttcatgcaaacataacactacacaccagctgttgtggagatggatgacgaccaccatgtgttcgccgaaattctccttaggtacacaccagctgaacgtgtgctgcttatgttattcttttcatgatagaatttttatggttcttattatgatgtcatgcttagcttatttttctctctactaactctaataaataggtgtccatttgctgcgacacgctaggagcacggctatgccagggcggcggcacgacgagatcgagatcgcatccagggtgtggcagcaggtgcacccataacattaaatgcagattcctc

SEQ ID NO: 6904 - DNA, 606 bp, Zea mays
  Intron number 1 from transcript GRMZM5G872992_T02 (locus G RMZM5G872992) derived from phytozome v7.0 (chr-ID 5; pos 6 2889122 to 62889727 reverse strand)
ttgcacgcgcccctcgcgcccggtcttggctccgacctcgcgctcggcaccctgatgggcggccccttctctagcgacatggccggcccacgccatcccgtcctcggcaacttttgtttgttcagctgagaagaacactctttcttctatgcactgagtatgcattacttttggagtttttcacttcgaaatcttttgtcattcagtgcagtgcaccctatcatctaatgctttattcagaattagataaaaaatatgtgcactttgatgtattgcaggtttctgtgcgttgcatcctgcacttgcttggagcctatagcagtgtctgctcatgtgcacatcttacatacacttgggaggaggacttcaatggattttcttagccgccatggctagagggtattgcaggttaaaagtgtcgaatcagacgctctaccatgcacatttaaaaataataaaattgcaattgctcgtgaaaataatagaagtgcaatgggtgacgcttttaacctatatagagagggtggattttatttctattcttgactctctccaactaatatgctggcagagatctccaaccttgtgaagaaggcactcaagtca

SEQ ID NO: 6905 - DNA, 623 bp, Zea mays
  Intron number 1 from transcript AC213614.3_FGT002 (locus A C213614.3_FG002) derived from phytozome v7.0 (chr-ID 1; po s 92463174 to 92463796 reverse strand)
ttgctcattgggagaatgtacgcgctgtcactcgtactcatccctctcttcaagaagattgaggaataactatgattaaccctctccctgtgaatgcaatcaatttccaagcggttcctgaccttgttagagaatatttggtggacctaagaaatttgcacattagagagatccagagatcgcatcttgggcaagccattgttatgtttcactgtgtatgataaagataatttgatagctatgggtcctcagcaagcattgggattcactttcacagtgattcgtcacaatgaagcgtgaaaccaacgtgccctagtttttaatgaagaatgctagctcatgctactgggtttcccattggatttctggactcatgaaaacattcaaaacgccattggttcttttggtaggatgataatgtggcatccagattggtctaatgttactaaacttctagtcaggcaagagtcacctctctcaagaggtaccacaattcatagtcttcagtgtgttttttagggattccaagggatgtcacggataatatagtgtgaaaatagtgcatcatgctatgttgggtgctttgccacgggatgaagagccagttccaccataccctgtag

SEQ ID NO: 6906 - DNA, 690 bp, Zea mays
  Intron number 1 from transcript GRMZM5G811053_T01 (locus G RMZM5G811053) derived from phytozome v7.0 (chr-ID 1; pos 1 44237359 to 144238048)
cgtgcgcgaggcggtgtttgggcagccacagtgaggtaagtgtgtgggcaaggtgatgtgtcgatggagtctgacggagtcaaatgaaataggctgtttgatctagggttattgggtgcttgctcagttcctatggcgctcaaatctttcgcctaatcacccacaggcaccttagccatgcctcatgaacgccatggactattcaaggacaccatcgtcttaaggtctaagacgtctgctatggcgtcctagctgcagcgctttaccgcttaagcgatgcttagaagacgccataacaaccatggcatttacaagcaggggcagtggcccagccagacaagcatttctaaattattatagatgttattggtataatatgtggttgcaaatcagagctttaacacgctctattaaggtttatatgccttttattaaccttttgtagcgtataaaatcaacactcatcaattaactattagtgtaattgtcttgctgaagttgctaaagaatgaggggatgcatatgttttcttatgcgtgtctattaatgtggtccaccgtagtttctgtgcccttagcacctcaacttgtctcatgcaagcactcacaggtctgtattgacacaaatcacatgcttttattgttacattgaatgatcttatacttattgttattactatttgcagccttg

SEQ ID NO: 6907 - DNA, 853 bp, Zea mays
  Intron number 1 from transcript GRMZM2G137528_T02 (locus G RMZM2G137528) derived from phytozome v7.0 (chr-ID 5; pos 1 58605599 to 158606451)
acctcaactcccgaggtagcatttcttctcgattacgccccaaacccttgaatcgatgtgcccctcccgcaccgcggtttggtgtggtgaaccctttggtggaaaccctacctttagctgggtgttaatcatggccaaaggcccggacttcagttgtctacagtgttgggtttcgatgcatggttacctcaagctgaagtgtcttaccaaattatctgatctgatgaagatgtccagttaactactgatcagtgtgttagatcgactgaagaatatctccaaatgaataagctttagatgtttagctacttgagcagcaggctgacttggacttggactgttcagtttgaattgtgcatggtattgtcgcagtggtaactgttgttttgctgtgtttggatcttgattttgggagtgaattatacgtaagttgtgcaggctatctgttgcttgcctgtgtttgcatatgtcatctttcaattttgctctactacattcttgtggggttgttaggacaatatttcaagcaggtttctgtattcctgaggttatccactattattcattgcctgcatttcattgacatgattttggtattgtggctgcctattgtgtgactaaatttgcctctagttgaacacttgtaatgtgaaattatcttgatgaacaccctgcgcccccattacctacctagtggagtaatattcactcgcatgatttcaccatgatgcttttgtttaggatttattaaatttctgctgtctctgtttcatgagcagcacatccttctacatctattgttttctgattaccatactctaagtttggccttgcaattttaatttcagttaga

SEQ ID NO: 6908 - DNA, 720 bp, Zea mays
  Intron number 1 from transcript GRMZM2G457231_T01 (locus G RMZM2G457231) derived from phytozome v7.0 (chr-ID 5; pos 1 25906275 to 125906994)
agtaggtagagtgtcatcaagactttaactatttgcactagtacttccttagatttcactgttttccatatatctgaactgcatagcagattaagagggagatctctatacgatgaagctaatacatcttcccaatgtttttcatctgcatgaggtaaataaagctttaactttcaatgtaaaaaacacatatattcttttttcagaattccgtttgttgtatcagaatgcatgtcctgtaggtcaaccattttatttggattgttttcccccttataactggtgatgggaagtaaaacaaagatttactttgtgctggaattcgtgatgggtggagagctccatgatatcattgtaggtcattgcttttcttttctctatcatttgacctgattcatcaggagcagtcataatgtagaaaaagatgtctgaaatcatgggcttcgctccaatggaccatgacttattgcttcattcgagcagaaagaacaactaaatttgttcttgttcgagtgcacaaacatactgtcttctgttctggattcaacttatgtggtgtcgaattgaaaattcagtttcagtgcacaaacagactgatatacctatcattgcttgtgtctagataatcttatctttaatatttttcacttcttttcattacaacatgtttgattggctaaaatgctaggtataaagcaatagttggagctatagcacaaa

SEQ ID NO: 6909 - DNA, 726 bp, Zea mays
  Intron number 1 from transcript GRMZM2G043147_T02 (locus G RMZM2G043147) derived from phytozome v7.0 (chr-ID 5; pos 4 8345653 to 48346378)
tctactccttccgccccgcaaaccaggcgctccaggttcaccgctgattcacagctgccaccccctatttcgtggcgctgcgtctgcgtgtgctctgccctaattcgttttgtggtgtgttgtgccgagctggatgactggattgtgcgtattctagattggactgcgattaagattccgtggcatgcgaatgtggcgtgtttgtttcggtgaaagccgcgtcttttggttaattagtctctataatagattcatactagtgtttagattgagaccatatggatagtttcagaacgtgatcttcgtgggcgttgccaaattttcgaaccaaattagccgattcatgctaattgtactggtattttcatattttcattatccagcatctaagtttctggtatgtggtggaggcacaataaaaatgtagattactctcttggattttgattttagcaagaaataactagttcccaactgttttttaagaccccttcctcctccccgggtggattggactagacattaatgaaactgagtaaagttcaccataggaaagattatcaatagccatttactggtttttgcaggcactgggtggttatgcttaaatgactgctgatatatttttcgtctttttttcaccatcctaaccattgctgacactcaagccaaacgttttctttttattatttcaggaaatattggattctcttagtccattcgttg

SEQ ID NO: 6910 - DNA, 815 bp, Zea mays
  Intron number 2 from transcript GRMZM2G350001_T01 (locus G RMZM2G350001) derived from phytozome v7.0 (chr-ID 1; pos 4 0188302 to 40189116)
gagacgttcatatcttccttgtggtacgatccattgatggataaccagaatagtggaataaaccaacccatgagtttaaatattaacaaggtaaaatttgtagatgaatttagaagttaattttaaatttatatggacaatttgtgttcatgcccttactttgaagtctaatggtgaatttgtcctcatttttttgacttggtgatttggcatctggttttcaaaacaacggtagagtataccctagctagcgatactacggaaggttgggtgtagcagttgaccagatgatctcgcttcctattcattcaaagcttacatctttatgtgcttttgattgattcccggtgactaattttactgctctccatatatacaaattcattcacctatcatattgattcccggtgactaatctttatggctggcgggagcgtttggtttgctcgggcgggtgctgggcctgggcggttgcgagctgggaatgtggttctgagctgagcgggacgctccttctttttttatcgagacgtttttctaggttgagttcatttctctgcttcatctgaaaacaattatcttctcatttcaccatgatctttgggagccatataaccttttctcctccgatttatgctgaaatgggggcctagagttgctccaagatgtaaaaaaaatcgcaccatgttattaatggatctttagaattaacatctacggttgatttgctctgctgggaagggaggttatagaacagaattaatatctacgattgattgctctgctggaagggaggttctgatccactgcaattt

SEQ ID NO: 6911 - DNA, 257 bp, Zea mays
  Intron number 1 from transcript GRMZM2G311281_T01 (locus G RMZM2G311281) derived from phytozome v7.0 (chr-ID 5; pos 1 34798958 to 134799214 reverse strand)
gtgatccaaggaattggaataatcttgataataaagtcaagggacatattagtagagaagggggctataagagaagaaaatattgtatttcctttggatgataatgggaggcatttttcatataagcattactctagaaagttgagcaatggagaagttcatgatagaaaatggttggtttattcaaaacatgttgatagagtgttttgcttttgttgtaagattttcaattttgagaagtgtaagagttcactggc

SEQ ID NO: 6912 - DNA, 936 bp, Zea mays
  Intron number 1 from transcript GRMZM2G543860_T01 (locus G RMZM2G543860) derived from phytozome v7.0 (chr-ID 5; pos 9 799805 to 9800740 reverse strand)
tttagtgagtatttagtattcacttgttagattaggttgtcttcaacaacaaactctatacactcctgtacgctaaatttagcgatccaagcgtccgctacatcctccagcaacgaaggctaaaccagtcgctaaagtaccggacgatgttcgtacacgctattctcagcgattcactgtgcgtccgctatctgtccttcctgtgaaatcgagcacggacttgggaggtggcggcggcggcggcggcgatgaccatggagcacgccgccgtcgaccagcagcgcacggagtcgcttcatccggccaaacgcgagcatcgatttcttgggcttggttggagaaaggagtcgttgttgggaagagaggcagtggcgtttgtagcagacgaccgagtggaggtggcgctagccatggacagagatctgaggagcggcggcggcggccatgaatggaatcgaggagcgacagcttggtctggtgttgtaggctgtagcgtgttcggccaaagaaaaaggctaggtggaggacaagcaaacgaaaacagccaaaaaaacatgaacatacagctcgttattagttttttaattaatatatatgctaaaaaagtgacgtagcgcaaaatgttaattaggttttttgaattaagtacattaggacaaattcaaattatatgcaaaagatagaataaatatgatagtttctaaattctgtcaacactgtagatatagaggaccgaatttagagaacgttgctggagattgagaatatatagaggacgaaattttttagggagtgctgtaaaggacagagaatattcttttagagaacgaaatttagaggacattgttgtagacagccttagaaaggtaggcctactccaaagaggggtttaggccagcgtccattctcaagatacgagtcaagagttgactgcca

SEQ ID NO: 6913 - DNA, 810 bp, Zea mays
  Intron number 2 from transcript GRMZM2G141948_T01 (locus G RMZM2G141948) derived from phytozome v7.0 (chr-ID 10; pos 21014379 to 21015188)
cctagcactgacaagcagtctttggaccacctaaggtattttttcattttccttgttagttctgacatcaaacatgttatttctagttctttggaagtacttgtgtgccactttatgtccgtgcattatggatggaaaattttaaatgtgttagcatatctagtgtctagtcactgatggtctattggtagttttgtgtgagtaaaggtaaattattatgttgtcttgatcagagctagaaaagtgcttgtggaccaccggccacatgttattggcagttaatctctggacatgcttttagaatatcattgtgctaatatgcactctttttctgttttttttgaagtcaattaacaggattaactcatttttcatccctaattaaatacacgcatgcatgttcaaataatatcttcaatttggaaaagcttatgccaaagagaagcacatgtatcactgctttactgtattttcagtatataggctgctgctgatgtccttattgtatgcactcggaagatcggtagcaaggcaacactacaacagccttgccaagctggtcttcctttcgtttgaaatctatggcactcttttgatttcacttggccccaaattttcctcgacataaaattgccgtggctttatagtttactataaaatccttatcaactggacataatgctctctttaggcttctattaattatcccagtaatgtaggagaatttaatttgaccattttactaaaatatttttgaattcttctgtttcctcagggatcaacaccccattatcccattaattaaggaac

SEQ ID NO: 6914 - DNA, 950 bp, Zea mays
  Intron number 3 from transcript GRMZM2G121166_T03 (locus G RMZM2G121166) derived from phytozome v7.0 (chr-ID 5; pos 1 80908775 to 180909724 reverse strand)
aggtgcatgcttttcctggacccatggattgttttatcactgagatcatttttcttataacaaggctataaatcatgtgtaatctacagtgttttgtttagaaaattttgtcctctctggttggaatcatagtagaaggaagcaaaatgttttgattgtttagatactttcagatagtccaataagccctggttggtacactcattttgggcttatttgcttccactcaccttttcgtctaacatgcttcctttattcatagttatttattgcaaaagggagcctctctttctatttttcgcttttcggccagtggacctctcctgttatactttatgtgaagttagtttaggtaccttctctcatgtatggatttgatgcttaccagggattagttttgtagatattatatttcatacatgaagaatcatggaatcattcatgtacaagtacaacatcattgcttaatgccacccttcttcaagctgcagtactatgcttttccacctgtcatgttaggctttgtcttctgcttttcgtgtgggcttgtaggctgtttgtgtcttcaacattgttttgaataagtcaatgggagcatagttgtttgattgattgatcagaagccaaagattgtttctccttaatctaaaatttactgaatgtcacatatgtgatatcacagattcacagttgttattgttgtagtttgtgttttgtgcaatctattcactaggatctttagaacattcttttccaagcgaaacttaatgcttgtcatttaaaagcccacaaagaatgcatgtatgatgtttatatgtatgcatgttttttaaatgttgatgttccacttccagccttgaattggtgtacgctatttgtaatcatgccaatctaaatcctctgttgtgctttcagattcttgattaccttggcaagtcctctgatagtga

SEQ ID NO: 6915 - DNA, 1010 bp, Zea mays
  Intron number 1 from transcript GRMZM2G412784_T01 (locus G RMZM2G412784) derived from phytozome v7.0 (chr-ID 1; pos 4 7179429 to 47180438)
tagcaagtttaactgcccgatcaaccttctcccaggtaaattagatcgccatgagttctttttagtcatctcctttggcaggtgctccttgcgtctgagcacagaggctgtggggtttcttctttaatccttcattggtggagcagcggatttattcagggttactcttttgtcggatcgggtctttcgcttctcgctttcttgcaaggatgttggcttcgcagtttatcggcttcgttcttatgtctgtccttcattcaaagcatacctgcacctttggaattctggtggcccaaattggatcaaagaatggcaactatattatgatgaagaatcaaagtcttggaaattggtttcccatcgccgtaatatgtcagtttcgtttgctaatattgttcgtaaaccagctcagtcaggtgcaaactcggtgcctttgggacgtccggttaggtccggaccttcttcttcaaacttgcgtcagaggccttcggttttcaatcggatttcttatcctttgcatccctccattgatcgactgatttcttggtcaaattcctcatccttttcttcgaagaacttagcagtgaatccgcgctgggatggcagaaggtttgctgggcgttcgcaatttcaaaattattcaaattccagtaacgaccgcgttgtaggccttaactttcgatcatcattgagggactcccgcgttcgtccttgggctttgcagaagttaatttggcgatccaagaagattttggaacagtgctcgaggaatattaggtaagattttgtccccagcattaatgctccctccggcccagcggtgaaggattatcgtaatttttggggacattctattccaggcaataatctacaatttttcggaatttcgggtcaaaattgcaggcggtcttttgattccttccctagtaagtttgagaatgcatcttgggtgtatcctccgcgattgtggttcaggtccccctgctctcgcttacgggtgggccatctcc

SEQ ID NO: 6916 - DNA, 751 bp, Zea mays
  Intron number 1 from transcript GRMZM2G124965_T01 (locus G RMZM2G124965) derived from phytozome v7.0 (chr-ID 10; pos 139115870 to 139116620)
gcaggtgagcgtagtggttgaatctattttacattgtggctggcggggttggctgggtaccggggtgggtggcggaaatgcagcgcctgtcaatcttgtcaactgtctctcttggagaccagttgtctttcagtttgaaattgtattgaacgatcttgcggttctttcattgggcgaccctgtccttgtgttggaggcagtttaggagatttgaacttttttcccctcatgaaaattactctctttaagctgacttgatgaactgacacacatgacgatagagttggagttgagggagttattgtattttgaattcgtgacattgaccgatgttggaaacttgtgccttcgctgatagaagagtctatagctccgttcggtgaaaacttgctagttatgtaggctatatatactccctcggtcactccattcttttttatttgtcgcgttttagttaaaaattgaaaatagcgggcggcaaatattcgagaacggaggagtagtttttttggtgattggttactttcgttcgctttgcaccatggaaggattcacaacataaacttgcctgctgctggagtttcattgtggttgtggtttatttcatccttgtttggtggttctagtatgtgttcttgctgtgaacttgttcttgtggacataagaaaacaccacaagttcataatgttttgtgaaaacttagttcaattttaacattttctgatcggcaggacaaattttgagggtgaac

SEQ ID NO: 6917 - DNA, 826 bp, Zea mays
  Intron number 3 from transcript GRMZM2G163544_T07 (locus G RMZM2G163544) derived from phytozome v7.0 (chr-ID 5; pos 4 8446625 to 48447450 reverse strand)
ttgccgttgatcactaccatcgttataaggtaagctgccagtgattcagatatgtttctgttatcttctactatatttgatttaaattcattcaattgctttactaaagctggaattttttgtttttgaagcatgaaatccttccatatatgaattcttgggatttgtttgataagttgtctacctttcgtgtggccatcctctgccaaattttaatttgtaaaaattgaaatcacgtgttcattttattgttcctttcatgtctgtaagtaggatagtgaacagaggtttaccttaaggtcccgtttgtttcctttgattttgaggaattggaatcttattaatggaataggctttttttagaatgtgacattccaccactttccaaagttatcatataagtctatctcaaattcatgggggtgagagatggaaattgattctatagatttaattacatgctattttttcgatgtacaacttatagcacactcttttacttgcttcgttataacataaatgtagtatataactatctctctcatatgatttaggataatatacaaatatattacatatataaatatatgaacttaattagttttgtctaaattataattattaaaatggaattcaattccaacgaaacaaacggggcctaatatgaattgtcatttgcatcaacaataaggttttgagacattgatattttaccattttctcaatttttcttaacttctatgactaagtacttaactgaataagaatactggtcccactgaaaactatccagaaacgactagcctaacatttgactggcaggaag

SEQ ID NO: 6918 - DNA, 914 bp, Zea mays
  Intron number 1 from transcript GRMZM2G096705_T02 (locus G RMZM2G096705) derived from phytozome v7.0 (chr-ID 10; pos 127861999 to 127862912 reverse strand)
gagaaatataaagatagccgaaacaacagaggacggtacgatttatttgccatgtttctttggagttgttcccagttctgttctccctctgttagctcttttttaatatcatgcacattcaagttttaaagagaagagaagacatattttacttgaaactgtcttgactattttttgtctcttgaataaaaaacatgagtacgtgaccaacctagaaggaaataggtgtttttccatttagaagtaggcatcctgaagagactcaacttgggtagtttggatgcatggccccgtgcccccgtcctaccagttgagctatagtgacttccgttttctcttgaataatactaccatgaaactgaatctgctaacagtaatattgactataaatattcttctttaaaatcttgatttgttggaaactgtaccgagaaaaacttgcttgtcatacagtgcaaagtactcgctcctttccaaaatttgcgtcgttttagttttgtctgaagtcaaacttctttaattttgaccaatgttatagaaagatatattaacatctaaaataacaaataaaatgtatcatcgaaacatttcattatagattaaagaaacaaaactgattttatatgttcgctcaaagttaaagaagtttgacttgacaaaacggtaactacttgcattttgaaatggagtagggtacaccatgctgcaattgttttgtcgatttattctccaatgttatgtttagtattgtcaaatattttttccaaaagtaatgactaatgaggtggttcattttgtgcaaactttccagggactggaagaacaaccgaggcggaaagcagtttggcggtgggaagcggggtcgccacttcgactcccgtgacagggcctccaataaagctcagaaagtttag

SEQ ID NO: 6919 - DNA, 963 bp, Zea mays
  Intron number 1 from transcript AC190547.3_FGT005 (locus A C190547.3_FG005) derived from phytozome v7.0 (chr-ID 5; po s 151669935 to 151670897)
tttttaccgtccatatttcccgtttccttctcctggtgaatgggctatggcattaaaactattccaatgcttaaagaaattctttgatctcactgaattgttgtccggtacattatatcccactccaaatctgttctacagaggattttgtgagataaagaatttactaggtgaatggtctgtttgtcaagataccactattagtgaaatggctaggtctatgagtaggaagtttgaaaagtattggaagaaatcatccactgcactagctgttgcatgttttctagatcctagatacaagagaagacttatagagttctacatgagaaaaattcatggcatctcctctcaagtttatgttgatgaacttcttggtatcatcaagaaactataccagtcctatgctgctgctactgcaccttcaactctgaggcctacaagtgggtcaaatgatgctaaggatgtagatatagctgaccagttagtggaaagtggatcagatgatgttaataatgaactagacaaatacttataccaacctagtgggcatgatgctgatgatatgaatgagttggagaagtacatggcagatgctcctctaaggctaagtggtcagtttgatatcttggcatggtggaagaaccacacaaaagagtatcctgttctttcaacaatagctcgtgatttgttggctgttcaagtgtcaactgtagcttctaaatctgcttttagtgctggtggacgtgttgttgatcctttccgtagccgccttgaccctgaaatggttgaagctttgatatgcatgaaagattggattgttgcgggaagaagaggttataaagcatctcttttcgttattcaatattttattactataatgtttgttaatatatcatatatgtgtaatggtttgacctttgaatttcagataagaaggttggttcaattgttggtgatcttgaa

SEQ ID NO: 6920 - DNA, 388 bp, Zea mays
  Intron number 4 from transcript GRMZM2G174803_T01 (locus G RMZM2G174803) derived from phytozome v7.0 (chr-ID 10; pos 24952118 to 24952505)
acgtcacaagggccaaatactgaggttcaaccagcgtcagtgaactctgatctgctatctcaagaaaccgagaatatttctcttcttttgagcttattggtgattactcatcttttgccttaacaacatgtaacctgcatcgcctgcttcatgtgtactgagtcctggcttattgctcctgtctggtttgaagtcagaggaagacttttatgtgagatactacacaatccaacttctaacagctctacttacaaactcgctgaaaaggtgcccagtaagtcatttttgtcatgttgagatgtcatgactacattggtatcccatctaagtgccttttattttgttttttccaggttacaagaagcaattctattgattcctcgtggta

SEQ ID NO: 6921 - DNA, 1015 bp, Zea mays; identical to SEQ ID NO: 6012
  Intron number 1 from transcript GRMZM5G830381_T01 (locus G RMZM5G830381) derived from phytozome v7.0 (chr-ID 10; pos 97784561 to 97785575 reverse strand)

SEQ ID NO: 6922 - DNA, 323 bp, Zea mays
  Intron number 3 from transcript GRMZM2G060561_T01 (locus G RMZM2G060561) derived from phytozome v7.0 (chr-ID 5; pos 9 3233049 to 93233371 reverse strand)
agatccatactgttgttggtgcaggtttgtacttctaacttcttctgtgttttgactatttgcaagtttttatggcagtgagaatatatatatatatatatatagacttgaaaatattagtcgaatcttagctctctgttaatgattagacagatctacacaagtgcgtttcacttttatttggtttgtgctggccatgttttcaaatcactgatgctttgttttatcaaattgatgcttatgccacaatataggagagtcagtgctctgaatattgtcatatttactgtttatttctctgaataggagctgctggtggagcg

SEQ ID NO: 6923 - DNA, 1041 bp, Zea mays
  Intron number 2 from transcript GRMZM2G057698_T01 (locus G RMZM2G057698) derived from phytozome v7.0 (chr-ID 10; pos 141500457 to 141501497)
accacactcattccactcgcttacaatatcccaacgtaagttgttaccctttggtactgaacaatctgctacatctgcctattttgtaccatcattgaattggtgagatctgcttccgtgccattgcagtagtcatcgtaggtcacttgatgcaagcattatatgcagtcataaaattttgctgctgaaaaccttggacacatttgagtgagtgtaaggaactagtgtaataaggggttcatattcatagtagatttgttgagatcaaggtgccttttttcgtcgggccttggtagaattttttttgaataaaaacatgttcagcagctgtatacagtataatcttatatcttacttcaaggatgacaatatccttagatattcatttgtattatactttatacatacgttttagggtctgctatgagctagcagcaatctcgggtatctaaaaaacaatgaatcaaatttcgctatagtagctgtttccatgaattatttgacatgcaccttatttattcattactgattaactctcttatttacctagagatgttgtaacttgtagaacaggagcaaggcagaacagaacatataatgatgtttacttcagtcctgaaatgataatataatttccatcattatgacagcaggggcttgctataactgactagttagtaatgactaatttgattgagaatagcacaacacaaacacctttaacttttacttgaatgttacccaagtgctgcttttgatgctgccatgatggaagatagaatggaactacagctaacatgtaagacttggttacattttttgagcagttttaaaaaagaaagaacatttgttgcaagaatgatgaagcccatgtagttttctactatgcgcatttgtttttattctggtttggtcattggggagtggggatacttgggactactgcaaagcattatggagttttgaactatcaaattgcttgcttatatcttcccttttgtgcttaaagggaaagcgtcggagcttctgctggtgaagaga

SEQ ID NO: 6924 - DNA, 844 bp, Zea mays
  Intron number 1 from transcript AC185251.3_FGT005 (locus A C185251.3_FG005) derived from phytozome v7.0 (chr-ID 5; po s 105766799 to 105767642)
atttgtcgatcctctgactttcagttccactaatcgtgagaatgctttggatgacactacaagaatatgtacttggatgaagaacgtgaagctagcattggtcctagttagatgtttattatgatgtaattatacttttgttatgtacttggacaataaactttgaacttataaactgcatctagagctggctgcactctttttcccttctggccatagggttttttaatgaggcagccattgcacagctctagtaatattaagtttgttttggtcaaaatttgtttgtttggtttgctaatcatatctgattatatgtttccaattttgggcttttgtgtatttttgggctcgattatgtattttgggctcattaatgtattctgggctcaattgtgtatttcgagcctaaatttgtatttcgggctttatatgtatttcgggccttctctattttcgggccgcccgattaaagcccggctcgtttagctaaaaacgtgtcgagccgtgggccgaggggtcagcctgtgggccagcccatcacaccccgaatttaatattgggctgggccggaccgaaattaaacgtgttgggcttttttgggcttgagttgggtcgggcggcccgaatgtacacctatagtcagaggtcgtcggtgtgacccagggccatcatcatgatcacgaagcgacgacagtgaggctaaggccaaaggagctgtagcagctgagactccctccggggacgcctcggcaaaggtacacattgaactattgaagagcaaattcaacatgatgtcatttctaactggcagatcctaatcacactgagcagaattttgcgg

SEQ ID NO: 6925 - DNA, 411 bp, Zea mays
  Intron number 1 from transcript GRMZM2G412871_T01 (locus G RMZM2G412871) derived from phytozome v7.0 (chr-ID 5; pos 5 934514 to 5934924)
tcctcacatctcaccccttctcccacgatatccacgtgagcacccatttccgatcgaaccctcgtcttcctattcttttttgatttgtggtgtgaatcttttacactcctaaacctacaccggacgcggaggacttagcagtcatcagtttattttttcccatactatgccatgtaagatttaggacatttggagtcactgcttccatcgacctccagagatctcttctgctctgttccccggcaaactgatctctggttttgatatgtgcacttacctttgatctttgaattatattattataccatcatgccttgcaaatgcattctaatctacaggaattttgctagcgcacttcactagcttacgacaagtattgattttcttttatattttctcagggtacttcag

SEQ ID NO: 6926 - DNA, 803 bp, Zea mays
  Intron number 3 from transcript GRMZM2G157329_T01 (locus G RMZM2G157329) derived from phytozome v7.0 (chr-ID 1; pos 4 1538281 to 41539083 reverse strand)
acctggactttggggtttcgaacgacgatatcaaggtatatgcttcgccggttcgaagagtgttctgttgttgcatctgaatctaactttaagaagcccgtaaatagctggcctgaagtgcgattggctagattcgccctcctgaaaattgagcccggaacatatttgccgtttgggctgtgttccaccgcagatctattgtggttacacagggcatcaatagctggtggttgtcacatctatggcttgtaattgtggtgttttcccgtgacttcggttaacatgtttagatattgttcttgtgtttcctaacaggggtgcttagatccagtgtagatctatatctgtgtattgattgttatttgttttctataattatttagtggctctgcataatgctataggatttaaagttttcgtagtatggtttctgattcaaacatgtaaaaatacactcatgtcgtatccacagatttgtatcactttggtttgatcactttgcttctattggcatgcttatgcttgtttggggagacattggttaagtttattacctacaatggatagtagttctttttaactgtgatttaacttatgcctgatattttaaattttagatgtgttctaggatctcaaattacattgacgtttatgtggattgattagtttattacatgtcacatagatcacatggattccctttgtaaccttgtaagtcgaatgccttggtaaacattatctgacaagtttcatatttatatgatgcaggagctgttctctgagctaggtgatctgaagcgttt

SEQ ID NO: 6927 - DNA, 961 bp, Zea mays
  Intron number 1 from transcript GRMZM5G878530_T02 (locus G RMZM5G878530) derived from phytozome v7.0 (chr-ID 5; pos 1 94403237 to 194404197 reverse strand)
cgcgtaagttccttgtcatccctatctggatttatcctgtcatggatttatgataaattttaggtttgttcgatgtgaatgtgatattgtgatttgacatctccatggtattatgttaagctttaatgatatgccgcaccactctgttaatcgatttactgaaaaaacaacgcatgcatacatcaattcagtgaaaatgtatctgtctcctgatgtttattggtatgtagtctattggttgacgtgtttctgattaagacaagattatcctaaaaaatgattgaaaacatgtcatgcaaaatgacacaagaaacgacatgactctgccagttgtattgatctgattctctttccttggtgcagtataatttgattctggggagaggagctttcaagactgtgtatgccctctgctcctcagcgtcctctttgtccacttaacatttccttgttaaatagattcttttgctcgcaattattccctctacccctcggcatcttgtctaattgaaaatatattgggtgaaaagatcttggaaacatgcaagatgtggctgaacacaaggtgcacgttttaactagtcataggctgatgtcaagagctgtgagcctgtgaccaacttctttaaaagtagatatgttttgctagagtgggagtgtcgggctgttgagctgattggttcgtctggcattttggcggttgacagtaataaccgttgtttaagatatattccccacctctctttcacatcaggagaaaggcattactgttgcatgccaaacatggtagtgatctactgcaattcagaagggatatgcttattagaaattcggtacacaatcataatggcacatggttttttatgttttttctgaattgtcttcaactcgttagaatatattaagtttggtatgtctaattttttttcttcattaaatttatatagttataaggcatttg

SEQ ID NO: 6928 - DNA, 891 bp, Zea mays
  Intron number 2 from transcript GRMZM2G099891_T02 (locus G RMZM2G099891) derived from phytozome v7.0 (chr-ID 5; pos 1 83205333 to 183206223 reverse strand)
tggagttatcatctttggtgccttacagtggtttggtgagtatatgggtttcttcactggtgacgtttttttattctttatcaaatagtttagctattctaacaaggttcggatgtcctattaggctgctgtcagataaattttgatattctattgtcgtggaataaaactattgagttcatccatgctctagtatcacccttgggaaatactagaaacgctactcctaacagaaaaaagaggttcataatattaataatattaaaatactggaaaagtaggcctagttcactggtgagagctgcccactaatttgccaggtcgtgggttcgaaggagccttttcatatttgtaggtgaaaggcaaggcttgccttagttatcccttcctagaccccacttttgtgagctgacactatgtctgccctttttataatattaaaatactgaccattcaaatactactttgactgtgttatctgaaatattcttgtccattttgacttctatattttcaattttttagttgcatcatgcaatgtactccctctgttccaacttatgagatgtgttgacttttttttagatacattgattttgctatgcatcaaggcatagtttatatctaagtgcatagtaaagacatgaatctagaaaagccaaaacatcttataatttaaaacggagggagtatcatatatcttaaagttgcatttcagagatttcatgaatattatacacatttatgttcttattaagtaagacaattcatcagtttgtcttttggttaatggtatatgggatctaaaccctgttaattataaatggtttctctgtatttttattttatttggcagccaagggcaacattccactttcctattggtcaagt

SEQ ID NO: 6929 - DNA, 571 bp, Zea mays
  Intron number 2 from transcript GRMZM2G000268_T02 (locus G RMZM2G000268) derived from phytozome v7.0 (chr-ID 10; pos 120451728 to 120452298)
tggccattgctaaaatccccccgtcagtaaatcaggtctgtgcagatcatatgagttaggtggtggcaatggcagtaagccagtaacctcagttagttgtgggtctttcaggttcttgtagtccttttcttaatgattgataagcatgatatactctatataaggccccctttggacattttcacgtttcatgcgtttttgttgtaaaaaacaaactgattcgtataaaatttctatacaaattaccgtgaaatttctactgcgcaaaagaccacaaaaggaagaacaggatgttttactgtatttatttttatcgaacatgcagaatagctgtgtgcctttcttttcatcaaagaagaaagagtgtcacatggatattaatattccatatgaatatagaacattagaacttgaaggttttttaatatgtaaatagtcatcattgaacgaaaagtgggtgttttaggggataattgtttcaaattaaaaataactttgtatattgtatatcctcaagtatacctacaccatacactgacatgtgagataaccttggcttgagcaggttgaa

SEQ ID NO: 6930 - DNA, 809 bp, Zea mays
  Intron number 3 from transcript GRMZM2G101699_T01 (locus G RMZM2G101699) derived from phytozome v7.0 (chr-ID 10; pos 83207704 to 83208512 reverse strand)
caacgcacatagactgctcatcttggatccttcaggtttgtatagtgtgttgtgttgctttatggtcaattgaccagccattacctccacctgatggtcctcgtttacaacagtaagagctaattaagtaagtaggtgcattgagatttgtcttgctatctgaagtggtaaatttgttaattctaattctttgttgaatgggggggttttgtgggtgctggatggtgttgtgggttgagctccttctttagattttgttgtgtaagaaatttgctttgattttgattggaagaaactagtacctagattggttgatgagttacttaccagatgatcattttctatggtcgatggtgtagttgcccacatgttatgtacccaacttttgtatagttgcccatttgttcatgctttccaaacttgagaggcatgtgcccatttatcgatcctttagaacttcatgctttctgaagtagacatccatgtacccgtcgtctatgatgtttgggaaactagtaacagagaaaaatttgcagcagggcagtggagttgaggctccgctcctcccctagtccgccatgcttgtatgtaggtgtagatcctatatctttgataatagcacatattgcaggttagatattcttattgggtcgattcattttgtatgtgctttgtagctgctaacacgcctctgcatatattccctaatatgcatctatgttcatattggaggatgcaaatgagatcctagagaacagtgcagtgtcacttattattagtaattctcattttgttatccttgtgcagct

SEQ ID NO: 6931 - DNA, 456 bp, Zea mays
  Intron number 2 from transcript GRMZM2G101699_T01 (locus G RMZM2G101699) derived from phytozome v7.0 (chr-ID 10; pos 83208506 to 83208961 reverse strand)
agggtgtccgttcattctacaaggtttgtcttattttcctgggtgttccgtaacttttccttgtacaaagttataatacttgtaactttgttactgacccaatgctattgaacttaacatattttattccaaagaaaccgaaccatgcattaagtttgagtatttggcctttgcgaatgccttttttcttcgatatttatctaatgtaatacgtacattttcaatcgagcacatgatgctgcatattgcaacacttagatatttgcttgaccataaatgcaatacaacatatggcgattttactcttatcttccacatttcaggacagtaagcctgcataatagtgtttatatgacatttgcaattaattggtattttggataaaaacatatattaaattttctacacttttcattgacagggtttgtccgctggtttgctaaggcaagcaacgca

SEQ ID NO: 6932 - DNA, 874 bp, Zea mays
  Intron number 1 from transcript GRMZM2G101699_T01 (locus G RMZM2G101699) derived from phytozome v7.0 (chr-ID 10; pos 83208989 to 83209862 reverse strand)
tctttcagcctttcctcacgctcttcggtaattaagttcatccatgatccgatccacatcaagcgtggcaatcaatcatctagtagtgtttttctttggtcggttccatccataaattagttctaagtatctttttttctgattttttttctagaatcctaggccatcaagcgtggcagtaatgctttgttcttgcaaataattttttaaaatattttgattgtactttgtttgtgatgaacatgtagcttctgattctttgctaaaaactaccaaatgtgcaatctgttattattttatagccatgtgaatatggatttatcctattgtatatatcattttttgttgttataatttttaggagacaactcggtctattgtccctgcaaagaatgagaagaaagaatcctcaaacactggcaagcgagaaactaggaaatctataaaaaggactggtgatttaatctcttagccttgacacaacatatgcatagtgtgttacttggtgaaaacttatgcacaaaatttatgttgtcgctttcatgaaggaggcaggttacttggttttaccctttctgcatattatgcaaataattctcaaatgaacatttttcttaattttgtatcaacttttatattgtgttattctttcacgtgtgacctggctatacagagatttatgcctctgcttctctatgctatggagtatcaaatctgttgattttttgttctgataatatagaatgataatggttcatgttgtgaaatgggtagatgatatcattccagatgcaccttatgccataactgaacaatacttattattgttttggtttcaggtgaggatccagttggagtgagggatctgcttgtc

SEQ ID NO: 6933 - DNA, 601 bp, Zea mays
  Intron number 5 from transcript GRMZM2G044348_T01 (locus G RMZM2G044348) derived from phytozome v7.0 (chr-ID 5; pos 7 0025038 to 70025638)
taatctcatcgtctggcgggctccattcttccactgtatgattctgactccctttcttttgtgtgtggttttgttgatccagcgacgcagatcttgaaacgttactacaccctatattttctgtgctattttagagcactatttgattgtattataagtacttcttcgcatggcgactggtggctaagagtcgatgtatcattttgtgtactgaatgaacttggactttttcaccattgtctctttcaaccttgctacagacaaggatatttctccatgtggatatggaagcttccatttttgtgacattagaaattctaatactggcatggatgtatattctttgtttacaacatttttatggatatgaaagattccatttctccatctggatagatgtagtaaaagatttcaattacaatggctgtcatggtgttaactgttaatgcaacgcttgcatttgatattgatttcttatgagccttagactcttaactatggcagtagcctccctttactatctttattcttgaagattgttcaagtccatgaatttgtttattcagcactctcggtggagttcacaaagtcccagattatt

SEQ ID NO: 6934 - DNA, 977 bp, Zea mays
  Intron number 2 from transcript GRMZM2G146599_T04 (locus G RMZM2G146599) derived from phytozome v7.0 (chr-ID 5; pos 1 8068555 to 18069531 reverse strand)
gacgagcgtgcgggcgtgctgtgagctctcccagggtaccctcttctgccgcacttgtcaggatcgctagcaagttagtgatcatgcatcatgataagtcgatttcatcatcttatgatactgtgtgtccgtgtgcacctatggttgctcattttgtccaagatttgtagtccttatatttgttcaattcgtgttatgcaatgattcgatgcacgtgccttgggaggattgctcctgtgtgatgggcagcagcctaataattttgcagagttgaaccaggaatggattgttgcttgaggtattaaatcatacttgctccattccagcaatggaggaaaaaccctaaccctaacaggggttgggtgttgtattaataggcttgagtaaactgggcctggcccattacaaaggagcgagagagtaattacacggggaaagccccaaaaccctaaacgggtattctaacaagttgaatggaagtgactttcagcatcatcacaaattgggtaaatgggaaatctttcagcaagaaatatatagggacttttcttttgctctcatccaaatacgaccatgtaaaaatcttctctttttaaattttctgaccaggcctttctcagaggacggtcaagcacacaatgtctctgttacagtgattagatagtgcttattggttctttacttattttaagtggaattttacccttctagagctgttgaccttttgatcaattttaatatgtaactagtcaaattggttgctcttgctcatgcccggtttcaactctagcgtgccccaactttcttgtgattaaaaggttgtattgctgttcattgtaatatcttgagctattttgacttccctacctgttgtttgttcattgattgtattgttcatagcagtttgttgtttgtctttcgttcctttgttctttgtaaagttgtttgacaactaaattgggatttgataggccaaa

SEQ ID NO: 6935 - DNA, 824 bp, Zea mays
  Intron number 4 from transcript GRMZM2G421779_T01 (locus G RMZM2G421779) derived from phytozome v7.0 (chr-ID 1; pos 5 2517453 to 52518276)
caatccgttccatcacaacacccattattttggacgtaagtatattctaaaaaattagttacatttaaatcgtggttgttctcattatatcatgaactacgtgtagatgtgattaattgtggcattcattgcagcaattcaaaaagctttgatggcgtggaacaaccgtcagtttgctgttacatttcttgaagaacaaaggcgtagatagattctacaatttcacaaagagcaataattgggactatgtttgggcgtagatagattctataatgatagaatacatgttgtactgttattgatcaaccaaaagcaacatgaggcaaacttgtatgtctatgaattttgtttgtaatacctatgacatgggtttaataagaggtagtttgtgaaatttttttgttcccatgattaataaatattttgtgcaaaaaattgaattcccataataatctgtatgggttacagatatttagataaggcaacagatgaacacgagaatgaaggtttgtcttcggcaattcaaggaaatcttgatcaggctctccgtcttcagagtgacggttttatgaaaacaacccattcttaggaggcaatggcctttccacagactgaattttccacatcattttcaccttcagaatctgaacacagtccctcagaatcatcaaactttatctcggagtgcaccttccgagcagcatgatagttccttttccatctcttcgtagagtccaaatctgcagggtatccgtctttatcatattctacatgcttcttcattagcaggtatactagctccagctgcatcctcttttctgata

SEQ ID NO: 6936 - DNA, 965 bp, Zea mays
  Intron number 1 from transcript GRMZM2G159364_T02 (locus G RMZM2G159364) derived from phytozome v7.0 (chr-ID 5; pos 4 7973555 to 47974519 reverse strand)
cttgtcaggtagaacctacttggagctgctgccctcgcatgacgagtcttgacaatcctgtggccctctacgcagcgtcgaaatgcgttttagtttataataatgctgtgttttagttatttctctcctaataattatactgagtggatctgtgccgagttcaactatccttgcactagtgctctctgatttgtgttgaggctgaagaactcggatagtttgtgttgtcatcagcttcggctctgtactgtgagttgggagttaaataacagcacgagattgttaacatctgtgagtttaaaccacatttttttttgccttttttatgcaacataattatttttaaggctttagaacaaggagttcaaccagtagttttgtctccctttgcatgtagctgatgctcacgccctgtgttgactattgtgcttataacaggactggcaattttgctttgagtctttatagtaatcactggaattatttcctaggttggcctgactactgttaccttttgtagaatttataaggtgcagttacacttgccacctcaattctcacacgttcactatttatttagtttaaattatattgtttatggttattataaacttgtgattactgaaggatacattaagtctgtattatttattggttaaaattgttggctaaattatttgtcaaaagtcaagactgttaaagtttgttgatctacatttgtgcgttgtaatctattctggattgggcaaaatccaaaatgcatgctatgtagcataataatgcatagaaaccccaagggtattaaataacttacatgtacaccccttaatttttttcttgtctaggattataagtacgttgtccagctgtggcaccaagtcgtagctcactgtcttgtcctggttctgctatattttctctttgttgcaggcggtatcataaactgattttttgtggttcagtta

SEQ ID NO: 6937 - DNA, 891 bp, Zea mays
  Intron number 1 from transcript GRMZM2G470666_T01 (locus G RMZM2G470666) derived from phytozome v7.0 (chr-ID 5; pos 1 16900915 to 116901805)
caggagcggcgtcaagttcaggaagaaaaggcgcggtacaccctacttgcatccgatctttcctcttgcatgccatggaaatcaatgcttgatctgtgtgatatgattcaaagcagtcgaaacagacaccaaggagttgtgggtaggagaatggatgcttgctctacacatggattacacctcatgataggcgtgctagtgtggtacctgttcagggaaataaaaatcatagggccttgactttgattctgttgtttatagccaagatttttttctacttcctatagtcatgcgccaattcttccttagtcgagagattttccatatcacaagtctttgtccccaacctgcagctgtttgttgtatccccattcggttgaatgccaaggttattaaaacggtaaaacgttggaatgcttatgggtgaaattttgacttttaaacatttaaacaaagtttaaacgtagttttaaacaacacaggaaaaataccaatacatcgtaatttcagacaataatatgaagttaaataccaaaatagagaggttagtggcttaccaaaacttcacccatgagctggattgaacctcaaaagtaactaatagactggacccaaaagtagctaatggtctaaaatgcataaaacactgcgttttacagtttagaacgccaaaacgctaaaacgtggtttcaacctctaattagagttttgacgtttaaaaacatcgtttaaacgtagttttaataacactgttgaatgctttactgttgggaagaccctttcaaatttctgcagagcaaaatgctgtgacgactgaagctagcattattcactgttcaatcatatttccttgcaggcgaaatttgcctgagagtatacttatcggttagg

SEQ ID NO: 6938 - DNA, 747 bp, Zea mays
  Intron number 1 from transcript GRMZM2G017419_T02 (locus G RMZM2G017419) derived from phytozome v7.0 (chr-ID 10; pos 89922565 to 89923311)
tacaccgagtgcgtacactacaatatatatatcttcttcttcttcttccattcggtctttaacgaattttagtttacttactactaatcaagacacacaaatagatatggtatgacacaaatctaaaatccaggtgttttttactctattattaggataaggatatggcttaattactctatctttacctatggcggtgagacgtttcgtggaacaggacaacaccaagaaaccaatcttattagacgacctgacggaactcacatcacaaaactttgatttgtttagatcaaatgtcgactcggtgatcgatagaggtgcttgaaatggtatggttcgattgaaaaaatagtcatttaaatttattttttattttaaaggacatgttattattgtagtgctaaatatgtatagtaataaaataccagtcagaaaatagatggaggcgtgaagggttcactgttattaattaaccttcaccatgcattgtcatgactaattaagattttctatgttgtgtggttgataaaatttatgtagatatgaaccatcggtttggtgaaccaagcacagacctattagttgtttgcttctcatgccttgatccaaaaaacaaaaacagaaatttatggtgatgatctctaatgacaatagatctcacctcactagctagatgattgtgtacgtagaatctgagacagcagtgtgttcattaacaatatttgcaggtgcgggccttgcaaagtg

SEQ ID NO: 6939 - DNA, 485 bp, Zea mays
  Intron number 2 from transcript GRMZM2G146111_T05 (locus G RMZM2G146111) derived from phytozome v7.0 (chr-ID 1; pos 2 19372487 to 219372971)
atcttcctctgctgcaattattacctatactccaggtgtggtttaggaatctgacttgggactctagtacctaatttggcttgcaaatatcacttgtatccaagttagtaaaagttttcagaactcaggtgtctggataacagtaacacttacaggtactatgtgtctcatctgatcttttgagctaaccaatttgataaccaactagacatctagcagcattttgttcctcctaccaactccatctggccgcaatatgcagatcacaaagtttgatctttttagtagtgtgtttttaaataaaacatgtcttttgaactattgttctttaatatgttcttatgtacattgatcttcaatatctcaatatacctgtataatttctattggtgtacagtgtactctaatacttctgtgaagaatgaaattgttttactattatttgattttacggatcggtggttttgtgttactcagataaatat

SEQ ID NO: 6940 - DNA, 481 bp, Zea mays
  Intron number 3 from transcript GRMZM2G146111_T05 (locus G RMZM2G146111) derived from phytozome v7.0 (chr-ID 1; pos 2 19373192 to 219373672)
gtgacgttaaggaggcatttgagctaattgatcaggtacgccttttgactttgctccttgatctggtcattcaccatcttttcatcttatgagcaatgacacaggtgcatttttcagtggtaatatgcatgcacttgtgcatttttcagtggtaacacaggtgccagtgctctacgaggggttgaatgcttttgttaagtttcttgcttgtgtactagacacgtgtgggctggtgtgggtgtggtgtttgagcgtttactgttttgtacttctcttacatacgcaaaaaaacaaattaaatttatgtcgtatgatatattttctagatgctattgttcagataacattttgattaacacagcatgaccatgtaccaacattttgttggctgcaagcctgcaagctcgcatctttaaaatgttattacttattttatttaccttgtgcatataatgtatacggtttttttcttctgtttagg

SEQ ID NO: 6941 - DNA, 768 bp, Zea mays
  Intron number 1 from transcript GRMZM2G065130_T02 (locus G RMZM2G065130) derived from phytozome v7.0 (chr-ID 1; pos 1 463623 to 1464390)
ctttggagagataccaacaggttgcccaaaaggtactgaaattttggttcgtgcttgtcaccaagatccttttgtgcttgttaaacataatataattggaattactaaattgaaatgaacatgcttttgcttttaaatccttacgcttcactgactactgctgtggaccatctttatatgttgtaaaggagcgaaagggcctctagcctagtggttaaaggctttcgagtagcacctccaagtcctgggttggattcccctcgggggtgattctttcggcttggttaaaaaaatctccttgctgtgcccacgatgtcctgtgcgccaccttccggttgggccgttgcagagtggacggttgatgccgacccgttagtgatgggggccagggttcggggattttcccagtcaggaccattgttttggtctcttcttaatataataccgggagggcggtctttccctctccgtccgagtttttttatatgttgtaaaggataacttagttttatgttggcatatttagtcggtaaatttgatataagccattaagccttctatatgatggttccgaagttaaagatcagatgttatcgtcttgtgaaatatgcctacaatcatttggtatcctattttatttctgagttggtccatccagtttttttgctttccctgtaatctaccctggatggttttgttttcttttgcaacctattggtagactaaagtattgtattatttccccacagctggaagccttgattgcta

SEQ ID NO: 6942 - DNA, 619 bp, Zea mays
  Intron number 4 from transcript GRMZM2G065130_T02 (locus G RMZM2G065130) derived from phytozome v7.0 (chr-ID 1; pos 1 464834 to 1465452)
tctgcaagcttgttgtcaaagagttaacaagttgggtatgtttcattgttatattcaaccttagtattccatgttatcttctttattgtggtatagttgttaacattaatttttctcacgttgagacaagctgagttacttaattatgttttgattttgtgtcgttccatttccattttatatttttatactgtgcacacattctatggctgatgttgaaatttgatagttcataggtttctttttattagagtgaagctttttttgggtcttcgacacttcaaattttgtttgagtattgcttctttatgtttgtatgtttaattgtgtgatcagcacatcaacaatataaaacactagcaccaaatattaacctttgagctatgatttggtgcgagtgcgaggtctaaatatggaactcatactctagtctgtacctttttgtttcaattatagactatagtaccgtttcattttcctttttgatgaagttgattagcttgatgttgccctaatttggtttgattcttttgtttcttagttcatcatgagggatttggaagcgaactaagttcctttatttgttaattgttatccttttttcaggtaatatattcag

SEQ ID NO: 6943 - DNA, 827 bp, Zea mays
  Intron number 2 from transcript GRMZM2G371008_T01 (locus G RMZM2G371008) derived from phytozome v7.0 (chr-ID 5; pos 1 324619 to 1325445)
gcctgctcacttggagatacataatgtaagtattatatgcttcctacggaaaacataatatacatgttgtattttccgatcttgttggttaagattacttgttattactgtgcgatgttctcctgaatttaaacactgtaaatgctacaggggagtaatgtcgttttcatttaattgtttgtgtatcccatttaattggatgtttaactcgtttaatggaccatatagcctgaataatggctaaatggtatgtgaatgactgtttaacgtttaggaaagcactgccactgtgtttctaattattcattgctcttaaagacttttaatgctgcattgacattgcactatcttaccctataactatgatcatgataatcaaaattcgttaccataataacacccagattttatatagttcaagtatgcattattttaaatggcagacctgttgcagtggtgagaactgcctcactaagtcaccaggtcacaggttcgaagcagcctttctgcatttgcggagggaaagcttgcctcggcttatcccttttccaaaccccacttatgtgggagcctccgacactgtctctgccccaagtatgcattattttacactttttagttgaaactatggatgttttcaaactgtatatgagccctggtgtgtataaagattcacttcttctgtatcttgtgatattctctttgatgaagtgatattatgcataacaactcactatagaatgtgtgacaaatgttattcttcctgaactttattctttatgcaagtggatttggtttgttcttgcaggaacaagtgtttactgaaa

SEQ ID NO: 6944 - DNA, 364 bp, Zea mays
  Intron number 2 from transcript GRMZM2G138425_T04 (locus G RMZM2G138425) derived from phytozome v7.0 (chr-ID 1; pos 1 95491172 to 195491535)
aaggcgaggtacacaaaatttaatcttggcactggcagcactaccttttcatttctttcttccatcatcagtcagaattcgggtcagtttacattagtttttttggacaaaatacacatgcttaatacgatattctgtttttttggacaaaaatgcacctgcttaatatgatattctgttatttactgttgtttacgctagaccatctttttgatcttccttatgatttcgaaataattatttaagcttgctctaatagcctatacgtgtctatcagactgttccttgactgtttcttgttctgttataaatccgtagaatttaatgtgataggtttcatctttgttgcagctgcgagtggagc

SEQ ID NO: 6945 - DNA, 879 bp, Zea mays
  Intron number 1 from transcript GRMZM2G034182_T01 (locus G RMZM2G034182) derived from phytozome v7.0 (chr-ID 5; pos 2 883585 to 2884463)
ctgcgcattcctggcggccgtgattggaggcggaggtgaggtgcgagaatggcaagaacacgatctcagtttgaatggcaaagaaactgcactgcagtccagaccatcattcaccattggccattggcaaagtgaagaacacaggaagcacaataattgaaccacaaaggccattggccagttcataaataaaaggctattcaatagcacatattacaaacaacaacagactaaactgaagaacacatgtcgcaaaggacagttcagtgttacactacaattcatacacttcccattaaagacactaaactctaaaacaacattagttgatacgacttgattcaaatggtgtgatccatttagtgggtgggtgtggttgattccaaaaggcctcctcatcacactgcaccttctgacatttaaatcaaactgcaatctgtgagagaaaaaaaatgtggtgtcttcaatcagcattgatttgaaaacagcaaaaaaaaatcacgaacataaatttcctgcttcgacagtttgatgcctactcaaactgtcctacaagtgacagaactgaggtcgttagtggttgatgcctactcaaaccaagaacaataccaaaactacaaaggataggttgttataataacaggaatccaattgccatcttcgggataccaagtttacgaagccgcgagatcgggatacctgagatccaaaaagctcctctgctacatatagcaattcttggctttccagatcatctggaaatgtctcggccgttcttgtcaaatacttgctcgaactatcatttgagcctttctgacctgtttatttatgccctgttctgcaggttggggtggcccaggaggctacgtttatcagaag

SEQ ID NO: 6946 - DNA, 778 bp, Zea mays
  Intron number 1 from transcript GRMZM2G076597_T05 (locus G RMZM2G076597) derived from phytozome v7.0 (chr-ID 1; pos 2 37741998 to 237742775)
tcaggtacgaattcgtgagctgtcttgcataatgctaatgtgacaggtcttgtgcatttcaattcaatggccttgttacgagccacgttggattgtcgattagtaaagggtctgatgtgattcatacaggctaagtttctccaaaccctttgcagggttagttacaaaaaccaacattttttcatcctgagcttgtaagcagctgtacaaacttttaagtcttgaagagagtagagctgttgtttggatttgcttgattgagtgagcatgattctctgttgccgtagaaattttgtagctgtgtgttgtaatgtgcaacttatgtagtagctttaggactttattttcgcacatacatgtcaaacatagtgagtttgcattagtaccaatcaccattgtctgtaggcctgctaacatatgactgtagtttcatgttatattatcatctaggattgataagtttgaatattgaatattaatatgggaactcgcagatatgatacgatagagccgtcttcagatggtatctgcaattgggcctgactcaagatatcaggtcaccattcttttttatcatctttgtggtgtagttgcaagttaacaacatggattgggctggcacagttggggtgcttggacacatttggttatctgtgcttaccagggataataaacgatgatataataatagtcacaagtctatttttactgcttcatgcattgcttatgctgcttcgctaaacatgttttcttttcttgttgtgaaggcgtaggaaag

SEQ ID NO: 6947 - DNA, 556 bp, Zea mays
  Intron number 3 from transcript GRMZM2G149969_T02 (locus G RMZM2G149969) derived from phytozome v7.0 (chr-ID 10; pos 66732852 to 66733407)
ccatatttattggtcgagacatacacagtgagaaggtaatgctattaaggatgaagccatgctgaacatttaaaacatgtgtatttataagatcataaatcagagatttgttttgatttactactatttcttatatgtctgacatttttttttctgctctacttttttgggaaaatgcattctagcttattagactttccagcgatacattatttttacttagcccttgttcttatctaggtatgcatattgaaacgcttaaaagtgctcgatgtgcggtgtataggaataaaggcacagattgcaccttcagaagatatgcacatttatgctgaaacattatggtgaccacggttccaaaattatataaaaaacaacttgatgcacatataacatgcatgcatatttgagctggaagtagaactgatctagaagtttggtttctaatattatttgtattcatacaacttcagataatttgatttgatagttttggttctgtctaagaagtattaggattctgatattggcaaatttctagcaggtagggtggggt

SEQ ID NO: 6948 - DNA, 808 bp, Zea mays
  Intron number 4 from transcript GRMZM2G142507_T02 (locus G RMZM2G142507) derived from phytozome v7.0 (chr-ID 1; pos 1 87381822 to 187382629)
ctcaatcaggtaattcttgtattcatcacactcgcaggtggagcaaaaacttgctcacgtgataatttgatttcacagaacatttttcatcttggttatttatactctaaaaccattcttcgagaatagttttatattgtggaacaaattgtatttactgttacatttttcctttttgaaacttaatcgaatataccatgattatcttgcaattccaacatagttccgtttcttataacatacctgtgtgtttccttaagtggaactttgtttgattacttatggactatctgaaaaccgaggaaataagactatcaagttttgatgcactgtctccatcaagattgccaattttatttacatggaaaattgcttgcctgcaagtgttaaacgatctgttaaaatactatagggagcggagctaaactaaataaacaatgattttatcatctctccatcattacccccccccccccctccggtttcaaaacttgtttgcttgaactttacacagatgattgttgtactgaaggtgtttattctagataatgggtactgatagatacgaccctttgtgttctatagaaacttctgccacaaagttatagatcaggttgaaggactcattatctagggtgattcttggtatatatgcttatttcaaaagatctactgatttcatgatttgcacatagaactattctttgtatcacgattgtttgtgcggctaatttccaaagatatattcagcttccttgatctgttttatctagtgatatgcttattctagtgaaaattatagggtcta

SEQ ID NO: 6949 - DNA, 380 bp, Zea mays
  Intron number 2 from transcript GRMZM2G442195_T02 (locus G RMZM2G442195) derived from phytozome v7.0 (chr-ID 10; pos 66319656 to 66320035 reverse strand)
caccacagccacaaccactctatcctggaggttagggtacatccattgcctttttaattaatgttagcacatgttctgaattctgttgcatgaagcacaagacaaatatatatccatagcttctaaacaatcatgtttctgttgtttctggctgaatttgtcttttgactggttgtacaattgataataaattttcagtaatctgctttgttcacctctatttgaattaattgtggaagtgtcaatcttgtcctaatgagggcactgaagtgtattattcaattccagacttaggctctgtatcaaggcagcaactttcacttttcatggagtgctattttaaatttaatgtcctttttcttccccttactgtaggctac

SEQ ID NO: 6950 - DNA, 523 bp, Zea mays
  Intron number 2 from transcript GRMZM2G033198_T01 (locus G RMZM2G033198) derived from phytozome v7.0 (chr-ID 5; pos 5 901797 to 5902319)
aagaggtcagcatttttgtccttgatgtgcattatgtgcctggtgaaaatgctagagttcatatactcgaaccaatactacgctttgtgtttatttagttaattggttggtttccaaaaacaaaagtgattggctggtatttacaaacggtggtgttactgtatcattctttgcaattgttgttcatgatatgcagaatagtaactgactggaaaagtggaaagtaataatttcagtagacaaagcaatgtatttttcttctttttctctgccctgttactgaatccatgcatcttcggttacttcaagtcgtattggtattctttgtttgatacgtgattcatctagttcctgccatatgttactagcattttcttattaatctattccattttgttgactgtcaaatttattttgaccaaaaaccctgctaagctggaatcacattattctgtagatgtttttcttcaccatgaatgtatatgaaacttaacctgataaatccatccgcaggctctttcaa

SEQ ID NO: 6951 - DNA, 919 bp, Zea mays
  Intron number 1 from transcript GRMZM2G102560_T02 (locus G RMZM2G102560) derived from phytozome v7.0 (chr-ID 5; pos 1 59961159 to 159962077 reverse strand)
atcttctgggaggtaaaaggaaaattaaaaggagaaaataaagaaccatattttccctgctttcttgtctgcgcttttcctcagacatctagtgttgtgagattcttgatgtatttttttcccactgttcttgatcagatctaagcaactttattcttattctggattagtttacctgacatatgctgtgttccagatttttattccacggagaagctcaggtttagatttgacttttctgtacaagctaatttgatcttgatgctagcctcaggaagttgtttgtttttattcttgcggccacagcttatgcgtgttgttatgagttacgcaacatgagcacacagcatcaaactattcaagaattgaactttgactcaaatcctatatatatttcgcactggttgctgtgggatgttgctggtggagaattcctagttggtagtcttattcaagcgcaataattgatggagttggaatacttcatggcggttggaagggctccacacgattctcctccttatccaatactagttttttttttccttctccatgtccttgctggatgatcttatctgcttcaagccccatcctgcccttttctaatgcttcacttgattaccaatttggctgcatgcccattgagtgacacatgtacggatactatcttattttttcggactcatatttgccttccttaagttatgataactttcatgatttgactgctatagtagtaatttctaaaaaactgcacacgggtctcagtgaaaacataagcataactcacaataagaaaccatgtacctgtccagttttactgggcacgtgtaaaatttgctactcctgttatttctgtgcagcgtatgtttgattttgacaactatttttactggtggacagaacttctgttcaagag

SEQ ID NO: 6952 - DNA, 912 bp, Zea mays
  Intron number 1 from transcript GRMZM2G093913_T01 (locus G RMZM2G093913) derived from phytozome v7.0 (chr-ID 5; pos 9 4575806 to 94576717)
aatagtttgaactagagtttgtcgtcattcctcgtcctcgccatggacgagtctacatctccgcatgttgatgtgcctagaccgtcaatcttgtccttgccgttgaaagcgtcgtcggcgcccgcagataggtgagcaggtgagtgtttgaaatatatgttgtgaccgatgtcgttttagtattcatgtggtgatttacgtctttcctgtgttcatgtgttattcgtgataattagaacattgaataaattaatgggttagtgcgataatccttttcttagtatatgtgtgcttaataattatggctagatccgttgtcaggtcggggtgcggttgtgctgttgtgtggtgaaataaggtatacctgctagaccgaacaattaaatatcgtatttaactcgtatgctatacaagttaatccgatgaaatggcttaaaaagctagttatagagtttctattcatattcggatgtttagatgtccaaggttaatgagttaagttttaataaccaagtaatgctttgttagtggacgttttaattagttggcgggttatgcaaagtcgtccggtcgggtggtttagaaagttgatgtgcttctatccttattcccaaaattaggtgtcttagactaatgatactaagtttgttagccttctagtattgaacgttagctaaggaaggtagagtgtgggtatagcttatcgttttccatgatattgttagttaaatctggtaaaactagaagatcgtgattgttgtgtttagtgagttataggtgtctagtgtttgcgtaagattgtgtcaatgtcttgccgctaagtatttgattctcttttctgtatcatctggtttactttatgctcatacatatgcattgcacatctcattaggtacgctagttaatcacgtg

SEQ ID NO: 6953 - DNA, 957 bp, Zea mays
  Intron number 1 from transcript GRMZM2G164489_T02 (locus G RMZM2G164489) derived from phytozome v7.0 (chr-ID 5; pos 2 16383043 to 216383999 reverse strand)
caacagctggcttcgcttggtgagcttctggggtcttgtaattttcacttatacatatcctatgcgttacaactttagatatataccattaaaagattacaactttagatatataccattggcttcacatgtcattgactcatgtgaaccccacatgtaagtgagatagcaatgatgcatatctaaagttataattttttaatggtacagatccaaatttccctttaatggaataattgattcatatggcttacgtatactttgtttgcactactgaatgaaatgtgctaggcaattatggtaggtttaaatttcgaatgatgaatctagacacataatgtattgttatattaagatgaatgaatactggactttagtgtatatattctgttgagcaactggatcaactctgaacaatgcattctatcgtacctgtgcttttggtttatttcttatgctacatccactacctgtcctccccatgattgctagaccgttattcacctattggcctgtggaatatatataactgccattgtggttgtgggctgtggcatatacaatcacctcgcattatgtcctgttgacagttctgttgcatgaccttttcaggattttactctgaatttgagtaggccctgacatgccttttaagcatctttttttgtcgtttttttctaaattgcgatcatgaattcaaagttcttgaattaacaacatatttatattgtcttctggctctgttatgttaagcaagcagttgacctcttttactacattgtttcttcccaaaagaaaaagggagaagtgaacccttttcctaaataccttttttgttattttgtgttcccttttgtttatatgcatgaactggtgatttgtgcatctccgttgtctgatgaaattttattgtcttgtttaggaaagtggtttcttggctctgttggaacaggtttt

SEQ ID NO: 6954 - DNA, 441 bp, Zea mays
  Intron number 5 from transcript GRMZM2G081642_T04 (locus G RMZM2G081642) derived from phytozome v7.0 (chr-ID 5; pos 1 19721379 to 119721819 reverse strand)
ggtgccgttacgtaattggtagttttggataaagtttgtgctcttcttatttggtgcaagatttctctgtttcatttcatgcgattcattatcttaaggagcagtttgcaagttcttccatagaacttttcagttgataatgatatgcttaagattgtttttgatcttttaagtttatgtcaagctcactgtttttaaggcgtcgcctaggcgacgcctaggcgtccgggcggtggtctgacgcctaggcgccttgcccgcctacctcgcctaggcgtcgcctaggcgccgcctaggcgtctaggcggtggtccaacgccttggagcgccttaccgctttaaaaaccatggtcaagcttgaaatatctcatcaccacttgatggctgtcccctttaattctttacaatattttgtatacaaatgtaaatacagcctactct

SEQ ID NO: 6955 - DNA, 938 bp, Zea mays
  Intron number 3 from transcript GRMZM2G371933_T01 (locus G RMZM2G371933) derived from phytozome v7.0 (chr-ID 10; pos 139389768 to 139390705)
gctcacattcttctagtcattgtcaattctcccaggtacatttctcccatgttggacctatacattttgcagcaagtaatttgctttctttgtgggtatattattgggagacatgtttttagttgctagaggttgataatttctcggattcgcctcttagttttgcaacttattctgtgagggaaactacagtttaagagctccaggcaggaatccttattctgtgagggaaactaggtgtccatgtttgaggtatctataaaattatattaattagagcatcaacattctgagggtccaactaaatagtatgatactcatgtgttgtctgcatgttggaaatctttaggtccaactaaatagtatgatactcagcttattctgagggtccaacattctgggctagacgacctaaagtttatgttggaaatgtatttatcatatatgcaaaatttgtacccagtgaaagaaataatgctgacctctaaaactcgctgaaagaactttgtcctgcaactcaaatgaactttggcacagatgaactttgacacctggtaatgcagtttctgttttactgatagcaactcctattagtataccaatcagtgaccaaaacatgtgatttgatcaactcatgtgttgtctgcatgtttccctaactgaggctttgctaattctttgatttccccatgttaatttgatttgcacatcactaaatagtatgatacctattgttttttatatgtacatggaaagagtatactaccttactgtggtattaaactaggaagaatattatgtaatctggaattttatgtgagggcctgtggtgaagtctcctatgtacctaaatattttttcttctctatttcagttctagaagttgaactttgctaattgaagctgcaaaggtaacttcgacagcaacaaggtgagtg

SEQ ID NO: 6956 - DNA, 660 bp, Zea mays
  Intron number 2 from transcript GRMZM2G115257_T01 (locus G RMZM2G115257) derived from phytozome v7.0 (chr-ID 5; pos 1 59542227 to 159542886 reverse strand)
ttccagcacagacaaaactgctgcaagcaaacctggttggtgctcttttagcccttccatcttgaaaagaacttgtggatatattaagtagtgttctttctttattctccatgggaattgcatttctggttcatttatatccctgcaaagtttaaattggctacacctatttggtggtcaaagatgagtctacaaggacaattaaattgatgagaaaatagtaccgaccagatttttgtcattgcatgatgattatatactctaatgtcttggtaatatgcagcaatttgccaaggttattgagcccttcttgtctttgtcctgttttttattcgaaacagaaagttctactcagtaatttaggggcccagtgctaaaagcaaatttgaccctgcatttgaggaacgcattgctggcaccattttttttggtgctagcactattgggaaacctgtttttacctaaagttttgaattagattattgtagcaacggagagacaattaatatatttttggtagaagaacctcattttttacttttgacagcacgtattatgtgtcattgtttatgaccacatgctactgtagctgttccaaatcttcattttttatcaaaaacattgatttaattggaaatttcattttctttccagataaaa

SEQ ID NO: 6957 - DNA, 1039 bp, Zea mays
  Intron number 1 from transcript GRMZM2G082683_T02 (locus G RMZM2G082683) derived from phytozome v7.0 (chr-ID 5; pos 8 6143659 to 86144697)
gtccaccctggaagacctcgccgccgagcacagaggtcgctcctttctgtttcacatatctctgcctatctctgccgcatactgtcgaacagttctcgcgccccagcttcatcccatgttgttgcttagagctagcgccgatttgtctccttcacctcattgtgtggtgcgcggcgcgagcggagttaaatcccgccaagaagatggcttggtgtgcctaccaacgcaactggcaacggccatgttgcttcctgtttactgaaatgcaaggggagagtgcattgctttcagtttttacgcagcagcgaaattaagtgctaggtttatgcgggcgaggcgtctgattgtagcttactagcttcagcttatagagcatctgccaataaaaggttcgctcctgtaagaactgagaactgcctttgctaagattgcttctcttatggggtgttggtttgaggaaccactccatccaaaatgaaatggtgcatcatgggtccatttctcaaatttggtgggatgacttcattccacatattagtactaattaactaactatgaggaataaggtggtgatgtatcaactcatttcattccacaaaccaaacaaaaaagttaggagtgagaagatgatggactagctcattactcaaaccaaacaccccactaatcaccagggaccgggatttcttccaatccatcatatccttttccccggatatttattcaaaactctagtgctcctgggtggcatatatatttcgtgtcactttgttatttgatgcaacattaagaaacaatggtaccagcagcataaaagttattaataaatttctaaatcattttacaaaggtcagcctcctccatcggctggctagagctcatctcattcagaaattggcgcactgtaataccaaacatctttttgattggttaatagctatctgacttagtgacttcacttcaattgaagtaaagactagctttaaacatgcttccttgtttaggtttggcaaaggtcattttaaagaaggggaagacc

SEQ ID NO: 6958 - DNA, 689 bp, Zea mays
  Intron number 1 from transcript GRMZM2G148098_T01 (locus G RMZM2G148098) derived from phytozome v7.0 (chr-ID 5; pos 1 3661855 to 13662543)
gctcacttcagtcatcagccaagtgattgaaaaaggtattgatatcgtacaagcatgtcttgttcaaaaaacgtttgctcctcgaaatcaaattttgtcagctatcttccaattcgcctgtctattgtagaattaaatttctggttggccgccttgaatggctgcatcattttggtgatcagaaggaattctcaaccacattctcatcctcttggtaaggaagagcaaaaagccaacaacttagctaatgtcatagatgaaggaccacttgtaccacctataactgtaggtcccaaaccatcatcttacctccttgtcagctatattttcctatattgatgaacattgggttgtccagaaatgttagagagaagaacaggaactgataattactgtgaaaactgagggtttgtccctgggtctcactcgtgactggcctttgtgtgcagtcttatgattttatctctgtaaaagtggcagaaccagtttatggtttagctctttcaccctaccttttcttggaggtgtttccctattattttacagcgaatggaagttctgtttcgtcatcttctatgttgctgtatatttacagaatagttttataataatttagtgaatttcgttctaactgttttctttcccgaagtgcaggcaagtcgtctgaattattggttccaagggctctg

SEQ ID NO: 6959 - DNA, 852 bp, Zea mays
  Intron number 2 from transcript GRMZM2G148098_T01 (locus G RMZM2G148098) derived from phytozome v7.0 (chr-ID 5; pos 1 3663456 to 13664307)
aggtgtgtgtgtctattgcacttgtaccttaccattaaataccaaacttagagtattataatgtttgcttttgctagatttgttgctgttgagtgtagactatagaggtaatctgtgtgaagatccataaacttgttcacaaatattagtttcacctataattcttttgatattccaatatgaattttattgaactaatactttatctagggatggctgcatattactttttctcatactggtatatcagaagtcaacaattttctgccttctgttcctagagaaatactcgaggaatcccaaccccatcagttcagtttgagttgtgacctaaataatgagtccaatagttggttcctgatgcaaaggtcatttatattggttcagctccatgagtttcacaagttgatttcttgaaaattcttggaggactcgtcaaacattgttcgtttaggtgggtctagccttcttaataatgcctaggtgcccacaatcattgtcatttaacaaggcttaaatctgtagattgcatgtttttagctaaaggtcctccaaacaagcaatgagcatatttggaataggaacagatgtatccacaaaactgttattcaggacaagatcaccatcaaatgcagaaggttacattaccccattaaaatgtaagatgggtccataaatacattttttttctcagcaagacaaaattgtttctaactgggacagatcagatgaatgagctaggcgtgttttgatagtttcactaatgcagtatctggtatgtctgaatttttaagatcaactcgaaatttgctttcaggtggatcggaagtacaaacactattatcatcggat

SEQ ID NO: 6960 - DNA, 1070 bp, Zea mays
  Intron number 1 from transcript GRMZM2G158277_T01 (locus G RMZM2G158277) derived from phytozome v7.0 (chr-ID 5; pos 2 9322632 to 29323701)
ttgatatacatccggctgtcaatcgccgactcaaggtgatctgaaagcacttgttgtctctcatttttttcgtcattgtttgactaattctgttgttgcttcctctgagtggcagaacgttatgtactttaagcggatgagctacaacatcttgttgtttatctttcataaaactggcaatcaatgcaattagactagttgaaaatgataatgtgttgctagccacgatcagctaacttcgtaaactgattatatagataaattacctgataatataatatgaaaaatgtttttttatttgcatagcaagtaaactgagattggctgtcaaatcttttaaaaagagatacaatcctacatcttgtataactatgtatctagaattgtaaagctgatcaaagattgggaatgcaagaaacacatccaaaataagcaaattctagtaagttcacattttcgattgggattatagatgaccttgttctgtacttctgttattggtttgtctgaaataatacaatcaatttatagaatatatatcaagatttttcagaaataataccctcttagacttttagccatgcagtcaatttgttcacttaacaatgatcaaataggtgattttcccctttaatcactggaaccaaataataagcctattatttgtggaacttctgttgaacttgtttggcatgacattattgatacaaattgatccagaagaattctcattttgatgaaaagcagaaaagaattatgacttttcagccttctgcatttgtgaacaaaggctacatcatgtacttaatgagttaatagttaatcaatgtgccaatattgtgtggtaatgatcaacaagaaagttgatattgcttcttttgtaaatttgtagtttgtgttgtaaatttcccgcatagtatcatactggtttttacagaagagcactgtcatgtccatctctcctatctgtcaatattttcttgtgcattatctctggtatttgcatgaacttcaatggtgttccttttgttctaggaaggtgaaaccattaggataactgtaaaaaacaa

SEQ ID NO: 6961 - DNA, 783 bp, Zea mays
  Intron number 2 from transcript GRMZM2G130432_T01 (locus G RMZM2G130432) derived from phytozome v7.0 (chr-ID 5; pos 1 91483855 to 191484637 reverse strand)
tggtaaactgctctcagacaaagttatagttcattgtaagctctctcattgtgttctccaatttttattgacagtatctcatgagctgtgaattttatatctaccagcgtccattgtattgtactttttcaaatgccaattggacaacttagcatatcacaattaccaatccgtttactcatgcatttgatttcaagtggcgtctggcctttacacctgaggtgcttggttgatggcttgatgcattgattttttttctcaaacatgcaggagagttgtgtctcattacattaagagagagagagagggagggagggaggctaaaaccttgtggtgtcctgtggtggatggggtatgcctcaatgcctaggcgatgcccccaaaaccatattggctaggtgcaattcatacaaacaccaacacttttagatgaaagttacgatcacaccagggatcaaaataagggagcaaccagaaaagaaaagaaagtttctttcaagctgttcctgttggcagattatgtgtgcttgatacaaatgattggtttgttgttacatggcactcaacttacaaagaaataagataggagcattatcttatattctatggtttgtttggctcttggaatcttgtttccttgaagaatatatacttagccatgtgcaactgatgatgcagaaagttgcaccattaaagatgattgtggcgatgtttctgtgttattgtaatcttttcttatgcttacttcaatgattttttaaatgtgtaggtagcaaccgcaac

SEQ ID NO: 6962 - DNA, 926 bp, Zea mays
  Intron number 2 from transcript GRMZM2G332294_T01 (locus G RMZM2G332294) derived from phytozome v7.0 (chr-ID 1; pos 1 96372318 to 196373243 reverse strand)
gagctagcgctcatcgatccaaagaaggcaaaaaggtatgtttttttttgtggatctcttttgtttgttccttatgaagttcatctgaatgtgttcttcgtcaaagtaaaatggatttttgaattcggtgctttcctggcagagatagttaaacattctggttcgagttgttacatgatgattttgtaaatagatgacatgcactgttctgatggatgactctgttgtggtgattctgtattttggtattaccaactttttgtaacgagacaaacctaattgcgatgacttatcagattttttttttggttcagaactggttatagtccaaaggaaattgtatattgcattcctgcacttcctaaatatatgcagacttgccagttgccagaacgtaacagtatttgcattcgtccttttttttcttcttctgaagtatcacttttcttactccatttaaaataaattaaagtttgtaccacctaatttttgctctcttgattgtgatgtgtcgatgtgatttaacttttaaaatagaattgttgaaaggatggaatataattggaaaatggtcgttggattggaacgcattaaaaacagctattgatgtgtatacatacattttcatgccactaataataccaccattaaggtttttttcctttattgttgttgtaaactggagtataatccttgcatgtcggtttttttcttgatgagaaaaatcctgcagtcagaattaaagttgcaaggataatgagatcagaagaactcggcattggtagaaaccaaaccttttcttaataaaaaaaaaactagtttactccttttgttcgagaaacgcttaattgtctgtctgttctgattactgcttggtgaatcatgcgataggattataaacaatagacagtcagcagcaagatcaa

SEQ ID NO: 6963 - DNA, 748 bp, Zea mays
  Intron number 2 from transcript AC194069.3_FGT003 (locus A C194069.3_FG003) derived from phytozome v7.0 (chr-ID 5; po s 153994015 to 153994762)
tcaaccactggctccagaccaagttctcccaggtgcctgatcttgtttttcttctccccttggactgatctaacatatggtttccaaatctgtcggcactcttcctgcgatggacccttcctctcttgatagatcgatctgtttgagtagtctatgtacaaatggcatcatgcgaggtactcgagggaacaactttgttcgtttttatgctcgtgcgttttatatatgattacatttttcttgagcgcgagtggtctcatattgatgaaacgtttctgtctgttagatgtcatagttaaggctgtggactgctcgaaccaatcagaggtgataaatcagtgctagttattgctttatatttctgaacaagacatttctgtctgttagaaattgttgcgacatttgcttagggattcccatgtgccatgttactagttacactgctattgctggtctcatttagtttaacataccactgttagatcttagaggtatatattgctaaaaagaatgcatgatcattgattcattgtgataccacctgtgctaacttattttgagtttttggccatccagtacttgtactacaagtggaattttggagaagtgaataatttgtggaagtaaagaattacaagcttctgtatgtggaaaatgtttgttgtacctcttatcttcaaaattatatatcctatcttgttttatatgctcaggtagatatcgagctcaaacagtttatcaaaggcta

SEQ ID NO: 6964 - DNA, 629 bp, Zea mays
  Intron number 3 from transcript AC185281.5_FGT006 (locus A C185281.5_FG006) derived from phytozome v7.0 (chr-ID 5; po s 90818318 to 90818946)
tgaaggtttcagaacgcctagagaagctattgaaggtcattatttcttttcttgtccaaccaattagtagtagtttctgttagcttatctctactactccttaagaccctaccttaggcatccatagtcattttggtgcacggttctgtcaagtatgattgtcgcgcatcggatccccccaccctcctcccctctgctccccgccatcaataccgatccaccatcaacgcccgcgctgccacctaggaccccgcccccgtccatgcccccaaccgcaacccccaccctcggtgacactagccccgccagccccacatcctagaatagttccagcagccgaaggaaattagttgattttcttttttcatgccttactttgtggtttgctatttcctgaattggtctaggtactggatccttttggttttctattttttattaaaaaagtttactgcaactttgctaagaagaatttgactgtatggatgaagaatggccaccaccagctcagtcctattgttatctattttggctatcctctgggtttttgttggtataaaattggtctgctcaaccacgtatatggttcagttttgcagtaatatcatgattcattgtcaagatttatc

SEQ ID NO: 6965 - DNA, 605 bp, Zea mays
  Intron number 1 from transcript GRMZM2G472449_T01 (locus G RMZM2G472449) derived from phytozome v7.0 (chr-ID 10; pos 8930247 to 8930851)
ccgacctcgccgccgtgctcgcaggcgcgctctcggtacggctctccaaacctcgcttttcttgcactcttgcccatcgcagaaaactgtgtttgatgtttggtttgggctaatttctagtctctctattttatttcatttagttttagtttccatatttatcaatttaggaaataaaatggtataaaatggaggaactaaaaattaggctttagaaaccatacaccccctatgtattatgtcatacgatgaaactaaaaatattttgtcaaaaaactaacagcaaaacctgagccattttcatttttttctcgtgcatgaagtcacgtgagtaactgtgtggattgtagtctctgtctgcaacacacagtccatcattgcctaccagaaaacaactagtgttttgtgtttagtttagggtttaggggggccgtacccagagcgcggcggcaaggacaaaccaaaactctgctatatacagggaacaatcacagcaatgagggaaataaccgaagtgctttctgttcttatctttctgttgatttttggtttggttgcttgtttttttagttgcaggggcctcctgttgctgttgctgctgcagc

SEQ ID NO: 6966 - DNA, 872 bp, Zea mays
  Intron number 1 from transcript GRMZM2G001500_T01 (locus G RMZM2G001500) derived from phytozome v7.0 (chr-ID 10; pos 21723299 to 21724170)
gcaaacagttcgctgccgaggagatctccgcgcaggtaacttgttatgttagaatggcagaccaaatgccctcagctggctccagtggtcggtgactggtggtgccatccgtaaggatggcaaaaataaacaaatatccggtggatatgcattttactctacgttttttcatgggacaacctgtatagaaatccgagttttgaggatatgggtaaatgccactcttgttgccattctattgtctatattgaaaacctatgagttctactagagaatagctcctggtcctggcaaatcacttgttaaggtatactggattgaatgttgtttgtaatgcaactggtacattgcgtttgaggtaaaaaggtatattttgccacataaagatgaacggatgtaaaggaagctgcttttatgttactaggcaaccagcctgtgttagaatctttggtaatgctacggggttctgattctttggagagtcagtgccagtttcgaatgctgggtttttttccagaatgctgcacatgtaaaattctgggcggaccaagctgggtttatgcattttgatttcagcctgaaaacaagtagcattctgatatgatttctatcaacattggggtttgcttgaatttctttttcttcagttaagcagttggtcatttgtgttctgcatgcacttatgtcctcggggactgagtttttgagtatatataaaatatgtatgttatcatctgtataaaactacttttgagttgctactagctaccagaccaatagatgtgatatacttaccattttacttccatagtaagttgtacatttaacttatcctgttttattatccgaacaggttttgaggaagttggtgg

SEQ ID NO: 6967 - DNA, 590 bp, Zea mays
  Intron number 1 from transcript AC212331.4_FGT001 (locus A C212331.4_FG001) derived from phytozome v7.0 (chr-ID nd; pos 5220239 to 5220828 reverse strand)
acaggtgggcccaggttcaagtgcatttgtgttacaaagttgcagatttatgtgttgtgttaaaaaattcacatctcgagttttagagcttctaaaatcatgaaatttgttttgttggcttccttatgaaatgctctaactattggatctataggttggcatgttttagtggaaaggtttttctgtataaattcgtctttaaaaactggtttacaaaaacaaatgaacttgcttctctccgtagttttaattataaaaatacaaaaacgatgaaatctgtttttgttagttagatgttgccatactctagctaagaaaaaatataaaacatatatgttgttcaatgtttttcttgggtgtattaatttaaaacatgttaaataggaaaaagatgattgtttttgcttgttagttttggatctatagctcttgtgctccaaatggattcaaatttttacagtagactcttggtgtgatgcttggtgactggtaacaatttcatgaattgtggtgcatgtatgattaagttagtgatttaacttgttcaatgcacattaagtagttttaaatgatttaaaattaatgtatag

SEQ ID NO: 6968 - DNA, 986 bp, Zea mays
  Intron number 2 from transcript GRMZM2G148281_T02 (locus G RMZM2G148281) derived from phytozome v7.0 (chr-ID 1; pos 2 07904399 to 207905384 reverse strand)
tccgagggcaccatcatctcgccgtccggccctgggtaatcatctccgctccgttttgctaccgcttccggccatcgatccacgtttctggtgtctccccttttgatctctctttcgtcatgtgaggcatgagcgcagccttgggcggagagattcgcgctagatctgatggtctggtggagacatggtcctcttgactgcgactggtgggcgtgggttggtgtcaattatcaatgacatgcgacgacaaaaacgggacggatattaaaatgtggaatagaatatgatatatgggaaccgcaatattatagtagtactggtactgtatgactatttatcgtgtgggtttggtaatggtatacttcgattagtatgctagagtcagtgctgattcagtggcctgaacagaatggatctgtcgacatgctgttcaaatgctgcagtagaagtagaaaaaatagagaaactgtggacgccttctcctcacccgggccatttgaagagggaatgctgggtgtgtaaatacatgagttctcatggatcatacctactgcacatggagatctggagcgatcatacttatctgcttcaaataaagttgtttaatctaccttaggtgcttagttactgaatgatggtctggtttcgcaaattactttctctctgaatcaagcaagagctgacaaaagttctacacaaaatagtgagatgaatcgaggtatccctcggctactgaatctaataggaacgcatcgcaacagaagagtcagaaggggatcagtatgatcctttcccctacacattctgttctgtaacacaaaagtgtgatcgtgttatggagcttaaagcattctatttcatgctcattttggatggacttttagcatgtgcttttacagctgcacataccttcactgtggaagatgaagtagcaacaaattgttctttcaggttccctcgtgtccctgggatatacaatcaagaac

SEQ ID NO: 6969 - DNA, 782 bp, Zea mays
  Intron number 1 from transcript GRMZM5G840002_T01 (locus G RMZM5G840002) derived from phytozome v7.0 (chr-ID 5; pos 1 91367231 to 191368012)
attgcgtcgaaagctgctgcatgagggaaaggtgagataattgtatttcatgttctattcctctgcatatcaagctatacaattgaaccttgccgatacatgttgctgtctgcttaggttagtcctcatgtaattgttgttcagagataaaatggattcatattagtcaccgttgtttgatagtttaatgtatatgactctactatgtggcagtcatatactagggaccacgttggaatcctactgatacttgctcatatggaacctatttttggtacagtcagggtttgtttagaaactttggattattcgatgcctgtaaattccttaactacacctgaaactttctgtgcacaagaaaacagaagtggggagtgtacaaattaacctatgggcagaaaattccttaactaccacatcacatcgagcatcaaactattgacaaaaactaatcagatttcataccacatctgaaatcagaacatgagatgtatattagaatttttgtttagaaacttattgttctgctaaccacatggttgtctgatgagtcaacccagtaacttaaagttctattagaattacaatattttttggaatttgaagatgaggttcagtatttggggatttaaagatgacgtgtttcacattgctataattatagtatgttctttatcaaaacagtcatcaatcagttattggatgcatttttttatccttagggtaatccaatgatcaaaattccaggtatttctttggatttgtcgtcgctttctacatac

SEQ ID NO: 6970 - DNA, 552 bp, Zea mays
  Intron number 3 from transcript AC199908.4_FGT002 (locus A C199908.4_FG002) derived from phytozome v7.0 (chr-ID 1; po s 177148704 to 177149255)
ggccccctgctacactttgtgcctcttaaccttgggtgagcaggcagaatgtcttgctgttgtctttttccctcaatatcaatgcatggaaaagcacattcttgaaagaagatagaatttctattatataaccaacatagttcagctaagcactctggttcgaatatttatgggatacaaactaaatggtactgaaaattaagagcaaaaatcacactaaggcaacctcatggtggttatttgatcacttgtacctgtttttgaatggaaatatattccttctttcagataaagcaaacatgtttctaccattctgtgttatcattaaagggccaatatttttcctcaaacaaaaagaataaaggaaatgttgtataacatgatgaaactgactggtttgttccaacaaacatgagaacacatttttcaaagaaattaccatgacaataggtgaggttcaatttagataattcttgaagcatagactagcgatctagcaagtttgttattgtaccaggtggatcaagaagttagatcaagtttgttattgta

SEQ ID NO: 6971 - DNA, 1022 bp, Zea mays
  Intron number 2 from transcript GRMZM2G128131_T02 (locus G RMZM2G128131) derived from phytozome v7.0 (chr-ID 5; pos 2 12745372 to 212746393)
ccgcgaggaaggtttggatgttgctcgattacagcaccattgaaatgggaaattgggcaatgtttctttgaggatgttgggaaggggagaaccttacccaattttaaattaaaattaaatgcaaggtgtacatatgcaaagccaagcggcaaagaatggaaaacacaaggaccacaagagaaagacaaaagaaaaacaagaagaaggaaaaggaattagaaattaaaggaaaagaaaataaaaaatacttgttttctcaatctgttgatagctttcgccttgttttttttttgttgttctgcattcccttaccaatcacaaaagaaacacacattttggtcgacaatgaaatactctcagaaattcccatttagttcttttgtgcgtatatggtattgggatttccatgcgaaagaagacagagcacaaaagaaagggggcgagtagacacttctcctagtaatctactaatctgtgttttttaagcatcatgtatccaattcctaagtactagttgcatgccatacaatgatacaattgcccaaatgctgcaggcaatgaattttttaggcagaagaaatacaatgaagcagcaatacaatacacacgagctataaaaatgaacccaaaggatccaagagtaagcatattggttgttaccctgattttccttctcaagtaaaggtaattccagaacactagtaaagtagtactatcttcagtcaaatatagatgattttcaggcaagaaaacaagaagattataagccaactgtcccatgtctaaacatcaagtaaatatgactggaggtggtacccttttttttttttgaaatttctaagatttctgataaattgaattttttcattggtaaaacatcattaatgataactcttattttccatgcaccttggctgtaaaaacattctctggagttgactttttttttcctttggcactccttgttgtagtaatttgtttagtttatgactgatcttacaggcatttagcaacagagctca

SEQ ID NO: 6972 - DNA, 1030 bp, Zea mays
  Intron number 1 from transcript GRMZM2G010871_T05 (locus G RMZM2G010871) derived from phytozome v7.0 (chr-ID 1; pos 2 39617441 to 239618470 reverse strand)
acttctccagcttcgtgcgccagctcaacacctatgtgagtcggcaaaacccaaaccccccttcttcctttcctttgaaataatccttctcttggtcagggcttgctaatggtaatttgcgtttggttgcaattgcaagctgctttattcggcggagagcatccgaatcctctgcaatattacttgtatattaaactagtttgcaatgttaggacaggaaaatctgttgtgcacttgttcttcactaaagttttaggtgatgtaacactgttgtgaggcattgttgtgatttggtgcattttttattgttgattttaggcagctggttccccaatgagatcgaggatgcctggctaagatatgaagagacatagggctggtttggtgacaaaggaattgaaggggatctataggaagaaaatcccttgctttactttgtcaccaaatcagccctttgccttgtttggatactctagtattccccctaattcacatgtgttgagatatattggggtgtaaattagtttaatttatactctaataaacctcaacacacgtggattgcggtgaatactagagtatccaaataaggcctaaggggtattaaccccctcccccccaaaaaaaagtcctgggaatctatttactgatttcacttatataggtgtagtgttaggaaacattttagcgtcggaaaacaagattttgaagcaattaagtgattttgtattttgtgctctttgaggttgtggaaaacaagactcgaagtggttgaagtgattctgaccagacctactgcattatgttttgagcatatctggtcgtgtagtgggtttatggcagtagggattcagtgctatcgttttcactcattagcgcatttgattgtaaacaaatacatccttgaaagtgtttatgatacattctccggtgaacctcatcttcaggtgaggcaaagagaggggagattaactctcccagcaaatttataatcctgacatggtttcttgaacttttttattgtagctag

SEQ ID NO: 6973 - DNA, 996 bp, Zea mays
  Intron number 1 from transcript GRMZM2G077588_T01 (locus G RMZM2G077588) derived from phytozome v7.0 (chr-ID 5; pos 5 117612 to 5118607 reverse strand)
caaatatcctaggaaagaaaactggtaagtgcaaatcctcatagatagagctagagcaaattcaagggggtgtgctttccatgtggtgtgggtgcaaggatttgtagtgaaaatttggctattatcactgtttcgtttatttttgtgtggacacggttgcacccattttactcttatcacttaatatatatcaccccagtttccaacaaggcaaagatttgtttgcatattggtacgtatgctgcaaataccactaagatatcggtaatgacatttcaagtgccctaaatagaataaattttcaacggtgatagtgacactggcaaccggctggtgctggcacaacacatgtggagtggcaatgtgtgcagtaatggcagtacagtgttgtgcagctgctgttgtgaccattttcgacaggttgtagtgttgttgatagtgctttcacttgtggtagttctttagctttgttgctttttcgttgttgttggtgtactacttagtctgaccttgtttttattaatcagcattccaggatttgttaaaaataccctttatttactttacaaggcagcagacacccctaaaagaaggcatttaggttcatgaagcagcagcaaccatcagcaaaatctacatctatctcttcatcgataactcacccagctcaacccgcatagctacacttctttggtaacacatgatgtttagcaatccttggtttcttcagcttcacagctgtccatatctcttaattaaaggaccaaggacaaagaaaaccagagaacacgatacatcttgattgtctagagcaagctccacagtactaaatagcaatattgtgttattagtcttatttcacagagacagctgtggcacgaagaggtgaattgccctgaaatttgttacctactatgacttatcatctgaagtaaaagttatataagtcaaactcttgcaggattcagagtagagcgaggagaatttcgattttcc

SEQ ID NO: 6974 - DNA, 854 bp, Zea mays
  Intron number 2 from transcript GRMZM2G041123_T10 (locus G RMZM2G041123) derived from phytozome v7.0 (chr-ID 10; pos 122524824 to 122525677)
aggagcagagccatcacagaaattcttgtctccaggtatgttgaagtttcaacaacttggtttataaattaacatgattttaaaaaatcacagtgactcctcttgcagattttgtaaaatgtttttttctctactgcactgcctatcatttgctgcaatttgaggattataacattctagacacactaaaatctatcatctatcataaacagtagctatttccccctctgttctttgtgtctctgattgtgtggtaccagctactttggcatacatttgttttttgctttaatcttctgttcagcttctaattcagaaatctttacttcagataaccagaatacttcagcttccatagttccacttacacagttgtaacaatctagcctgtaatggcttgtaacagtacagtgagttgggagttgggacacctctgatgtttagagctccaatggtcctgtgggagggatatatttttgttttcatattgtttagccatggggtgccagggtctacgttctaccttggtttggttctctccttttctcctatctgtcaacacatagtcgtctattacttataaaaaaccacattttcccattttgatccctttatgaacaatgctggaaatcaaattctattcattttggaaaataattacatatttattcgtcgtagctatattccattgttttattaggtgctcaaaaattgtgttgaccggacacatgctattttggcctatgtgctatccattgctatgttttatcggtagggttttccatgcttagataacttcctaatttctcattttttgtaaataaataaatacttggagattcttggtcaaagga

SEQ ID NO: 6975 - DNA, 790 bp, Zea mays
  Intron number 3 from transcript GRMZM2G179662_T02 (locus G RMZM2G179662) derived from phytozome v7.0 (chr-ID 5; pos 2 13762881 to 213763670 reverse strand)
gatatattttctcttgggtatgcacattcatgttaatttttagttttgtttcatgtttgacttcttcacctggcatggcagtatatgcttcccatgtcgaatggttttcctatgattatgttatgcttgggcatgctagtttcatctaatgggctgtattaccatttgttcttcggtggcaatgggaggcatattgttttgtatttagatgaaagctgaatggctgtgattattgtaaaacagttctcataagttagtgcacaaaactgttgttataccaacaacattgacccctcattgtccgtcaactattcttttctcgacccttgagacaaacttccaccgaaatacacaacttcaacttgactactagctgggggataggttgaaaaatactttggttctcttttgggcttcatgtttatttataaaactcatgttaattttcatttgcctacatatactggaagcaaattcaattagagtttgtaatagttacttttttgtccccattaactttttttctacattaagtatttttacatctcatggtttagtttcatggagtgtaggtcagctccaaaagtagattagcgattgctagaattctggatttgaaacacgatttttgtgaatttcacctctagcttcacattttttagcagtactctattaggttagaattctgacactctttcttttcataatataaaaatggtgaccattggatggtgtattatgtatcttatttccaggtgtgttcttgctgaacttttccttgaaggccagc

SEQ ID NO: 6976 - DNA, 418 bp, Zea mays
  Intron number 1 from transcript GRMZM2G152757_T04 (locus G RMZM2G152757) derived from phytozome v7.0 (chr-ID 10; pos 15716416 to 15716833)
agaaggccgtcaccctcgccgccaaactctgccaggttcgtggctaccgtggtccgtggttcagctgcgggcgtagtccggtgctttagatttacgcaccaggaatggggaagagccagccactgtaccgtagtttcatactcgatgttctagctagtataaatgtataatataatgtatttcattttcatatgctatgaaacactatattcatggcgtaccagttgctatggttttatttacgacaatgaaatgcttgtgtagccgtacaggcttgtattggtggtcttaatcctgataaaaaagaatcacatatagtgatggggtggcgtatttgattgtttagaccggataccgtgcagtttggatttatctcttttctgttttgtttcctccccagacagttcaacaggatatt

SEQ ID NO: 6977 - DNA, 855 bp, Zea mays
  Intron number 2 from transcript GRMZM2G152757_T04 (locus G RMZM2G152757) derived from phytozome v7.0 (chr-ID 10; pos 15716860 to 15717714)
ggcagacaaaagtcctgtcacagtggctgattgtacgtgctggattttatcttcaattctgtatgattgatgcttttgagttgcatccacaaatccaattcgctccaaaagcaaagtttctgaacaaaaatcagtgcaattcattcatgtgcgggctccctttggtatggaatagaagtcggttgtatctttttcatttaagctgtggtagatagggcttcaacttagcggcttctggcatgtattaaccaatcgactccaaaagcttgagcagataattcacctgtaattcaacatatgacaatactaaaatcaagtttggagttagttaatgcttgtagggaactagagacgttgttaatgagagttgactatgatggaaaacattcttcaattagtatgttgatcatcttaatatgtgaaacatgtgcaataataactaatggagtttacccttaaacctagccactagatgcgtaaaacttagggtgggttttcgttgcccagcgacggcgaggtgcagtaggggtctcacacagggacagtgagaggtggcgacggccttccctccacttccgcagaacagaatagattagattgagtgtatagggaatcggaatgttgtttcctgtggcagctcccgtccccgcttttgtttctgcggtgtgaaagggggctgcaaccgaacatgttattgtgccctcgatcagggtgtgttaggataggatatgatcaaccatgatcgagtcctttgagatcaacccaaaaacttgtgctttctcccaactcgctgtttacttgccaattttctttcacacattaggatctcaaatattggtcggtttttccttaaag

SEQ ID NO: 6978 - DNA, 856 bp, Zea mays
  Intron number 1 from transcript GRMZM2G125476_T01 (locus G RMZM2G125476) derived from phytozome v7.0 (chr-ID 10; pos 118968718 to 118969573 reverse strand)
tttctcttggctgctcaatctcgcgaactcgttcagtaaattgcttcccaacttttttccctgacgaagatacctcccgacttcttttgctcttccgtagcaatttggatgcatcgttttcaaatcgatgatctaggattccgtttgttagcatcattagttgaaattgcttgttgttagctctacgtcaatttgtgcgttatattagaacctggttgttagttcagtaactttcgataattttgcttctatgtggccgagacccttaggtagcttttccctatagataatacagtagattcacctatctgaataggtcagctgatcttgcatcaatctggatagttttgcttgttggactcctggcggtcatcttttcttcttcagtgtcgtgttggtgttatgtatataattaggtgatgggaaatgatcacctaatcataacgcgatggttggtggatcgggagagagttccatcttggttagacaattcaaaagggagttgtaaacttgtaataggctcgtgacgctgaacacgtccaatgttcggtgaacagacagcccatgtcaaagataagtatgaagtagctgattggaagctccaccttttattgttgcccatttgaagtttaccattgacaagtattacctttcgtctattgttgcaaatataaatagatgtgttgttagcacctgcttttgtatgtgttccatctgatgataaatgccttggtcgctttccctttcaggtttcctctcgtagtattccgttcagtttctaggatgtgagagcagcttttgcgttgatgataaaagtgaggatgcttggttatctggatttgtggtgctttatgtg

SEQ ID NO: 6979 - DNA, 709 bp, Zea mays
  Intron number 1 from transcript GRMZM2G122897_T01 (locus G RMZM2G122897) derived from phytozome v7.0 (chr-ID 10; pos 143389749 to 143390457 reverse strand)
cgccacacccagcaccagatccaggagttggaagcgtaatgacactaatcatgctagctactcgcatgcttttccgagttaatttgttctctcttttcctcattaattctgcttctgcacgggtacggtcgttcttgaaatctttttttggtggttaatttcgcattgacttttgcctgtcgatgcatggtttggttcacccaaaaaaaaaagatacgcacaaaatgttgttggttcactgaatttaatatgcagagatgatgacaagctggtgctagtcatcactcggtcactagagcatagtagtcagtcatcagtcggtcactagagcattcactgagctgatgagagactgatgtaagcttattccgcacaggtcaaattgagttcttgctcgtccatatatcatagtatattgtattcgttgacccaatgtgcaaacggtttttgttctttagctcttcttctcgagctaaaaccaaaaggcaaattagcaaacatagcattatataaattcaagaagtatgacttctgcgtcgttcatactgcagagcttcctttcacttgctagtttattccatattttgtagaaacattaattaatccgccgtcactcacggaacacgtcatcttttgatctgatgatcgtcggttcatgcatggatgatggccagtttcttcaaggagtgcccgcacccggacgacaagc

SEQ ID NO: 6980 - DNA, 654 bp, Zea mays
  Intron number 2 from transcript GRMZM2G404137_T01 (locus G RMZM2G404137) derived from phytozome v7.0 (chr-ID 10; pos 94932746 to 94933399)
gaagttactttggtagtaagaataatttgacacaggtaaaacaagagaaatcaaatgtacctccaatactggaaattacagccgccggtcgccgccattacgaccattagcaacaatgtcataaagaaaatgcttctcgtttgcactctgtagaaataagtttcagaattcatcaaaagtaagcaatgtattttcatttcagatagataacaatgctggaaatagagaagaaatacttttgtgccgataggcttagcgctggcatttatcatctcttgcagaacattttaatgtttaattaaggtcaggaacttttataaacactgtgatgtactataaccaactgtatacaattatttttacttctagctattggatcccacgcttactccatatataaacacatattaactagacaatgcttcatctcattgcagaactaaaagaagaatttgacggtaaaagaaaaggacaagaatcaacgacaacaacaggtacaggaacaagaagcaacaccatccatgaaacatctatatcttagttcatggcttcatgttggactgctggttgcaggcgagggctccatgtatccatctgaccatatttcatcatgttacagatatcagtcctcgcgaaatccattcgcactcttgc

SEQ ID NO: 6981 - DNA, 791 bp, Zea mays
  Intron number 2 from transcript GRMZM2G125233_T02 (locus G RMZM2G125233) derived from phytozome v7.0 (chr-ID 10; pos 122226104 to 122226894)
tcgtccttggcagagacaccgtcgctgaatacgtcgtaagctcaccaaaaccattccgcatgttgtttttcttgtgttcatcctcatctttcgtcagcaagtatgctctgcatttgccatccgttcgtggacagatctctatacatgtttttttttatatatatacattggcgacagaaaaatgcacggcgcaggtacacaactcatctgttggaccttctgttcaatagtatattacacaataaggctgtcttcaataactcaaatcaaatgggagtagctccatggatttggcctctgctttgtactagtagtacctttctttccctgaaccacggcaacacaataatatgttgtggtttttcagaaactgtgtcaataaacttaagttttaaaacaggagatacgtaaggaagagggtcagagtagactttctaagtctcttaaaagactagctagagttttagctactatggttctcaaaacttctgtaatcgttaaatccaaacacacattgtaatgtctaaaaccaaatcattttacaaaaccatgatttttttccaaaaagaacagtaaaaagatacttcctatccaaacaggctagtgcacacaaaagctctgcatcatatgcaatcatactgtcatctcaccaagcttttaagctggctgaaagcgacgcgactgtttcttctgtgtcatattctcattccaagtttgtttctgcaactccctctgtcgatgggtcggtccgaccagaacgatacctcttacttcgggccgataacggggcg

SEQ ID NO: 6982 - DNA, 511 bp, Zea mays
  Intron number 2 from transcript GRMZM2G576877_T01 (locus G RMZM2G576877) derived from phytozome v7.0 (chr-ID 10; pos 71955392 to 71955902 reverse strand)
gtcctaaggtaagcctataacatggctggtatgtcaagttctaaccacatgaatatttttgtttcttggcttgaatcagcttctttcaccattatatatacctattttgatattagacacctgcaccattaattgctaagtgccaatataatgttttttacaagtaaatggtataatgatattcagtgcgtcaattatgttgtacttgtggtgtttttctctccgtcaggcttccggcagaagtagctgccaaaacgcacaagtttgtatttgtaatatagtggcaatttaaggtattgctggatattggtttgctattgtgcctataaaagtattaggttggaagtatgttgctaaatttttctggaatttgaatatgtgttagttcgatgattcattcagaagctttctttctcaaacgcttgattcatatagaagccgatctggtctttgctattgtggtcttatgtgccatgcttttccatattttcagaagaagatactgggtgca

SEQ ID NO: 6983 - DNA, 948 bp, Zea mays
  Intron number 2 from transcript GRMZM2G137451_T01 (locus G RMZM2G137451) derived from phytozome v7.0 (chr-ID 10; pos 110999070 to 111000017 reverse strand)
gtctagctgccattgccaatcactgcaagtgagttttacatcccagttagccaaatgctagtacctcatttgagttttctatattccacttttgttaagtgcatcatttttttcctttcctgatctggcattgtaatctttagtgacctgttgatgtcactaattagtctttaagcagctattcaagtcattgcaaatgactggcttgaaaatttcagctgagagcatcaaactttacacttttttctaaaaaataatcaaattttatttccttggctgtgttgtatgcaattaccttttgatataagcagctattgcaaatgacaattgccttgaagattttggttccttaatagcgtcacattttacttccttaccagtgttttatgcaattgccttttgatattgggatccagaacagcatacttttgttctttcttttatttcttctgatgcttatcacttaggtgccattgcttgttagttttttagcttatcttccatattttatccttcattttatagctgttcaagtcttgcattgttctgctcatgttcccttaatgagctggacctgtgatgaacctttcaattcaagtgccgtttgattgtctgttcttgcttgctctttagatattttagcactttttttctgcatgacatctatattttttattcagtgtgatgaatccatacagttttggccatattgcatataattaactagttgtggttgtactgcttgtgattgttttctaggactagatgcaaattctcttgcagttgtttaacaaatcattatcattagtattcagcagttgttggatgcttttaactgaatgcatcaaatttttcttgttacatggtattttatagttaatttgttgactttgttctcttccttttatctgttatctaggctcctgagggagttagatttgcaggaaa

SEQ ID NO: 6984 - DNA, 386 bp, Zea mays
  Intron number 2 from transcript GRMZM2G073836_T01 (locus G RMZM2G073836) derived from phytozome v7.0 (chr-ID 5; pos 1 35275096 to 135275481)
ggttgccaatcagccagcggtgagttatccccatggaggagttgctatcagtttttcttatggaagcttgattctttgagagtctggtgttgacttgtcagtacaatgcgggtttcagcttcatgtaacgttgagttttagcagagttttttcaacttaatctgagtataggcatttcatattactagtactccctttccacttcattttatgggaatatattccttagtacgtatatactttttgttgaccattattaaaacacaagaatcaaagttatcattgtgacttaaacacttgataagaggactgattacataatgttcacttgattatttcttctttttttaggagggctaacagttcaacaaaacactcaagcaagt

SEQ ID NO: 6985 - DNA, 869 bp, Zea mays
  Intron number 1 from transcript GRMZM2G145870_T02 (locus G RMZM2G145870) derived from phytozome v7.0 (chr-ID 10; pos 69432585 to 69433453 reverse strand)
gcgcccgctcccgcgcgctccgtgctggccacacggtacgccctgctgcatcctcttccattggtttgtttggtttctccactctgatgtcgcggatacgatgtggaggtttcctgttttcttggtacgattttgtcacggaccttgatgtccaggcaagaatcactgaacaatgtaccaagatttatagaagcggagagaaatcggagagaattagtgtgcgtttgtttgggattataatctgtctagattatataatgtaacatctttagacgacaggcggcaataaactggagacaggcagggacagaggaggaaggggatgtttggtttctagggactaatttttagtccttctaatttaatcttttttagtttctaaattgttaaatacgaaaaactatagtgactaaaatggaataaaatggagagataaaccaaacacccccgaagatgggctcggcagttctcttgttctgttcgatcgatgccctctgcctgacactcccagctccttttgtagctgcacacttcactaatctgagcttaactggcagctcagtccatggtaggcccatttgacagcccagtctgtgaccgatttcgtatccttttccccattcgctgagcacgattttgggtttcccactttctctatgtgtcgttgggtttcgtctttacttgtagtaatcaccaactcaagacacaatctttgcaccatttcgcctgccccgtatggaatgcctatttgttattttatcagtaaaatcttgcacataaatactgagttaatatgcttcatggtgcactttgatacactttttttgtttatttaggactcaatccttgaggtgctggcacaggacgat

SEQ ID NO: 6986 - DNA, 992 bp, Zea mays
  Intron number 1 from transcript GRMZM2G015159_T03 (locus G RMZM2G015159) derived from phytozome v7.0 (chr-ID 5; pos 1 4343794 to 14344785 reverse strand)
ccaacgccgggaataagatccgcaacgccaagctggtgcgagttcatgtcccgagcgctcaatttcaattcttggtttcgccgtagattgaatcgcggccggccggatcttgatcgccagtactgggctgcatggtgcttagcgcttggggttgttacgaatacgatcgtatactttctttgcctgtggattattgcgacgggacaaatagatggggactggggtccttgcgtttatggttcttggtagaagtttttaagaaattatgcccttctgttttgcgaattcgccaatttatgtttctggataagtgttttggcttcttggtaatttatgcgcaaagaaacagtaatcatagttttagcgggtaaggatgtaaaatatagtgtgatgaatttagttgacctttgatactggtggtaactgaactcctaaatggtccccgttcatgaataaattccgtcgtttgagcttttatggagcttacagttcgcattttaagggcagtcccgacccagaaactatggtataggtagtttccatatgcttgctaattaatatagacaccacctgtggaaactatgctcacaatggataatttctacaaataaattttttttaatcatctatcttctctcgtagcatctaccaatcacatgtctttgtatcttgtgtaatggttcctatataaggaactccatcgataagacctcgattgtagccaatattttattgcaaataattcggacaaccaccggagaaaaaagggcatttacttattgtagagatggtgcgatttgactcttttttagccctacctatatttccttctcacttcaataactatagtgacacatcagcattttgcttagttggcacactaattaatagctatagaaaccatctagtttctgggttgagagtgccctaattattcgccatgtgaatgtaaatgtttcattatatttcgctttgtcaggttcttcttggag

SEQ ID NO: 6987 - DNA, 1017 bp, Zea mays
  Intron number 1 from transcript GRMZM2G122863_T01 (locus G RMZM2G122863) derived from phytozome v7.0 (chr-ID 5; pos 9 330641 to 9331657 reverse strand)
ggtcgtttcaagtatcctgctaccggcgtccgaaggtgcgatatcactgtgccctgttctgttccaaagctcgagtcttttttttttggttggcgtcctgtggcgttgccgtgcttgttcttgccttggagcactttgggtttattgagagcgaagtatctggtgttcgtgctgctgaaggtgttggataatggatttggggtgtgcggtgatcgttgagctggggtgcggagcttcttacctgtatttctggcacggaatcccatgaatcaagttgaaattattgcgcactgctctaccctgcaaaactggagtatttttctttgatgtaatcgtgtgttagcagcagagattaggcggtttcgatgttggttatcgagagattggtgtgtttcacttgattaggcctatttcggttgtcaagaatggagttttctctggtttaggtaatgcgttgggttttctgtgatttaggcaacgcgttggaggctatgcttccttttcttcgatggactgatgtgtttttgctcgttggttgggatgccttggccttgattctaagctacctgtatgagacggagaaatgtagccgcgtccttcttgtgttccgttttcagttatcctaggcaagtcagtaagtcatcccagatatttgtttcctacacaactacactgtctacacataacttcaatagaggtacctactatctagtagacacgttgaaagttttggaggtagctcagatatcaaatgcatagtttgtatttatatgattggtgggattgctacaccgacggaatcttttttggaggttctcttgtatggcttgcacaagtaaattgaagtaatggacttggtacaattgtgttctttcaagtacttcatcgtttccctaccattggtgaaatatattaagaaggatgcttatatgttggttacgtcttattccaggaaccttcaagtgttccagtggaggtattaggagtggtggggaaaaagggattgtagaggtaacg

SEQ ID NO: 6988 - DNA, 765 bp, Zea mays
  Intron number 1 from transcript GRMZM2G341379_T01 (locus G RMZM2G341379) derived from phytozome v7.0 (chr-ID 10; pos 34913878 to 34914642)
gaagtcgtcctggtacgtgcctagtagtgttgccttccatacttgcactgcatgcgcgcgcatttcaatctacaggttccgaattcaaaatgcgcgtaaataatcgactagctgaaatcatgcatgtgcaatacaaaagcaatgtagtaattttataaaatgtcatccgtgcattattcaaaattttactactttttttaaaaagactgaatgcattgcatgcatgttttcatcttgcaaattaaaatccgcagagcttagttcatctccaataatttcaaaaaaaaacatttagtaatttagtgagcttttcatgtagctaaaaaaggttaagaacaaatttcttgaacaaaatctaacttagtaaaaatatagaaaacaattttgcattacgaatcattaactattactaaatcactataactatttttatacattttttcttccttatatacatttgctttgataaacatgccctacttattattattctccacaacctttcatgcacatacagagatattggccgatcagtacatgagcatatattgggtcgattttttcaattgtggaaagatggagagttgggagctgagaccctttttttccaattttgctaaaaaaaagtcagagtaggttttgtcagttcttggagactaattaagatgctcttacgttaggcaaaaccagattcctggaaactaattaaaagcaaatttccaaaagtaaattcaagttttttttacatgcagcattgccacaagc

SEQ ID NO: 6989 - DNA, 507 bp, Zea mays
  Intron number 1 from transcript GRMZM2G089836_T01 (locus G RMZM2G089836) derived from phytozome v7.0 (chr-ID 5; pos 6 7509224 to 67509730)
aacgaccccagtacgttacgatcctctctgtctctctctctctctctctgctgctgctgcgctgctgcatttggtttgggttgcatcccaactcaacatccccttccaaacgactatggattagatcgatttgaaccatatgaacgaattaattgtccacgcatttgattcctttcacgtgcatttcatccaacgaggcgctgggacccacacgcatggacgaattattcagcgggccccttttttctcttcacttttcccttttttctcttcacttttcccttttttttttctttctcatccacatacaaattccagatacccccgggccctccgggattccacccaaccaccaggcctaccgttgtgtattcttcttttgtttttctgcccttctcgtgcctgacttgtttggtccaagtcgtcgtcgcttcgtaataataataataaattgtaaattatacgcttgcaggccccgtgtactacaagggctggtaccacctcttc

SEQ ID NO: 6990 - DNA, 568 bp, Zea mays
  Intron number 1 from transcript GRMZM2G536120_T01 (locus G RMZM2G536120) derived from phytozome v7.0 (chr-ID 10; pos 3020579 to 3021146)
gacgtgaacgctactgccgtcgggtcaggtgtcacactactcgatcttgcgtctggactctacaaatgctgccttgctatttcagatttatgctcactttagctctcgagattcccgaataggatcatttagacgctatctggtctattttgtctctcttagtcgttttgttctgtcttctttagtgaagtggttcttttttagagaggtgatgtaaatttttcgccgtaccctacatgtgaggggaaaaggctggaacaatgttttttttccatcatctaaaatgaagaatgtatatgcaatgcaacgtgatattttttccgtgggtgatactttttagcattaattaaacgtttatactcaattgttgtcattgaattgatccctcaacaatctattgttatttggagtctttagatttatattttatttatctacgaagcatgtcgtcatagagaaatcaatcgctgcggatgtttattcttttataagaagattgatttttttactttacttttgattattttgagtaggtgatacacctctctctgttgcagttcgttccaaa

SEQ ID NO: 6991 - DNA, 1030 bp, Zea mays; identical to SEQ ID NO: 6972
  Intron number 1 from transcript GRMZM2G010871_T04 (locus G RMZM2G010871) derived from phytozome v7.0 (chr-ID 1; pos 2 39617441 to 239618470 reverse strand)

SEQ ID NO: 6992 - DNA, 643 bp, Zea mays
  Intron number 1 from transcript GRMZM2G122943_T01 (locus G RMZM2G122943) derived from phytozome v7.0 (chr-ID 10; pos 87083274 to 87083916)
tcgcgggggacgcagccaaggagaaggtcctctcggtgagccctatctccccccccccccccccccccccctcttgctcgccttttgctcttgtagtcatgttttcgttccgatctgggaagtggacgaggaatctgattaattaattggttcccgttgaaaaaatcgggtgggctttgagtttattcatgatgatggtataagcaatatgctcgatttggtatccgaattgtaaaaatcgctatgttttattattagcaacgaatttcagttgctgatgcaaacccaacggtttctgaaagaaattaccaatgcctaatacttttactaacgttaagtgttggtaacttgatagttttgtattgtctgtgtgttgattgaagctcaaattgagagggacataccacgtgaaatcaatcatgttggcataagcgtgcaaccaagcgatctgtattttatatttaactcttctccacctaaaaccgacctaacattggaagtaatttttagataaaggggctgattactctggatgatttggttgcatgcttgcacacaggatatgtcccccaagttgagttctcttttctttgcacctgtgcacgcaggacgccacggatcttctgctgcaggagctgagcca

SEQ ID NO: 6993 - DNA, 740 bp, Zea mays
  Intron number 3 from transcript GRMZM2G108739_T01 (locus G RMZM2G108739) derived from phytozome v7.0 (chr-ID 5; pos 2 16246341 to 216247080)
caagtgaaaggtgtacaggttagcttccagggctctgttgcgttccttgcctgaactgcttgttttgtagcaactgtttttttcctcatccattgaactattattgtatctgcaatggcattatgcgctcgacctgttcattcactagtgtacactagttcttctgaagttttgtttcttgctcatgttctgaaactcacatcaacctggaactctcatttttggaagtgccttactgccatattatatgactgtaggataagcataataatatgtagctgattgtaatcttgtttgtcaacaggatcttgaagacatgcactttagtttaaggtagaataactgataatttgttgtcaatagttgctctttttttacctttatgcaacggtcaactcaatttgaaatggggagggtccttgtattatcaaaaagtaagggaggccttgagtgaggcttattctacatttgtttattcacttgcattcgtttagtatgggacctctagtcacatgacaacatgccagctaccaattatatttgtttgaggtcatgcttttatttcttgagtttgataatgttggtacttaagttacaataataatatatatagaacaggtgcctctagaaatatgtgacgatcatttttttgtcaagttatccatagaaaaaaaatttgaacccagaaatttatatgtttgggatgttctttaaacaggtggaagagctttactctctcg

SEQ ID NO: 6994 - DNA, 793 bp, Zea mays
  Intron number 1 from transcript GRMZM2G118786_T03 (locus G RMZM2G118786) derived from phytozome v7.0 (chr-ID 5; pos 1 46928982 to 146929774 reverse strand)
tccagccgagcaaccgtgagccaagcagagcaggggtttgtgatttgaagtttgatctgaagttttgacttgaatttgattatttatttgatagtaatctcatatttaattataggaataaggtggacatgatgtttaattatattgcttgatgttttcgatgtgattggtttaaatttttttgttatagtcttagtagcccccctcttggatcaatcctggatccgccactgattactgctacgaatatatgtacacagtaatataatctctaagctcctcatgttgctacatttgtaaacttcaatatttcattactgctacaaatctatgtacggttccagttgactatggtagcttccttgctttctgttcttgtcttaccagtctgagctaaagttttatttattaaattgtgatgcaatgttgcatcaatgctggacttcggcatttgaattttacgtgcactctggtttttatgttgtttactgtccatctttctcctaatcaataaaatgctttgattactattgacataatgtgaacttcgatttatatgttgtttattatccatatttggccctatccatgaaattatttgattcatgttcatataatacttagaagaatgtaatgtaagcctcaaattctctaatttgagttgctatccagtttaacacattaatttaactgtctaaatgtatcgtttaaaaaaactcgcgcaaagcgcgagcaagttactagtaataaatgcatgaattgaatggccaggtttaccactctagtttcgctg

SEQ ID NO: 6995 - DNA, 673 bp, Zea mays
  Intron number 3 from transcript GRMZM5G818514_T02 (locus G RMZM5G818514) derived from phytozome v7.0 (chr-ID 5; pos 7 4455444 to 74456116 reverse strand)
ctccacggcgctgcagctgttcggaagcgccgcgggtaagatggataacctacctgcttattactcgcttgcttcgttgttttttcctggctagggaccgtttactagcagatctttatctccagatatgttcaatacttctgcggtacttctgtgttccttaaagagtttgtgctagagtaaggtttgtgtccgtagccacaatgctgcatcccacctgcttaccaactggccatgtgaaatatttctgcctgccatgctagaaattttttctgtcagagtcgttttgacaaatttttaacactagaaacgaaataattggtattttaccactcagtttgttaacttgtttatggttcgtgtgtccatctttgcctatgatttgtggtcttgatgtcaaaattgtgaagcctactgataataatggcaaaatagcaaatctctagtatcctgtccctgcctttcttttcatagacctacacattggcgtccatggtttcagagttaaattggctaattgaagctattcgttcttgccacaccacttaatttataacccttctctctccccccccccccccctcctgactgtaaaaataaaaatctatttacctttgttttttttgttgccgatgcagtccccacggttggtcctgctggttatataaattac

SEQ ID NO: 6996 - DNA, 973 bp, Zea mays
  Intron number 5 from transcript GRMZM5G828302_T03 (locus G RMZM5G828302) derived from phytozome v7.0 (chr-ID 5; pos 1 88126212 to 188127184)
tcctgaaccagacagcccacttaactgtgattcaggtacctcttctcactctatatcaaactacagtacacgaaaaactacgacgttctactacttttctatctttatgaattagactgagttgatataatattaatcttaatgttgtggactttaacatatgtactttaggacatataagaaatattaagctattgctgtaatggagacctgagaatacatctcaagtatcaggactcaggagtcaggagtgacatcgcagcatgggaaccactctttactcttaaggtggtagccaaaagaagaagaaaaaagtcattccgagttatcaaatgtagtagcagaactgttgtgctacagcacagctagatttgaaggagcagttgcatcactattttgtaattcaactagctgttgtaacttctagatctaattacactacagacaaacccagtgttagcgtctcccacatgagtggagtctggagaaggaacaaccgaggcaagctttactcccgcatttttgcagagaggctgtgtcaaacccaggacctttggctcagtggaaaggcttatcaccactgtgcctgatctgtccatctaattaatctacatcgttacaatatggcccctaccaaaataagcgacgctggtctttctcattttccattcaattgatatgtttgttatctttatggtttactgtgtgatttgttgcccttaaagcaaagataccaccgtcatctcactggctttttaaatttatgtatatattttctctcttaatatgatatcatcaatggactttttgctaccatgagctaggatcctctaaatgtgcagttatacctttctgattaatcatgtgctgcccgagataagcctatcaagtagtctgaatctgtctcactttctggctatctttttgctcaatcataggcaatctcctgcggtcgggtgacatcagaggctat

SEQ ID NO: 6997 - DNA, 354 bp, Zea mays
  Intron number 6 from transcript GRMZM2G120579_T02 (locus G RMZM2G120579) derived from phytozome v7.0 (chr-ID 5; pos 3 4610244 to 34610597 reverse strand)
gccctgaaagaaggtatgccgtttttcttaccttgtgaattattcttcaaatttaaggaaaaacatgctcttttgtcatcaatccaaaggatttgatctcatccagcaaaaggtaacataagaacatgttcacatggtttatatgtatcctttgaataaaaaacacattgcctacatctacttggtacatatgtatgggttttccttgcttgatccactgctattgtttcatcgacatgaatgctggatatacaaaaatgcctactctagtctctataatatcaaagtgattttgaattcctgtattgttccatttcagcttacttgtggtggaaacagcggatcgtccagggt

SEQ ID NO: 6998 - DNA, 440 bp, Zea mays
  Intron number 5 from transcript GRMZM2G120579_T02 (locus G RMZM2G120579) derived from phytozome v7.0 (chr-ID 5; pos 3 4610637 to 34611076 reverse strand)
gggcaacttttgggccagaagcccctacggaagaggtattacctaaactatgtcagagacatcttctaaatgcttaacatatggactgaaaacttctcagttctctaaagagatttatgaaaccatcttatttgtctatatctatcgtgagaaagaattagtacacaacggtgtacaaagcacacatatctttaggatctccaagtttgatgtttatttcctttgtctctgcttcattgcaaaacttaatgtatcaaaattcttatctggtattgccttattgctggatcttcttatcatagaacagactttattggtcttcccatggtacaatagtgatcaaattgctgccaagtacatctttagaattatgtatggttctggagacttgaaaaccttcactggatataaacattgttcacttgtacattcgtaggttg

SEQ ID NO: 6999 - DNA, 644 bp, Zea mays
  Intron number 2 from transcript GRMZM2G031963_T01 (locus G RMZM2G031963) derived from phytozome v7.0 (chr-ID 10; pos 124661157 to 124661800)
ccctggtatgtgctgttcttttctatagggcgtgaacacgtaccagaattactatttgctttcgcctatggatgctgaattggcagttcaagaatgcttgctttatcgaacttttgacctctccgggggagttcgtgaaagatctactttggttccatgaccaattctgctttgttttcgttctagcatgcggtctcttctttccaaacaggcttccgtttgttttctcaaaagcagaaaatagtaatgatatcatccaaatattttcaaagtttttcttgaaagcagtaatatgatgaccgatctctttgccttccatagtttatatagcaatgtataccccacacttaagatccaaatccccccccccccccccccctatgtactacttggaaactccagtacaatagctgttaatgttgtcaaagctggatagaaaattcatgtgtttgctcagtttatattcatatatgtgttttgaatcatcgtgtaattcatatgtaaattaactaaggaggtaccaactaggacaattattttttactgaactctgatcgaagctatttcttacctgacaacaatgtttttgtttctcttgcaattcttcagggacaagcctcaccaaccacggggaagctattctt

SEQ ID NO: 7000 - DNA, 938 bp, Zea mays
  Intron number 1 from transcript GRMZM2G169734_T01 (locus G RMZM2G169734) derived from phytozome v7.0 (chr-ID 5; pos 1 47108830 to 147109767 reverse strand)
ctgtcttcctcgccctcatcggaaaagcagctcaagtgagtcatctctctccctctcatccatctcctgtcttcctcgccctcttccccatgtcttccgtagctgctgcacgtctgcgcggtgccgagtgaggagcttctgcacagcgcccgccgcctcgtgcttctgggtcagattcctctggtcgtggaatttgtgatgtaccttatattttaattactgctcatgtcttcaattgcctaatctctacatatgctgacagatctgtcttcaagtgcctaatttgtgatgtaccttatattttggggcgaggaactagatctagtgggttaactagtcacaaccttttggcattagtcgaatggtctcatttcctgtttacgaaacaaactgaaaagacaatgaagtgaaaagtttatagaaacaaattgaaaagctagttgtttagcagtacaaaattcttatcataagctctaaacaaactgaaaagctagttgattttgtcacggccttttggatgctcctgttgtgtacggtttcactaatacttaactacatcatttatgaatattaatcggatggtctcatttcctgtatacgctgtagcaacgttcaaaagatcacagccatcaccacacacaccaaaaaaatgttttattataaactataataaaataattgaatggtacatgcatgattacatcattttttctcttcctcttcaatgaaattaaagggaagcaataattaaaggaagcgcaatgttgtgtgagcattaaagcaataattaaagataagcaataattattgtatcctactgatatatcatttgcaatttacagaagaatatttttttttgttttctgtgtgaaaatctgccaccaagtaatatatcatttgcaggagcgttaaaacagctcgttgttttgggatttgtt

SEQ ID NO: 7001 - DNA, 771 bp, Zea mays
  Intron number 1 from transcript GRMZM2G451231_T01 (locus G RMZM2G451231) derived from phytozome v7.0 (chr-ID 10; pos 23781158 to 23781928)
cgacaacgtggccgcgcgcagggcagaggaggccggtgagttgggttcttgggcacctgctgtgcgcggatcgcgctgaatcagggggtgcggcggattctttagtgtctgttgttgtaaggcgttcttggttttatgtgaacgctttgagaagaaaggttgggcacggatagtctcgtctttgtgttgcggtggatcggtttgacactgaagtttgattcactgaggatggtttcgaattttcaaatttgtcggtcaatttgggtgtcatgatcctcgtgggatgtagtgattcaacagctgaacaacctgtctggtagtttactgtttcaatctgaggtcctgttgagcttactcgcgtagacttaatgtgatccatgctttgtgcatctcggtgggcacaggttttatgttttcttatttacccttttgtatatattagtttgcattaaaacgtgtattcatggccacaatataatgctgtgcaaattgagcagctgtgcaaattatagtgtagtgattgctttcccccttttttggtgaaatgctgctgtgactaactattgatggtaagctaacatcaagcataccaaatcaggaatttgacagctccttttagttggatttcgaccccaccaagaaaattaagtctggccttattattacctgataacctatatgtttcaagggcatctctgtttgtaattattacaacatgtcagaggaaggtgcacttatttcccttgttggttaatgcagcgataagaaggc

SEQ ID NO: 7002 - DNA, 1018 bp, Zea mays
  Intron number 2 from transcript GRMZM2G169516_T08 (locus G RMZM2G169516) derived from phytozome v7.0 (chr-ID 10; pos 124062191 to 124063208 reverse strand)
caagccggggtgttatcagggagaattttgatccggtgggtgagtttaggacgtaaatccaatcatttcatttttgttatcttagggggtgtttggtttgtagggactaatttttagtccctacattttattccattttagttccaaaattactaaatatagaaaataaaactttattttagtttctatatttagcaatttatagactaaaatagaataaaatgaagggactaaatattagtctctagaaaccaaacacccctttagttcatatattatatatatatgtgtgtgcgaaatgatccttgtgtcttgtcttgggagctcattcgtgggactgcactaatgtgaacctgatatactattgttgactgaactgatcgttgacagtaacataataagccaaatagtaattattaattaataatacaacagaaccatgagtatggcaggatgccgttcctttgcatcacagacatgtgctacgaaccttcagagagatgcaaagattggaaattggaatagccaagtcttgaagttttatcatatggatgcatgctgaggtcctgagttcgaattcccgtggaaatgaatttcaagctgagattaaaaaaatccctttgaccgactctgcgacaaagcacggcttaaggctcggcccacgctcacatgggcaacttggccgccatgaaagggtggaggaaagaagatttagaggttttcttgatctgcatgagattttccctatcaggcaatgcttggtgtccatcttaccccagcaatttttttggatgttgcatgccccacacctgctaaaaaaactgggaaataagcgaaaagtcatctgaattcatgttgcttttgaataatccctaggattaggaatagtgattggttttacttgttgacattctgaaatccaaatggacatatatgatgttgttttgaaaccaagcagcttctcttgccgtctggtaatacttgttgtgacataaacaggttcagatcgctcaggcat

SEQ ID NO: 7003 - DNA, 874 bp, Zea mays
  Intron number 1 from transcript GRMZM2G118714_T02 (locus G RMZM2G118714) derived from phytozome v7.0 (chr-ID 10; pos 12607279 to 12608152 reverse strand)
cccaccgcggctacattcctcaccccaccctgtcggtacgcgttccggtcgtccccatcacccctctggcctctgcgtgttgatttcttcgtttgtgcttggtaagaacgccctaaattgctgttttccctcccatttgggcctgttgaaccgttcctttgctctgaggccaacaatccgaatgtttgcctatgctttgacgctccgatccatctggtttcgttgtggattgttcgctgcgtggtgaggctattgcaaatgtaaagttttttcttagggtggttcagttgaacacctcgccaccataatacgtacaccgctgagagagagttcattgttgttgccataatattgtatcagaatgtcatgtgtgaagctgtacagtgtacactactggaatattagatgattggtgagcttgatgagccatatgagatgatcaaaccataattttgatagacaaaggtagcttcttgaatgctgtttgtaggatccgtggggctggggaagagcaggaagcttggtagtaggtgggttcttttttgtgctgcatggaattcaggattcaatggttttcatcaaggatttggatgtcactagcccgtcatattggcgacaaccaattcctggtattatggctggaataatcaaatatgggatttttgaaggtcgagaaaccatatattattattattattatcattttacattatgagccatgacagacttgggcggcctagtatttttttcactccatttttgtcatgtttgacttcattattgatttacttcacaccccaatgatttcactaccattatcttggtttgaactcaatttattttcctattgcaggctgcataaacttttaaaaaa

SEQ ID NO: 7004 - DNA, 650 bp, Zea mays
  Intron number 2 from transcript AC211672.4_FGT003 (locus A C211672.4_FG003) derived from phytozome v7.0 (chr-ID 1; po s 156348371 to 156349020 reverse strand)
attagacttggttctggtgttctctagaatagcacgtgagcgtatacggtggcattaacaatgattctcaacttaaactatgaagctataagaaaagatctcaaataaaatatagaaagatatgcattaagtaatggtagtatttctttttcagaactgcattgccttattatgaaaaccaaatagcagcaacaaactactatatgaaggccatcagtgtatttgaatgatctcacattcagatattcagattataatctgcacccatcttcccctaatttaaccagttctacaatgaggtctacgcaaaatgttgcattgatcttccattcatatattctctgtctgttgattctgaacctttatattctccaccgatcttccagtgattccactagttttacaattagatctatgcataatgttgcattgctatatatgcaaactataattcattgaacctatagaagaactcgtcttctatggaagcttatttcattttgaatgtgtatttcatggagcgccccatatggtgctaaaggtatgtttgtcacatagctaactttcatcattcattctctctatatttgataatttcattgaccttgctattttctcacaggtcaagtacgctacttaacctggtcaaa

SEQ ID NO: 7005 - DNA, 832 bp, Zea mays
  Intron number 1 from transcript GRMZM2G433077_T01 (locus G RMZM2G433077) derived from phytozome v7.0 (chr-ID 5; pos 2 16709547 to 216710378 reverse strand)
ggaggagcggtagcaggaggagggcggggaggtaggcgagaaggcaaggggcggtgctatcggcggagcacgcgcgcgagtatcatggagaaacacgcgacgggggcaacacgcagcggggaacaggagcgcagacgcgcggtggaggcagagggcgacggggcatgcacgagatccgggggcgggggcacgacaggtggggatgccgacaatctcgggcttgcagggggtggggcgtcgggcggaggcatgaccctccttgcagccttatagagtagtagtagataagtactgagcacattaattaatcaaagaaaaaagaagcagcatccaacatggcattatctcaaacacttgttgtgcttttaggacaggagctccactcctagaggagagatgttaaacaacttcaatgcttctggtgagtcacatcaatcaacaaatgccattggagaacaaggcgttaataatttaaccaacaagatcttaccctgctgtgtacgacatggacgtccacgaccgccgtgaaagtcgaccacgccgaggtccccagcatggacgtccacgaccgccaagaagtcgacgacgccgaggttctctagatcccgtatctcgcactcccccgcgaggtgtgaggacgcgcagcggcagcgggaggacacatgtcgtggaggcgtttgttgtcgggggatagacagaagggagtcgaggagcgcgagcgcgcggtcggctgcggcgaggtggggcggagcgggagggacgagagcgagagcgccgggtgggaggggcgtatcagtcgaggagcaaggagagcgagcaggcaggctagacg

SEQ ID NO: 7006 - DNA, 765 bp, Zea mays
  Intron number 2 from transcript AC199703.3_FGT001 (locus A C199703.3_FG001) derived from phytozome v7.0 (chr-ID 10; p os 34505495 to 34506259)
tgcaggtcacaaacagcacaattgtcgcattggtaagcagcacaagcaaatccacagccacctaattcaaatttgcttgttgtggcggagcattgctaatttgatgcataagaacggggataggcttcgatattttcagataaagacatctttatctcccaagtgcatcagtatcaccagaaaaacaaaatatcccaatcccacataccatcgaaacaaatcaataaatcctcttcattctccccaaccatttgaattcatatctaggttaatgagctgagaatgatggcaaggacatgctcaagaactccaacctgacaactcctccctcaagcaaaacgctctactgaatggatggttggctaggaaaccaagcattatgagtaatagtcaatatagtctggtagatcttcagatggtacacagtttgtgatccaggacaatttgaccaatctaacaaccatgctggaagaaattaagctgatgccaagttgacaacactaagtccatgaagcactggataggggtatgatggcagtggcggatccaggatttcaatgttgggtatttacaatgcaaagaaaatacttcggttgaaagatacgaagagttacagtagcacaaataaaaggtatatatagttcaaactagagatgtttagtaaaaaggggaaattacaaagcggaaatgggaaatttgatatcgttacctccctcggcgccggctgtagatccgccgcccctggggcttgagcagcaggccagc

SEQ ID NO: 7007 - DNA, 984 bp, Zea mays
  Intron number 1 from transcript GRMZM2G005199_T01 (locus G RMZM2G005199) derived from phytozome v7.0 (chr-ID 5; pos 2 5436790 to 25437773)
aggtaacgttttgttgcctcatgagttattcttctttgtttagattttatagtttcttctgtaattttgctatgcaacacagtttgaaaagtttgtttttgtcttttttggtgaatatcattaaacagtttgaaaacagaccgcatgcaatagtttgtaggaatgacaatatctgttacctttgatgggaatcataatctaagaaatttgtaaatctgtgcaaaattttgcatgctaatactctgttcaagctgcaagtgagcgaatggacatttttgtaggcagctttttgtttgaggcatgctagtcctcactatatgcatcattatcatgatacacagaatgaaatttagtaacgaagtcacagtaggggagatccttgatgtatttttctcatgaagttgtgaaaggctaattgaactgtttccattgtagcattataccctttgtgtcaactgctgctatactttctgcacttaattttttcattccaagtcttgaacttaatttttttcattcgaagatttgaacttgcttcttatacccttttctgtttgttgtttccccccttttgcagcgtgctttgaaggtaccacacctcaactttttgtgctcttgcttatttatgtttaacatttattcttgaaattttgtgcctctgtcataattgataccaatgtgatattccacaataacaatatttgagttatgctatactatcatcttacttgaccatacttataattgtccatttttggttgatcgcatacaaataggttaaaatataacctttcagaactatacgaatatatgttgtcatcttctgtcactctgctgcttaacacctgtacccattcaatgaaagcatcaaagcatggtagcaaaacaatggaaatgtaaatgtgcttgtaattcacttgttgaagtatgcaatttatctttttttaattgccatctgtagatagaaggacgtgttctgggggt

SEQ ID NO: 7008 - DNA, 477 bp, Zea mays
  Intron number 1 from transcript GRMZM2G456853_T01 (locus G RMZM2G456853) derived from phytozome v7.0 (chr-ID 5; pos 3 1581650 to 31582126)
gaaggcggcaaggtcgccctcaaggtcaagtactcgttgctcatcgcagtgcaagaggaccctgaaggacactgacgctttgaggcctccattgccatcgtccacgcctcaactctgtctgtctgttgtgttgccgcggtgtaaagttcagttgtgggcaactacgttgtacagaatacagtgtgcccagaggctgatgttttttggtttgttcacttagttcttgcaaatctaggaacagtttaggtttagatataatacagagaaattacctgattcgattgagcattcgatacatgagaaattagtgctggctgcatctgcaatttcatcaaaatttggcacggtcctgcaacagatgattttctttcgcaggtatgggctgcataagacatccacaaagcaaaatagaagaaacaacatctttgctttgtaagtttaggtacacattgtcctccccatcgtccaggtacatca

SEQ ID NO: 7009 - DNA, 746 bp, Zea mays
  Intron number 3 from transcript GRMZM2G109977_T01 (locus G RMZM2G109977) derived from phytozome v7.0 (chr-ID 1; pos 2 02994646 to 202995391)
caactgaagggtcttcaagtaagcaatcaactatcttcactctatgagtctatgttcttgctaaaggtagatggttagctaacagtcaccccaccttttaacttatatatacagtaagatcacgagtttgttgaatttgatatatgtttacaccttaccgaagtgagcatacgatgcacctttttttgttagtggaatgaattgtaagcaattatccatacactcattagaaccatctggaaatgttttgcttgtttaatactttcattactttgtgtcagatgttgcctgatatagctcatgatgattatatgataaaacaaccttagtgagttgttaaggtccatttaaacatataaatgaccatcattttagtttagcctagctctttagggtgcctgaagccctgaaccatgtagctgcctttttacaagaccacaacagcctttatttaaaacatgctgtaatctattctaagcatactcggatagtaaaacagtggcaggtgtttccccttcatctgttgatccatgtagcttgttcttgtgcttttgaagcttttagttgtttctaataataaaactatagatagtatgcggcaacatagaacataaatttactttttccaaaacaagagtgaggctctcctattttgctatttcttcctttttgtgaaacttgacatttcttttacataataaaaaatcgggcagatatactctgttatctttttcattatcaggttg

SEQ ID NO: 7010 - DNA, 856 bp, Zea mays
  Intron number 1 from transcript GRMZM2G145578_T02 (locus G RMZM2G145578) derived from phytozome v7.0 (chr-ID 10; pos 17169546 to 17170401 reverse strand)
acgccaactacgccacctgctcccgcctcaccaaggcaagccctcctctagtctccccgtcccctatcctagatcctagataggccgccgccgctaacagggctagcgctggtgggaccgctgccgcgccgtcccgggcgtaggtctggtctgcaactgatgattaagtatctctgtggtgatgcagagcaggccttggtcctgcacctggttgttcacttgtttgtgttaacatagcagttttgtattttggatggtgggaattgtgatgtcggaaacacaatttgttcaccactgatgcagcctatagtgaaagaggataaatgaatgctacatttgatactctcatgcgggatatgcaaaatttccttcaaattataaacatgaacacgaagacgagtacttgtcgatgaatcttgctggttagaacgttatgctgcttttactgtgtcaaccatagtttgattgagcacacatgcatggcgtccgaagataagcacaattgtcaatgtcatacttcaacagcgtggtgcaaccagctttttttggtggtagaaggacagctaatcaacctgcaaaagatggagccatacacaatgttgtgtttctgatattgacagacctgttggcaatacggctgacagttcttagtccttaggacatgagtagcctcattgtactgcacatatttataccttactgtattttcaatatggttttcttaagtcgttgtgttgcttctattgctccaggttttgatatatgaataatgctgagtagacagactaacatggaagcttatataatctgtttttatttaggaagcagctgcttctggagtgaaatttctttgctt

SEQ ID NO: 7011 - DNA, 625 bp, Zea mays
  Intron number 1 from transcript GRMZM2G130207_T03 (locus G RMZM2G130207) derived from phytozome v7.0 (chr-ID 5; pos 1 84703321 to 184703945)
ttctccggcccttcgccgccgacaagctcccccaggtacgcccaccattctcttccgtccatgctttgcgatggtgagcacccactacccaaaccctaactggatctgtcaagtgtttacatgtattttgcctactaacttcgttttttttaattatcggtgtacgtctatgccgtttactgcattcaactctgctcgtttgtttgattcagttgagcagtgacatcgtgagcttatatgctagtgtagcttattggtgtttcaagcaatgtatgtcaaatatctagattagcaatttataaaccacgtaaaaccgtgacagtatcataatggcataagaggttcttttattttgtttgaacattctagtcagagtaagttatgtatctgttttctacatgctgaaggttatactcaaaccacttgtgaaatggctctcaccctatatctttctttagtgaatcaatgttggtattttagtagtagacttcagtcgtcagccatacttagcttttttctgctagtactgtactaatgttttgttcctccaagagaccgggaagtaaaatttaattggttcatatctttggtttatcattgtgtttttttggctattgcagtactt

SEQ ID NO: 7012 - DNA, 410 bp, Zea mays
  Intron number 2 from transcript AC203280.3_FGT003 (locus A C203280.3_FG003) derived from phytozome v7.0 (chr-ID 1; po s 119994400 to 119994809 reverse strand)
tcacaaccgcagaagaagccttgcttcgtggaaaggtagctccagttcttccttgtctgctcaaatttcgtagaactgtgatttccttgcaaagagtaggtgcaatggcaacggcttggcagattaatcgattagttagggatagttagctcctgattccttttgttttttaccactaaatctcagatacccttgtcgacgctatttgtattgcatagttttaattctatagaacattataacatcaaaagttgaccacgcagtgtagttcttttaacttgttccactgaattcgagtgctcttgctccccgatgaactgtatgtagtatatttgagcctggcatttttcacctttcattgctttatccatgtgcttgctttgacatggtttggtgggtcaagcttgtag

SEQ ID NO: 7013 - DNA, 544 bp, Zea mays
  Intron number 4 from transcript GRMZM2G155962_T01 (locus G RMZM2G155962) derived from phytozome v7.0 (chr-ID 10; pos 110206844 to 110207387)
aaggtaaaagacgcattcctctccaagatgtatctgcagttactataagagtttgaggttctgaccaaaaaaataatagagaaatatgttcacatccttgagagaaggtttcacatttgacatttggacaaagagttattatatattgtaaggttgtgccactatagagccaaaagaaatgaggaaattaaatccagatattcaaattcttagccctgttattatacaatttactgtttagatgagtttatgagaaccccaacagcatattttttgaaaaaataaatttgcatgagtggactcctttagggctagtttagaaactcaaatcccctcctggattgaaggggattggagaggaaattggttcatttctacctcaatcccctccaatcccaaaggagattcgaggttcccaaagtagcccaatgtaaagtaacagggatttaaatatgctctatcttactgagtttaagttatcttactattctttgttcttgtgtatgcagggagttggtccatatattcaagaaatagaggaact

SEQ ID NO: 7014 - DNA, 770 bp, Zea mays
  Intron number 3 from transcript GRMZM2G107400_T02 (locus G RMZM2G107400) derived from phytozome v7.0 (chr-ID 5; pos 1 4731442 to 14732211)
acaggtcagtttcttttgtcgtaacacatctctttgatgctaaactcttagcgcaccgtagacaggaaagcttttatggctatttttaccatgcttctgctctgtagtttcttatgcattgtatgaagttcttcatttgactatcgtccaaaacttttcaagtcaactgcaaaatatcagtttgattgctaatgatgggatcctagtgaagcatgtcaataagaggattctttctttttataggaaacactaaatcttgtgatgtactccctctgttcctaagtctccagcgtattagtcatctgcacagtgaccaaggagcgctgatatgcttttactcgcagtctttttaaccgtgcactttcgaataaatctgcaattttggatcgtatcagagatgcagtgtttaagaaagtgagtttgtttcctgaattttatatttccaccaaatgtcattgattagcattgttacaattagaattttctacgtatatggtaataataacccactgaggctttgtttggataatgtagtattgacaccaatccactgaggctttgtatagtcattcccttgtgctcaactctttgtgatacaactatgatcagttgataaaagtggcacataacttgagcaagttttatattttgagtacctccctattgtaacatatcttgttacacttctaattttgtggctagaacatgaggtaactggtaagagagttcctttttcatttcatgtggtagggtttccaggccagttatac

SEQ ID NO: 7015 - DNA, 1035 bp, Zea mays
  Intron number 1 from transcript GRMZM2G116034_T01 (locus G RMZM2G116034) derived from phytozome v7.0 (chr-ID 5; pos 5 6779484 to 56780518 reverse strand)
cggcccgatccgcgctctcctctccgtcgcttcaggtgttcgcctcctccagatctcttgctgtctcgcttgttacttttttgtttgcttttcggcgtccgatctggtgcgacggcgggtctgggtccatctggcggtgctacccgtgcggatctgcgccgattcggtgggaatattagtgattttgacggttctggattgacgcacgggtttgcgcacggaaatactacctttcccccctttctctgacatgcggctttcagctcaatacatgatttttcttacgtaggatttgattgattttgtatgtagatataagcgttttccggtgctaatatgcaaaattgctagttttggtcatataaaactgtcctgggaagctccgtagcttgtgtaccgtgcttgagtattggattcaagctgtttgagctgtgggatgctgcatgcttgatggtaatgaattattctattgtggtaagtcaatttttttgtgaaagtgactatgagatggtcgcaagggtttgctacaggataaggttaaaagactgccctgccctatgtactagacgagccattcataccgtgcgaactgctaaaagctgttgctcgatttatcgagtacttgcaattatatcagcctgctgttaagaaagtgtaaagcatcaattgtcttggtatggttctgtttagattctttataaactgaagattgagttgagcatgcattttgtataaattgtagagcttgaataatcattttaagagtacaactgattccctattgattctgttgtgaattacttgtcttctagcatggtgtttgtcttaaacatttctttgctacacacttttctcgttgtaatctgtaggacagtttgttctaagcttaaactgtgccattgctcattatattgtatacatccttttgatctaggttcatgattaaacctttctttgtatttgtttgtcatattgtcaacatgtgctgtaacttctgtgtattaacatgtttcttttgctgcagtcatggcagga

SEQ ID NO: 7016 - DNA, 690 bp, Zea mays
  Intron number 1 from transcript GRMZM2G149238_T02 (locus G RMZM2G149238) derived from phytozome v7.0 (chr-ID 1; pos 2 58961177 to 258961866 reverse strand)
tccaagcacccctccggcatcgtccccacgctccagtaagtcccggatctgggtcgtctggggttaggggttgcggagagatcccgtgccgtacgtgctagggtcgcgcggcggatggcggtgcttgggttccctagaggctggagctgccagggcttgagtctgggcagcggggtgcctctctgtactgtgagtggtggtgtggctggtctgtatcgtgttttttgttcagcttcccgagctccccggtgctgggtgcatcgaaatgagctaatattgactttacatagttgggactaaaacgtgaattattttgttgtcatcctctctcggatctgacttgtgagaacgagccagggccaaactcagatctaattgaagtttgtattcttggcgtagtagtcacagcaagcataatctcttcttgaccatatttacattccatgttttgattcgggagcataaactgtgtaatgactaatgtgataagcagtcagcctcgcggaaagagattttgatatctcatctcgtgtcaagggttaaatgcattggttgatgtgagttgaccatgaataaaggtgtttaaagttgcctttggctcgagggggcaatccctttttcatcagtgtttggttttgggggtgggggtgcttgggacgtatcgtctctgcagtggcatattcctgaaat

SEQ ID NO: 7017 - DNA, 1056 bp, Zea mays
  Intron number 2 from transcript GRMZM2G016184_T01 (locus G RMZM2G016184) derived from phytozome v7.0 (chr-ID 5; pos 1 4336845 to 14337900)
cctctgtgctcattggcattgtcctctgcaaggtaggttgatttactattctggtgcccaagtaattgacttatagttcacaattgcattgagtaatcaaacttgatgtgaatgccgatccatgcttgcagcttactagtttgcccaggataattaccttcttagagattatttataacaaatggaagaccttttctactaacccaaatgagttgcatcagcttttatacccaatgatgtgaaaggctaactaccatgaattagagtgactagttgctgggttattaatacgatagtaagaagatgaactaagcatacgatattctaaatgtagtttttgtctaccatattcttggttcagttattgtattatcggtagttttgcttctaattgtaattccctaaccagcaatgttgactgaccattttgactttctcccttgcaaggcttatctatagagagaatgaactgcaaccacaatatttattaatgattccttctttaaaccattgactattgattctaatgtaacttcgtcgccaacattgtttacaaccatcagacctctcgctctcacttaagttattgtactgtggtgaattaatgctaactgtaattttctaaccaacaatgttcactgagcacttccattcttgacataaagatatactcgaacaagttctaaacaagtggtttaaatcagtttgcccaaagttgaacaatgctgagtccactatgtcctccatttcatgttatttttcaccccaagtcaaaaatgatcatgcaaattaaggatatagatgacaaacagaatgtgtggcgccagttataactcttatccaactctcactatgctttggtaacaacaaaacaagcctttagagtaatttatgtatgcgacagcatatatggcgggccttcacatttctggaccttgtgtgtcacggtaatcagttctgcattattcatagttatgcttctagtttgttgttttgacaaatggcatgctttctccttcaggcttacgatttcactcgaatattgagctcctttta

SEQ ID NO: 7018 - DNA, 814 bp, Zea mays
  Intron number 1 from transcript GRMZM2G069970_T01 (locus G RMZM2G069970) derived from phytozome v7.0 (chr-ID 5; pos 6 1841032 to 61841845 reverse strand)
cgagcccgccaattgggcgccccgcccacgccaaggtgcgacttttttgccttcctcccctcctcctggagccgcgtgcggcgtgccccaggactgggctgggggcttctgcttgattcgaatcagcgtgcctgttctattagttttcggcgcttgcgtgccctggtacagtgccaattttgtgttttttttggctcgtgggctaagagaaatcatgttttgttcctccaattgacgggggtgcctgtcatgtgtgtgggatgcacgtgcacatgattcagaagaggagtatagtgttctcggcgaaattaatgtgtcaattgtggtgtgcaatcgtatctttcaagtttccctgtttgattggtggtgatgatgcggttcatccgcgttgtgaagcataaggactcagggagagcttaataatctaccttgacgaggggaggaggttttgtgtagttatagttcctggggattggctttgattggcatttacatgcctctaatacatatatatttcttgtccggtggtaggagtcctacaaaattgtgcatttgtcattagatttttagtatttgaagttcgatgctagctttgaataattgttggattgacatgtcatgtttattcccatttttactctagtgctattaaggagtttcttggggtccaaggggtttagagagcagttatgccaacatttatataatacctgtagcgttatttgttaactggtatgaagaaacatcgttagccacttatccttgatttgtgcttccaggctgaaagtcagtggagttctcagttctcaccaac

SEQ ID NO: 7019 - DNA, 975 bp, Zea mays
  Intron number 1 from transcript GRMZM2G056505_T03 (locus G RMZM2G056505) derived from phytozome v7.0 (chr-ID 5; pos 1 76327613 to 176328587)
ggcaagcggcaggtgttggtaggcagcccaattcggtgcgtgttcggattttgctctgctcctatctttcctaggttgctttgcttttatcccacttccaaaagattttatgtggaacaagcgctaatttcaaaatttagcatggacatctttttcttgttttcacatgatctctacgaacttcccgtgtcagatttcataatttttcgtggatgccaacaagttttggctgaaatgattctcgtggccctgaaaatatagtgatattcttttccgcggctactggagtggctgtatcgtcgagtcaactgaatggctcttcccgttatcttagaaaaacctgctcaaaggtgtcaagcgtatgacttgagcaggcctcaattatgtacttgtgtcaagaaggtttgtacgggccagtatcatcactgaccgattcatgaacaatcatgcattaataagttattatgtgatatgtatctcgttttcccacaaaaaattttttgtttgcataacgcaacagcctatctaggggttgatagctaggaaagtcaacttgttcagccgagatgtcaacgtatcttcttctggagaacagaacatacctgtgcaatgcacaaactcttgatctcaagtaatcatggtggtcttgtttgtagttgacatcgtttttcttcttcattcatcagaactaactcttaacacccaaggcaaagttaattattgaaataaaatagaagtcatctatcagacaccagtataatagttaggtcacttggttgttttactttgtttatttaccttcagttattagtgtatcatgatctttgtggtctgccaacaaaatttagatcttttgatgaaaaaaatcctggtcaaaattcttcctaattttcctttttctagagcagaatctgatatgtgtttctactgctccttgcagtgttgtagtctgaagaattcgctggcggtggtgca

SEQ ID NO: 7020 - DNA, 811 bp, Zea mays
  Intron number 7 from transcript GRMZM2G113093_T02 (locus G RMZM2G113093) derived from phytozome v7.0 (chr-ID 10; pos 5741788 to 5742598 reverse strand)
taattatagtggacacggctggaagactgcaggtcatacacatgttgcttcaatatttgttccactgatctgtttcatttgtgataaagggcaactatgtaatatcttggatccaggtcataatcatactgaactttgaaaattttaggctgtactttacatatgtggttaaattgcactatttgttttcttgtaaggaatcaagttggtaaaaatggtctgaaatgttgactttgaatgagatgttgatattctgttttgagagacatgcagtaggggaatgccctactgtggtattatataaatacagaaagaatataaagataagaaacaatacagaagtgtcaagaagtgcagcagaactatacaacaggctattcagccaaatagaaatgctatggcttctttgaatcataaaataatatttcaactcaaaatgctattcagccaaacagagattttgatattgtcctatgcttctttgaatcttaaaataatatttcaaccaaaaagtggtagctccattataatattttaaagtaaatcaacaaataatctatcacgagcttctgtgaaaataagtgtttcacaacataaaactgtcttcatagcataatttcaatctagtacttccctttttgctaaactgatgcatgtcaatgtagttttaaacttttcgttttaaatttctttatgattggggtactggcagcttgctgcccctgcccttcatactttttgcagtgaatttgatcagttccactgatgttaattcatctgattaatcttgtgtcactaggtagataaagca

SEQ ID NO: 7021 - DNA, 549 bp, Zea mays
  Intron number 4 from transcript GRMZM2G027135_T03 (locus G RMZM2G027135) derived from phytozome v7.0 (chr-ID 5; pos 3 0758137 to 30758685 reverse strand)
attttgcagatttcttctccgacaggtgttatttccattctgtcttgtgatgttaatgacacttatccacaacttgttgacttcatgccatggcatgcaaatcaggttcagcattttgttacttaaataaacacactaatgggagcaaccttcaaatgcgccctttcttcttctggctaaattcagatgatggatttgagatagctgaaaatagagattttgatctgtaactgccatgagttgttaatgctatataatcggtcatttgcacagattacttgagttaaatattgtctcagggctcagcatatttcatttaggatattgccatcagttgtttacttaagcatttccttaaagcactactacttcattttcatattgtctcttaacaggcactttggtttggttccactttctactatacaaaaaagtgaacaccagcacatcactgtaaaattaaattctagacttgcagttattatgcttttttgtatatacaggtagctctgacctgttgaaactgtcataggagctgccaacaaagat

SEQ ID NO: 7022 - DNA, 725 bp, Zea mays
  Intron number 4 from transcript GRMZM2G074898_T02 (locus G RMZM2G074898) derived from phytozome v7.0 (chr-ID 5; pos 1 9125509 to 19126233)
tacaggaagcagcacaagaaggtatgtgatattacctagccaactttcttaaggatgtcatccattcatttctcttatagtttccatgccttttggttatagaatagctacagttttcctgtattaccaaaatttttcttcaaccttctgagttgagccgcgatggtatgatccaagtttgatagttttgttgatttgattttttgaatgaaatgattttaactttaaagtcttactaagctagcaccagggttccaataaaccttagatttgtacattttcttgccattctggggttttgattgatacgtttaccatctgtatttgtgtgtttatacacagcactgatatataacataaactagctaaccaacaagtgttaatgtacagttaatcttatgcactcgtttcaaattataagtcactttgactttttggtacatagattttgctatgtatctagagatatgttatatcgagatgcatagcaaaattgatgtaccaaaaaaagttaaagtggcttataatttggaaccgagggagtaatgtgattgttgcatcctttgaagttttatccgtcatcactgtctttgtatctatctatctgatgcatgggatccaactagacgattgcaacaacaattgtttctgccatgctaacaatggtgctagaagtctagagcctctgatcttaaatgtatttgtcatttgtctgtaggacatcc

SEQ ID NO: 7023 - DNA, 736 bp, Zea mays
  Intron number 7 from transcript GRMZM2G001033_T02 (locus G RMZM2G001033) derived from phytozome v7.0 (chr-ID 5; pos 1 82191121 to 182191856 reverse strand)
agaaggagattctcagttattcaggtaagggtaacattgatattatcttgaaataatttctgtttaccttaaagattgggagtaccatgtgctaattatttgtgcttttagactatgtcttttttcatattctttttttttttgcttttgttgggcgctcatgttggatttctactctagcctacccaacttggttgagactaaaaaactgtcttctattctgccatatgtatgcaatataaggattactgaattaagctttacctgtatggtttcttatgtcttctcttacccaaccatgttcatactatggagcatgggtaattggattttgaacataggaatgtactaaccgttcttaaaataaggcttaagtgccaggataagtagtatgctcttgttcatctgattatgagcttatgtaagcttattttggaagttgtggtgtgttacaacttacaaacaagtttgtgtcacaccttgttagatattgccatattagccatgttggcatgtgatgatatagttttaggtgaaaacttgagttcattggaaattatgtgagcttatgggtcttctccacataagcataaaaagcgagctgtcaaatgctgtacttttaagaatgcttttgtcatgtgcaacaattctgacttcaagctatgttgacctttctatcaacttttttttaatattgacagtgggaagctcttgctttattgcttattggaatcag

SEQ ID NO: 7024 - DNA, 911 bp, Zea mays
  Intron number 1 from transcript GRMZM2G569855_T02 (locus G RMZM2G569855) derived from phytozome v7.0 (chr-ID 5; pos 1 0800499 to 10801409 reverse strand)
cttcttggagcacacaccggtctctactccagccgcaacattcgaaccatcacgacgctgcgactgtggggggatttcaacccatcggctcctaccttcggcctctactccagtctcatcgtgtgtggtgcccccgttgcgactgcggggggatgttagaccgtgtgtgtgtgagtgtgtgtgggccggcaccactgttgggttgccggcccattagggttagggttgtgtctctatacatattgtatctcatctattatcaatacaacatccactttcatattcctacagttagtaatggctccatcttctctgtcacctcagtgtgtgactcggttcttcctgacccaaaaagaacgccatttgcatatgttttcgagaagaaggaacccttatatgcattattaaagataattttccctatctagtattttaactgcacacactttatacataataaggttcctaatttaatttatttgactgtatttagcatttatatgtgctaatttcaaattcattgaaaggtccgtttggttgggttgtggccatgaaaaaagttgttgtgggctgtgaactgtaaaaaaactaaaaaccatttggtggaagccgctaaaaaccagtaaaaagatgttctatatttttgcaaaggtcttctattcgaaagccgctaaaagcaggtccagaggtgttttcagttttgcgctgtgggcttttgaaaaaaaaatctgatggttgaattgggccctttggtttgccttttggcttttaggtgacataaggcatagccaaaaccaaaccaaacacacccgaaaactactactccacctttatattttctttactttccttagtttttttttgcttggtgtataggtgttctcattcaaattgcggggagcatacaacat

SEQ ID NO: 7025 - DNA, 561 bp, Zea mays
  Intron number 2 from transcript GRMZM2G167431_T02 (locus G RMZM2G167431) derived from phytozome v7.0 (chr-ID 5; pos 2 00380876 to 200381436 reverse strand)
ccctcctgacactgaaactccaggattggaagagggtatgcgttgcttatgaacaggcaaactacatttaagttcatgtctgcttcggtagcaactaaaaagttaaccatgaatatttgagttaccctcttcgatttaatagccaagcttttcaacttggcaaaactgaaaatatcagagctatcttctataaaaatattgtttattattactcacttcagcaactgatctcagcaatcggtaacacttacacttgcctgtaaatcagtactctgtatattaaaactcatagaccaaaacatgttgctagtgaatatttcacactttcatttgtttcattcggtgcatggatcaatagtgtgctctcatttgtttcattagtacaagtttcatagtatcacaaatattttttttgggtgggtgggggagtagaaaaatgtcacttaagtttggcatcctaagttctgaagacacagtcaacatatattgctactgaatgctgagcatgtgttttgcctaatttcagagcataagaggaggccagaattgacaaacatcata

SEQ ID NO: 7026 - DNA, 384 bp, Zea mays
  Intron number 1 from transcript GRMZM2G126957_T01 (locus G RMZM2G126957) derived from phytozome v7.0 (chr-ID 10; pos 142468010 to 142468393)
gtgaaaaatcggaaggtaatacatagtaattttccaattcctgatgctgatttggtaagatgactttcattgttcttcagcatttgctgcatacagagctttgattatcaatacagtagatttttcttgggtcttgaccatattcagagggaggtcacaaaagaccctctggctacaatttcagtgggtttgtcataggcttattttttttattagcaaattgttctggacttgtgtcaccaagcatttttgtaagggtaagactaataattattttgtaattagctaacatcaagcattttcttggcttcttcaacatttttcttatccttcattaaccatgtttcaggctgcaaaggagggcgagcctttttgggatagccc

SEQ ID NO: 7027 - DNA, 742 bp, Zea mays
  Intron number 3 from transcript GRMZM5G841878_T01 (locus G RMZM5G841878) derived from phytozome v7.0 (chr-ID 5; pos 9 0323399 to 90324140 reverse strand)
gaataaacaatcaatagctagagaaggtagctgcattctatgatttcagtgaatttagatctttagtatgtgcttcttggtataaaattatttatagattcattcatttgatctaaacaggatgcagctatctaatatctatgacattctagcagatatttgagcatatttacaaattattgttgtagaatcgccttacctgacctttgtcatagctatcaaggagctttcaataggctttagcggaataacaacaaatttaaaacacctttcgtaccaaacctcctccccaacactaggtcaactgatgatgattctcaatcacaataatagaataacaacctatgagttgcttcacccaaaatttgtgagcacaagtatgtctatactagctactacatatatggccagtgtgtaactcgaaccatgtcaggccacactacaaaacatcattaagcgtagcaacacgacatggtgctaggtcacaaggaattctcctggttctgtgcgtgctgctacattgtcattttgctactctccaccttgtactgggcctccaaattttgctagctccaaacaattaataacctagaccggtgcaaaactaaaaccttaatgtggcggtacattgttctctagatcacttgctagctacaaaataaattatctggcagtgaaaggcattctgttagggtggaagattattttgattattaattatgtgtttgttttggtaggtgtc

SEQ ID NO: 7028 - DNA, 640 bp, Zea mays
  Intron number 2 from transcript GRMZM2G141302_T01 (locus G RMZM2G141302) derived from phytozome v7.0 (chr-ID 5; pos 1 49707973 to 149708612)
gatcccaatcatatattgcaaaagcttatttactggtaagaaaatcatcattggttactgaactgcatagttgacaaatctttgattgtttaatgcttctagtaaattcaattttaccatctctatttactcataaagttgtcccctaatttattagtaagaaaatgatcattggatgtcagagctgtttcctaggcctttagagaagtttgactagctttcagtcaatatatccacaattctatgttgtaaattatagaccattttgataacagtacaaaatatgtcttctagtttatttattggagtttgcttcctcttttcattgtggctgcattgcaactactactgcagggaaagcagcccaatgccaagatgtagagaaagcagcctgctgccatctctgtcttttatctttttagatgatgaattagcactgctcatatctactagaaatattatttcattcaaccgatttagtactgtccatatctaaaatgtattgtaaatcttttaacaaatgttcaatcttcaatatatgtcatattgaaatttataaatccgacttgtacattatgtgtcaaggtctctattctcaccagattcattttctcactttagaaacaagagaaatataagg

SEQ ID NO: 7029 - DNA, 927 bp, Zea mays
  Intron number 1 from transcript GRMZM2G026892_T03 (locus G RMZM2G026892) derived from phytozome v7.0 (chr-ID 5; pos 2 3267613 to 23268539 reverse strand)
ctttcctgcctcggcttgcaccttcaaccttacttgtaagttccatcgttttaactctagagaggctttttgctcgcgaatattttggaacgaagatgctccgccttgattttggtttagctgttgttaatctgaatcgtttggttgcgtttatcgtggatttggacgtcgagacgccgctatatgaggaattaatttgattttattgcttatgataggggttgttgtcggttggcgggttaccgttcagatctagtgtagtaaaattgcagtggtgatgggaggagaggagtgggcaagttaggttattaggtttctaggtccatgtttgtttatttttttggtgaggatggtttctggttcacctaacggttgaaagggatgcgtgctgacttggcaaaggtcgttgtgtttttgtttgtacgtacgagattttttttatatctacttggctaattttaaaacggttcaaggttcaatgccactatgccggcggtactatctgcatctcagattcgggtttggtaccatgatttttttacagatttggccaaactgcatgaagttcagtggattatgtcaattatagagtcaggcgcctgagtgaacctttacagattttatgacgtcgagagttgggtaaagttggcgcgaaatcgttgcgctatgatttatttatttatctgtagttacgctagattacacactgtcggttaatctgttcctaatttcctatcacaatacaatcgccaatgcacagttgactaccttttgttccgcgtattgctcagatgagttggctcagcagtagcatcaagaaaaaacacattgtggtcatttccaacagcccccaaacagaactctgaagcaatttttttgttttgggttgcagaaagctctgacctcaaactgaaagggacctgcgaa

SEQ ID NO: 7030 - DNA, 741 bp, Zea mays
  Intron number 1 from transcript GRMZM2G445958_T02 (locus G RMZM2G445958) derived from phytozome v7.0 (chr-ID 5; pos 2 16616108 to 216616848 reverse strand)
cttggagccttggactgcggacgtaagcggggcagtgcgggtcgatttagaacaaacagaagggctattttgaaaaaaaaatgacgtataattacctaaacctgatgctttaggcctcgtttgggagggcttcacctcctctgtaaacgactctggctccgactcttccaaaagagcagctcttccgtaggagcttatgatttttataaatcgtttggcaaaaactgctgcttcctgctgtaaactgatgctaactgctgatgcattcatcaaacaaaaaaggacaacattagctaactgatgcactactttcatcattcatcattaaaaaaatctaaaaccaaatagaacactgtttgctgctactgaaactgaacagaacgatcaaaactgatgcactgcattcaccattaaaacaactaaactgcattcaccattaaaacaactaaactgaaactgaacagaatagtcaactgatgcactacattcgatggtgatagagattagagacagacgcaggagagatggctgttgactgcgctcgtacgtggagccgtgcggagccaaaattttaggctccggctcccagccgtatttgggaaggagccggagctagagccgcccaagagccctcccaaacggccacttaatatagtagataaatatatttgtttagatttaaaaaattgtttgaaccaccccacagtcagtcagtcactcacgctccgttggcgggaagca

SEQ ID NO: 7031 - DNA, 626 bp, Zea mays
  Intron number 1 from transcript GRMZM2G176277_T01 (locus G RMZM2G176277) derived from phytozome v7.0 (chr-ID 1; pos 1 11548268 to 111548893 reverse strand)
acgacctcgtcgccttcccctctctccctcaactcgtaagcactgctctagtccctgctcctcctttctttaattcctattgtctcgatcctcgtatcaccctagctacccgatccgattctataatcagtatccctaaataggtaggaagatcgagaacttacattacctccaagtccgaggctaggtcgatccgatggaatgtgaaacccagctaagctactgtctgtgtttagttcctttcgcttaacaaacgaaggaggcgacggtgctttatattggcaagctgctactgctacattctcgtactcccgactcccgagtcctgagacgtcgactcgacccgtcgtctagtgcgccaactcaagaatataatgagctttcctcttctttcccacccacattcgtctctctccttttcctctccttttctgagataggataagaatttttttttctttcagaattactttatactgaaagaacggctggagttaatcaattgattgcaccatggatttgttttgatttgattccaccccattccagaaaacataattagcgaatatattctcatcttgtcttatttagtcctctgtcagccaactgaccaagcatcgtgccgg

SEQ ID NO: 7032 - DNA, 765 bp, Zea mays
  Intron number 1 from transcript GRMZM2G468693_T01 (locus G RMZM2G468693) derived from phytozome v7.0 (chr-ID 10; pos 132534541 to 132535305)
gtccgcgtggtaactcctctcgtcccgagccccttttccacgaatccgctggctggattctcttagccgcttcccctccggggcatatatgactttggatttgagctagttcgaagcgcctggatccctggatttgggcttatgctctcttttatatgaacctagtctcattcctctcgatctagattctagaaatggaagctctacgcgtttcgttttatgtcggaactcagaactcagaaagtggagcaagtacgcgactaggttgcgacttaatatggatgctgtccgatagatgaccgtagcaagcatgtagatagtggctcatgctttcgcgttttctgctttcagtgaaggaacgcgattatgaatcattggtggaaacaagtactaaattgaccaaataaactctagaccttagggagttagctattttttgactttaggttcttcggtattctgttgaattttatgaatacacagtatcacttagtaaatgaacacgcaccgtttcccttctaccaataaactttagtaaccaatcacaagttcaaaggtgttgatgaacagctcaagagaatcatcaccccctttagcttgtgtcatgttgttcatctcatggatatgaagttttcgatcgatctagttctagtttgcgtgtctgaatttttcctttgcaaaattactctcaaatgtagatctgccttatcttgttaattgttttttgcagggcaccttgccatttaggctactggctgctgaata

SEQ ID NO: 7033 - DNA, 778 bp, Zea mays
  Intron number 2 from transcript GRMZM5G813470_T01 (locus G RMZM5G813470) derived from phytozome v7.0 (chr-ID 10; pos 10884579 to 10885356 reverse strand)
tgagtggaggtatatttatttggctttgtaagaaggtgcgtaacaattcttcttcatttttctttgatactattactgaccattcatatcaaggagtttcatcatcttgcaaatatcaagccacatttcagtggatttatacccgaaggaactattcgtgaatgtcatacaagtttgttcaatagtaggattttgtatggggaccaatgctataatcatctgatacacttcccagtgataaacaaaatcaaggttgctaaacactagctatcttagaccttgtgaaaggcctattcctatatgtctagatatgttagcagttgctaaacaaaacatatcattgacatttaaaagggcgctaatgtcaaaatatttgtcagcatagtggtgctagcaatcatataaaacccacttatatggtctttcacccaaagatttttgtagttgtcagagttgatgacagtcacagttttagcaaccgcaaaacttaaatgggcatatttgagcacactgctcacataatgtatgtgcacacacacttccctcatatgtatgcttacaactttacaaggtagtgtgcaggatgcctaaataaaacttaaagtacatatttcactttacacttacattttaagtgcgttcatcatcatatcaaatttagctggtacttatgttttcagattaattgggataacctgttcttcattatttttttatatttatttatctttcataacataacttatattatttccctgtctgcagtttcttgagcaat

SEQ ID NO: 7034 - DNA, 556 bp, Zea mays
  Intron number 1 from transcript GRMZM2G375002_T02 (locus G RMZM2G375002) derived from phytozome v7.0 (chr-ID 5; pos 2 17600770 to 217601325)
tgctcatctcctacacatccaacactttccccactgtgagttgagatttcttcttttctttttgagcctttcttccttcacgcactggccctttgggcttttgccagggagtaggagtaaatcggttcccctgctcacacagggactatggggaggggattgttctttcgcacattgatttctacccaatcatcatctagacaggataggtacagctcagctacgcctcccgacaaattgacatagaaacctacccctgttgatttctctaggagggcgaagaaaatggaaacacagttctaccatacccgctatcttagctcgacgttccctcgtatctattttgggaaccacataatatattagcgtttcttttcgttccctcggttgttgtgactagtgagatcagagccacacagaatctctaattatcgttcccggccaagctgtgcccacagacaactaacgggacgagggtttgttcgtttgagttgtcttggctacaatattatgcagttgcttatgtctgcaaggcgcatctcaatgctgcaggact

SEQ ID NO: 7035 - DNA, 902 bp, Zea mays
  Intron number 2 from transcript GRMZM2G145594_T02 (locus G RMZM2G145594) derived from phytozome v7.0 (chr-ID 5; pos 2 04426251 to 204427152)
gcaggccaggcacgccacacttgtcctctcggcagtcaaggttttctcatcatgaaatatctccattcactaaacatcgtttgtgtcattgcggattagtctgtcctcgggttgataggtcggtgaatggtgatgaatccaagggcgtacagtatagatttgcaaatatgatgaagtatgcgtgcattgattattgagatggcaaagttatataaagctgagcttatagcatttgcacgtgcagagtgagggaactggatatgtcatttgtgacaataaaacattgatgcattggcactcttaaataatgttgatttcaactcatgggagtcatatattcatctatgacatttatatctacgttttatatctttatatttttagattaagtaatgaagatgaagcattgctggatatattagcaaatggaatatggtggtatgataatatgtaaaacttggacatttagatatgttatacttttgcatgtttgcggtaaactgatcaagggattagcaagaaactctagtcattccaattgaggttgcatgtagaatctgcagggacctgcaatttgggtaagagactgggtcaagtggcgatagaagtatgatgtttaaaatcgcggcagttaccattttgatattgaactgagctggttcttagttcaaatctgattaaatcctaagatgtctgaatgtagttttcttttaacgatggcggtccataatctcttcactctctgttctgcacttgcttcatattgatattcttcttgtgtatgagttttttccatttaacttgcaatgcggaccaatacaaatctctattttctgaccacctaattatttgtttctattaactggtgctgtcttttgttcaggaaatatcgaagttcagat

SEQ ID NO: 7036 - DNA, 842 bp, Zea mays
  Intron number 4 from transcript GRMZM2G157272_T01 (locus G RMZM2G157272) derived from phytozome v7.0 (chr-ID 10; pos 77469933 to 77470774)
acaaccatttagtttcggtgaatctcaagaataaggtaagataaagtgtgtttcacattccttgttttgttatttctttatacatattcacaaaagttttgttatttctttatacatattcacaaaagttgttatttctttatacattacttgtctccaatgggagtgacatgtgacaaattttttgaggatatcagctgagctgataattgtttaggtagcttgaagtttttggtaccgctcttatggctgtcctcaaaatttaatattctatttttctgatggaaaatgtgttctaaacatactgtatggatgggatgggctcaagacattttttgcccttgatcagcctctggcactaagcccagaagattgaacgtactgggctgggcagtccatatatcagtaggccttagcttgctggcttgatctcatgtgccatctgttatttcaccatagggaaatggaaaatattattcatgtttatgaatgccaacacaccatgactgacacttcaatgaagctaggaacaccctatcctagcctggtgtttttcttttttttaaaagaaagtcaatgtctcttatggcctacttagaagggcagacctgatgtagtggtgagagctgtctcattgagtcacaaggtcatgcgtttcaaagcggcctcttcacatttgcgggggaggcttgcctcagtttgatccctttttcagactctgggagtctccggcacatgatctgtcttgccgtcttatggctacctgttgtctgaatatgttctgattcttcatgttgtcagttttcttatggatgtttctcttccaggcactaactcctcac

SEQ ID NO: 7037 - DNA, 442 bp, Zea mays
  Intron number 3 from transcript GRMZM5G834778_T01 (locus G RMZM5G834778) derived from phytozome v7.0 (chr-ID 5; pos 2 15304835 to 215305276)
ttgcaaaggtaccattttatccagtccagtccatgttttatgactttcttggatttgcatgatcaattgttctcgtatcctctcactgccccaggaagaacaaatagcatgtactttgactacaatattgaaaaaaagattttgcatgtttgtggatcaacagagtagttatatataaaagagaaacaggcacgatattttggcaatgagcaaatgcagcttacagtgtagatgtctctctcaggttcagatgcaaacacatccttaactagatcgatggcctctgactccgacaatggtgtgacagcatcttgtgcacattgaaaatatttcttaggctatctgctgttagcgttatttgtagtcaccattcacttgtatttgtgaatgcaaatttgattaaataggtgctcattgaacagaaccaccgcgagaaacacac

SEQ ID NO: 7038 - DNA, 862 bp, Zea mays
  Intron number 3 from transcript GRMZM2G170291_T03 (locus G RMZM2G170291) derived from phytozome v7.0 (chr-ID 10; pos 84261088 to 84261949 reverse strand)
ctgggacagctatgtttataaagaaaaagtttgagcctaagaaggtgtctttcaacttggatagaacatgtatgtttggagatgatttcatattatcctagctctgtacacaattttctattttctatgctaatgtagcagcaattctgttttgcatattatagttttatgattatatttcaagatctggtttagtaactgcttgtaatttggtagtcgtagtctatgacaaacctgtccaaacttattgttttttatttagatttttttgagaagaaagaaaattctattagttgaaaatcataacagagaaaaacatcttacagactgtgacagccagtactcatgcttttatgccatgggctagaagagcatgtgggtgtattatgccagttataaagtcctaaaagaatatgaccactttgatagattgtgttggagttaggataatcattgcaagattatgttgcaaaacaatactcaaggcatgcctctgtgtaccttttcatcttctttgatatgtttatgcatgtttttttctatataaaaacttaaattaaggaatgaaaaagtccaggccaacaagctctttaacaaataggcatattgaattcttatttgcttttaataactaaattttacttgcaatatagttcttagattccacttccatacacttttcagcttctaagcatgaagccgatgggcgtgttataattgcggaatttgaatcattccttttactgaacacttattctccaaacaatggatggaaggaggaggaaaatgcatttcaaagaagacgtaagtgggacaagaggatgctggaatttgttcaacacgtggataaacccttaatctg

SEQ ID NO: 7039 - DNA, 956 bp, Zea mays
  Intron number 4 from transcript GRMZM2G305321_T01 (locus G RMZM2G305321) derived from phytozome v7.0 (chr-ID 10; pos 146596111 to 146597066 reverse strand)
gcgcctgaggtcggctattgactaaccatttgttgaatatgatgtttctactgcattcttgccctctatgccacttagcatactggagtaggttattatcttaattttttgcgtcttactattaaatgtgttgaaggttccctggttccattgttttgtggatgtaaaatctgtggaatcaacaaatactagggcaaccattaatttaacattagttcatcaagttgaaagctcaactcatagaaaaaaataacaatgtctgcttatgtgggggacacattgtttagaacttgggaagatgatcatgaggtcagtagaacttatttacaccaatgtgttacattgtttctggaatcctatatgtattttcaatatttggtgatcatggttttgcaaatacatgccagtggcaccacaaaagtataggtttctaaaggatgtctggacacaaggttgactcaacatatctagtctaggctgaagagttttacttacatattcaactaggacaaatggactgatttaattcgaaaattcacataactgattgtgtttcttactccgatagatatatgggatgatattaattgctatgatggctactatggtcttatgtctgtcaccataaaaatgtatataattgcattttaatgcaatctatgatttgagtttcattcatcatcttatcaacgcatgactaaagaagggcatacctagtatcagaggctcccacatgagtgggtatagggaagggataaaccgaagcaagcctccccccctgcaaatgcagataggctgcttcgaacctgtgatctgatgactcagtgagagctctcaccattgcaataggcctgcccttccttatcaatgcatgactacattagttttttaatacattgtaggatttgagtttcattcatcatcttatccacacatgactacattaggtcattgaa

SEQ ID NO: 7040 - DNA, 906 bp, Zea mays
  Intron number 1 from transcript GRMZM2G131723_T04 (locus G RMZM2G131723) derived from phytozome v7.0 (chr-ID 1; pos 2 30204280 to 230205185)
tggtgtttccgcacttcctgtcaatataataattggtatggaacaatgtttctcttgtaccatattctaatatccttacagttctgttttttttacccttttgttaaattcaaaaagacatagaggaagtgaggacatgaattaactttgttgtacctgaccttaggttttgttctctggcaacaggttattgactactctcctctttcataagttaaatgttcaaccttacattattagattgacaaatatgagtttggagctacattttttgtgtaaaagcaaagttacaagtcactggacgtaattaagtttcatgtgatgttcttgctaatactgttacctagtatcattttcttttatattatcatcatgttcacaaatgactgacttagtaattgtattttgtgatggtcctcgtctttaagcctcaggctcagtcttagaatcacatgaaatctcctagttttcaggggaagacaaaaaagaaaactaaaaaattatgacttctcatatgatttaagtaattaaagcgctggaataatgggtccatggaatagccatttctaccaccctgtgtcccaaattataaattggaacggagggagtagttttctttgagattgaatgggagtagtgattatgtatgtatcagcatcaaactcatattgacagttagaaatttcgtcagattatatgccatgaggaagggcaatgtctctgaaacatgtcccgttaggtttactagcaatcaacatgtctgttacgcttcatactttggtttctactacattttctttgattcaattgaaagatactttgcacaatgaatgttgttcgttgaataacctgaccagcatgatgtttgcaggcgttcttatagttctcggattgggcaccgccctt

SEQ ID NO: 7041 - DNA, 804 bp, Zea mays
  Intron number 4 from transcript GRMZM2G451179_T01 (locus G RMZM2G451179) derived from phytozome v7.0 (chr-ID 10; pos 111313177 to 111313980)
gaatacctcaacctttttgagatccgtttgaattagcctcaaataaacaatcttataattacccaatacacagaaagcaaaatgtttggatcaataattcataaaatttatctgatcacgagaaactctaggtaaccaaacgtggcctaagcatgaatgcatgatgacaattgatgacagtgatgtgactaatcatcacggtccttcagatgaaaaaagattgttggaaataactaacacaacactcatgatcgatccacctttaaccgacaagcttaaacctctaataggctcttcttctagccacacatcagcctgctggaccagtttcagcgacacctaaggtgtgatgtgcctttcatattttcctacaagaatattccttaactttgtgctttgtttttgcatgtcaaaagacttgttgttatggcatgcaagttacttaaacatataaaataaagaatattctcatatgaatataacacaataagagtcatgtagcttggttactgtttcagtcttgcatcaacacaattcatttattgtttatcttcaggaaagtagcacatggaatttattccttagtgatgatccatttttctctatttaacattgtctatatgttttttcctgttgggctctcaattctcaagtagctttattttacaatgaaaatttcatttttgaaacaagttattgaatacatttgtgtcagtggacagttgcaagttgcattggttcagaattttcagatcttgattatcatcagccatttttttaagaaaaatacaatctattaccgtt

SEQ ID NO: 7042 - DNA, 973 bp, Zea mays
  Intron number 2 from transcript GRMZM2G181453_T06 (locus G RMZM2G181453) derived from phytozome v7.0 (chr-ID 10; pos 124841922 to 124842894)
actgataagtccaaagtaagtttttttatttgtattttccaagggctcctattcctaaaaatatatgtgatttactgtaaaatcagcaaacattttatttcatcacatgttcagtgcttagaggtgttgtcatccctaaatttgtttttgagtaaaatgcaccacaggtacaagaactagcgaggtgggtaaacttatagagcttgaaatttgctaaaatctgtcaggaattttcttcaaatatgcaggataagtcaaaagcggaagccatgtcatgtctttgtgcacacagcactaatatgccatccacttttacaccatctttatctggattttaacgtacaaaacacagataatcagaacaatgatctgcaagattctatctagtagcaccatgagcacaacattcaaatcatccgttgaactagctagagaatgataacttgagtggaacaaatctaggcatatatcaatgttgggtaccccatccagtgcttcatgtgctctttttttgttggatgttttgcctacacgaaccatttaacaagtttaaataagttatttgaacaattgccaagtcctatgatccatgtgtacccacctcataagttgtacttgtgtcatttactctttaatgtttcaagtcaatgcatccagaccagcataccatgccatgccaattgacagaaaaatcatcaaaacaccaagcagagtccaaaattcaactcaaggaactcattaagtcagttgttaaaagtatgttgaggccagtactcagtaatcctcatgcacttgcatctcgcaaggactgcaaaattttgaactatagtcttgtatcttattcacgcttttctttcatttttacaataaatgttcattttgtgatgctgcattttattttctgggtcatttgtgattcatcgtctattctattttttaaactacaatccaggatttgatacagccgagttca

SEQ ID NO: 7043 - DNA, 691 bp, Zea mays
  Intron number 2 from transcript GRMZM2G173649_T02 (locus G RMZM2G173649) derived from phytozome v7.0 (chr-ID 10; pos 124324770 to 124325460 reverse strand)
acttctgccttgggatcccttttggtaagttttattttcaatgatgtataactttactgtgtgctttggataaattgccaggagaattctttgttgtaaaaaaaatgttaattttattataaaatatgtttggcatctttcaaggaattaagagctactcatggcataaattgtcctaagttgttctaaatgtggtgattgctaacatagtttcatttccttgatagcaaagctgttttagattcattatctaacatgttaggttatagagatctgatattctgatgtggcaaaaggctcctaggaagctaaaagccagaagctcaacaaaagacctgtatgtttgggcttcctgggagcttttggacctttcaaaagccaaaagcccgaaactcactacagtgaacttttgggcttatgggagctgtttggctgttggaaagtccaaaacctagtagtctaagagtggccaaaagctcaaacaaatagggcctactggaaatactcaaaatttgatgacaaactcttccactggccatgttcttctcacatgcacggcatcccatatttctgagtggttcagtgtttctaggttttggaaataccaacttgtttgtcatgcatgtatccacattcagataagtgaaataatggtacttaatttggtattgcaggtggtcttttattctct

SEQ ID NO: 7044 - DNA, 818 bp, Zea mays
  Intron number 4 from transcript GRMZM2G061817_T03 (locus G RMZM2G061817) derived from phytozome v7.0 (chr-ID 1; pos 1 3161809 to 13162626)
aatatcgtaaggagagtgcagacgttggacaagtatgccatatcttcagttctcttatgatgcttcagcgctgcatcttcagttttctcggctaaaaagagatcatagtcaatagtatacctatgtgtgaaatactgtcaaacttgcatggtatatggacctcagaaagtataggaaagcgctatgctatttgcatgtttgctgggagaaagaaaagatagatgaaggtaattatacagtttctaatacattgttcagcttttgttatttatgccatatgatacacactggtcatgaggacatgtcgattgtagttcactggtattgttttttttgaaaggaagcggcaaaagacttgcctcttcattgtattagattaggaaaaataagataatccacaggaccgaaacacacaccggaagagaaaaaacaaaatcaaaatacaaaaaaagttcaccggtattgtaagctttgcagataagagcacaacttttccccctcttttctaaaagggaagctcatgttcatttcagcaattcagcttcaaccatttggcattcatgtaatatttcataggagttaaagggcacatacctaatcaagtctgtgggtctccaattctgaaatagaaagataatttatgttctcatctttctgaaatgaacaagatgactggcttatgggttaaggtttttttatagagcaccatgacttatcaggtaaagttatagttgtgcacaaaatgtcattttttaatccttaatgcgtgtgctattcacacctgtcttcttttgcagttttgtgaacaaccctaactt

SEQ ID NO: 7045 - DNA, 810 bp, Zea mays
  Intron number 1 from transcript AC210267.3_FGT014 (locus A C210267.3_FG014) derived from phytozome v7.0 (chr-ID 5; po s 210134140 to 210134949)
tgcctgtcagctgggagcaacggcttggcctcctggtgagttgattctcccctcttctggttcacatctgatgtcaaatactactcgttcactgttgtgtaatttacggttgagttccttccattgacaagtcgaattcaaaatacgtatgatcacccttaacaaatattgactatataaaaattaaatccatcttcaagggaaatggagcatctgcaatgaggagaaagaaagaatgagagtagatgatttgtgcaagaaacataagtctttcaccaattgatttgcaatttgcaactaggaaagagagctttaatagtttttcactgttttttccagctctgttttccatagacatagcagcaagcttctactccatgatcaaatatacttgcagttatttaggtgaacgcataaaaaactaaaatggatagatcagaaaactgcatcggtaacttcatcaaacttgaattacattatatctgtcgatagtagcttaaagcttaaattggaaaggaattgattaaatttcaagaaaacacactggacaatagggcttcaacaaaagcaaaacaaatataattaccacctaacaatagggttttgagcacaacaataaagagtctacaggaataggctgtttgtttttggggaaagtactgcttttgcttgcagctcatgggcaataaagaaatgcatgtcctcataaatcatgaatggtgattaaccacagatttgttgagctaaacatgatgaccatgttttttcacttcctataatcttgctctttgtaggtggatcaagtgcatc

SEQ ID NO: 7046 - DNA, 753 bp, Zea mays
  Intron number 1 from transcript GRMZM2G084684_T01 (locus G RMZM2G084684) derived from phytozome v7.0 (chr-ID 5; pos 1 65853334 to 165854086 reverse strand)
ccctgcaccatcggttgtcgccgtgcctgtatctggtgagctgctcgttgacttccgcttcccctgtttgctgcctcccggtgctttatactattcatcgccctaggtgaaatgacttaacggtcttaattagcgctgggtgaagcttcacctaggtggcagcgttattcgtcatcctacataatgatcatctatcctgaaataactttataaaaatcacgaatcttgccgctgtttatacttgaggcagaaggtgggaggctttctggttctcttgtccatgctgaagttgaggtattcatgtttacagctcctaacatttctcctaacttgtaagcacatgaacttcattcaaaactgatgctcttgattggacatcctacctagtaccttgttatgagatgtatcctgtcttctttttctttattttggtgcttaacggggcggaaaaaatcgagttcttggtgctcttttttcttttctgcaacaaactttttttaatggaataatttagcggttgctctgctcctggacgtttcagtctgattatcattttggtgtgcttggatttaaatttgagattggagctcgagcgactttctctgattcatctcttaatttgattgcgttcatttgctgtactttcctattgtattgtcggtttcattggtaggtccactgatttgtcttgagtaatggcttgatttctccatttcagagaaacccgaggcatcaaggcaccaacagagcgct

SEQ ID NO: 7047 - DNA, 678 bp, Zea mays
  Intron number 1 from transcript GRMZM2G176604_T03 (locus G RMZM2G176604) derived from phytozome v7.0 (chr-ID 1; pos 5 408445 to 5409122)
actttgatcgccgtcaagaatctcctcaataataggtactacactacttaattggcgtcctcctttcgtggaaggttccttgcctgttttgctcacttcggctatgacttccaatgggggccggggcaccaatccgctgtctttcgattcgtgctggcttggattttgattgtggcaccgaagatcgtgattgggctgaactaggatctaggaacgtcggtcacttcttgcatgtttgcgtttcagatgttgaaagggggagcaagtctcccctgttgcctgatttgatttcgaggggggaggataactatctctttgctggttcatcccttgagtgccatggctgagtgagattagaacggatggtgtactgtcgggcgagtaaaaaacccctgcagattcgtgtcttgcaagtttgctgctcttgagatgctctgctgacgaaaggttggtttgtggggctcaagaaatttcaaattgctgtaataatgactctctctttctgtgtgcccacccccattagattcttctcgatttctgtgacagatttttgaatactacactgttctctaggattgggttgccgtttatttcatcatgctttctgataacattatccactttttgttttctcaaacaccaggggccaggccgagaaggagttcaaggtggaggtcg

SEQ ID NO: 7048 - DNA, 615 bp, Zea mays
  Intron number 1 from transcript GRMZM2G036286_T01 (locus G RMZM2G036286) derived from phytozome v7.0 (chr-ID 5; pos 2 08070991 to 208071605)
cacctcgggcccggccacgacaccttcatctacaggttccagtcggcgtggtttttttttttgtttttttttttttttgcttaggatcgcatcttttcccttcatattcatggcccctattttactttacattatgaggcacataatagtttttttttaatcagctgtcacagtactcgctgagtgtgtgtgaatctaattccctctagtattttttttttggtggaaggaatatttgatgcgaatcttcctttcggtgcctgtatttatttccaattattctattggttcggttcacgagtagtttgatgctgcatcgtgtgcacacacatttttacattatgaggcacataaacatactaggtgaccaatcaaacgagctgtcgcttgattatgatatgtaagcctcgtcacctggaaccgtatactatctcacaagttctttttaatcagctgtcacggtccctcatccacctcttggttgaaagagtttgtttttctctccctgaattcggatgatgtaatgtaacatgacatgacatgatagctggattctgtttgtctgcgccgtgccgtgcaggggcgaggtggcattctgcagccaggagtgccggg

SEQ ID NO: 7049 - DNA, 635 bp, Zea mays
  Intron number 4 from transcript GRMZM2G439198_T01 (locus G RMZM2G439198) derived from phytozome v7.0 (chr-ID 5; pos 5 9045739 to 59046373)
gcacactcttagtcacaactactggtatgttttctgtttcactgcacgatgtagttcagtgttctgtttgtgttatgaatatcggttgatgcgaagtactgtactaggagttcattaattctacatattctaaattggttggttggttgtgctggtccaacagagcaggttggtatcttgagaattcacctgacaaaaaaaatgataaacttggtagcaatggtaagaaacagataaatggaatcctaataaagatgggagcattcggtggtcagactctcaccgcgattcactgaaattttctcatatcttgatttcctcactactttcatttgttattcatgcttttttcttctccttatatgttttcttcttttgtgatgtagttttcgttacagtttgtcataatatgcaagttctaaacctaaaaacacacatgattatatagtagaagagtacatcaaagttttcttctacctacgtatatctatttagatgacggaattattagcacacttcttgggtgtacaaatcagtaccaaaaggcaaaaaatatctgagaaggctgtttttgtttcatttgtgatattgtgagtgcagtcattgatgatttcttgcccattattcaggaatca

SEQ ID NO: 7050 - DNA, 863 bp, Zea mays
  Intron number 1 from transcript GRMZM2G064831_T01 (locus G RMZM2G064831) derived from phytozome v7.0 (chr-ID 10; pos 145206208 to 145207070 reverse strand)
tgctgatttgggtcatatccgcggaggtcacgcaggtgaggtgtggtgtggatcctttgatcttggtgcgtgttcggtgttcctctgttcacttgtttatttttattggagcctcttggatcttggcttggcctttgggacgcatgttggcctattggtacgttttgtgcgtaaatgctctgtgcctatcagattgtatttgttgggacgacctgggggtgttgctctgcatctagatttttaaacgttacgcgcagggttgcctgtgatagaaaatttttcccaggggaaggttatgcatctgccaccactctgccttaaaaagaacatctggcatcattctgaatccagccgaggcttcaccactggactttatttatttacaccataaaaaggcaaagaaaagtcaaattcttttgtcttctactgtatacttttggagctgcctgcatgcatgctcttatggacacccgtcaaatctgctgttaatggtttaacgacttgtacctgcctgtcgtcagtcctcggtgcttagcttgttcatgtaaactatgctaaagcataatcatgcatgtggttgttgtcacagttcttctgtggttgattgagggtggttgcgatatgtttgatcacctacaatacacaaacatgattaaagaagataccgatggtagaatcaggggatactggtagtacaatttcgtcactctcatgactgcaaaacacctcaacttctagttcttgattctttttaaaaaaatatatatttgtagtgtccatattgtgaaatatatcaattttcattttgtaactaaatttcttgtgcaggggatattcacaaagtacaaacatccttttgcagt

SEQ ID NO: 7051 - DNA, 761 bp, Zea mays
  Intron number 2 from transcript GRMZM2G173660_T02 (locus G RMZM2G173660) derived from phytozome v7.0 (chr-ID 10; pos 148527081 to 148527841 reverse strand)
ccacggctgcagagaaggccacggatctccagcgggtaagtgacagattcgttgaattcgtgggttggatacacgcatgaatagttagttgtctgccgttacaaattctaattcatgttccttgctagttaattccatcccctctaatcatctgggaaaattaaactgggacaaatatccgaataccttacccaataaacttcttccccaccagattctaaccgtgcatggatagtgaatgaagttccagaatatggttaaaacaaagcatggaagttgctctgcactgtacctgaattcaatattcctcccccatgccatcagattccctccatgttccttatgtagcggagaccattagctgattcgctaagtgctatgcacgtttcggtttctacctgtttgcagagcattacgctgcagaaacagaaaactcaaatgcatgacttcatcatgtgccttggggcctacagtgtactaagcttccaaccatggcattgcacttagattatttggtgcttcgaatgtcttagtccggttgtacacttgtacatgtgtattgcaagctccataacatgttttcgtacatttggcagttaatttgtttaacttatgctgccgtttattatcacatcatctcttctatctaagaagcgtctcagaacatttattatgctgcaagttcttcctttatttttttgggaccagctggagcgttatgataagtagaagcgtctctatgttttctctacagggattaa

SEQ ID NO: 7052 - DNA, 337 bp, Zea mays
  Intron number 2 from transcript GRMZM2G581103_T02 (locus G RMZM2G581103) derived from phytozome v7.0 (chr-ID 5; pos 2 11745832 to 211746168 reverse strand)
tggctgtttcccaagccgggctaggcctttttgaggtaccaaattacatcctttcctttgcctctagaggagtgtttggtttgcatagaataagtcatgctagttacacttacacccaagcaagaaatagcgataaataactttgtcaatgccaggtgctcttttctttttcttgattcaactatatatcttctttggggattaaattctggcatgctcaactcaaatcctatagctcgctagcccatatccactctacagactagtgtgcattgtgctttgttttttttttttttgttgacagctttttgtgaacacgcagttgttctcagtacat

SEQ ID NO: 7053 - DNA, 667 bp, Zea mays
  Intron number 4 from transcript GRMZM2G387471_T02 (locus G RMZM2G387471) derived from phytozome v7.0 (chr-ID 5; pos 6 5912614 to 65913280)
attcttatcggttgcataagaataactcatttgaggtgcatagaagacttggcagtgaaaaactttccacacatttgtcaggtgctggttgagatgatgttttatttagaagtagttagatttattatgtttcataatcatttttgatataaatatctactaaaattctgttataatgactgttattgcaactatctattaaatcaatgtttacattgtgtagatgaatgtccacaggtgtttgtaagcgatagaagcatcaaaaatccgactgtacattgtgataacactttaggtaattacatttatctgttatgttatttaactatatcatgttgtaacactctagataacatgcaccattagttggttgagctctcatcattcaacctatatgtacacctaagacctttgctattttcaactttaaagtcgcattgggtcagacgagtcatcaacatgattccaatcaaagttcagaagttttagatccaagggaacgtaagagaatacgagaaagaactcgatttgcatctcaaacaaaagaacaaagggcattgcgtaatagggaatcatgtaataagatggcaaggaaaaactataaaagaagacaacgggaaattaaactccaggacttaatcggcattgaggacccgaagtttacccc

SEQ ID NO: 7054 - DNA, 594 bp, Zea mays; identical to SEQ ID NO: 4697
  Intron number 1 from transcript GRMZM2G476850_T01 (locus G RMZM2G476850) derived from phytozome v7.0 (chr-ID 5; pos 2 16306445 to 216307038 reverse strand)

SEQ ID NO: 7055 - DNA, 1053 bp, Zea mays
  Intron number 1 from transcript GRMZM2G148621_T01 (locus G RMZM2G148621) derived from phytozome v7.0 (chr-ID 10; pos 143501431 to 143502483)
tccctcctcgtcgcctccaaggttctcgacgacttgtgagcgcctttaaatctcttcctctcgttcttatgtttcctaccaaaacctgcacgtacgtacacggtgtctgcgtgtgtctcgagctccagattcgttctagacgtggtgatatattctcgtcggtgaccttgatcgaagacggccggagtacaaatggaatggattcgggattccaaaccactttatcttcagcatcaagagctgtcaatgcataacaacatcagtagcatgtgtatactagcctagctagtaggataacgtcaagtgcagagcgcgccaccacgaccacgataaaaaaaatgagaagaactacacactgcagaaacaaaaaaaatgaataaaagcatcaaagaaagcaaaggatgtctgaacttctctgttctcaaattgtcattgtcaacacaacagcaagcagaaaacaaattgcaaatcagttatcctgggcagaattgtcaacacaacagctacagctacatgtgtactttgataacgtcgtgatctcaagggtagggtagagcgcgcgacgaccaccacaattcgacgagaattacgcaccgcagaaaaaagagagtgatcgaaatactagtgatgaactgaaccgggaacaaaaaggaaaggtgccttttctccattctggattggttccggcctgtcacattaagatttattggcttctggctgttgtactctgacaacgacatgaaacagtctggtgctactggtatatgcaaaagcatgatagctacccctgctgcttcacggtttttttcttgtttttttttctctctgtttttttttcttgtgtgtgtgcctgtgtggtgttgggggttcagaaaatgctaagctactagtactaattactgacgtacgattactgctactgataactgtctgtgccatgcatgcatctgcaaggtaaaaaaaatttaaactaattaaaactttcacggtggtgaatggtctgctgcatggctcgcagccaccacagcaacgccttcttcgcgcgcgtgggcg

SEQ ID NO: 7056 - DNA, 961 bp, Zea mays
  Intron number 1 from transcript GRMZM2G511820_T01 (locus G RMZM2G511820) derived from phytozome v7.0 (chr-ID 1; pos 7 9258933 to 79259893)
ggacaagataagtaagcagtcttatatagtttgcccactcgagttttgtatatcttgacataaatgaattatgcaaatgttgctagagttcttttaggttgaagcttttgcttagttcagtgttgctatcggaaagctaaaattattttcttgccacctcctctgcattgttttactgcttcagctcctggtgcttctaatcgagtactatagaaagcatctctcttgaataaatcgttgtgtgcaaatatagggtgcttatataatccatcattagagtacgaggcgtgctttattctatgtgcttcccacaaaaaagagtagcctattataaactttgtattagagcacttgacgttctaagttttgaccacatttctctactattataatgcagccataaagattcaatttttatgttgggcaccataaagatgtttggcaccattcttcccaaacatttttctactattataatgtgtgctttattcaatttttaggattgttaggggtgaagtcttagtctcaagatagcatattgttgtttgcctatattatttagtgtcgattataattagtattgttgtttagtgcttggttcatactacatctaggcagtgttctaaaagtttgggaggaatggaataggataacggtcggctaacatacatctttttttcagcagccgtggtaatgaatttgaatactgtagttactataatgaatgttttttaacttctctactcttctttactaatcttttagaactgtgtccttttctattatttctattacttcattgtgttgattatcttggtgtttatactcgtcttcagttgttctctgtgccaactgtggtcttgtacgagccttctctttggtagcctaataggattttgtgtcttttgtttatctctggtatttaatcttatactaaattggctcgtttgattttcagggc

SEQ ID NO: 7057 - DNA, 467 bp, Zea mays
  Intron number 1 from transcript GRMZM2G352695_T02 (locus G RMZM2G352695) derived from phytozome v7.0 (chr-ID 1; pos 2 54807337 to 254807803 reverse strand)
tcccggccggcgaactctgcaagcggacccaccgtgtccgtatctctcacccttcgtatagccttttttttattattatgatcatctacaatctttttgtttcatcttcataggtttttgtcgggcccagagcctcagaatgacatattgacatgtagcttgttcggttattactatgtcacatgtattggatgtgattagaaaaaagaattgtagaaattttgacttattatggattataaacccaactaatccccttcaaaccacacggattgagatgaaaacaaacagacccttatatgtgccaataattatttgatgaaatttcttagtgccacggattctcattagagattatttctttgaattttcttaccgccccaaaaaacaaataacttactatagcagaacttacgggttcttgtgtggcaggagaagctacgtgtcgctgtgcttgtatcgaagtc

SEQ ID NO: 7058 - DNA, 901 bp, Zea mays
  Intron number 3 from transcript GRMZM2G079343_T02 (locus G RMZM2G079343) derived from phytozome v7.0 (chr-ID 5; pos 2 7595354 to 27596254)
cggtgtttccgcacttcctgtcaatataataattggtatggaacaatgtttttcttctaccatattctaatatccttacagttctgtttttcaaccttttgttaaattaaaaaagttattgaggaacacaaagcatgaattacttagttttacataaccttacggtttgtttgttctctggcaatagacgactgactactctcctctttcataacaaaaatgtccaacctaacattattagattgacaaataggagtttggaactacacttttcgtgtaaaagcaaaattagtcactggatgtaattaagtttcatgtgatgttcttgccaatactgttacgcagtgtcatttcattctacgttatcatcatgttcacaaatgacagacttagtaattgtattttgtgattgcgacggtcctcgtcttgaagtattgggcttagtcttaggatcacacgaaatctcccagttttcagggtgagacaaacaactcaaaacttatgaattcttggacgatttgaagtaattaatgcactagaataacgggttcatgaaatagtcattcctacctccctctgtccaaattataaattggaactgagagtagttttctttgagattgaatggggggagtgattaactgatcatcgaactcatattgacagttagaaattttgtcagaatatgccatcaggaacaggaagggtaatgtctctgaaatgtgtcccattaggtttattagcaatcaatatgtttgttacgtttcatactttggttcctattactacttcattgattcacttgaaagatactttgcatagtgaatgttgttcattgaataaactgaccaacgtaatgtttgcaggtgttcttatagttctcggattgggcaccgccctt

SEQ ID NO: 7059 - DNA, 763 bp, Zea mays
  Intron number 3 from transcript GRMZM2G052701_T01 (locus G RMZM2G052701) derived from phytozome v7.0 (chr-ID 1; pos 2 66560251 to 266561013 reverse strand)
taatccagctctgattcaagatttattaggtatggcttcttgtttaatgagaattaccttgccatatatgaatagtgaatattatactcaaggatattgaagtatgaatgtaattacttctggtttgtttgtttctatatatgtgaatttgcttacaaataattgctactccagtggatgatactgtaatgtgcagcttaggtggaattttgttggcattgtaattccaaaatttcttttttggattaatttgatagcttttgagattattttatcgtaatattgtattggtgagccatggttgtatggtcaaacagcttgtccaatggatcaaattatagaaatgaagttgtgctctaaatgtatgcaagcatattgtttgtacaaaccatcatttcattcaaatggttattggtttctacctttcaatgcttcttgggtatttggattggcaagctagatcatttctgcagataataccactcattgccttttttagcacccaactcttgccgcactttaaaaagctacatgtggctacacaaagcttattctgttaaattttagcttacaactagaatgagttgatgcctgaaccatatatttctttttcttcgaatgactgccatttctattctttttgtactaattgttgataacaacattccctacatatctcttcttcatcattagcttaacactctcatatttttattaacatttcctaggctggagagattatttctcgctttgagaagacaaa

SEQ ID NO: 7060 - DNA, 986 bp, Zea mays
  Intron number 2 from transcript GRMZM2G128114_T03 (locus G RMZM2G128114) derived from phytozome v7.0 (chr-ID 5; pos 8 6186354 to 86187339)
ctattgcttctgctcacagtacattctattgtaagtcaaatgtttcagtgcattcgatttttatgccttagtaccaggattatattatgttccagagcagaactcttgctgtagtgttataaaattctaacaggacagttacttaaacaatgtaaattaatatgtggctatttctggagataatgtcctggctttgtgctgaacgacatgaatagtattatcctgtcttttatttcagttattgtttctactgtaactcagataaatctggtcttgtaggaaaataaagtgtttttggtgtcgtatgtggcccaagtctccattctcaacaatgtccatatcttgtttatatctcggaaattcttagatgttctgtttctttaaaataccttaactaatggcagcttcatacgtcgaactagcatataaacaaactgcaactgaatatctattgtaaagtcttcttttgattcaaacacttgttttattttagaaaaaccactaaaaactggaagatggggacagggatgccctatatatatatcccgatttaaaaaatgcaacttaaacaaataggaaaactaaaaagtccatgccacaagtaaaatctagttaaagtaaggttaaagctgggaaactttctctgtccttatccggatcacatttggttagtttttatgtaccttttaggaatcataaccacattttcctatgaaataataggtctgcatgaggtcagttttttgcaattttcgtttccctctatggatactcttataccaaagcaagagtaattaaaatgtaaacttcagttctttgcaattgctatttccctttggttactcttataccaaagcaagagtaattcatctctatatttgtttttttaatgtagttggttcttatttgtaactctccactttgtatgttctaatcctttccttctcgtagcttggagtaaactcactgcaagtgagagaggcaag

SEQ ID NO: 7061 - DNA, 941 bp, Zea mays
  Intron number 1 from transcript GRMZM2G023794_T02 (locus G RMZM2G023794) derived from phytozome v7.0 (chr-ID 1; pos 2 69786 to 270726 reverse strand)
gcgtggagcttgtcactccatcggtgccggtgagttctgcggagaggagctcctgacctggtcgctggacccgtggcgaagctgccactgtacactcgcagcacgtcggcgtcggtggacctgggctcgtcgtcggcgctgtcgttatggagctggccggtgcgatacgaggcgttcggcatcatatgtgccgctctggaacgccatggtgggtcatcgaagagcgtctgctaaactggcacacatgtcctcctccttttttttttgttgccctccttagcggttcaaccaggtctctttcagcccgtttgatgtaacaaagactcaaacagacatataactcttaatagacatactttatttgtttatataccagtttgacaaaggcacacagcgagacaagtttaaggaccgaaaatatactttactcaatcttcttttattactagataaatgcccgtgccttgctacggagtgaaaatacttaaaaatattgatagaaaagacatatagataactctatttcagaacataactattgtatttgtgtatgttcactaactcaatgctcccaattagaataaaccgaagtagcaccaaaggtgcaaagagccatccaattttgtcctgtagtgttgcatctagaataagccaattaatatgaacattgcgacaattacaaccgcatctgtcataaatggaagatattacaccaatcaatataggtaaagtaagttatactcctcatcagatcatgaaaaatagtacaccagattcaacaatgaaaacaatataaccatacagagaagggaaaaacacatgtatctcaagttttgattttgaaccttattccacttgctatagaagaactgcatacaacataaacaattattctgaatacatcagattgcaggagtaaggatcctctctccaggcagtga

SEQ ID NO: 7062 - DNA, 589 bp, Zea mays; identical to SEQ ID NO: 4699
  Intron number 3 from transcript GRMZM2G401784_T01 (locus G RMZM2G401784) derived from phytozome v7.0 (chr-ID 10; pos 7194107 to 7194695 reverse strand)

SEQ ID NO: 7063 - DNA, 366 bp, Zea mays
  Intron number 1 from transcript GRMZM2G011631_T01 (locus G RMZM2G011631) derived from phytozome v7.0 (chr-ID 5; pos 1 64340073 to 164340438)
tttcttatgtaaaaaagccccctttttttataacaggaatgattttttgtgttttagaaaatggtaaagaacaattggcttgtctgtcgtgtactggatacgtacttcgagatcagaattcacaaaaaacaacagtcaaatctgttacacatagttgtactcatcatggagatgtgcaggaaaccccttatatggtaggaaagatgcagagtttaagaagattataggaatatatatagcaaaatcattatcttgattacccacttttattgattgctttttcaagatgcagatatttctcaattaagtttatatacaatgcagtatttttattttattttttgtagtgcgttggagaagacattg

SEQ ID NO: 7064 - DNA, 854 bp, Zea mays
  Intron number 3 from transcript GRMZM2G011631_T01 (locus G RMZM2G011631) derived from phytozome v7.0 (chr-ID 5; pos 1 64340733 to 164341586)
aggtgcgttgttgatttaattcacttcaggttttattaggaagaatgggtaatttggttattataatcttgtattgtggaagcacttttagaaaatctgatctcctttaagctaagctgcagcagtataaaaaaactcggctggggagggaatgaccgccctcccggtatagtaataagaaggacctgaaccactggtcccggtcaagaaaaccagcgaaccctagcccccaatcactaaccggccgattacaactgctcactctgcaacggcccagccagagggtggcgcgcaggacatcaatccctgagagtgggtggggcacagcgaggggatttttttgggtgcggaactaggggtcgaacccttgacctggtgaaagggacaacaccgccttcaccactgggctatcaacccacctgcagctgcagcagtatatcttactacttttctaaagcatgtttaaaaaaatgttgtggagcacaacctatctagaatgtataatccgccaaaccaggttatgtggctgctctggtggcataaccattctcaaaactagcatcaaagactgctgaagaaaaaagtttatttgttttttcaggaggtggggggcattaattatagttcaaccacttgatacaaaacaaagtgatctaagaaaaaactgtctgcatctgcagggaaaataaacaagggcaagctattctttagtactgttctatgtgaaacatgtttttgctctccatttatttctcacctagagcagattggataagatttagaaatggcaaagttgatgactgtttcatatctacttcatttgtatttgtattgttgcaggagattggtttcca

SEQ ID NO: 7065 - DNA, 575 bp, Zea mays
  Intron number 1 from transcript GRMZM2G331861_T01 (locus G RMZM2G331861) derived from phytozome v7.0 (chr-ID 10; pos 110093985 to 110094559 reverse strand)
gcccgcactcctcctccgcttcactcgcccgccaggttcatggacgtacgggcgagatctggagcgcgcctctgccggtgtccttgaacgaagacgacctagcaaagattccccttttctttggtagcatcggtaggtggagctgccaaacgctatcccatccgcgtgtcgtcatgtgctgggtgaaagcttcttctcgaaggaacagcagctgcttgcctctctcatcttgctagcttgcacagtacagtacaattctaatcttgttgccatgtcatgcttcccagcaggatcaaggtcgttgccgtctccaggtccatcaaatgcgacaaggtcgagcgcgcgcaattctgctctgaagtcatctcctttcaacatgttgattttgatctgattcttctactataaagtgttggacatgttaatcatatatattcaacccaaaaaagaaatcccagtgttccggtactttcagttttatagttgaaaaaacacttgcatttgttgctgcttaatatctcttttacaattacattattttttatctgtctatttgtaaacacagagaccagcac

SEQ ID NO: 7066 - DNA, 697 bp, Zea mays
  Intron number 4 from transcript GRMZM2G064386_T01 (locus G RMZM2G064386) derived from phytozome v7.0 (chr-ID 5; pos 2 15967456 to 215968152 reverse strand)
gtcccagttcccgtgagtctactgatcctttgaagtcaggttaagaaatttgtgttgtctagcttcattcgcctaacatttggatgtgcttcgtcagctgccagaataatgaaagtttcgcttctaaggaagtctacctagatcatcagcaaaaattcctgtatatgtctgttgtatagccaaagcctcattggaagagggaaaaaacaacatggatatcactttcagttggaccactaaccttaaatgccaaatgactttaagaaatgatgttgacatcaaattcctctacaagtctttaattaactgaatggctaagtaactttgcatattcttggtcttaatgcgtgtctttgaagaattatcctatgcgaaaatcatgtctacctacttttattggtagacctctgtggacaaagctgtaggtattaacttttcttatacactgtatgatttgttgtgctactagcagtttcactgccctcagatagtattcctatttgttattgcttttaaatttagaatgatactatccaatattcttagtaacagtgtggcacccccaacaccctatcctagttgctttgaaggaaatgaacctgttgtgaatgctgtgctgtatatctgtaattttttccctgttcctctgactccatctccaactgtggtccaataatccgtgtctgccttgtccagc

SEQ ID NO: 7067 - DNA, 1026 bp, Zea mays
  Intron number 1 from transcript GRMZM2G116034_T02 (locus G RMZM2G116034) derived from phytozome v7.0 (chr-ID 5; pos 5 6779493 to 56780518 reverse strand)
cggcccgatccgcgctctcctctccgtcgcttcaggtgttcgcctcctccagatctcttgctgtctcgcttgttacttttttgtttgcttttcggcgtccgatctggtgcgacggcgggtctgggtccatctggcggtgctacccgtgcggatctgcgccgattcggtgggaatattagtgattttgacggttctggattgacgcacgggtttgcgcacggaaatactacctttcccccctttctctgacatgcggctttcagctcaatacatgatttttcttacgtaggatttgattgattttgtatgtagatataagcgttttccggtgctaatatgcaaaattgctagttttggtcatataaaactgtcctgggaagctccgtagcttgtgtaccgtgcttgagtattggattcaagctgtttgagctgtgggatgctgcatgcttgatggtaatgaattattctattgtggtaagtcaatttttttgtgaaagtgactatgagatggtcgcaagggtttgctacaggataaggttaaaagactgccctgccctatgtactagacgagccattcataccgtgcgaactgctaaaagctgttgctcgatttatcgagtacttgcaattatatcagcctgctgttaagaaagtgtaaagcatcaattgtcttggtatggttctgtttagattctttataaactgaagattgagttgagcatgcattttgtataaattgtagagcttgaataatcattttaagagtacaactgattccctattgattctgttgtgaattacttgtcttctagcatggtgtttgtcttaaacatttctttgctacacacttttctcgttgtaatctgtaggacagtttgttctaagcttaaactgtgccattgctcattatattgtatacatccttttgatctaggttcatgattaaacctttctttgtatttgtttgtcatattgtcaacatgtgctgtaacttctgtgtattaacatgtttcttttgctgcagtc

SEQ ID NO: 7068 - DNA, 955 bp, Zea mays
  Intron number 3 from transcript GRMZM2G357152_T01 (locus G RMZM2G357152) derived from phytozome v7.0 (chr-ID 5; pos 3 7362320 to 37363274 reverse strand)
tggttgtgtcactggaggagctttagctgtaaaaggtaattagtttgttgtgtcatctatgaattcctgagacaatttttctggggaaatatcttatgcaatcacttatattggtgcaagcgtgcaatcaaacgatttggtgcatctaatctagatctaatgatgactgttattttacatttaaccccttccacctgaaacatagtacctattttacttttaacccctttcatatgaaaccgttggatctagattggatgctctggatggtttggttgcacgcttgcacaaaatgagtgattgcacaggatatgtcctcaattttcctaacattttaattatcaattttttcttaactaaaacggtaaaatttctcggggcaatcaatgtcgttgccctgtgtatggattgtggggaccggtatatttgacctcttagggcttgttcgtttgtgccggattggtgggtcggaacgattccgaaccggattgcttctctaatttatataaacttcgattagctggaacgattccgggtgcaatctgacagaaacgaacaaggccttaagtagctttcttccagctatttgtgtctctggtctccttcctatatctcaagaattatataggtgaaattaataagctgttctaaattaactgtaaatctgcatttctgataatatttatgttcctttcgtgtgtataacataaacgttttatattccttcctgcttcggtagctagctaagaataacagggcatttcgtatattgctgtcctgatgtatctatatttgaaaatgttcataagggcttggttggataccatacattgagattaatgtctagaaagtgcttcccatttcgttattagattactttccaattcctgtcaattctaggtaaccatacaaggcctaagagattttatatttttacagttggccctaaagctac

SEQ ID NO: 7069 - DNA, 1039 bp, Zea mays
  Intron number 2 from transcript GRMZM2G070555_T01 (locus G RMZM2G070555) derived from phytozome v7.0 (chr-ID 10; pos 80736068 to 80737106)
cccctcctccttgacgtcaaggtccaccgcctggccttgcttcgcttccttccctttgcgcatgttgagctgtgctttgggggattaggaggcgatttgtctgtaaggaaagcatatcacccaagggatggatgaaatcaaagatttgtgctttattgggagacaagctgaaaagaataagatattcttttgtgtgtctttgctgcattactagcaaattagggtgtgcatatctagtagcttgttagttggttgcatcgcagatttgagtttatgcacatccttactagattaccatgataccgttcaagtgcttggtctaatataatttcttgctgttgggtatctatatggtttagtttggatacagttaagctttagtgttgtgcttgattagcaactaggtttccagtggtgtaggattgcaggatatagtttcatgaaaactattcactgtttttaatggctttatgagcacaaatttgtgccacttttttagtgtaagataagatgtaggcccgtttggttagagggactaatctttagtcccgtttagtctcaattttgccaaaaggaaggactaaagtagggactaattggttctagtccctcacatgggtgctaaaagggactaaagggcaacatttactccaattgtccttgcctagaaaactggtgtgaaacaagaaaagaggtattttggtatttttgtgttgcatttaatgtttagaatatgtgtagtccctacaactaaacaaggtagggagtaaagtttagtctttgagctaaactttagtcataggactaatggaaccaaacgggccatactatcatctgaattagtcaaatacaattctgtagcaaacaaagtaatatttgtcttgctgctggtaaatctgctgaaccgtctgttggtgtggtctgctattggtagttggtacaacaaatcaagatgctgcatttcatgatctttgatctaacacaagttttgtttctgtcatcagggtaagctcgtagagaagacgcgtgaggtgacatt

SEQ ID NO: 7070 - DNA, 953 bp, Zea mays
  Intron number 1 from transcript GRMZM2G300766_T01 (locus G RMZM2G300766) derived from phytozome v7.0 (chr-ID 1; pos 2 63359326 to 263360278 reverse strand)
agcaactcaagcacttgctgtttgacagtctcgaggtaggagctagccacggaaagggaagaagcagaggcagtgacgacggttttgattggccaccgcctcttattgaagaacacaactgggacttcgcgcagggctggagtgctacttccagtatttcttgcaggtcgaggagttgatgagatgcaacggcggaatgccaaggtgattacttgtatgctatgcaaacatgtataaaacattgtatatatgtgattcccattacgtaattaggctatatggttggttgctagctacacagtacaaataaatcaactgggttctctataaatcaatagtcatgagcctggggttgtgttatccacttttggttaatggcaagtaataatcttatcataattagctagtattgtttgtcaatttttcatatatatactcgtgctaatgatatttgttgcttcattctgtacaattatgagacattttatatttttatatatatatattttttggttatgcatatatattggtttttagtgtatatatattatttaagtacataacattaaaaaaccaaaacatctttgaatttttctttggcatatgctatcactttggaactgtaattaaccagttcttactgctttgatcgcacttaatgaaactaagcatttaaagtctggttaaaaagatttgatattgttaaatattgttatgagaaggtctacaacaacgcttaactgctggaatttcttctggcttcttatttaaggtctatttgtaaacaggtcatgtaaataattgtagatgggacaaaagtctgaactgttctaaatgtgtcacgtattgctttcaggttctctttccagatcacaatttaattatttaattttttgtttatttttttatcatttaaagattctaggagttgggaagaccacttctcaacaaga

SEQ ID NO: 7071 - DNA, 988 bp, Zea mays
  Intron number 5 from transcript GRMZM2G136854_T02 (locus G RMZM2G136854) derived from phytozome v7.0 (chr-ID 5; pos 1 237643 to 1238630)
gctctttccgtgccttcaggactaaggctgtactggtaagtgcgttttacaaattgaaactgctatttattcaaatgatcagagtcctggtactgcatacccttctgctgtggctgcttgagtgacttggcctgctatcccaatttgacacgtatgaaaacaaaactcagccttgcggagaagatgaccccttggctttagggggtgtttggtttctagggactaatttttagtccctctattttattccatttttccctaaattgccaaatacggtattttaatttccatgtttggcaatttagggactcaaatggaataaatagagggactaattagtccctagaaaccaaacatccccttatcttatgagaggagagcaccaatccctttagggaggtactcatacaacctgtgagcagcatgggtccatgcttaggtgggtggtctctcaacttgaggctctaccaactgagccgttgctcgattcccgatggttaatgaaaatttaagcagtatgtgagggagcttttgttgatggagaaatttggtggtttgctgaacaagcatgaagttgtcttgtgcatcttcctttgaagaaggcactttggttcagagctattagaatgtccagcttctctgcgagacggttggctaagatcttggcaacaagcttcgcaaaactgtggatcaagctaattggatggaaatctttaacttgatcagcatcttcactttttggaatgagagtgaggaaggctgaattaagcatccaactatccaaggattccgaactttatcacactagaaagccactagggctgccaaaacatctgacttaataataggacagcagcatattaacttatgtggtagcttttaccaaatgtcgcttgactttgtttaatttttatgttaatctatgactttcataagttattgctttcctgcaggcttacaaataatatcctcagtactgcacaacaag

SEQ ID NO: 7072 - DNA, 730 bp, Zea mays
  Intron number 2 from transcript GRMZM2G034362_T02 (locus G RMZM2G034362) derived from phytozome v7.0 (chr-ID 5; pos 2 15703868 to 215704597)
ggtttgaaagcttcaagacaaacaggtgcttaattggtacgctttgatgattggttgcatgctgagtgttttactgtcaataggctggccagctagctgggaggtgctgaagctgggtgcaatttatctttaatgtaatttggattcttttttgacagcaggcttatatatatatcatgttctgaagaactaacttaatgtgctaacggaagttcccacaatagctcctagcatcttcacattcttcctggaccttttctttaacattacaagctgctagcctttttattgtgaaatcttggatagtacagggcaagaatataacttgaacataagtctttcacaagtgacacatgtggaatgcagagtattccccccttctttttagtgataattggtgttgacattactattttgtatgtccatgtatttgttctgacaactttggtttattattagttgaacagtcagtataagcaattctgctggcacatgtatgtctattatggagactttacaatgtctaaggtttctttccctaagtttcaatctgatcagcaaattgactaagacctttacattttactcataatgaataaaatatctcccacatgcacaatacacaatttttatccttttttgttactacttaaaattttgtttgcagttctcatcatctcacatgcattttacagttttgagcagttttgtatcaacctgacaaacgaaa

SEQ ID NO: 7073 - DNA, 450 bp, Zea mays
  Intron number 4 from transcript GRMZM2G034362_T02 (locus G RMZM2G034362) derived from phytozome v7.0 (chr-ID 5; pos 2 15704803 to 215705252)
ttcttgatctcattgagaaggtagtttttttattatgacgttttgaatagttgtttgctattttttgtactactaaaattattatgaaatcaaagtagcgttaatttggtgaactagtgacactcggttctcatcctacatcacattgttaaaatattgcatgttccctgccaatggtttcatccaactgcatcatcaaatgctcatatgagagcatatatgctattgctattgaggacaaccactaaatgactgtatgcttagcaagcaaacattgccaatactgctttgatccttaagttccaattcaagatagacatctatgccaattaatctgacacacattgtacttaaacttattggtcttgttgttttgctgtaattgttttgtttcacctaagtacttgattcttcttttgcagaaacctggtggaattattgcccttctgg

SEQ ID NO: 7074 - DNA, 799 bp, Zea mays
  Intron number 2 from transcript GRMZM2G107741_T05 (locus G RMZM2G107741) derived from phytozome v7.0 (chr-ID 1; pos 8 8898634 to 88899432 reverse strand)
gccctggctacctcaacgccctcaccaccaccgttcgtccccatttcctcgcgtactatagtaggtagttgttggtgcgcagttttgttttggtggacggtggtgattggaattctcattgttcaatgaaatgctttacattgaagaattctcttcaaagagggcaggaaactcctgcaattcacctaacttaagaagaaaagaatggacccagcttaggccttgttcggttattcctattccatgtggattggatgtgattggaaaaaaattatgaaggattttgacttgttcaggattgaaacccgctcaatcccacccaatccacatggattgagagcaaaacgaacaagcccttatagggaaactgggcccaaaaaccttacagctgcactgtttagtaggaggaaaactagcaaaatgctttacatagttgtgcggtggtggggttccggctcactgaactgtatgtgtgctgtttgatcaaatgagtcggttgtcatgcttcatagtggtttggtgcccctgctatcatttgcagagcacgtgtataatttaatgcccagggagtcattcatgctaaggtggagcttctgcagattggcttagtccctttcttgcaatgcaaatgattctttggcttagttttttttcgtgtgtcgacatgttgactttatcattttttctgtccatgggtgtatatattatagcttacagcttcacattggaaacaattgatctgatgcgtggtaaaatgtctgtcttgatagggagctaggctcaataaattttatcaatc

SEQ ID NO: 7075 - DNA, 678 bp, Zea mays
  Intron number 3 from transcript GRMZM2G351577_T03 (locus G RMZM2G351577) derived from phytozome v7.0 (chr-ID 10; pos 147836676 to 147837353 reverse strand)
ctgctgggctacagttaagtcgtttcttttagatattttgatatttcccctctttgcttgtttattccaatgttcattctggccttattcttcactccatttgtgaacacattcttagctttgccagaaaaaaagaatgataagatctgcaacttgtgaacacacttctggccttccctcttttctttctatttcctatatcaaggggtgcattagtttatttgcttatctggcatcatatattgtacctagaatctggcttggaagaagggaacttggatactgcttttgaagttatatacacttatacttggtgaccaatcaccaggtgtagatagagtatagcatataatggtggctttcttggctagaagtttatgcgatgctcatgagagtttcaatctgtatgtaaacatgttgatggcatgtttgtatgggaattgggagtgtttcccaggctttgcctggccagagaacccatcctgggcctaggcttccaatattggacagctgggagtgctgtcttggggaattattttggaggttgctgcatatttttgttctgacattgttttgccaacacttttcctttattacctgcattagtataaggtaggccacgatggtctgctgacttgttttggttatagcagggtaaagagagaaggaagaaacctg

SEQ ID NO: 7076 - DNA, 730 bp, Zea mays
  Intron number 2 from transcript GRMZM2G097504_T01 (locus G RMZM2G097504) derived from phytozome v7.0 (chr-ID 10; pos 120656539 to 120657268 reverse strand)
ctggtaacagattgtgttatgttctcatcagtcatcactctggatttgcaccgttgagttgatttacccacttaggctgtcgatttgcactgtagattacaccgtttgcattgtgagaaataggggatagatatgatagttgctgcagagtggagacagccttgctgcaaaaccataatcaccatcggtcgtattagatatttatagggcaattatcaacacgagtaccacctctcctctgaaactctgggactccggtcatatcagcaccgttgagttgatttacaagagtagagacagctttgctgcgaaaccataatcaccatcggtcgtattagatatttatagggtacttatcaacacgagtaccaaacaagctgaaaatgagcatgtttattttctgatcctcctcctatcccagttgctatgtaccaaataacataacataacataggctcgctcatcatgacatccgtccactgcaacccatgaaacaccccttccttattattagtagcactggatcttttgcctccagattggatcatactcaaaccctttaggtctcctttggatcaaaggataattttctgaatcctgtattttccctgtgtttttgaactaatttctgtgaaattcctatatcattcatgtaaaattcctgcgatccaaagaagcccttactgctttctcacttgttcttcatcttgcacagtcgagctcccgcatc

SEQ ID NO: 7077 - DNA, 492 bp, Zea mays
  Intron number 1 from transcript GRMZM5G848659_T01 (locus G RMZM5G848659) derived from phytozome v7.0 (chr-ID 1; pos 1 04519722 to 104520213 reverse strand)
gaagagaagctccaccaggtcaattcatcttatcctatctatggttcacgttacattcagtaattgtcactacattatttttcagcactaaatcttacaatggtactgtgaattcaaactgtcaaggtcttttcagaagaagagtaacgtgtaaaccatcattgtgtattctgtattgatgcccaatgtcatcacatcaacatttttaatgaaaatagaatgtatatcactttgtaaggaacgaaaaggaactgataatttgtttctcattttgagaattgcttagagatatctattggaacattgaaattgcaaatactcctttcttatgaattataatgacatcatggcccataattcccatattagtacacatcttacgtcggaaatgatgttgtcgcagtacttttcctgatacacctattcttacaatcaataattccaaaagtccttatgcaaaatagtactgaagtacgtcatcacagggccaca

SEQ ID NO: 7078 - DNA, 845 bp, Zea mays
  Intron number 3 from transcript GRMZM2G466281_T03 (locus G RMZM2G466281) derived from phytozome v7.0 (chr-ID 5; pos 7 0771862 to 70772706)
tactgcctatttacaggtactgcgttatttattctcatggttaccttttccagcaacgagtgggaagttgtgtgctaaagtacttttttgggggtgtgtttgtttctcaaagagcaatattccttttggtattctgtttatggagactaaaccctgctaagccatcatcatggttacagtgtttctggcatgatttttaaagcggtaaggcgagacaaggcgttggactatcgcctggacgtctaggcggcgcctaggcgaggtaggcgggcaaggcgcctaggcgaggtaggcgggcaaggcgcctaggcgttggacctccgcctggacgcctaggcgacgccttaagaacaatggtttctggttgattgtttgaaaactttagatgagtagctcaaagcctaccattacatcaaattgaccacattcaaaaaactgactgactgtaggtttgtggctcatcttacctaccttgtagcgaaagggtctctagcataatggttaaagcttccgagtagcacctccaagcctcgggttcgattctctcgagggacgaatttcgggcttggttaaaaaaaccccctcgatgtgccccgtctgcccgctcttgggtatcaatatcatgcgcgccaccctccggttgggccgttgcagagtgggtagttgatcggcccgttaataatgggggctagggtttgggggttttctcggtggagaccatgttttggtctcttctaaatataatactaccgggcctctcgaccgagttttttttacctaccttgtaagagagcatggactctgatctgccttgtttttttctgacctttgcagtggctctgtac

SEQ ID NO: 7079 - DNA, 719 bp, Zea mays
  Intron number 1 from transcript GRMZM2G462387_T01 (locus G RMZM2G462387) derived from phytozome v7.0 (chr-ID 10; pos 130004117 to 130004835)
ttggtatgtctattggcccttaactatttcccctcaatagttgttttcacttcatcagtaaactaagaaaatactaccatgactaaggtgcaaatggttggataactacggacatgaacacagatagctacattgtttctcaaattagattacagataggatttcagtaaatcagatcatggtatggttgcagttttgtagtacgagtaattttgttttgttttctctgatgctaaggtagttttaagatttactttgacctttcctttggttgatgtaatcttgaagctgtagtcgttaggggtaatcataggtgttgttcataagaggacttcacttttcgtggatgtgaaagcatttgtttgtttttgatcgagtgcaagagagatattttagggcctggcgatcaccttgttttggtgctctgcacaatcagcattccttttaccgtgtgaatatggatctcactttaggtgtgttaaactaggtttttgaattttgaataatttgttgatgatggaagagtggttgttcgatatgtttacgctagagtggaaatgtctatgaacatgatcaacaaaatggataatgtagagttcattattattttttggtctttctttggtcagtagtcgtttttgagttgctcaacaccaaatgcatggtggatatgttgttgcatgatatgtggatgtatttgttagagggtgacaagttca

SEQ ID NO: 7080 - DNA, 370 bp, Zea mays; identical to SEQ ID NO: 5472
  Intron number 1 from transcript GRMZM2G158616_T02 (locus G RMZM2G158616) derived from phytozome v7.0 (chr-ID 10; pos 54821060 to 54821429 reverse strand)

SEQ ID NO: 7081 - DNA, 428 bp, Zea mays
  Intron number 2 from transcript GRMZM2G347623_T01 (locus G RMZM2G347623) derived from phytozome v7.0 (chr-ID 10; pos 91785451 to 91785878 reverse strand)
tctcatcacgtcttcttccaagaagcagagacctggtaaagttcaatcggaactttgattatgttttattcttattatatgtaacctgtagttaacttgacgatacatcttgtgtgcaaaccttttcttttaatcatcttgtgtcaaatctgaagaaagccattgtcctacaattacttattagccctctatttattttgacactgctttggaaaaacggttagtttttactcgtcattgaattgttggaggtgtttctgctgcctctctggttacaaatatatgttttggtgcccaaatgctacttctgatgttctattgctaagttgatttactatttggatggtagcattgactggatctgattgctaaaattgtgttgttatcatgcagttggtgtcacttccaagaagcattctaaaggagga

SEQ ID NO: 7082 - DNA, 1033 bp, Zea mays
  Intron number 1 from transcript GRMZM2G000753_T01 (locus G RMZM2G000753) derived from phytozome v7.0 (chr-ID 5; pos 4 2657712 to 42658744)
ccgagggaccgtccccgtactccggtgatcgagcggtgagattcgtacgccctgctttgccctactcccctgagatttgccccctccatttctcgtacagttttggctcatgctctgccaatttcttgattcccgtgcgaagactacgcgccaccgattaccacctacttgttctcatctgattggatttaaattggatcttagattagctacaactccaaagatgcgacctttgctggtgaattgtggctgagctgggagaatctttgttctgctcttttgcgcttcggttttctttttatttttattttttggcaaactagattaggaccagaagatcgaatatttcctgctttgcttcatccggcagttttccctcggcagtgattaattgctcttcttttcctaactggactccttgtactaccactgtgtcacatgtcacatgagctaaaattggattagattctattttgaggccctttacctttctgatgaaactgctgtattgtatcagttttctttatttccgtgtactgggtaactctgtgattatgtcaccacaagtatagctgtagaattcaattgcgtgcatatttagctcaacgtcttctgagtaatgtaataccaggccagattcagaatcttataccgcatgaattctctaggttacaccttaaagaactagcatttttaatttacggcatgtccatgtgattgtgccgcggccagacattatgaatagaattggggaaatcaaaagaggatttaatggcctgtttcagtttcgttccttttgagtttactttcttttgtcgacatgtaaatttagactccggcggacatacgggatattgtcactccatttgttcataaagcttgatgaggtatcatgggtaaatgaagcccctctttcatggaagtgatgggggttcctcttttttgcgtcactcatttaccaagctttatctggtttatttgaccatggtttctggatgtattgtttacttgactgtgtaggcaccggttcagg

SEQ ID NO: 7083 - DNA, 813 bp, Zea mays
  Intron number 1 from transcript GRMZM2G546229_T01 (locus G RMZM2G546229) derived from phytozome v7.0 (chr-ID 1; pos 3 3125628 to 33126440 reverse strand)
ccaccatcctctataagctcaagcttggtgagatcatcacaaccatccccgccatcggtgagccctagtcttgcctttttaatgttgtcggatcatgttggattcggttgtgaagaatgccctgttaaatgatggatctataggatgcatgatctatccataccagattggttgttgggggtaaaacggtacatgattgtttgttctaacttgatactcggataagattacaacgatcattctttgagttgttcatagtacaacgaaatcacccgcatatttggtttgatggaacaaaatgcaactaatataaccctagataacataatttattatctttaaataataatcttaatgtttcatggattcttttaatgtatcatttcgagaaaccatcccatctagggtttaaagctgcctttgaagattaatttttttatgtggtacttagttaaaggcatagttctaacaaaggataatttagcaaaaaaaattatggaaaggaagtgttaaatgttgtggatgcaacttagatgaatccgttcaacaccttttctttgattgtcatatggctagatgtgtttggagatgtgtacaaatttcatttaacattactccatcttcgtgcatccaacatatgtttggcacttggctaaagggtttaaattctggacttaagagccggatttgggttagagcatgtgccctctgttgggctttatggttaagccgtaatgatgtggtttttgataatgcacaagtttccactcccttgtaggtcacattcagaggaacacattggacaaggttcta

SEQ ID NO: 7084 - DNA, 927 bp, Zea mays
  Intron number 3 from transcript GRMZM2G102447_T03 (locus G RMZM2G102447) derived from phytozome v7.0 (chr-ID 5; pos 5 9726597 to 59727523)
ggtggggtgagtgagctcaatcttctaacgcccacaggtgtctgattggtagagaacaatgttttcaaaacacatagattggtgatgtttactgcatggcttctctgttgctagttgtatagttcttgatgagtttctgctccattcacattagtattcacggtgcattgttattcatgattggttacttggcttgtgacaacatcagactaagtgttatgttaccttctgttattcatgttataagaacatgtccaaagagaaagaagtaaatcctgtggaacataagtttattattattatggggttaggatagtagtacggtaccttcttggcaaaaattatattgaataactatctcagtccatcctgcatttgtatggtataaaccagagaagtaagctaagtttggaatgtatggcgagatatctctgtgtcatgtataaatatacatacaataggtaaaatgtttgctattatgttgctggtgtcatggtgtgtaactatgtatagattgcaaacatatcttgctacataataatactccctctgtcctaaaataaaattcgttttagcaaattagtgagttcatacaacacttgatgtatatgatttgtatatgtgtctagattctttgaatatagacataaaaaccaagagctaaaacaactactattttgggaccgagggagtatgtattcaatactagcagcaacagtgttattatagagaatcgttattataggaatgtcttctattcttttcaattcagatgttatgattaaacactgttccattatttttatgtgcacaacataccatacatacattttgaagtccaaatgcacctttttattttggtctttgagttgcattgcatctgagaaattgcacttatgctttcagttttcaatcaaaagaccttgt

SEQ ID NO: 7085 - DNA, 1002 bp, Zea mays
  Intron number 1 from transcript GRMZM2G038598_T06 (locus G RMZM2G038598) derived from phytozome v7.0 (chr-ID 1; pos 5 9956827 to 59957828)
ccgggcacgacggcgccaacctcgtcttccacaaggtgcgcggccctacgcgtgattgcttcctacccctgccccagtgctagttccgtttctactttctagtcaggcttttttccccctgttttcctcctcggtagaaaatgtttgggtttgattctagtgatggaattttatgtggtatgtttgatcctacttacttctccacgaactgctgctagtaacggagttctccagccttactaattttttttgttccgtttccattcattcattatttgatttcgtagcaaaatctcagcgaatcaacaatcaatgcgaaaaaaaaatataggggcagatattgatttgtggggaaggtttctctcctgctttggatgagatgtcccaggccaggccttcccatggcggttaaggaccattttgctgtatcaccagcagttcctagctctatcgagactcgtttccttgggtttccatcgcgaaagccgcgggcgccgcccgggtcttcgctggcgtgccctctagtctagtggatggaaactggaaatgggtaacaccacccacatacacgccacgcgttgctttcttgtttcccttctctcctgtatctatccttccgccttccttccacatacaaatacctttcttctttcttctacactaataaataagtaaatacaccatggaacgcgtcgtcgtgccggcctcgcctcgttatgctctgccgcctcctctgcctctgcctctgcccagatccacaggtcgggtcaaccattagcctactcgcagcccgtgcgcgcagccaaacctgaatcgaagctgacctgcctaactccaatcgtccatttccgtcccactcattccgtcgtcgaatgccgcttcattagcgcctaactatatccacctccacgcccgcaattttttttatatatatttctaatcaatactgctacctcggcctctgcaggttgaccttcgcgacaggcacgcgttggtggacat

SEQ ID NO: 7086 - DNA, 1061 bp, Zea mays
  Intron number 2 from transcript GRMZM2G066948_T02 (locus G RMZM2G066948) derived from phytozome v7.0 (chr-ID 10; pos 105680276 to 105681336)
aagcatccagttcatctccaccgcgaaaaacactggtgagcatttcattcatggtgattttgatgtttttaaaattttctctgatagttgcacatgcgcctcttgcttacccggccgccattcacttaatgcttacccggccgccgccgtctatgttcgacttacatcgatgccagtagatgcagaacatttgcaaatatcttttttaaaaaaggatcaaaatccatgctacaatgtttactaaaagatgggtattgttaccttttaaataagttcataatccatcctgctgtgtttactaaaagagggcactgttggcatatcgttttctgggtattgtattgttgttttacttcttaccttactgagtggataatgctgctttagatgtgataaacaccgaatgcattttttgtttcggttgagaacatagcttcaaatgatgatggccaccgttttacaatcatcaatatttttctcctttttacaaaatagagaactactcactgaaactatgttcaaacatattaaattttgtgttccagaactgcgttcattatgggtactcatatacatttttatttttttataacgacgatttccagagttgtgcctattcatctgacaatttctaaatgtgactgttttgctcctcaataaggtgggttagaaacactattttattttattgaccacatttaacagaaaaccattgttatttcacacccttctgctaaattaatgtttattttctagatgtttctttcatagagtttgagaacgtatttttggaacaatgaccgacaccatttcacgttcatgcgtactttttcctttctgtaagattaacagaaactatgttgatctattatgattcaaccatctaattaactatagaagatatcaagtgtcaactaaatgaatgcaagtggttggtttgtttaacaaaacagattattttttatggaattcatgtttctctattttactatgttcactatttaagtattgtttaattggttgtagctcaacagttaataggagatcatacatattataga

SEQ ID NO: 7087 - DNA, 315 bp, Zea mays
  Intron number 1 from transcript GRMZM2G091672_T01 (locus G RMZM2G091672) derived from phytozome v7.0 (chr-ID 5; pos 5 5553506 to 55553820 reverse strand)
aacctcgtccccttacgattcggtagctggtctgagtacgtgaacctttcttgcttttttaaatatcgcgcaacagtttcatgcttcttcttatatcatttcgttaagacgagtctttaactacctaatactgctgtagtacatgatcttcgaaagcattgtttgatgttttgattaaaatccaattcgtttttataatagataatatcttgttttgcatttcaggtgttacagagctgcgtgcaaatctagttcagaaatataattatatatatgacaaggtgacagtttttttttcagaaaacttgagcagat

SEQ ID NO: 7088 - DNA, 622 bp, Zea mays
  Intron number 1 from transcript GRMZM2G362341_T02 (locus G RMZM2G362341) derived from phytozome v7.0 (chr-ID 5; pos 2 16951916 to 216952537)
aatccaggtatgaggctaaaaaataatttgttagctcctatgaatctgggcactgcttcaccattttgtgactttgatatgcttattatgtttagtgaactcaattttctatgttccaatcactgctcttagttaattttgatacttgcagtctgtagatcttgttttctgttgattcacttgtaattaaactgtttgggtcactagattggtaggataaaactgaaagcaatgagaatggcatgtctttgggccttaattttgcacaagattcgactgctcatttggtttgaatctttgcttctgaactacatttgttggtcaatgagttctttactttctttagtactcccgtggtccttcaacagactgcacttgtattatcctaatttatgtcaaaaaatatccgaaatcatggacacgtgattgttctaacacagagaaactgtgtgtccagagtacaagcgagatagcagtaaattgtttctttcctatgtgttgtcatcttgcttagtttctccagttgccacttgccactgtaatagagatgaagcacaatgttatattagttatgtttttttcttcctttcttgaggttatcttaggattttccctctaaatt

SEQ ID NO: 7089 - DNA, 1014 bp, Zea mays
  Intron number 1 from transcript GRMZM2G125931_T01 (locus G RMZM2G125931) derived from phytozome v7.0 (chr-ID 10; pos 13555521 to 13556534 reverse strand)
atccgaacacgttttcaggtgagcactcctcgactcgattgattctcatccatcctctcaactctcttgcgataagtcggccgtatgtacgacttactcctacatctcgtttacattattagtacccaacgattgattgttacagctaacgaagataagctgatgctgttgcaatcaatcatgtagtaagtactaaaacgaaaattttctcgtatggttggtggatcgaaaaccttgtggctgatggtagatgcatgctcactagttttggttggtgcaacctaaaactttgctgaagcatctgctggaacattgtgctggtacaaaatgaacctcatgcacaatggccagttgcctgagagtggtaactgaaatgcatctatgccaaattggaattctgatgatccttgacaaggggttttccagtgtaattgcagagaaccaagtccaggtaatctggtataggccactttagggcttattcggttagctctcaatacatgtggattgagtgggattgaatgagtttgaatcccaaacaaattaaacttcttcttaactttttctaatctcatctaattcatgtgtattggaaataaccgaacaagcccttaatggtggaaacggtggttgcataatggttcagtgctgttgttaagatgaaagggaaatctcaaacttaagtagaactggggttgatttaggatctgccaagcttttctttttctccggtcaggggcatctagaatgatcatgatcacaggctcagggccagttgaccattgtcgggttgcttgagataggatacaagcacaatttaattcagaggccggccgtgccaactgaagtcaatggctccatgtttctaagggacagctcaacagggtgtcaaaaaagttgttacctggttgataaaatctaaacaaatcgctgtcaatcaaaacaagccttgttgccacattgaatctcctgaataaaaatcacatgttgacacttgacgtgttcgtcgcaggc

SEQ ID NO: 7090 - DNA, 473 bp, Zea mays
  Intron number 1 from transcript GRMZM2G585723_T01 (locus G RMZM2G585723) derived from phytozome v7.0 (chr-ID 5; pos 2 16444522 to 216444994 reverse strand)
ctatatttagtctattttggttttttgaactgaggacaccccatttctattattttcataacagaaatacaaccaaagtgacccgccactagaaagatcacaaggagcaatctgagagcgaggacatcgtttaaaatcactccctgcacttttcccagctaaagtgccacctgattcagagatgaatactctaactgccagcgtccaagtttgcaggattacaacctcacacaggaggcaaaagtcaagttcatgacaaccaggaaaccacccacacatgggccaacatcaacaaagacaaacaaaacaacactaaagataacttctggacacaacaacactagatcacaggagctcacaccatctttcagctcctaatttcttccgaattgcatcactcttcttaatctcccttagaaacctcatcttttgatagtttattttggcttttagtgtctacttttctcagtgag

SEQ ID NO: 7091 - DNA, 994 bp, Zea mays
  Intron number 2 from transcript GRMZM2G167295_T01 (locus G RMZM2G167295) derived from phytozome v7.0 (chr-ID 10; pos 126577057 to 126578050 reverse strand)
caggataactgccccattctttgttgaaaaacaaggtcattaagttatatgcatgagtaaattggcactgatgattgtagatcttagccttgcttgctctgcacttttggaaaactatgggacgacatggcagcttagaatttttctctatcaagtaaattcaactattaggatttgttgcccctcttttacatagaacttgtcatgaaacctttgcaccggtatattacttcaaattattcaatctaaaatcatgcaatgtccctaattattcgttttcattctgacagaatccaaatatgatgaattcaactatgaaagatttgcttactcctggtcttatcacttatcccatttttgggggaaatacaatatagaagttatttgttgctgcggggacattctgagctatcaagtctgtaatttaactacagttttcccctctcccttgactcatttcaatactgcagatacttcttgatatggattatggaaacttacctacccttctatcaccatcttggtttgcctttgcaggtcctgagttatctggatgataggtgaagagttatagcaacaaggtaatattgcaattatctcatcagtaatcttcaagcttgaatctaaattaagtaggtgcaatatagcaacaaagttagaactgtaattttcccgtatgaatttgatatacaaactaatgttaagtcaaataaaaagataagttttctggatgataggtgcagagttataacaacaaagtaatattgcaattgtctcacgaataatcttcaagcttgaatctaaattaagtaggcgcattatagcaacaaagttagaactgtaattttcccgtatggatttgatatacaaactaatgttcagtcaaataaaaaaagatataaccttttgtttttcaaggaaagtagtatcactaattactccatcatggaaaccaaaaacaagtataatgcaatgatgatttatcttttgacag

SEQ ID NO: 7092 - DNA, 433 bp, Zea mays
  Intron number 1 from transcript GRMZM2G167295_T01 (locus G RMZM2G167295) derived from phytozome v7.0 (chr-ID 10; pos 126578133 to 126578565 reverse strand)
ctgactttgataagtgtaagttgtctcctcggatgtaaacctgtaactgttaagttcccccctcaagtttctaaactttgccattaagctttctaatttccaataatcaatctattaccatgagttctaaattgggcatcaatttaatattttataccaatgaaaacttatattccctccatcccaaaatataatttgttttagattaaaaatacattcattgattaatctacgaatgtagtttgtatgcatgtctacgttcattattgttgtaatgaatatagacaggaaaaagagggctagaaagaactatatttttaggcggagggagtatcttttagggactccaatagaagaaggcttatatcatatatgatttgtggttgtttctatcttatttgatgtttattcaaactaacaggtcgatcagtgg

SEQ ID NO: 7093 - DNA, 797 bp, Zea mays
  Intron number 2 from transcript GRMZM2G075683_T03 (locus G RMZM2G075683) derived from phytozome v7.0 (chr-ID 5; pos 1 86115066 to 186115862)
acgtacagagcggcgaggaggtggctatcaagttggtatgagatagtttgatactgttcgtggaccatttttttttctccctatcgtggaaatacatgcctgacattcggcattagtttgttccatatgcaaacatatatttggccaaccattgctagaaccgtttccccgaagaattctcgtgtagattatggcatgacataattatgaaaatgaatggtgctgtgcatgtaattgctttcaaagatactgacatggttctgagttatatttttacatgactaataacaagactttcaaaccgtttcttggttgtccatgcgaattgacctgtggattcagtccaaatcatggttctgttacctttcattagtgtggctgtataacagctcctccttttttttagggaaaagaagtaacgagtcatatttcatagggccattttgaacatatgaaatagcacttgcagaaagttgatttatggtggtccgtgataagagaactttaaattttacattttatcctgtatgtatgacgtggattatggattgactaaagcaaaaaaaagtgctatgggaaaatttaggttatattgctctatatgtaatggatttgtagcctgaacatatagtattacgttttgagacagaatgaggttagccattttcaagcaatatgatctttcagtcttagtcttggtagtacccctttcagcctcaaggcacactacctgaccgtttttcgtcatctcatgtttaccaggaatctgtaaaatcaaggcatcctcagcttcatta

SEQ ID NO: 7094 - DNA, 753 bp, Zea mays
  Intron number 1 from transcript GRMZM2G086553_T03 (locus G RMZM2G086553) derived from phytozome v7.0 (chr-ID 10; pos 135576041 to 135576793 reverse strand)
ctttgggtaatatagcctgcagccctgcaccatatctctgccttccgtttatgtttatgtctcaattctttaaagtgtgctcttacttaagagctaagaccaacaaaatctctatatccttgttatgcttttaactagaggactgggcacagaattttgtttttaaaggacccccacattttaaatgaataaaaaataacagagatgccacatgcaaaaaaaaaaatcggaggaaaactctagtttataaagcaaccacagtttgagagtactgctggggaaaccaaacaaatgccaagaacagattgaccaacggcattttaatattttggtgaagtacagtccttgcctttattattatgcactgtataagcattataaagtagcttctatccaaacacgagcgtggtctttgaatattgtatctctcattgtaggttgcttgcataattttttctttttcctaataagggttcataacttcatatatgtacacagaccaaccaaagatggataatttttttccttgtaacctaatcatgcttagatttgtagtaatctctaaccttttacccttgctaaccaataaaggcagtaaatatttgcttttacttggattttttcaccaccatatttcattgccaggatgtcaatgataatgccatttacaggtttctttatttagtgcagcaactctcactgtgtatgtgcttttcaggatcttcggggacgtcgtttactccccacataata

SEQ ID NO: 7095 - DNA, 973 bp, Zea mays
  Intron number 1 from transcript GRMZM2G135904_T02 (locus G RMZM2G135904) derived from phytozome v7.0 (chr-ID 5; pos 5 9035823 to 59036795)
ccgctgcccgtcgagagccacaggaaggtgagcgaccgactggacccgcctccgttgccttgccttgctcgctcgctcgcttctgtggactgtggactgggtgggggcgggcggacgactctgccttcctcctgctgctccttgacccgcgggtcacgggaaatctcttgccaaggtcggattttcttgggatctggctgctcgcgtgccgtgcaatttcttgccatgtagtaggactgtagctgtaggagggcaggagagtgactgcctcgtttccttccgcgtatgcattggggagctgtgcgggtgatgcttttctattttcgatctgatcggtgctgcctttactccgatttcccagcttatgaaataatcgtatatatatgctcctacttactgtaatagtagtatggtgctctcgtcttgcgccgtcaaacttcagttattagctctatatctcggcaattgctggcatcgtccgcgttatactgatcctgtggggaaatcttctctaagttgcccacttgtgtttttgataatctgatcagctgaccagggcaccggctcggcttcaatgaggtagacttgatctgcacctgtacctccagttttcctttgcctgttgctgttagggattcgactagctcaatgagaaaaagtcttgtcctcgcgtgtgttcctactgaattagctgaccgcgtctttagtgaaaagtcaatttttagttggtcggtcatggcccaggggaaagatcctagctttataaacttgtagatgcatgtcatgcggccattccatttgatttgctgacgaacatctctcagcgataggatacactactgttcagttagccataggttgtttcactacaggtattttgtaacaagtcattccttggatactcatcattctgtatatctctggttaacttcaatatgtacttgaaattgcggtcttacagaactcagtagaa

SEQ ID NO: 7096 - DNA, 393 bp, Zea mays
  Intron number 1 from transcript GRMZM2G098904_T02 (locus G RMZM2G098904) derived from phytozome v7.0 (chr-ID 5; pos 8 7113770 to 87114162)
ctccacgacgatcgagtcgcagtcgtcgatctgtggtacgtatcgctgcacgctgcttccgtcttcggctccgctcttccacttttttgtttttttttttttggttcagagcaacaattagttcgaagatcattcagaacagtgcgcagtgccttctgtgctacggatttgaaaatcattcagaacttgtggtttttgaataaaaccagctgcagccgctaggcaactcgcggtttcgacagaaatcagatgttgcagcagacaagttgggcttaaataattgtagggagtaatcctaggttagtttccctgttctttctagtagctcacagtaccaagttcaatcattggcatgcagcagctgcagcagcaagtccaacatcggctaccaac

SEQ ID NO: 7097 - DNA, 707 bp, Zea mays
  Intron number 1 from transcript GRMZM5G818977_T04 (locus G RMZM5G818977) derived from phytozome v7.0 (chr-ID 10; pos 144314837 to 144315543)
agtcttctggttcacccgataagaaggctatcacttgatgtagggtaagccttttcctttcaagctctagatgttatgctctctactaacatattgctagtcaccaccgcgttttcggtgtgattatactgtgattttgtttgacagatcaaactagtagtttcgttgtagaatgtgtagtatgtaaatgtgcctctcctcacctttggtttcttgagaatgttcactctcaaggcagcccagtcatggaggcacatagcaattattggtgagtttaacgtggaagcttactgttttgttgtggtattgcttctaaaatctctcactaaatcagccaacgctgcggttgcttgtccttagcttgtttagtgttcgctggttattgttatgataagttattttcttcagctttcacttacctttgttattggcaacatacttctgtatgctccgcccttctggcttggtaggagttgcctgcacggagcctgcccaaacacgatcttagttggggttccacatgagtgcttttacgacattttgaactagatgcgtgatttattcttcttgacttaaattttcaatatttatatatttggcagatcatagatggaaaaatgtgcttaaaattttcttgcttttgatgatgtgttgcttaattgtgaggtgcagacaactccaagtcgctgctctccagggagaaccta

SEQ ID NO: 7098 - DNA, 1049 bp, Zea mays
  Intron number 3 from transcript AC183413.3_FGT006 (locus A C183413.3_FG006) derived from phytozome v7.0 (chr-ID 5; po s 112046808 to 112047856 reverse strand)
agacattctgcttggaagtgcccttacatacccctgtgagggcactgaccgagattataaatatggatatgtacttaaatattttttctgtcaaacctttagtccacgtaatcacacatccctgtgcattttttggttagaaaacatgccactatttgatggcctgttggctgacatgtgacatgtcacagttgccttagagctttacatctttgtggttctaatgttctatgacattacaatcacatttttttgttattatgatttacatgctatctacacctatttctttgggagcactcaaatatgcagcattctttatcattaattttggttacttcttttgaggtggttcttcaacatataactaccttggaggaaccaaatcaccacaacgttgtgttacgttttttgtgaaatttgaccttgacctttttctgttgcagctactgcacagggtgtccaaatttcttcacgaaaacaagttttttttgttgcagctactccagaggctatccaaaattcttcatgaaaacaagatagttccagttaattttgctatattataggtatggtgatgcttgaagaagccctaattccatttgaactactatacaacacttcagaaagggagtcatttcagtgaagcatggtttttttatcaccaacattttcttcagtgttagtacttagttgaaattatgaacaaagacctgacgcagtaatggcatccaggggtgacaaaatgcctgatctattttagaatttggagtctaaaacctgctaccaaaataacaaagtcaaggttgggtaagtacaactactattccttctatcttcctagtcaatagtgaaacgatcaatcacctacatgtttgccataacctttctggagagtactctaccttttaggagacttcatttcaatagcgcaagcgccatctttggacatgcagtatccacttttctgacctctttgccgaccacccttctttttgtgctcatcatcaacagcttcatcattggacttgcgacattgactgcattgg

SEQ ID NO: 7099 - DNA, 629 bp, Zea mays
  Intron number 1 from transcript GRMZM2G021270_T01 (locus G RMZM2G021270) derived from phytozome v7.0 (chr-ID 5; pos 1 99868399 to 199869027 reverse strand)
ggcgtcgccagaagaagtacaagcaggtgacaagttttggctgtctcttgggcgctcttcaaatgggcgttttacccttttggtttgttatatttcctgtgtggatgtgtattgaaatggggtagatctgtcagaacaaattcgcaactagaatgttttgctttgggttccatagtcctgttgaccagacaaatgattattagaactaagtgccttgtgttgtcagtttcgaatctggtggataaagcattcgagtgtaggttgggatttaataattctactaggcgtgcacattttttcagcagttcagtatatctgctctttgttgtttaggagtgaatcgattcatagattttgtcctaagaacacttaagattccttttcaatttaatactgatctctaattgtttttgtgatacgcgctattttttttacggaatttcatcttaaattgttgtagcattggtgagtaaggttatggctcaattggtcactagtttaaagcaacatttatagggtccagatggcatggtcaatatgaattgatctgcacatgttaggggataaccattctagatgtcaagatacagagtgtgaagtttcttcttgaattcaaatccaggttttct

SEQ ID NO: 7100 - DNA, 553 bp, Zea mays
  Intron number 3 from transcript GRMZM2G350312_T03 (locus G RMZM2G350312) derived from phytozome v7.0 (chr-ID 1; pos 6 5658507 to 65659059)
ctaggtgagcactttattgcgaaccccataatttcaggtgcccaatctgcgaatggcctactcttctttgtttcagcgttgcaatcttaagtaccattgcttcagagttcatgtttgttgtttcatgtttaaatgttatgtatgacatgccagttgtcacataccactttctgaaatgtagctgttttacatgttgcgattgaggccaggctcaggtgtttttttcagttccaccactgtcaaaactttgtttggtataatagtcttgtcttcccaagagagcatgagcatggaccattgagagtatacgaatatgcctaacatcttataatttattagacttgaattttcttgtttttttaattgaaacttgcattcatgtttaaccttgaaccctgaccatgcactttgtgtgttttgacttttgaacacaaccctgcacctgctctttcctttgtactcataacgctttatactgctcaaaatttgctacggggcttttttttggcttatcacatttagcatgcctttgcagaagcagatagacagaaca

SEQ ID NO: 7101 - DNA, 780 bp, Zea mays
  Intron number 1 from transcript GRMZM2G075096_T02 (locus G RMZM2G075096) derived from phytozome v7.0 (chr-ID 5; pos 2 07198699 to 207199478)
tgcttctgctgcagtttcccagttagttgaagaaggtacaattacttagatttgcacaatttttttctcttcatttggttaaggttctgtggttaatatatctggggattgccatgctgcagtaagagctcgcagtttctgtactgtctataaactgtgccatgtttgactttaagatcactagtagatccatagagctttatgctttttcgaagcatatatctattaatgcatctatacttctatagctggacaatataatctgtttcaaatcctgcatatattttcctcacagagtcatattttatttaaatcacgaagggtgtgctctttggttgtctctcccaaagttcataagtttttcagctaagggtggttatcagttcaaaaaaatttcaagtaataccatgccctgactttgcgggctactactatagttcctgcgtatagttaggggtggtaatgggctttacattttacactataaaatttgaggatcggatcatattagaattagaatcagactctattttctattcatttttgaactaaacttaattaagggctcaaatgaatcgtgaagaaacatttgaatcgtgatgcattaccacccctttgtatagttaagtttcttcatatgggattagttaatctttttcttggcaaactggcaagctatatatgtttaggttgcaaccaaattgctattaaactcaatgtaagtgatcacatgcttttttcctagataaacttgcttcgaatcagaggaggcgtcggtgc

SEQ ID NO: 7102 - DNA, 618 bp, Zea mays
  Intron number 2 from transcript AC194966.3_FGT002 (locus A C194966.3_FG002) derived from phytozome v7.0 (chr-ID 1; po s 35659890 to 35660507)
gattctgggaaaggtaactgaaataaaatcaagcagtcaaaaagaatgcagaaacattgttatacagaagaactgttagaaacaacaagaccaaaagggcaagcgcaggtacatgtagtctatctcttctctactatatttaagtgggagtttctcccttcgtgcgtcgtcagcaagcgcaacgagcatcgaacgaaataaaagtccaaaaaatgagcgcagtgctgggttcgaaccatcactctccccgctcccacactcaggttctaaccattggagctcacaaccatttgtgttcaacaaagaatagatattgcaaatatttcgaatataaaaaccgtagtaacacacgagcaaccgattagtaaaacaaggttgggacagaaacaggtgatactgattaccgaaattactcattccctacatacacgaatgtcaaatgtggtgcacttggcatccttcaatgtttatgtaagatcaattattctggaaaacaagtcattactttgatgttccttaaaaaaccatacctcaggtttattggaattcaatatgaaaaaaagtgccacactatctcaagtatataaactaattatgtaagattctcttgtcatagac

SEQ ID NO: 7103 - DNA, 791 bp, Zea mays
  Intron number 2 from transcript GRMZM2G153383_T01 (locus G RMZM2G153383) derived from phytozome v7.0 (chr-ID 10; pos 34772936 to 34773726 reverse strand)
gttgtcgcggtcaagaagctcaactagaagagcatgcaggggtttgaggaatggcaggtaaacaaaatcatgttccttttttcgcttctatataatctagtactacgtattaaataacaatgacaataatcttgcaatagagggtgcctagtataagaatagtataagatcggggccttgacttggttttgattgctcctgatgatggtacatggtagtacaagcaaaacaattgctttgttgttagctacagatgtagttcaatttcttctcatacatcactaatgcagagagcttaaaaggagcacaaaagattttgaaggttcgcctgaccactgcaccctttatggttctttatgctttgttttaatgctgatgacctgtctgtcagtttagtacatgtgtgatggctgattgtttaattcagctgcgattactcggtagtgccgatggtccaacgctgaccaggaacatattgttggaagtgttgtacaatattacaactggccacatgtctatcacaatgcagttactttttgtttgttgccatgcctttgagaagggaaaaaaattgttttctgagctgtgtcgtcttcagcaaacacaacaagttcagcaatgtgccacacattcttgcaaattgttgtggccacaattgactcacttaagttctcttagtttagtctaataaatatctttgttttgctagatgttagtaagcatatctaatggagacttctcgatgcctacctgcagtcggagataaattttctaggaaggctctcccatcc

SEQ ID NO: 7104 - DNA, 817 bp, Zea mays
  Intron number 2 from transcript GRMZM2G129817_T01 (locus G RMZM2G129817) derived from phytozome v7.0 (chr-ID 5; pos 7 151681 to 7152497 reverse strand)
cgcctgggtttaacgaggagaccgctttctctctggtgtgttcgattactccaccatctcactctcacagcgacacgattggcatgttgatatacctgtttccaaaattacatcttgagttaagacctggctatccattactagcaaatagcaatatgccttctgtctttgaaattgcaccttgagttaaatcccatgttttatccttatctgctagcaaatagcaatatgccttctgttttgaggatgattactcatgtaggttgagcataataagttggggaatcagttcactgctttatttatagttttttaaacttgcattttgcatttcttggcaagacaagctatttgggttgttgttgtacaaaaaacattctttctcttctatctaattgcttgtacctgttttgtgttaattcgttttatgtattacaaggggagtaccgcggaagcaaactggaaaatggttgcttcgcaaattagctagcactggcaactgcataataagaaactatcatcggcctagttctaatgatgatatgatagatgtactccgcttgtttagccttctctagctactgttcttacttacctgcaaggcatgtcggcatgacatactttgttttttttattcttaatgtgatacaacatcatttgcacagtgcaacttggaacatttttcagtatcttgttaccttgttagttcaaacttatcatagtgttatttgctgtctattcttcattgataatctattcttgctattggctgtctaaaacaggagtgcagcattggggaagctgagacgccgaacta

SEQ ID NO: 7105 - DNA, 805 bp, Zea mays
  Intron number 1 from transcript GRMZM2G005562_T06 (locus G RMZM2G005562) derived from phytozome v7.0 (chr-ID 5; pos 8 2554791 to 82555595 reverse strand)
cgaatctcgacgatcccccccttccttccttcaaggtacggcgaatcggcgatcatcctcccgctttcccttctcctctaggtataatgatttgttataggttatggggacttttgagtcatcgggtcgatctgacgatttgctatgggtgctctgagtactcgacctgggaactgtggggcgcttgtaggcggcgcagagttgggtctcgtcgttgtaatgattccatcggctcgttgcgtagggtttgatctgcctgtcgttttcttttcttttaattaaatttctgatgcacagtcatgtattgatctggtttggtgttcctagatgcgtgtaataaatggggaaaaaaccatgtcgtaataaaatcaatttatttttaataaaaaaaatctgaattctggctctagtgaataaatggatagagcctggctctaattctggtaaaataaaaagacaacgagcttaacttcttaattggtcaattggaagggttctccgatctaattagacgttgaaaatatattgcaagattacttcacttctttaaattgccaagaaaccataaatttaccattgtgattggggctacttttttttaacctttagcctttgtgaaatttaaccgaatctgttcattttggtatttgagtgtttttaatggattagaaattctttcttttcatgtcttaccaattcagtggtgtaatttcatctagattctgatcgtatctaagagatcctagttctgtcgtttttttaacatccagaaggagagcaccctccacctggtgctccgcctgag

SEQ ID NO: 7106 - DNA, 623 bp, Zea mays
  Intron number 1 from transcript GRMZM2G030858_T02 (locus G RMZM2G030858) derived from phytozome v7.0 (chr-ID 5; pos 9 47574 to 948196 reverse strand)
acaaaccttatatcaggacaagtaagaactctgtgtaaacttgcgcgctcctttacatctagctacatggctatacagattcagttaggtgcagtgttataatgtgactaaatcatcaagttctgcatatacgatttcatataattagtattttgaaataatagttagagggaggaatttgagaggtgtttgttttagttattcctgttcttgtattaacttattttggccaaaccatagttaggttttgctccttttcttttgttctgtaacgttgatggcaatgatgattgactgctgaggttgtgaggtggtctgcctttaactgaccagccataactcagctagtttttttctgaaatggttttcgtcagtgattgtcttcatgccattttactgtttcactgtgtagcgtctaggcgtcaatgccttaatgcaacatgatgtaaaaccttgaaagaattgattccgtcatctctaccttatggatatatttgtctatgctttatttttgtgagtaacagataacttactttcttgaagtgatactaaacggtgttccacaatttttcccctgaactgaaacagcggaaagttactttcctgccagagaagcctcacac

SEQ ID NO: 7107 - DNA, 645 bp, Zea mays
  Intron number 2 from transcript GRMZM2G042438_T01 (locus G RMZM2G042438) derived from phytozome v7.0 (chr-ID 5; pos 2 04631742 to 204632386 reverse strand)
caggtaaaatgttatgtttattttctccgtattttgtctttttaggcatttcttaataaatcaatctttcattctatgcattaggactcagttttcctaaagcttcttttaggtatgttcttaatctttttcagaacagcgccataacctactaatagttgtttatcacgatattcttttgttccaatcattccttgtagtttactagggagttttggtgctggtaggattttggtaatagtccatggtggaaaaagttatagcagaaaaagctctattttcagttttccatcgaacatcattttgataggttgaagagccaaggctggcatatttgtctaaaaatgagaattatatatgtcaataaatattgctttactagcctgaaatagccgaaatgtcacactacaccgtaacaaagaacagagcttaacaaagcaagaacatattaaaccaagtagttattatctgcagctcctttaagctacagtggggggggacaaagtcatgttatatttcaagtaaacgaaagaaaacaaaacaaaggagatgtgtgttcacacaaagaactacatgcatttacctcactttttgtttcatttattctatatttttcacactttattgtaggtggttcgaagttct

SEQ ID NO: 7108 - DNA, 554 bp, Zea mays; identical to SEQ ID NO: 5554
  Intron number 2 from transcript GRMZM2G107737_T02 (locus G RMZM2G107737) derived from phytozome v7.0 (chr-ID 5; pos 1 18492206 to 118492759)

SEQ ID NO: 7109 - DNA, 801 bp, Zea mays
  Intron number 1 from transcript GRMZM2G010321_T01 (locus G RMZM2G010321) derived from phytozome v7.0 (chr-ID 5; pos 8 4934472 to 84935272)
caggatctccaccttccccagggccttcgccaccggtacgcccgccaccccccatcctctgtctccggcgccctggttcctcggatcacggctcctcgcggttggtacggcgccaccttgtgtcgtttcgcgcgcgtatagatcccgactcgcggttggtactgttcctgatttgggccgtggttctgcgttccatcagacggcgcatgcgttcagggatggggggtttacaatggggtttagccgccgccgctccttatttatcatgaatgctttgtctttcccggcgggggggggggggggggggggggggttcgttcgttcgttcatggtggacagcgtgtgtgtggaagagaagaaacaaagatcttgtatttacagtgctaatgtgtttggaagatcgatttccccagatttatttgtgttaggtgtggacgagggaggcaatgtgttacaaactgaaattaatatttttatatgaatactcaaatatttatatatttgtgttggatcttagatggcctttggtaaacctgtgcttcagtacagtttttttgttgtggggtttgttctgcaacagtaaaatgtggctgagaaaaaaatgactggttccttgtaagagatatacatatttgttttttttggtatcaaatagactaaatggtggtctcagaaagtcactgggtggggttggtgtagtacttctgtgtgcattgttgcccccacaatgccactccaatgcatacaacctctgatgctccacatgttacccccttttttcagtgctgaaggatctgaagt

SEQ ID NO: 7110 - DNA, 759 bp, Zea mays
  Intron number 3 from transcript GRMZM2G115621_T02 (locus G RMZM2G115621) derived from phytozome v7.0 (chr-ID 5; pos 6 0778098 to 60778856 reverse strand)
ctaaattcacaagaaacccccctccacctcaaggggtaagaccacagcttacaccactctttatgcgatgtaatatatttgtgttatgctaatttgattcactacaatgccacaatccttaccgttcataatattttgcttctctgtctcctgtgatcgcttaaaaaagtacactgttcctagtttaagctaacttagtttgaacgcaagggatgtagcagtacttaaggtttcatctgtaatttctcaatggatgagcgagctagagtttttatttaaggcccctttggaatgcgggtttttttagttgcagtgctttggccaaaattataaattcatcgcaggaacttttaccaattcttacgcaaatgtagttgcttttacagttatttcataaccgagtatcctctacttggacgtgatggggtgaaccatgccaaacatctctgctgccatagtatcatattattggcttaaagtttacaaaatgacttcatcttctatggccacattaccctaccccgtcccccctcccacacacactgatttgctcgccaagttcgtttttcatagcaccgtttcctctatttggatgctacagagtatcttatagagttaacaaaacaaccttgttttttatggcggcattatcttgtttagctttgctgaactatcttcaggtacatgtagcaagattctgtacaccaaaatgttgtactaatggcaattgtgccttgtagatcgagatcatctacaatt

SEQ ID NO: 7111 - DNA, 663 bp, Zea mays
  Intron number 4 from transcript GRMZM2G098577_T04 (locus G RMZM2G098577) derived from phytozome v7.0 (chr-ID 10; pos 128109147 to 128109809 reverse strand)
ggtaggcaacaagagcaagctaacagacaagatcagttaagctcccagtttgcttcgaaagctcaggtacattcaaaggagtgtatgaacacctctactagttattttccccgttccatcttactattccattatttgttttcttccttgcattttgattatttgcctgtgctttttatattttgcatattttattttgctctgtggtcacaacatgaaactgatttggttagctaccaatttacaaccaatgcttgtttgacgcaactctttctgttaaattttgtagaccaacttcattcttctgacctatcactatattaatgtagggatcatttatttacctaaacgcctgacctaggaatttgcagtaccccatgtgattaggctaaatctggctacgaatgttggacatgcaaatgacatgatgttgcactaagaacgaagtgtaacggaaaacaccagtttgacattgtgaacaatatatatgccttttatcttacatactgtattgctgcattatgtatataggtgggacgggatagccattttgcagatccgtctgttatttttttcatgtaactactctttggatcataattgcactgttctttttaccaaattccagtttggctctacccctgctcttatcaaggctgaagt

SEQ ID NO: 7112 - DNA, 1019 bp, Zea mays
  Intron number 4 from transcript GRMZM2G097481_T01 (locus G RMZM2G097481) derived from phytozome v7.0 (chr-ID 10; pos 120619879 to 120620897)
gctaagtttattgagcgttcaaaggaacaccagcagtaagcaaatatggctataccttgttctagtttttgttgcaagacatcatgtgaatgttcatgacattgaatctgtgcaagttgctataaggttacaatagtttgggtttgatgtgagtctatgaatgaatcactaatttgtgctacaatctgacatgacatattttgcttctttgcattaatgcttctaaaaggaagtgtctttaatattgaactgtgttgtactccctccgttttaaattctaagttgttttgttatttctaggtactttattgcccatgtatatagatataacatatatctaggtgcatagcaagatcgatgtatctagagaagccatgacgacatataatttggaatggagggagtaattcttcaatggaagtggctctaattatattaaagaaagatgttgtaagttcctaatcatctcccaccaaatttctcatgtggataggttggatatttaaacttgaactgaatttatgacattgcattaagggattagttgtgcttgactggtcttcaaagtgatatgtggcccctctttcactatgcctgatttcaccaatacctgaaaatataagaaaaatacaatgtctacaggtctggcctttgagtatattttgaccaccagtaggcatgtttaggctcaggatctgaaccagatcatgtgataaatgaacaggtctggagttcagactattttagtttggattttgcaaacaccacaggactcccccctctttacagataagctgtagtatgctttgagaaacaaagccactcgctcgctgcaatgccagaagtagccaaccttgtgcgcttttaggtgtgagctacaatagcctttctggaatttaactatgtggtgcatataatattttggtaagctatacagatgatcaggactgttagcctgacgacattaatcttcccatctcacaggcgtgtgcaggaacagagcaaacttgggcgcttat

SEQ ID NO: 7113 - DNA, 545 bp, Zea mays
  Intron number 1 from transcript GRMZM2G155753_T04 (locus G RMZM2G155753) derived from phytozome v7.0 (chr-ID 1; pos 2 10841982 to 210842526)
gcttctcgccaagctcggggcgccgagcgttccaggtcagtcgtcctcttacccttgtcatttcagtcacgttcggcaatattttcttttcgagatactgttcgtatctctaccattaggttccggcaaatggaacgagtcagtttcctgtcctgagcctctttgctactacttcacttgagattttttagttctcgttaagtttttttttgaggctattgcctcattgtaatctaattggtaacacctcacttcagttttttttttcaatgcggcttcagttaccaacttaactaactcagtgataatagatattttgacttgggagcactattcataacaatgatcagttgtggaatgtggtttacataaggccccgtttggatccttgaaattgattttattctaataattataatttagtcacaaattaattaagctaatatggttgtatatatatgtatattattgttacccataaaggtaagatacttatacagttatacattatatttctaatgcagggaagcgtcgagttgaagaag

SEQ ID NO: 7114 - DNA, 653 bp, Zea mays
  Intron number 1 from transcript GRMZM2G108410_T01 (locus G RMZM2G108410) derived from phytozome v7.0 (chr-ID 1; pos 2 39435588 to 239436240)
gggagggtggcagctccacgggcgactcgggagcagtaggctccccagcggcggcggcaccgagctaccccacaaagtcgcggatgctgggctccagagctcctgccattgtgttacaaaaaaatgttcttggagataagaaagagctcatctattgtaatgaatagtagagaaggaaaaattgatccccgtcgttcacatttgtgatgttggtctatacgattttgctagctatttcattcaaacaaacaatggcggtgctgtggataatgctgtgtgcttcaatctcgttgaattatactgacgatacttgttgcctccaccaatcatctcgccttttgagttgctcatcaaggctgctgccatacatactggttattcatttttatggctgtgagctccagaatggcttttgcacttagtggcagcttgcacttgtttcttagtgttgcatccagacgacttgagaaaggaattctggactaatttttctacgcagtatgttgttcctccttgcatttcttgaatgtctcaagtccaaccattcttagcttatgttacctttcaagtcctccatgattgctgtagggttaaatgccatgttacctttctgcacagtgaatattacgcaccgggtatccaagtgacaaaac

SEQ ID NO: 7115 - DNA, 898 bp, Zea mays
  Intron number 1 from transcript GRMZM2G085336_T02 (locus G RMZM2G085336) derived from phytozome v7.0 (chr-ID 5; pos 2 187326 to 2188223 reverse strand)
cggtgggtgccgctaccactgcgcagtagcctccggtgagctcctcaagtcccgtttgatgcaatgactcaagtcagtgcgcgtagattggcagtcaatataccgaattcagatgtttgtttccgatccaacattctaacacaatgaaatgtcttagtttcctggtgggttattataattcttcccttagttctccatgtaacaaaatggaaggtgcagctctaaccacattagagcaactccaagagttagtctaaaattattagcctctcttggttgttggtgtgatttgctagagtatccaagcagcttatttctattcagatagaaaactgtatgatgtagatatatcaattattatttctaattgtttggcaccctgccttgggagcactcatccagtcacagtcaggtcaatccagccccagctcctcagatttgaatgcctaggagcgctgcctggctgggtcaggcttcctagggcttgatccaagaagggcatgcatcatgctttgaatttttttaattgatatgagaggaaatttcctacagtgttttgacatgttctattaactggcatagagtaatttaccatctgttctatgtcattgcccattgcttttcaaaattggacacctgaatgccatcactgtgagcttgatgatgccaagtacagtaacacatggaagctggaagggtaacagcttcttcacgcgatggttgaatgatggggatttcatagagggcatcattcctgcaactgattatgtatatgaggggatcagttttgactgatggtataatgggaaaccctgagttatcgttacttgatccctaatattttactcgtggtgatcttgtagggcatcagaagcctttcatcacagttcagcggcat

SEQ ID NO: 7116 - DNA, 804 bp, Zea mays
  Intron number 1 from transcript GRMZM2G090887_T02 (locus G RMZM2G090887) derived from phytozome v7.0 (chr-ID 1; pos 1 13876459 to 113877262)
catttttatcttggtgattcatttgattctaactggtatgccaaattttgtaatatatgactgttcttgtagtagtcatatctttcaagttcattttgcaaccatgtttatcatggcctctagtcctctacattcccaaagcatcaaaacccatgtttctttagcatattgttttatctttgggaaaatattatgattggtttgctgtatgtttgtgtcacaagttgttttatgagatatatttataaattctaaatcatataatttgctttgggtacgtgtacattgaaatatgcacaaaacgatactctctaagatgggtttctctctagcccagcttatgataggtaagcttattctggttaactgtgcatagggaagtagggatatcagcattatttatacttccctatagaatgcactagaaagcatataggattatacttgttagaatctgtagttttgtgtctgagtatataagtaacacacttctctaacatacaaactctgtactgtgtgtttttgttcatgttcttggcagatacaatttcgttaaatggttgagattgaatccaaatgttctgtattctactgcagtttttctaactctagtttcttgagcacaatatgtccaggcctgtttatacatgtgtagtcagggtcatgaagcagcagcaaagcgaaacgggtagccacatagggtgctgatgttttttttgtgtgtagttttattctaagatggttattatcataattaagcatgccataggctcttgcccgttgctggattgctgctgttcctaa

SEQ ID NO: 7117 - DNA, 715 bp, Zea mays
  Intron number 1 from transcript GRMZM5G846875_T01 (locus G RMZM5G846875) derived from phytozome v7.0 (chr-ID 1; pos 2 72743921 to 272744635 reverse strand)
gcactcctgagccagcgactacaaaatccactctggttctctacttcaccctccatattacaatatgtactctgtagatgtgagatgagacacccaagcagtcaaactaaacactattgtccaatcccctcttccaaattcattacaatcctattagcatgcaaagatttaatttgatgcaatgttttgatttgtactacgtttttactagctttgcagatgcttcagaaggttatggtcagtgacttttttcttttcagatttgttagaatagacacagaaatttagatttctctcctgtaatgttgttagcattggtcttaattttatttgctgttgttaggagaggatttgattatcatgatcagtacaagatatcaatcattaaatagcgaattcactctaatttctagccaccatttttctaagtaccatgttgctgctctctttccgctggatgaacatttgaacagtggcactgaatagtgatcttatagtgctggcccgcaacacatggggtgcttctgttcttttacccattgaaatgttatggatcttttttctaatctaagattagaagtatggtcgtgatactattttgctataatctatgaatgtttttctgtaaaaaccaatctgtttttgctttagattaccaaactaaattgtctctatgcttttttgtgggtgattttgttggacccctacagccgtg

SEQ ID NO: 7118 - DNA, 886 bp, Zea mays
  Intron number 3 from transcript GRMZM2G019553_T02 (locus G RMZM2G019553) derived from phytozome v7.0 (chr-ID 5; pos 1 33774506 to 133775391 reverse strand)
ttgctattctccttaggaaggtactaactttttaaacttgaatgacttgtttacaggactcattgtaacagtttttttttgccattctcttgctggataagtcagatttgctgatatatctatgtattcgtttctgtgttttgttgcgacttttcaaccactgctctgaagcaaaggaagagttacatctttgatatcgtttttttagttttcacactactcattatagctcaatgcacatgtgttatttggtacatctcttgtttccataattgtctgttcttttacctcgaatagctgagttaacctctcttcttggtggacataaaactgttgttagctggactatttttagtcatgtaaagtttatcaggcatgatactgtcataagtttacttctgagatttcggtgcatgaacagatgctgatttgatagaaattggaatgatgtagctattaaatttgtggatttttcagatgggatatgttttgcttaatcatttgcttttgataattgtcatcacaaatcacatgccatcgcattttatacagtggtactgtatccattacaagtaatgtcttagaactttggattcctgatatctgaagcacctgtcgactcctgttttgtaaatattagcgcttaggttttgcgattttttctgcaactacagttttgacaactaggttccatgatagtgttaccagatgttaagcgctatatgagcttctttttcttcctctcctgtatttgtgtatatatatatatttattaaatgtatggcaaccaggaaaagagaagcattcagtagtaatgctaaattgacatttactgtgatattttctgttagacagtaacaatattacattttgcagctcattcgtg

SEQ ID NO: 7119 - DNA, 777 bp, Zea mays
  Intron number 1 from transcript GRMZM2G159535_T01 (locus G RMZM2G159535) derived from phytozome v7.0 (chr-ID 5; pos 2 08380962 to 208381738 reverse strand)
cgctggatcttggcaacccggtcggcgtcgtggaggtaagatatttgcaaggttgtgataaaataaccaaagaactgtatgtatgcgaatttgttcgttccattaccatactgagtgttcccatgttggagcaattgtggtgcgtgatgaagtggaaactagcaaatggtttgtgacgcaaattgtttgtcatgaaaagatgggtttgctaagttagaacgggggaaatcttgtctacgatttacaactattattttggtggtggttctcaggttgtgtaaatacttgcttctgttcattggtttagacttcgagcagctatatattgcttatgttatgccaaagcaaataaaaaacactatttttttttgaagtaaaggtactgtaggagggtcctacagtaatattattaaatcaaaagaactgagtttagggaggaagaggaagattacaaagaaatgaaagatagagtgagccgaaggggaagagttacaaccctaaattgagtagccaagatgcaatgtcttctttaagaacaggcttgactctatggcataacagagcaatttcactcctaaacatagccttgcactcaggaaccgaagggggaatttcattgaagatccaattatttctgcacctccaaatgcaccacgtcatgatgataaaaaacactattactatatagtttccactttctcccacctgagcataagggttttccaccagttgtacttgtaaaatttgaatctgactgatttgtatcctttcaggggg

SEQ ID NO: 7120 - DNA, 640 bp, Zea mays
  Intron number 1 from transcript GRMZM2G073966_T01 (locus G RMZM2G073966) derived from phytozome v7.0 (chr-ID 10; pos 31496237 to 31496876 reverse strand)
gggttcatcctcgccggcgacaacctcgtcgccaagtgcccctcctggttctggtgcattctttactcatctcgccctgctctgtcttccttgaaacctagaaataaacatgtgtatttcaaatataccatgattaaaacatatatctcttctcttgagatgatcaatatggttgtatcacttctcttgtgatttttattcctaaatacgtcttttatgctaatttgaatgtgttattatgctcaattaccagatctcgtgtacgctccgcattataaacacgtagaccaccagttctatatcatttttatgttcttttggtaaatacgtagatccaagttatatttcccctaaataaactagacaaacctaggagcaactacatgatttatataaaaaagatataggcaccacaattctgtatcggctataactctgatttgggtagtctgtgtgtacatccacactttcaatcagctcagttgtcgcgaccctctatcagttatgataatgtgttttgaagatgcttgaatggtttcttggttttctggaatcggaataattgttcaaacttttattagcatggtgtctagccatctttcaaactgaataaaatttaattattactgttgtacaacag

SEQ ID NO: 7121 - DNA, 683 bp, Zea mays
  Intron number 1 from transcript GRMZM2G372502_T01 (locus G RMZM2G372502) derived from phytozome v7.0 (chr-ID 1; pos 3 6892359 to 36893041)
cctttggtgtttgcctcggccctttgattgcaatagtatgaactgttagtgtattctgagtgctaccatggtttaaacttccccacatccaagcttgctaaatcttatttcattccatgtcataagaagaccagtaaacccatgcccctaatgtacaccaatttaaccatgcaaaatctgtgaaaatttgagtttcacactcctaatgagtcattggctacaattttgtcctcccttatggtaatatttttcctggaccctgaccttaacctatgaacattaaggagcaactgacaagtaaataagcagtactgtttgttcccttcttttctgaacttgtcagagcgcctgggtttttcctaatcagatgagcaaatatatgtttttcattgggaacttgatcttgtctttttttagaacatcagagcagcctaagtgattttcctgtttatacaaattacagaggcagggaggaggcgaaaagcccaattatttaaactgctgtatctggacatttaggatgtggatttttagttagatgttgggtgcttcttgacctagagcagatgagtatatatacctatttgtgacttcaggacttgaactacctataagcatgaagatattgtactaattcatgaatacgaaaactgtttcttttcagggtattgattacctgaagt

SEQ ID NO: 7122 - DNA, 919 bp, Zea mays
  Intron number 2 from transcript GRMZM2G069099_T03 (locus G RMZM2G069099) derived from phytozome v7.0 (chr-ID 5; pos 2 10096283 to 210097201)
ctcaagcgcctcaactttgagctcgtccaggttgcgtattgctatattttgcaaccctgtaggaactatggaactctacctgctgccaatttgctgtactctgttagtctgtttggttccctgtttgagggacttaaatatgaacagcctacattttgagctatggtagctgttggtaaattacataccactttaagcctagcatacatgattctttttggagaatttataatttagaactatactcgatagtggatgaagttacaccaccgcttgcttttgatgcaaatcatctggtgtattgtttcttgacaagctgatttttcacgcatttttggataaactgtattctgctgtgcttgaactccgtttagttttcaaattctatgaaacttactaaaatatttgcagtcacctgacaaacttattgttggctattggcttgataagctgatcgtatcacacatattttgctgaattatattgtgctctgcttcaacttcttttaaaatttacatcttattcctaggaggctagttgagttttgcacttactatagtatttggattatttgtatcactattaagtattacctaataataattgtagcataatgaaaatttctataatctatttttaagaagactgcacatatattcttcattgtgctcaggttgtttaccatcacttttgctctcatgtcttaagttgatcaccatccagtcacatgtattcttttgctattgtgttgcaccttttatatttcttttatttatttccgcacacggtttgaacattttaaggacagtagttctatactctattaggtgatgctagcgttctctcatttgcgctgtttccatgatttcattgctggcttctaaaatagattttaaattgtaaaccagaggaaagagtt

SEQ ID NO: 7123 - DNA, 998 bp, Zea mays
  Intron number 1 from transcript GRMZM2G177412_T02 (locus G RMZM2G177412) derived from phytozome v7.0 (chr-ID 10; pos 144617846 to 144618843 reverse strand)
cgccgccctcgagcagttcaagatatccgccgaccgtgagtcccttgcccctcgcctctggaaatccgccgccgttgttgcctccctgtaagctgtaaccctgggacgcgggggattgtgctttgccggtctggtgtgtgcgcgatttgaggaaccttttgtcgaggtcactgctgcagttgggattagttttgttttggtacgggccaaaacatgtgggtggtttgcggaagagtaaggaataggtgtgaactttgcattgccctgttgaaattttgccttaaaccaagcgttttaactttcatgttattgcttattcacttaaaatttggacagactaattggttggttcctgagtaagattagtatgtggaggaggacaccaacaggtgacatggcatcagagaagaattattattggtcgtggggatgaggaaacttcttggttccgcaattaaaacattgattagttttctgaactgagtggggcatacgatagggagtagcaagttacattttggggatttgttgaagtgtttaattggctgtggttgtggagatataagtttcagagacttgtggagcttttgtttgtatgtgtatgttcgttggtttaaaattaaacggttgtatttatctatatacaccaaaacaacattttgtaagaagccaaatgatagtgtatgcatacagaaccgttagtcctttaggaaggataaatctaatttgacaaagatgcgaaataattatattcatgtacaatttgacaaaggataaatcatattgttcgctttggcatcggctattggccaaacattttgcacgatttttttttttgggaatatcttgttcagtcatactcatctagtgtatctccccttagaattttctttgataaacttatccaatcgaattgtatccagtttcttacaaaattgtctctgtgcaagtgtgcatgtttgacaatgttttgactattatattctctaccagggtac

SEQ ID NO: 7124 - DNA, 557 bp, Zea mays
  Intron number 3 from transcript GRMZM2G466931_T01 (locus G RMZM2G466931) derived from phytozome v7.0 (chr-ID 10; pos 27553038 to 27553594)
gcttgtgctacactggtggagaagctagctaccaggttagaggttaattatccatatttatgtctaaaagtgaacatgaactggtagccagaagatgctttgattctaaagttaaaagaataagttcatgctacgttctgaatgttgaatttagattagattgatgctcctaaaaataaagcaaaaaaatagatgtctgtgcatcaattcgttgctgagctgggacgaactgaaggacccatatattcaatcatgcatcgcatatgcacatgagcacatctcgatcaccattcaccaggagtttgccgtcagcggcttattattacgtacattctgtcgtatgcttattgcatgtatataatgttgcaaatttatctgagtgatgaagacttgtggcatttgaaatgtttctccaaatgtcttgttgcatatggttgagtttttcatgctggttatgttttccacatgttgtatgttatctataaaccattttcttgtgtcaacacatcaccacctctgcagattatacagttcctcagaactgcaagaacacgtga

SEQ ID NO: 7125 - DNA, 938 bp, Zea mays
  Intron number 1 from transcript GRMZM2G006626_T01 (locus G RMZM2G006626) derived from phytozome v7.0 (chr-ID 1; pos 1 9098413 to 19099350 reverse strand)
cgtagcagaatactgaaggccatgtgatgatcccccaccgcacaaggatgaagcgccaaagaggagacagtgatttccggccgtgagttttacgtaacttattagctatgaccagcatcatgccgtatatacataaaaatcatgagttagatcatagagtaagccaattatggctcttatctctatttcgttactgcttttaacatagcggacaagacagttatatactcgataagtgatcggagagacaaccgtattctaaagaaagtgaaggaaaaaaaatggtgagagaaatttaatttaatttttacacttcaaaattagataggaaaatagagcatgtaagcatccatgcatcagctatacatcttgtaagtttgaagtttaaaaagaaaactatagagaaaaacgaagacaaactatacaacagcatatgaacattcgcaggctacagcatccgcatccgtaactattcacatgttaatttattctttatttatgttctcctcgcatcttttttacgttataatagctcgagttttgtgtaaaccttgatgaccacatcttcttccattactattctgtttgatttttttacacaatttagaggtttgatagacgaggtcttttttttatactagctcttgagtacctaaggacacatctcccaagttcaacaaggcatggtaaggagatttagagcatgtttggtaggctgttcaggaacgtggtctgtttggtagcctgaagtagttgctgagcctggccttaagagtccaaatgagactcgtgcccctagctccgtggaaacgagattcatttttgcttttttggagacctggcccatgctatgcgctcgacgctgcttgggtggctactgttgtgctacttgcgtcgtgttagggttacctcctttcttcctcccgccgcatcgccct

SEQ ID NO: 7126 - DNA, 1010 bp, Zea mays
  Intron number 2 from transcript GRMZM2G088212_T01 (locus G RMZM2G088212) derived from phytozome v7.0 (chr-ID 5; pos 6 3565458 to 63566467)
gaacaacaactctgccctcaccgtcggacagcgaggtcagaccacaacccctctctctgtttatcctgtagctgacatgctgctgccttcatttgtctcgtctctccatcccggtttcattttcccttgcacgatcctgtatgtactcactatgtatgtagcatatatgttcttgatttgtgcgagacccatccgaggcataaatgatctgttctagctttgctttgaggcctattattgcaccgtggaagccagaggatttcgcttcccatccattcaaagcttgcatcttgatgtgcttttaattaatttccagtgactaattttgcctgctctgtacatgcgggttgtcgttgattcacctgtccgaatatcgtcaatgaatttgagacttgcccaaaggacttattccttgtatcagctgtaaggtgaagcttttgtcctgatatttttgccagtcgctgtcgaaccattacgttacttaagggaaagaaagcacattcccggtacgaaatgccatcatggagtcatagtgataatcctaggtgagggacacttggagagtagtaaagtcagcggagggtaatcacagttaattgttactgatacagtgtgtttactttcgatggttacctggggtaggttaaatcactgctggaaaccttaatccttggttcttctttgttcagaatgtatgaccgagctttgaaagtgattgcaagccctgtttggctcttctgaatgtcattgtcaatttgccacaaaaagtgtccatcaattgcaggaacaggatacatacaatatgcctatctgaaaccaatatgtttctatcagagtatatatgtcagaaatatgagaagccttttgttttaggagtttgttttattgtatagtacctgcttcactttctgttttggtgttattagctaacaattgctgatatattgttccacacgatgtgtttttctttgacaggtccaatcctccttgaggattatcatctaatcgaa

SEQ ID NO: 7127 - DNA, 737 bp, Zea mays
  Intron number 1 from transcript GRMZM2G117100_T01 (locus G RMZM2G117100) derived from phytozome v7.0 (chr-ID 5; pos 4 6265602 to 46266338 reverse strand)
ctccgcaagggccagctccagtacctcgtcaagtggtcggtgacggtcctcgctctcctaaatcccaatattttttcgtttttgtaattttccggtaggctagcgcttcttcctccttgattcttgcttggacagtagtccagattcttttgcagttagtaccgtttgggcgtggtttggttagtacaccacatttgcttgtagttggatgggctggtgactctgcacaagtaggtttagtcgtggttcgtggaatgcgttttccttgtctattctttgatttgctgctggatgtttttattaaaatatcagaatgactcgtggacgtttctagtatgatgtagatgctatgtcatgaactccacaatccacattcaagaatgtgttttttggcaaagctgcagtgctgtactgaagtaatttctattcgcactatgattttgaacacaactattccattctcttgttaaatagagtgcgtgttgcagcatttgcaatttggtggccaactttggtaggcattgagtcatgtattcgtcttactttatgtttgtttcattaaatagattcatcgtataatttgtggttgctctttttttttctttgatggagaactatgggtttgaaagctgaatgttgtttatagcttgtttactgcatttatgttactgctgatactgtattcctatcaatttgatgtgatttataaggcgtgggtggccagagagtgctaacac

SEQ ID NO: 7128 - DNA, 864 bp, Zea mays
  Intron number 2 from transcript GRMZM2G331032_T01 (locus G RMZM2G331032) derived from phytozome v7.0 (chr-ID 5; pos 1 98522145 to 198523008)
tgctttcaaatttgttgtcgaggtatgctaccctttctgtgatatgcatgcattaaaacgaaaattgcatagtccatgaaatcatattacagtcttggtttaggagtttgaaatacaaatattaaaatgacagtttttatgaattccacctacctgttttgcatgttatttttctagaatgaaaggaggaatcagccacttattttgctcgctattgcattccatttccattattttcataatcataaccaagtccgtgcatataatgttgcagatatgcgtagagaaaatatagagtaggtgggtaaaaatttgtgagactcaaagaggaaccgatttgtcactttgagctatacaaattttatgagttgcctgataaacattgttctgtgatatttcaagagagttaaaaaaaggatccatgagcttagtttattatgccatctaggttggctttactttgcaaatagaactttttttttgctaacagtgggtattcatgatatgctagtaaccttggaacacaaaaaatcttacggtttcttgtgcttgtgcgcttcattattgtttatatttgttgacatattctaataggactactgtgatgtagtctgctttgtatgatttcatgagcacttgtttagaactttgaatgaaaccacaacccttctcatatgaacaagttagcatgatttaaaaattaaatttagctattagttcaatgtgaagaactttaaaaatgtcctgttgttttctaaataactcgcggtgatttatctcattctgtatcactttgacttaactacttaatattattcgaaactatcaggcggtggctctcttcaagtcctacttcggtggagc

SEQ ID NO: 7129 - DNA, 634 bp, Zea mays
  Intron number 4 from transcript AC211705.3_FGT001 (locus A C211705.3_FG001) derived from phytozome v7.0 (chr-ID 5; po s 197992415 to 197993048)
ttatttgtaggtagaagatattgtacatctggtatgtgttttctgcctgatcgtcgtttatgcttgcctcttgaagtaacaggtagcacatggagagcttgaattgaattcaagcttggatatgattggaaaatatttgtattagatcacctagaagggtgattgatgcttgttattggccaagcaggtaggtatcacatttgtatttcttttgctgttgtaggttttttagttgtaactgtcttttgtgttgcttgtttgaatctgggctggaagaaaaaggtgcaaaattgaatatgaattggtcttggaaaattcaaacacattgattataaatattatgagatccttatgtttcttgttgtttagaacaactgcatcctatatgattactcatatgggctttagtttgaagtggattatgtaattcttctattttagtccactgttgcacatcttggcatgactgcattgtgggctacaatatgtctctcttcatgctttggtgatgaacatttgacgcttagtttcataatagaagtattgtattaaacatataaggtagtgagtgaaccagctctttagttgtctactgccatgagtattaaacgcattgtttcatccccttaacaag

SEQ ID NO: 7130 - DNA, 934 bp, Zea mays
  Intron number 2 from transcript GRMZM2G110381_T02 (locus G RMZM2G110381) derived from phytozome v7.0 (chr-ID 10; pos 13492379 to 13493312)
gccttcacgacgacgtcatctccaaggcctttcaggtccgaactccccgcaattacctctccttcactaccgggcgagttgtttcttaggaggttctgcaattaccaggacacctctgttctctacgaaaccgagagtccttccgtaggtcatacactcaaaagaatacttatatctgtcttttttatttgtattagctaggtctagtaaatcaaacaccgcattgctagctaacctttagctggccaatacatttggttcttttagtcactagactaaagtttagtcactaaagcacaccgtttggttctagtgactaaatcagactaaagagcattaattgttgtgaataatgactgtattatccctattaattagtggatgtttgctgcaagaagaaagtgtagaagataaataaggtaacaatcctactttagttccatttagtcactccttggtgactaaagaactaaagtttagtcacctcactttagtcaccatgtttgcttatttagagactaaaagtgattaaactttagtcactaaactttagtcaccccaaaccaaacagggccttagctaaacttgagttgggtggaaccaaacagagcctatccattaatagatatttaaaaaaactaaactttgcatcacctatccattcatatttttatttataattttccgggcacatttggatatccttttttcccaaatgggagcttgggaatctgggaagaatggaatactggataccttctcgttgacttggtgctgaacgcacaaccaaaaaccaggatcccaagtattgtgtctgaaacaatttgtaagctctgtgtcattagggactggaaaattctttgtaactagctgagtcttctgctggcgcctggatgatgatgccttcttcctttttttctgttttaggggagga

SEQ ID NO: 7131 - DNA, 376 bp, Zea mays
  Intron number 1 from transcript GRMZM2G001411_T01 (locus G RMZM2G001411) derived from phytozome v7.0 (chr-ID 1; pos 6 4658613 to 64658988 reverse strand)
tgttttaatcaccatttctaaaatttattctattggtaagacgattctaagatacaggttggagttggattccttgcatatacataaacagataaagaagcaaccggtttataacaaaaatatgtcttctgttttgcctgttgcccaattctcttttagtgtagcctacttacaataattaaaagaagagttggtgtctgtttgagtagacagctaagtgcatatataagtgcatgattttgattactaattgtgatcttgatgatctttattttgaagacggtctaacatataagcgcatgatttagatgaacgggattgctattgtgccatttctgaagaatcttactattttctcttgccttcttagaacaac

SEQ ID NO: 7132 - DNA, 460 bp, Zea mays
  Intron number 6 from transcript GRMZM2G063851_T04 (locus G RMZM2G063851) derived from phytozome v7.0 (chr-ID 5; pos 1 23631389 to 123631848)
tgctttgggaaacatccctacttgatccagaggaggtaatcttgcaagcatcctcttcatgatgctatgttagcatagtgtactattagctcgtgcccactctatgtcaaaatatgtacactgttccaaatttaattcagtattacacaagatctacagaagatgcatgggtttttttaataacacacgaatttgctgtagttgaagccttgaaggttaagcgttttttagcatggtagctgcatttcttgtttctttatttgggttaatttggagcttgtcaaacctgaatggctggacgtacatcactcatcatctttgttttttgatgtaataatctagttttgacattaacatatttatgaatttcaaagtgaagcaatgaatcacatcattcatgcgctaataacgacttcttttctatccagggtattcgttttaggggcctctcaattccaga

SEQ ID NO: 7133 - DNA, 855 bp, Zea mays
  Intron number 3 from transcript GRMZM2G117189_T01 (locus G RMZM2G117189) derived from phytozome v7.0 (chr-ID 1; pos 1 99297935 to 199298789)
gacaagattttggtttgtcaaaagaaactttaatacttttgtatttcacataatagatttaagcgaatgagtctatagccttatggtcataagagtcttaatagcacctcaggtcgtgcgttcgactttctataggatcgaatttaagtaggctaggttaaaaacaccactcattggtcgtgttcctaagttatatgtgaccacctgagtcactttcagtgagatgcacatggtcgtgtccttggccctttgtggcatgttcagggtagccagccttcagggtgtttctcagattgcatgtgagaagtttcttcttaatgcactgccacatggctctcttttcccacaggtcaagtccttttttcttcattttgtagtctttttgttgatgagagcgctgagaatatctgtgtgcagatcctccagatgagaggctcgtttcaggacctccctaaggacttgtttggctttgtgggaaattaactagttttccacctcaatacatgtggattgcagtgcaatcaaacaagccttaaggattggatgctccaaggacaaaccctggggcgcatggtatggtgtgtgtgtggtagtggtggtggtggggggggggggagtgtgtttccccattggagttattccttttagctgattaggttgtttgacataggaattcagtctgaatagctgttgtagtcaaggtcatgggtcctactcccctaccagattaaattaataaaaaatctgagacacataattcctccttttcattcgtgccccgccccccaacctatgtactcaaactactcagtttttgtttatcaatgatgacggttattttgtatattcgtctag

SEQ ID NO: 7134 - DNA, 1012 bp, Zea mays
  Intron number 3 from transcript GRMZM2G169458_T01 (locus G RMZM2G169458) derived from phytozome v7.0 (chr-ID 5; pos 1 90230560 to 190231571 reverse strand)
ctggaacctcccaataggtgaggcccgacgacgatctctttgcttctactactcttttccaacatcgaacagtggccaagctagcccgctgcaaattattcctgatgcacagcacagcttaagaaaacaaataatttagaaatacatacgatgagaatttgagtctagctagtagcatttctcgattttatcctactgtgcaccggccggcacctgatagcgaacctatctatactctctctggaaactgggagagagacgacgctgatggtctgactcagaacagtaaaccgcaattaatctagctagctagaagaaaaatacctgcataatatgtactagtatgtttctcctatttaagtgtcatttagtatcgatgactgagacgtttcaatgtctgctcaaaatgatatagcagtcagagatcatacgaattttaattatgcacgttcataggtatatgttttacgtggtacgactgatggttactactccattaacaatttagatgtgtgttttaaacatctctttccaaaatgcaaatgaagagacgtttatattgattctattgctgacaacccattaattgctactagttgcccttgcactgttgcacagcatgaattgcccgagaacttaacgaaaagtccaactcaaggtccaaaggctagctagtacgtgtagtcactcattggtacggtgcagagctagcgtaaacagccggtgatatcgtgacaaccaagctggctgatggcgacggtgcgtccgtcgtcccctttgtgaatcgtgcatgacaggtagatatcgtgcgtgtgttcttctctcccgcttgtccttagggctccgtgaaagaaactaaccgtttcctagtccaatcatcttcactcatgtttcgatctgtcacgcgccgccgtccagtgagcagtactgaaacccacccaccatgttttgtctttgttccacgtgtctgtgcacaggcctagctctggaaccgctctcgggagccctggcg

SEQ ID NO: 7135 - DNA, 926 bp, Zea mays
  Intron number 1 from transcript GRMZM5G883792_T01 (locus G RMZM5G883792) derived from phytozome v7.0 (chr-ID 1; pos 1 74305978 to 174306903 reverse strand)
gtcacagttgatatctgttttcttggcttggttctgcaaaccatggagagttttttcttagttcaagacacaaaacagtctcgatgcagacagctatagtaacctggtattacaaggcaaccaagaaaattacaaagtactctccaatctaacaaagcaaggaggctaacaggccataatattttattttactacggcgggtataggtagcacagaggattatgattcatcaggcgtgttactaattgaattcttaggcgtgttattaattgaattctttgacaaaatcagttaagtcactcatgatagtcatgaagctagccatcaactatgcactgaatggaaaaaggaaagccaacacaactacagttatctcgatccttcgaactgtgcaggcaataattcaaatatatatatatatatatatatatatatatatatatatatatatatatatatatatatatatattctcaaacaccaataaataaacatctacgagaagatcgatacctatgtaagattcgtttttcatatacacgcaatgcacaagcttcatacaataacagtattctcaagacaagtaatcaataattcagtgagataatctgtgtttgttctcataacaacattctgttcaacctaatcaataattcataatgtttttttatagttaatgtccaagttagcaaaaacagacagcagtggtagactaaaactccaaatgcgataccatagggtaacacactttttctgtggtataaatgtgagagcaattttttacaacacacatggaattctctcataaatatatgtagcacagtccacaaatgcataagcaatgtgattcaacaattgtgtgggccaagtaaatcagcaagacaaagtactgaaacaagattaactgaccttaagctggaagcaaa

SEQ ID NO: 7136 - DNA, 944 bp, Zea mays
  Intron number 1 from transcript GRMZM2G108214_T01 (locus G RMZM2G108214) derived from phytozome v7.0 (chr-ID 10; pos 57844764 to 57845707)
cgccacggccaggcccactcgctgcacaatccctggtaataagcttaccctcgtactcaatatatcttccgcattgtgtagctagtccaaattagagaatgaaaaccggagcacgcggattgaatcatcggtcatgggcgccgccgtgcgggtgggagcgccgccggccggagtcaggggagggggataggtatcacgcggtcgttgaacttgaacccttgatctacatctgtattctgatcaaaggataccccttcgtcgtagcgcgatcgtcgaccgtggatcttagattgtggggtctacgtagggtatcgattcgggtcgaggtcagattaaatctgagccctctatcttagatcaaacggccgaaattcaaagataccccttcagccaagcatttttacataagagaccttatattttcacaaaatcaacctgccgtcctagcacagttgaaaacatttaatttaagttctatttttaacagttaggtccctgcactttcacaaaataatggccgcggtccagaactaaataaaataggataaattcatatagaaaatagtttttagtatgaaaataattccaaaaacttgttcaaatcataataaatccattttaagtcctttttgatccattccagttgcattaattttattttaatattgtttatcacatggtaactctgttttatcataaaacatagattaacattatccacttagttatttctatatcaaccacttaaaaccccggaaaatcataacttttaaccgtatctctaaatttagtgattctcgaacctacaatctcgttacgatgcgtagaatattatcatgcattctgttctgatgtttggtgtgatattaatttctcatataccatgtttgtttgtattgttgcgagtagacgagcaagcaactgcggacccagtactcagcaga

SEQ ID NO: 7137 - DNA, 990 bp, Zea mays
  Intron number 1 from transcript GRMZM2G525751_T01 (locus G RMZM2G525751) derived from phytozome v7.0 (chr-ID 10; pos 130367698 to 130368687)
ggcttggaaggcctcatccgcgtccggccccactggtaggcgtccttcttttgggcatgtttggttcagcttttttctgaccagcttttctgaaaatctgactgtggagagaatctggctgtgaggagaatctgagtatcattacgattacgtgtggaggaagataaagttgttcatagggctcaggatctagaaagtgacgaattcatactattacaacgactcagccgattatgtgtttatgttgattttggatagtttttgtcccaacgatttttatagaagctggctgaaaagctgagcgtttggcagtccgcagcaacttttggtggccagaagctgtcagaagccgaaacaaacagaggctttagcagttcggtgaggggtgctgcgatgttggacagataattgctttatatgcactgaaccatgtagttcatgggagtcgagcatttttttatgttcgacagatagttgctttgtatgcacaaaatcatgcaatcaatattttcatatttgcatttcttattttcttggttaggcatcaatcgttggatgattgctgctcattgcttgttggtaccttggtggttcacatattgtttgtcattaggttttgatattgttgatgcttgtacgcaaatgttgttgttttttctcgtttgacaatccatagcttcatgtccagtctattttaaatgtcaatcttttttaatcatgttataaccatcttgatgcactaggatattctattatattcacttgtagttaactgctcatactccttttatgataccctgactcaactctcttccccttagcttgggggtaattgatctaagtgcaactccttcaagtacttttaacagtattcatattcatgtacacattttgtctatctatatttgtgccctatatgtatagtatctttgcttacaatctgacccaaacgtctcattttgattgacagatcgcttctgacttgtgaaa

SEQ ID NO: 7138 - DNA, 747 bp, Zea mays
  Intron number 2 from transcript GRMZM2G107866_T01 (locus G RMZM2G107866) derived from phytozome v7.0 (chr-ID 1; pos 4 4364134 to 44364880 reverse strand)
ataagtgtggaaaggtgggtattcccagtaagtcccgagttgtttatgatattttataaatatttttcgtaaaaaggcaatctgctcatgattattcagattgaagtgatttatctattttggggcatagagcatggtttgatttgctaagatagtaagcaagtaaggttgacagagatatcgtggtctgcctattcgtgcataaaagtcctctctagaaatgaaaagggactagctagccttttagacaaccatgttggcaacaccatcggaataagttgtgacttcacaaaagatttctatcaaatgatgcaacacgctatcagaactcctttatagggactttcatcattgctgcttggcaaattcgaaagcaaaggaatgacttggaaaaagctcctgtgaagaaatagatttagtgaaaatcttgtatagctgtcctagattagtactgcagctcacctcggctgacggttggcttctctgttcttttgctgctcctttgaggccccttcgtgcaatgttgttcttgtttccttttgtttaataaaacataccgtggagagcctcaccggcagtattttccgctctaaaaagggacagttcagactacacatgcttgtgtgaaaagaagtgttaaaatttcaataaaatgttgcacatgcttgtgtgaaaaaggatgtaaattatttgtgccttgctttgtaaatcgtttcttagttgttttacaacacattctgggataac

SEQ ID NO: 7139 - DNA, 922 bp, Zea mays
  Intron number 1 from transcript GRMZM2G160273_T02 (locus G RMZM2G160273) derived from phytozome v7.0 (chr-ID 5; pos 1 58811690 to 158812611)
gcagcgccagcacgccgccccggcatcccatcacggtatctttcgtcgtcgtttcttcatccagagcagagaaatgccgcatttcttcagctggtgactgttccagcggggaaaaatttgtcctgggattgggctgcatcgtggcgacgcttctttctttgatctccattccccacttgacgcgattggagctcgccgctaatttctagtattttccgcgatttttgttggattcactaggtgtcaggtgaacacctaaagtaggtttgattttgcagcaggactgcatcttactttctccatttatttgctggcgtaggaccatataaaacggagggaaattttagacatagcgggacttctacagcatatgaacaaattatgttgtcatgattttaatagattatgcaagtatcaaatgttatattcttttgaatacaatatctgaaatgtgcagtttttctcatgttaaataatcctgagatcaatcacattattggaaatcgacaaatatttctatagagtattttgtggtaacctatccatgccacttatacacaagacacttgtccaaaactattggtctagaattttatttcttaaatgatgctgcaggttttgctttgcgatatggttttccttttgatatttcagatatgcccattcatttgagatgaaaggtgctatcagcgatgttatatgttactacctccgttctcgaatctcgaatatttgtcgcccgctagttcattttcgaactaaaacacgacaaataaaaaagaacggagggagtatatatttttcttattgtacttgctgttcaattcatttcccttattgcatgcagatcgaaatgaatccatttctataaaaaataatttgtttatgtcgcaaataaacacaattacagatcgatttgggt

SEQ ID NO: 7140 - DNA, 767 bp, Zea mays
  Intron number 1 from transcript GRMZM2G130046_T01 (locus G RMZM2G130046) derived from phytozome v7.0 (chr-ID 5; pos 1 62682058 to 162682824 reverse strand)
caggtttgctgcattctgtttctccatcttgtgctattacccattttgcacagcatcttgttcccaaaacgtgatcttgtagactgactgttcattcggagtttcggacttgggattattttcctatatgtgatgccttatcttctctgttctgtatttggaacaaatctagcgtgcccttggcactgaattctactcccatctgttttgccagttactagcatatctacacagtgtaagctgagttctaagttttactacccaaaagatattgcgagttgcagtgcacaagcaaaactagccacatagcccaaaagaagtcctagatcaccaaatcttataaaacaaaagattttggtaaatatctttttgggacataatatcagaactgctgatgccaactgcctgtttcagaactgacgaactttgccccttgagggcttattcggttagaggtggattgaagggggttaaatcctttgctagtcaaaattgaatagaaagatatttaatctccctcaatcgtctctaatccccatgcagccgaaaaaggcctcaaggttttattttccttaagagatggcgagtgaagatcaaccccatttgagtactattgtgctaatcaccgaaatatactggctcctatttgcctaagtacttccttttcttttaccaaagtgaatttgattcacatcttgcattactagtttctgctgcgagtgaatttaagagtgtatgacatgtttttgcaggtgataatacgccga

SEQ ID NO: 7141 - DNA, 655 bp, Zea mays
  Intron number 1 from transcript GRMZM2G130121_T01 (locus G RMZM2G130121) derived from phytozome v7.0 (chr-ID 1; pos 7 4628637 to 74629291)
agattcacacagttgtcggagcaggtaactatgcaggatgcactgctgtttccttgactattagatgttttcagcattgccattaatttattttagttcaatttgttcatttcttgaaaaaatgtttgcatgtgaaagttccttcgatgatcttgtatggccccagtattgggatttgggaaccatcactgctcttcgttaaacctggagtgtagccatatagtttgcatgagcccatgaatatctcacactaactattgaactcgtgttgattccacttgggctggcatttcagcctcttataacactaagatgtgagactacatattttttgttttttagttttgttattcaggattagattcaaacaagttatctatattttacttataggtgcactgggtggatagaagaagcatattcaatgcagtcatatcactcaatgtttcctcctgttttgtctgctgttttatgatgaaagtgaaaatgatgctggaggccaaaccatgtagaaatccaaattcgtggcagatcttaatacgaaactgcctgtcgaagcttgctgtgaattttactactatagacatgaacgatagaacacctgtctctgctagtaggtaatttatgaatgttcatcttattccaggtgccacaa

SEQ ID NO: 7142 - DNA, 639 bp, Zea mays
  Intron number 3 from transcript GRMZM2G012734_T02 (locus G RMZM2G012734) derived from phytozome v7.0 (chr-ID 5; pos 8 9942571 to 89943209 reverse strand)
gagtccctcctttgcattctgtggcaagtgagatgcctcctgctacgttcagaatcttacatttgcattatagtgtaattaagataaaaccattacctgccaaatacttttatgtgactagttttctaacttatcccctgtcaaacaattggtatgcaagtacgcacaaactcctaggcatttttacaggtgatgatgtaccctaggtcaaccatcatcgttttatttcatttgagaccttgtctcaaaaaaatatattactgataagaaaaggaatggaaagtaattggatccttccatccatactcttacagagttacaggtaggatactatgagttaggtttgcttaaaagtctgtaattcatcaggatataaggctcctatttcagttcttttaggagttccagagactaatgctaagattagtagccttttcattttatgatcatgtttgacattaatctctactgaacacttcttaacaaggttttacccctagaatacgataaatgtaatatgaagggcaacttcaaacagttttgcatttctacattcaatgtatttgtagcacttgtttgtcaggcaacatatatctgcttcgttgtcttaaagcatctgtttctcctttttacaggtag

SEQ ID NO: 7143 - DNA, 631 bp, Zea mays
  Intron number 1 from transcript GRMZM2G470365_T01 (locus G RMZM2G470365) derived from phytozome v7.0 (chr-ID 10; pos 126929583 to 126930213 reverse strand)
cgagagaaaccgccgttttttttctctctctctgtcattggtttgttggaccagtttgtgcaagggtaggggttgggctataggggagtaatatgtgatgttggtttggaacagtgggagaagcggggagaaccggagaagggaagggtttatgcaggggtttaggtctaaaaaaagccaggggaatctggtctcagagaacatggtcacgaggggacgaaggctctttctgtgtttggtggtttttcctgatgtgtggtgtttgtgtaactcgaaaaaaaagctattttaccactctcaactgtcttgggttgtatctttatagacggttttgttgagtgcaaggtataggggtttttggtcagagagggtttctttgacgtcatgtgcgcataatcccgacaatcgggtgcaccatacagacttacttaccatgtcgaccagttcacccatctggctgccaacttatagccttgaattggatggtgatctgtacaagtgtcgtatgatgtcaatataaagggggcagctttcttttcataaaccaaaatatcttgttctcaggaatcctcctagtggttttttttttgtaacgcaagcgcttttcatttcaccattggcaggcgagatt

SEQ ID NO: 7144 - DNA, 848 bp, Zea mays
  Intron number 3 from transcript GRMZM2G009448_T02 (locus G RMZM2G009448) derived from phytozome v7.0 (chr-ID 10; pos 17608938 to 17609785)
gaaaggttagttcatactttgaaggattgtgatttatctgttttcgattatcatggtggcattatttcatcatgtctcagttaggatattgtttatgacctgctaattcttgtaagatttgcatcctcagcattaatttaggctaatatatgccagaatctattaatcctaactggtgctattgtcttcttaacttttatgcattatactaaaataggagctatgataaatttagggtgttgatagctagtaagggattttgaaatttatagtgatgctgtgttgtttgctattcatggtcatggtatgtggttataccataacactgagcaatttagttaagtgtgttactagtatgaattccagtcagttgtaatttgtatcttgggcagcactaatgagttactacccctgtcccaagaaacttgacattctaatttttttctaagtcagactatcttgagtttgagtaagtttgtacaaaaaattctgagactcatattaccagataaatacaattaattttttcatgtaacattttcatattatatctatttggtcatgtaaattatgacaaactttgtcaagcttgaaatagctaacttgggacaaacttagagatcacatctgtttagttataaatgaaactgttccgttatgattacgctttaatatttttctaacactcctttatagatttcttttattgatttgatatttaaattttaactttttattgttctgtttattatttcttctgaacattaatgttgatattaaggtaggttgcactcgaaacatgtaactatgcctacacctgactctttcttgcttgtactagactctgg

SEQ ID NO: 7145 - DNA, 465 bp, Zea mays
  Intron number 2 from transcript GRMZM2G140651_T01 (locus G RMZM2G140651) derived from phytozome v7.0 (chr-ID 5; pos 2 06619638 to 206620102)
catcatatcgctggcaggtcagtagcactgactggagtatgattttgatagcaggaaagtacataaaacatgataatggattctcgccattgtgttcgccacataatgatgatatagtgcctgtttggacgctggcattgagcgccacaccccgcctaagatacggcggccgattcggccgccataactgcggcgcacaaagtgtggcgcggcgtgctaccagcggcggtgatccaaacacgcccatagactagtgttttagtagtcctttttctttttttcttgtcaacggttcttttgaattattgtttttgttgttgttgttataaagaaatccaatggtaatgccgcagagaagaagaaaaaaacaatagccacagttaacgggttgtctgtgtgtttctgctttgtactaaattttagacatttgttcatggcaggtgagcatatcggattttggtcacg

SEQ ID NO: 7146 - DNA, 795 bp, Zea mays
  Intron number 4 from transcript GRMZM2G167356_T04 (locus G RMZM2G167356) derived from phytozome v7.0 (chr-ID 5; pos 1 54986346 to 154987140)
cttcatcggtgggctacctgcatctcttactgaaggttggtgtttgctatcaacaaacaaatgtcgaattcattttgtttatgatactgagaaggcacaaaatttcagatgagttgaaggatcacttttcattgtatggtaaggtgcttgaacatcagataatgcttgatcatagcactgggcgttctagagggtttggttttgtcacttttgaaagtgaagattctgttgaaagagtcatatcagaggggagaatgcgtgatcttggtgggaagcaggttagatttttaatttttttggtgtaaacttatgtttcacttactagtgaagtagaacaagaaagctaaatgaaatagacttagaaatgttcataactttgtatgctactggagtgaaggatattgaaattctagaatacgacttaggttttgatatgtgacctctattttggctatataatgggtgattcgaaattccaaatggagctctatagctcttctacgaggaaaatcagcatttttctttcccttctaaattcacatttattggtattgctctcacctgatcttaaccaccttatgtttcacgtatggtatttaatcatttttcggatgagtcagagaattgaaacttttggtccaagatggttgtgctgatcaacagaagagtgtttgtttttgtctaatttgaagtggtttttctgtcgtttcagttgtatatgtttgtcatgtcagttattttttttgtatggtttctgttttcaggttgaaataaagaaggctgaaccaaagaaac

SEQ ID NO: 7147 - DNA, 611 bp, Zea mays
  Intron number 1 from transcript GRMZM2G470671_T04 (locus G RMZM2G470671) derived from phytozome v7.0 (chr-ID 5; pos 1 3392284 to 13392894)
ctgctccagtgaggaacccaccacagcctggtaaagtgattcacgcagacaataagtatctttagaactgacattggcatggtaatcatgcctcttttgactctgcagtattctattgtggacatgtgtttcaattatgtaactttagttatatttttgtataactgtttgctcagttgttgagaatgtgttcggtttgttactataacaatgttgatgacataaatatactgttaagtttatattggaatttgtggtacaagtctgaagttgttgattgtgtttgaagcagagtcaatggcatttcggtttatatagagaattacagttccttgttttttggtagaactggaacctgtttcagttctgttcctaatgcttacacatgggtttgtgctacaagtatagtattagtattacagagctcattgttttggaatcttgattgctttggaatcagaatcgtttatgtttagctcatattagtattagtattacagctcattgtgtttatataggagttttaatctgttctatttctgttcctaagtgtcttctgacttttctttttggcagcgcgctaggctcgtcctccagctcctgttcgtgat

SEQ ID NO: 7148 - DNA, 1038 bp, Zea mays
  Intron number 1 from transcript GRMZM2G303768_T01 (locus G RMZM2G303768) derived from phytozome v7.0 (chr-ID 10; pos 139853665 to 139854702)
ctacgccgccggctcgctgcgccgattgctgcaaggtctgtcgtttccccccttcacgtcatcgtttgttctcgacccaaactagtagcttcgagtaaggctgatcacgcgaaacgatttgctcgagtgtcggtaccggtaagaattcctggtcctggttccatcgcttggatttactgcagaatttgcacttggtctcagatttagatgatctcgtcatctcatgcctgcgggcttcagtaaaagcgtcgcagtcgcaggcaatgatgctacgcagattaagcaaattgctgtggtggcttggtgggtgggtactatgttacagccttgcagggtgggttttttttttcttgttacttttagccatgtgtcttcactgttacgctttatgctcttgtcctcaagacctcaactacacaaagggacagttcataaagtgcttagtaaaattttcatggttggttgttatctgcttcactgagcatcttcattcttgttgcgtaagatcccgggttcacatgtggcaagcttcactccttttcggtagtaatgctttcgagcttttaattgttgtctctataatttgggtgatgcaagtcctccatcaaatcaaggctttggggggggggggggggggagccagctttttttccagaagcacacggtggttgtttttattatcagatagatatattctgggctttatatgttggtggagtggtggcacttgtgaactgtttgtggtttcctgcatctatcagcattcgttttcagggagttgttggatcgtattctttgattaaacatatactatatcttaaccatcaattagtctagtagataaaaacttgcataatagtttctgctgcttaattgcttgcatgcatgcatgcaccaaatcgataaccaagtgcttgaaaaggacagttttgtttggtcataaaggaattccaccggccattaccagatcgataaccagctagtctcagtttgcaagttctgatctttatctactattctgacctgcagagggaatca

SEQ ID NO: 7149 - DNA, 929 bp, Zea mays
  Intron number 2 from transcript GRMZM2G581200_T01 (locus G RMZM2G581200) derived from phytozome v7.0 (chr-ID 10; pos 144222699 to 144223627 reverse strand)
ttggagcagcaaaaaaaggtactgttattgtctgggaggtaacaagttggcttcaattattttttaaactgtcataaagtacatctaatcttattgttgattgcgggcttaaaactttataactcatgaaattctttgttgtattattattgctcgacataacgagaatatgattgccatccaaactaaacttgtatcagaatttgtgctttctgtttttgtataagactgccaaacattttgatttaaatatagtgctttctggttttgtataaaactgccaaatattttgatttaaagatagtgctttctggttttgtataaaactgccaaacattttgatttaaagatagatcgacttcacccaagaatgcgccctaaaaactcttcaaaatgctcgtctcagaaaaataaagaaacttaagttaattgatttaataaatggtgctccccccgttcctttttatttgttgccatttagttaaaaaatgaactagcgggctacaaatattcgagaacggaggtagtataacattttgattttaatcttagtatcttagttgttttgaagatacttcttccagtagatttgaattcgtggaccttgaatttgtttcatatgcaaacccacatgcagacccagttgttctcccaaatatctacaacacattgactgtcataactttcgtttgcaattctttttatctctacattagcctaaataaatgacaacatgctatttatttttggggtcagcgatgaaatatgcctttaggaaacacattcatgttccttagatcttgaacttagcaaaaagtggtgatgtaggactaaattgtgacctacctacaaacttttagtactgtcttttgacttctgcttatttgatgctttatacagtgtcccacccctttgctcaaccatagttg

SEQ ID NO: 7150 - DNA, 488 bp, Zea mays
  Intron number 1 from transcript GRMZM2G581200_T01 (locus G RMZM2G581200) derived from phytozome v7.0 (chr-ID 10; pos 144223751 to 144224238 reverse strand)
aggctactttccgtgatacccaggtatatttgtgattctattagaatgctagcaacttcatcctcgagtttggctgtgagcatttcttttttatgtttgcatgaaaatatgttagaaatttattatgccatagttaagccacaaaaaattgtatgaagaagttgttttaaaatgccattttccaaataaatacatataccatatacatcgtgagcacatctcacacctacatttatgtcagcaccccccccctgctagtttatctgcattgtattctgttctagaaagattaacagaaaaaggaaattatctacaggcctacagtctacctttgaactcaggattttactacttagccctccaaaatccagttgatcccatggtggtttatgcagaactcttttgtgtttatttcattttatggctttttgttttttttcttttagtaatttcagggcaattatatttttccaggttcacgtccatag

SEQ ID NO: 7151 - DNA, 831 bp, Zea mays
  Intron number 1 from transcript GRMZM2G004641_T03 (locus G RMZM2G004641) derived from phytozome v7.0 (chr-ID 1; pos 1 3644224 to 13645054 reverse strand)
tcttgctgagtctgggacttcagttcctcgcagaggtatagtataagccttgttgtctttgtcaagcaatagcttaaactatcctttgcgtcttaatctgaacaacatatgccggagatgggatggattcttggtttctacgtactccctccctgcttgttgagctttcggtttctagttagctccgtgtgtttggtggtgggtgcaccagcagctgaaataggttgcttctcgttttgccttagtcaaggctctttgaaatccgaccgaattttctcgggagctagttcttcctggctgggatttctggccgggtgccgaattttaggattcgtttcctttcacagcccaccaatttggacttctggttttgctccagttaggtgatgccttcacccaaaacaacttgaaggcttgctatgtcccaggtagctatatatctcaaaagttttggtggcagtcttcgaggaagtggagtcatctcaagtttttatcgatcgtcccaggtagagataccttaaatttttattggatccactctttggggggttctttttttgtgctgattttcttcaggtttcgctcgcccagtatcagacatattcttcacctcttttgcagtctcttgtctgaatttgctgttattatttgcatgggaggttttgcttctgattcaattgccaatgtttcaagcaactattcttttgtttttcttctctctccaattacacgcagcacagccgaattcctaatactttggaatctctgcaattttttcatcttcttttgcagccaggctttacatatcttgggtgccgcacacagtatcta

SEQ ID NO: 7152 - DNA, 655 bp, Zea mays
  Intron number 5 from transcript GRMZM2G134270_T02 (locus G RMZM2G134270) derived from phytozome v7.0 (chr-ID 5; pos 1 549765 to 1550419)
caggtgagagtataacttgcttctgtctataaacaatttatttcataatgtatggccattttttttcatggtttcaccttttgcctcttttgaccaaacatattcttgttgtatgtgcattttgagctttgctgattagatgccaagttaatgatgagttagtactaagttaactaaacatttgaagttatcatttatgtgctttacattatgctagcaataccagtgggtcatgcaagcctcatgtttccaaaaatttgtcctgcccagtctgcaatttgaacatagtgacagtattatacttctatcgactatcatgcattcatgcttctgcttacttgtccatccatatacgatgatatgaaacagaaacttatgtatttttggaagatagctggtatataatagatgtttttgtatcatctaggcagtaggcacaccagattgttaatgtgtatgttgtgcaaaagtacaactatcacctaaccataagggcatgcatcagtattcgccttcttttttctttggtctttttctctcagttatttccaagcaaacagacaatggcatcaatgctccacttcggtaataactctaatacttttgcttacaactggcaggtgtgggattacactggacttggatacacgaggta

SEQ ID NO: 7153 - DNA, 479 bp, Zea mays
  Intron number 7 from transcript GRMZM2G134270_T02 (locus G RMZM2G134270) derived from phytozome v7.0 (chr-ID 5; pos 1 550557 to 1551035)
aggtgctttgcaactcactgctcttacgtttacaggtttgtcttttcttcaacacttgaacatcatagtgaaatctattggccacattgtttatgcattatcgatatcaaagtaaatctaagggtgtatatattattgcagaaggttgtgttagtttttgtgatgcctagaggccatatatttcttatatgttagctgtaaacagtagcaatacatcttttgttaatatgatgtgcttacagttacaggtatgcagtaaatttgataatttggtgtcgtgcaacccagattcccactcttgttagcgtaactttctttttggtagaatagtctcttgttagcgcgcctttcttttcggtagaatagtcaatatttgtttgatgcttaaattctccttgaacaggaagaattggatgatattgaaaatgtgatatatcctaccagattggtgtctcttactttcccgttgaagaccagac

SEQ ID NO: 7154 - DNA, 690 bp, Zea mays
  Intron number 1 from transcript GRMZM2G042361_T02 (locus G RMZM2G042361) derived from phytozome v7.0 (chr-ID 1; pos 1 13924577 to 113925266)
tgacaagcatatctccatcgctgcaaattgagtttgtaagtggtccgaaacacctaggtagctactagctattgagtatttaggagtcaatgcttaatgatatttacttaatgcttaattgcttatcgaagtaagaaccctgttttttgtattgacatggtggtgctctttagaagagaagccaggggtaaaaaacaattagttctgcggattttattttatttcgatcagttgtgagagtttcttacaattggatgacattgctttgtagaaagaaaatacaaggtattttttagtaggaaagagttgcattttttgtgttcatatacaactttgtcattcgttttctaaaatgttgaaaaggatcatgtcattggtgtaacactcctgtttgtcttaattgaagaagtggtaccaacgagatgtcatttactatcaaaattttatctgatgcatatgttgtagtagagctctcaacaattgattcctctcatgttcttgtatcaaggtaggcaaagaaaacctaaacaataaattcctaacttctgagcctttccattattcttgctaaacgttggtctcacttcagaacaattggaaaagcatcattcgagataaggttgtattttgcagccccaaatatacatgttgtttctgatatataaaaacatgcgtttgattctcatggag

SEQ ID NO: 7155 - DNA, 397 bp, Zea mays
  Intron number 1 from transcript GRMZM2G417223_T02 (locus G RMZM2G417223) derived from phytozome v7.0 (chr-ID 5; pos 1 7269429 to 17269825)
cgttttaactgagtcagtgaagtggtcgtcagccagtaagtcctttgcccaagtgacctccaaaaaaactggtagttttattcccgtgatgtttttaatcactcgccagaactgctttgcaactggacaatcaatagcaatatgaaaaaatgattctccttcctccccacacacttcacagaaatttttacgaagaatatgtctcctcttcaattcctgcttggatggcaaatagttatgaaggactctccacgagaaaattcttatttttgaattaggtggagtgtttaaaactaatacaataattattagccggttccgggccatagataatgtgttttgtttatatttaacggatttagtaaataccctattggatatcgggtcccgttgcaag

SEQ ID NO: 7156 - DNA, 936 bp, Zea mays
  Intron number 3 from transcript GRMZM2G463726_T01 (locus G RMZM2G463726) derived from phytozome v7.0 (chr-ID 1; pos 2 83254921 to 283255856 reverse strand)
gatcaggagcttgtgcatcaggtgcggccattctgaaaatctggattcgtttcttaatgcgcttggttatcaatgctgctatctcacggttccaaatcacctgaatctacctaactagtattagaaatatgagttgtaaggctatccccaggtcgcgccgctaatgcgcattttgcgtgactgttcacagttttatcagattgcagatgaggacgtgcaaaataagttctcggatacagagagtgggtgagaggaaagaagatggcggtaatggattaggatccaaatgtttcttcacaatttatttgagtccttaattagttttagttcaaaaatgaatagaaaaagagcctgaacctaatcgattcgattcttaaattttatagtgtaaaatttagaacttattaccacccctaagaataagagaggacttgtggttagatatctaaaagagggaaaccctatccctaattggggcaggggctgtattaatatatagccaattatatgggccaaggcccattacagtgataaggtacacaacacgctaatagaagtgtttacacacataacgcttgtggtgttgcactgacatcgggacatgctaatttctttggatgttggcatgtggacttgtgagtcagttcattgctcattccattgaacctatgctgccatgctggtgaagagtcgacacagcagccagttgttgttataaacgcaatgcgattctgtttcttaatctggctgtttctcatattcgtagataaccttgccattttctaatatattgttatgtgcagtctagttaatcaatagtagggcgagttctatttattagctcatagcacacaccacatggtcttgggtgtcgcagactgatttatctccatgataacaggccattatccaaagaagctgtggtgcgttgctgca

SEQ ID NO: 7157 - DNA, 691 bp, Zea mays
  Intron number 3 from transcript GRMZM2G046748_T02 (locus G RMZM2G046748) derived from phytozome v7.0 (chr-ID 5; pos 2 00823234 to 200823924)
gccagggtctttgctcatcaggtttggtcatgagttgtatgattaagatttcttttttgtgtttttttaccaacataaccaacaaggacatataatctggatcgtttctttttacatatttgatctgtcttctccatgctgcttaagcacaacaatttgatatctacctcaaaacaacaagcactatagtcatcagttaaaagtaagattttgccaatcagaattatattaatatgaaataccaacttcgatttagtatagatttaactaaaacagtaagtttgtttaattctgaaatataagagccaacatgggtcctggtatgtatatggatgcatgcggtttcagaaccgacctcgctgtttttttttcttctgtggtatcattatcttggcagtttttttttctgtggtttctttgtctgtttgtgtccttcgatactatatcaaacttgttctgtctggatgtaagcaaataattgatgttttggattgatctcttgcttcgagttcatctttgtttagttgtctttgttactgagatactttgtcttcataatctatcattatcgtttgtccttgttttgatcttgcgtagttccgctcggtgttgatccttttttgtttccatccaagcactatctcctaacttctcatatggttttgacaggatattctggacttggcaaaat

SEQ ID NO: 7158 - DNA, 807 bp, Zea mays
  Intron number 1 from transcript GRMZM2G057642_T03 (locus G RMZM2G057642) derived from phytozome v7.0 (chr-ID 5; pos 1 57520647 to 157521453 reverse strand)
ccttcgggtactacggcaccatcgtctccgtcaaggtccgacccgctcctctccctctactcttctccgtttagtcacctcccgcgtttgctctcgagagagtttgccgggcgctgctggtttgattcaatgaaatgaggctgtgctgcggccgctgatgttttctttttccgaaatatggtggaaaaggttcttctcctttttataggatcttagagagggtctcgggagtggctgtcttacatacatacaaaaaaaaaaagtaacaaacaacacgagaacacgaacgaaagagaggaggtggtgtccgcctattcccagtttttggtggctaaactaatttaatgccaagatgaattgggaagtattattctgagatctggttattgtacttgcaaggtagatgtttggttttccttttggatggttttccccctcatggcattagctcattgggttcgataccttgaagaattggttatttgaagagctgttccaaagtggatatcagtggcggggcatgaattcaagggcattatagttttatatgtcgtagacatcttgcttttcttcgactgagagggggtgtgaagatgatggcatcatcatttgcaaatgtggtgtatggaattgtcaaacaacttacatagtttcatacagaaagacaaacaatctgttggttgttgtacttgtttgctagtatgatttagcagttgatgcttcctaatgatataaccaactgttttgaggctgtgtgagattatatagcttttgttttctgattaatttgcgcattccaggtgatta

SEQ ID NO: 7159 - DNA, 399 bp, Zea mays
  Intron number 3 from transcript GRMZM5G886363_T01 (locus G RMZM5G886363) derived from phytozome v7.0 (chr-ID 10; pos 2011768 to 2012166 reverse strand)
tgcttctgcaattattcctgaagaggtgtatatttgaactcactatatggtttagtttgagcattattttgatgcttacagcatcctaaagatgtgcttggcaacatgactagctttgagggttagtttttgcttggcgagatggacatttgctatgcttgatctattaagcaataagccagccacctatgccctgggatttgaaggctttgaactgccattgacataataatcctatatgctccaactcttactatgacataacaatatgtccccaatctgttactaagattcctcttctacagggctgcatttctcttctatgtttggcatatttattattgaatctttctttgtttgaaatgtaggttaacaaaattggcagagattctatctctt

SEQ ID NO: 7160 - DNA, 455 bp, Zea mays
  Intron number 3 from transcript AC185602.3_FGT004 (locus A C185602.3_FG004) derived from phytozome v7.0 (chr-ID 1; po s 95855894 to 95856348)
tctaccacccgccgttgtcatttctgggcggtaatcagatcctttccatgcttcgtttcgatttctcatgttctcctgcatttagttttgaatctttgcaatgctctctcgatctacactggaatacaatacgatgtcgatctacaccggaaagcacacatgcttttttctcccccttttcccctccaactacaccggaaggcacaaatgcttctttgcctctttttttaatcacattagaaaccctaaatttggtttcccctgaaaaagaaaattaacagaaactaggaccgcataatgtggacctgcctttgcctttactgatcgccatgcatccactcgcgcgtgctattgggcttcatgcaggacatgttacttttggatgcatttagggaatacatatgtcatttcatgttattgtattgctttcttaaagttttttattcatatttcag

SEQ ID NO: 7161 - DNA, 277 bp, Zea mays
  Intron number 2 from transcript GRMZM2G170699_T01 (locus G RMZM2G170699) derived from phytozome v7.0 (chr-ID 1; pos 2 35448225 to 235448501 reverse strand)
ggaattatttgtccaagcaggccctgttggtaagtggactttttaaatatatttttctgtagtgagatgagagttttgctgtatgtagcacttttttcttgtcctataacagcatttgtgcgttttgttgaataattgcctttcagcattttttattcttttttctttggtttttgattgtctatattattatgttattgatgtttttttagatataaaacaaatacattcctttttacttttattaacagaatcactattcttccatttgtagtta

SEQ ID NO: 7162 - DNA, 523 bp, Zea mays
  Intron number 2 from transcript GRMZM2G414805_T03 (locus G RMZM2G414805) derived from phytozome v7.0 (chr-ID 5; pos 5 8057557 to 58058079 reverse strand)
ggtctagagcgtcggttttgtcaacagtgtagccggtgagatttccttccattaaaactgagttctcctttcattctacgatattcatatttgtatttgccaagttacttttttttggcatctttaatgagggagggagctttgaaaatgtgaccagctgaaagcaataccagccactcaagttgtagagcgaagtggacttgtgctagtctatatgatgctcaattattttgcttggctcagactctcatgatatttatgttatttaatcttttctaattaaggtacacaggaacgctagcatgaaatgaatagtgaagaaaaattggcaattccttttgtttctggcactagctgtaatggtgtaggactgcctaagtggagtgttgaactgttgatgcaacatcttgagaaggagaaattgtacacaagcttataactaacatttacactttgatctgttgttgacataatgaagctccatttccctcttttctttaatccttctctgtttgtagttttc

SEQ ID NO: 7163 - DNA, 965 bp, Zea mays
  Intron number 1 from transcript AC205104.3_FGT003 (locus A C205104.3_FG003) derived from phytozome v7.0 (chr-ID 5; po s 45536536 to 45537500 reverse strand)
gaaaggtgaatagttgaatgctgtcacgaaaaaagtgtacgcgaggccgtttgcgacagctgctggagatagcataacacatcccatcttcctctgaacggatgttccattttttccttcctcctctccatcttcatcgaccaatcgatttgtcgttgattctgaccatcgtagactatctcctcgttcaattcttcttctcggtcccctttattctatcgctcgttgattccaaaaatctagtctagtatcgccagtttccaaaccccaatccctcgcatgcctcctctatcaccatgtagaatagaacaaatagatggatggaggatacgtatacacgctgacatgagaaatttggaattatagaaaccacaacatcagccattgtcagaataggaccaagtctgatagctttgctgatatggaaccaaaagagaaatatatttccggtccttaaacttgtcgccctgtgtcatccctatccacaaacttttaaagtatgtctcttaagcccttaatcgttgtttaggtctcacttaaggacaaacgagcatattacatgtgaaccaacattttaggtgccttttgatttaggtcttagctcagtccaccgccgatgttgtcggtgcctacactgtcaccgccctccttgtgtctggagccattctcgctagagtcggccacatcccctccttcccccttgtccctgacgccatggaaggcagctcgagctggtcagggtcatccaagcgctagggtaatccttctattcctcttgtcttgtgccttgattgcggtcgacacattgttttgtagctcaaggttaggaatgaggagcatgaaaatcaaggaaagatattctacaagtgcccgaagcataagtttgggattcaaattcatttgttttgattggtttaaactaaatcaaaggtaatgtctaaattggctttggttgtgacagaaaa

SEQ ID NO: 7164 - DNA, 865 bp, Zea mays
  Intron number 1 from transcript GRMZM2G125635_T01 (locus G RMZM2G125635) derived from phytozome v7.0 (chr-ID 10; pos 127987015 to 127987879)
cgaatcgggggttccacacatagcttcgtcgttttgtaagtttcttctactctgtttccctctttgtctgatttgtgccatagattcgagatttgttggatgtgctggtttatgttgctgtctttctagttttctcgctgtgaaggtatgatgtctgatctttaggcatgaatagttacttgtagccttggaggtgacctcacctggtggtcggcgttatcgctgttgcttgatgcgctagccgtggtatcgctgttcagacttagataggtggattggatatttgttcattgtacgtatcttgttatttcacaatcgatgctagccctgttaatcgaaaattgatggtagtggatatgcttcacccctgtttagatttgaaacatggtaggaaatatgtattcagattcggaaacatggataggaaatgtctttattaacctggtagctgaaaattgaatattaaagggaaaatactattaacctttttgtttgattttgattcatgggtcagaactatgaacacggtgaaaaaatgcatattgtttcttgtcatttagaaattaaatgaaatcatacaaggctgagttttgcttttgttcccatcggatctgtgattaaattctgttttcctaaacatgtttatgtttgattgcgtgaataatttagatctgctgctttaattagttggaaacatttgttttgggcatacctttaatggcataactgtggtatgttggtagtttcttgtagctttcacgcatggatcatcaacatttgatcttgttttaacttcttaccgagaagaatttttgttggttttaatggataaactcgctaatttggtctgtcctgcaggaatttg

SEQ ID NO: 7165 - DNA, 870 bp, Zea mays
  Intron number 4 from transcript GRMZM2G161414_T01 (locus G RMZM2G161414) derived from phytozome v7.0 (chr-ID 5; pos 1 68420430 to 168421299 reverse strand)
cccaattagacggcacactgagcttgcacagtcaggtacatgatcccttgtcactgtaccagtttctgtgcttctctctcatgaaaacaactgttgggattatttgtttctgaagatcagtgcatttattagttctctcatgaaacacaacactatgatttaaatgctcacattttgattactgtgtaaacaatgggacatacaagatttttttaggtttttgtagctcattattatagtatgtgttattaatatgatgtagcaggcaacatagtatcctgcgattcctaattagttgatgcctaagggtttttgtagcttatgcaactaagaaaacttcttcaggctagaaaaaaactttgaagtgtgggacatggtgcttagaaagtgtggcaagcatcgaatttacattgatgtagtccatggtgtaggatttttagatggcaaacacatcataatttgtgtttacaattgtttattaggaggcacattgaccattgcttccttccaaaatttatatgttgcagtttacttccttaagaaactaactgaagcattatgaggagctgtagcaaatcgacaatccatctgctattgctaataatcatgctattttggcaatggcaaaatttatatgttgtagactacaacaaacaatgtctatgaagtcgttgacatctggattatattctattagtgctgatctggatcaattcttgtttattaggagacttcaaatgttttctctcccctataaaaacactttgtttcatttgcttataattaactgctgcactgtccatggattgctctctcattctacttcctatgattttaggattttgacagctgttgtcaacgaaggcgaga

SEQ ID NO: 7166 - DNA, 446 bp, Zea mays
  Intron number 2 from transcript GRMZM2G161414_T01 (locus G RMZM2G161414) derived from phytozome v7.0 (chr-ID 5; pos 1 68421514 to 168421959 reverse strand)
atcttttgggtcaatacgggtaacttccttgaaggtttctatagctttttcagtttccccagattttgcatgtatgtgaccaatagcctagaagaaacataaaaatcatttcacaaatacaacgctatgttgcaaatacatgaactgagaataagcgtttgattagatatatgtcttaccttcaaactttcacaattttcagggtgcacctccaaaactttctcaaagctacctaatgaacttttgaagtctccaaattttaactgaatttgaccaagtcctggttcagatcaaattgtgttataaatatcaacttaatatacagtggagtgctccaaatgaccaatcatgctaatctaggctgcatgcatcatgtgcaaacctaaggaagaagattgaaaagaaaattagaactattaattttggatgtcatatataggtagttt

SEQ ID NO: 7167 - DNA, 700 bp, Zea mays
  Intron number 1 from transcript GRMZM2G060038_T01 (locus G RMZM2G060038) derived from phytozome v7.0 (chr-ID 10; pos 88861888 to 88862587 reverse strand)
gaaacatatctgctaatgtaagtttttagaaccaaaactgttgtatctagtatttctcatagtacctgcaattttttttctactcattgtaactaacaactggtaatgaaaaaacagctgcaacactaaccttctagggcgtttattgagctgaaaaccaattttccatttataaagctggccatgatgatgcttgtactactgtcagcatgattttgtcataggctaacattttagataatgttgaccaacactaattgttctgttagttttgaattttggttcataaaacttttgatatgtcttttcctaaaccacaaatattcctagtaaacaacagtatatagtactacaaacctcctacttcatgcaatgattctcaactctcctgcacatttgagaaaaaaatagtaatacgagatatggaagtttatggtttttaataggcttttcaatttgaagaaacctctctatgaaaaaagtagaatcggaaagttttaaatgccaaatataaagtaataaaatcatgatgctacacaatatttgagtatggcatgcaagataacataagtttttcaaacctttgttagagctgatgagtgtagcaatataaactgaatttattgtttctttttctcagaatggaaaggaccacagggttgaattgatttatgctggtaggtcaagtattagaactttg

SEQ ID NO: 7168 - DNA, 984 bp, Zea mays
  Intron number 2 from transcript GRMZM2G111782_T01 (locus G RMZM2G111782) derived from phytozome v7.0 (chr-ID 5; pos 1 63293378 to 163294361)
gtgcgatcaccagtggcggtggtggctctgtgggtgtaagttccgatctccgtgctggtcgagttattatgcgtatgaaagaataatatgatgtgttcgacattttgcctgctcgcttaatgactgtacacttacttcaccaacttaatgcctgctctcaatacgtttgcaagtatctatatttacagatcttcattcaaaagaagaagttcaaaaacagttgagattgggtagtgttacagcaccgaatcctgcagcttttcctctgcctgcatttctgatgcggatttctgaacctttttgagtcgagcttgttttctcagcatatctcgtggttaggctgtgcatatctccctgaattcgtttgacttttttacattaaatttgatcaagccattttattatacaaaatcattattataactggttgtttgcttcagattaaaaacagctgtttgaactgcaatatatagaaacccgtatgaattattgccaactatgcatcgtcttctgacagccacatgcggatctttgtccgcttgctcccgccgcctgtactctgcaccaaccgggcttgtttattcatccattaattcatctgctcatgcgatgcgattctcccctacggccctacccctaggcttaggctgttagttatgcggcgacgcgaataattgacgacggttagctgggacctgtgtttcagccggtacagaggttagttgaagagcccacgacgacagcctcagctctcactgtgtgtctgtcagcgccgcctaatcatgcacttgtccttgaaatggaattttttttacatcgagttcgtttcctgcccatgctatgttaggtgataaactaatgctgaagcaacctccattttttgctgaatcaacctcttccaagtttctgttcatttgctgatctgaacaatctatgaaccctttctcagggtcgcactccagcacgccagggtgacaacagaac

SEQ ID NO: 7169 - DNA, 864 bp, Zea mays
  Intron number 3 from transcript GRMZM2G113911_T02 (locus G RMZM2G113911) derived from phytozome v7.0 (chr-ID 1; pos 1 83848264 to 183849127)
ctgctaggggaaaaggcagcatttattgtgccgacgtatgaactaaaatctgctgctggtattttactttattctgattatttttggtgttaataaggtagttgtttcttagttaccttcaagatatagggaagtatgcgttctcaccttatttttggctctaattttcatccatatttttgagataatttcagtctgtcatttttgtgatacatggcctgtacgttttttgtgcttttgctattttgggtaacattcatgttagtgaatatctgtaataaactctgttgcgaacatccgattttaagtcatttatagctactgttcatcaccatgccatcttatgtctccaacttctatattcctccagccgcctgtctagcattctctttttgaaacttgggaactcaaataaagcttctatttcctactttaggctctagtgcccaatcaaactttatctggctctttaatcttcctctaggcttatggtaagaacttgaacatgtgttcttttttctttttaagtttggtgttaattgcttttccaagagaaaaaaatatagttgtattgcgctttagtctttaataatcaaatgtggcaggttcatgtcagcctgttctatttaccaccatgatgcagcacatgtgattcaacatagaagtatttacattttacaactccgttttattagtgtattcatgagttaacatttttattgacatttagagtttggtaattcggaatactttgtgatctaacatgagttgtatttctccaacttttttactgttaactttgtttcaacataaaactgactaagattatattcaccagagctgccactctaccttattctgggc

SEQ ID NO: 7170 - DNA, 977 bp, Zea mays
  Intron number 2 from transcript GRMZM5G885867_T02 (locus G RMZM5G885867) derived from phytozome v7.0 (chr-ID 10; pos 146473658 to 146474634 reverse strand)
cgacttgcaggctcacctgttctgccgaggacattgtaagcatccgcatcacgaactcttcgtttgtttttgtactgtactttaaagcacgttttgctagctgttcgaaatgatttcttctctcaacttagacacaaaatccaaatttgtatgtgctagaaccttgattttgtttgttcatgtactaattatttttcgtacggcagttttgactctgtatactgctactagactcactttaccacggtttttaaagcggtatggcaagacaaggcattctggacacccagggatcaccgcgtggacgtctaggcgtcgcctttaaaacagtgcacttgactaataatattccttgcattaacaagagttacttgagccatgtgttagaggcttagagcatctccagatctaaatgtagcagctcaacagatctcgtatccctctattctttagggcatgttcggttccgcagggatcggaggggattggtggggatttaatcccctcctattcaaccctctaatccccctcaatctcttcgcaaccgaacaaggccttaggagatctactaaatccactgccatctctcctgaataaaggagagacttctccctctcctaaatcaggatgaggtttgggcattatgctagagcaaaggtctcccataacctaatgtcgtttttggagatctcctataactggttgtatgggagaagaaataggagatctggtggagatgcttttataccttaagctaccgacgacgaattatactaagtgcatgccatatgataatcataatccggtaaaggtagccattttcacctgtaaggctgtaactagaagccaggtttcacaatctttttttttttttgataattgatgaaagggacacattatgtttgtactttctgaatgtcttctataggtgaaaatgacttcctgtaggcatctattttgtcaggtggaatctgttt

SEQ ID NO: 7171 - DNA, 770 bp, Zea mays
  Intron number 1 from transcript GRMZM2G126852_T02 (locus G RMZM2G126852) derived from phytozome v7.0 (chr-ID 5; pos 2 3985913 to 23986682 reverse strand)
aaagcaaacgggtacggaaatatacgctattttgatccacacaaggatgtcatcaacatttctgagagcaggatttttcgttgctatgtgtaattttcattagattttgattggtttatcttttgcaaatatacctcctctgattgtttttctatctcatttgtggagcaacatagcaaccaatcttgatttgctattttatctcacttttctttgatttaatcggcttaagtgttatagatctctatattgacaagttttttgtctgtaaacatcatgtatcttctaagtgtgtccacgacatatctggtttttattgatttccgaagctatttatttttaccttgtaaatggctgaatttctcatttggtattctacatttatatgtagctcagtgattgtagccaattacattggcaatatatgctatgctgacctcagttcgatgaacatttttactgagagctgcattctgcccacaatagctttaccagtaatctggccttttaaaattgtttattttttagtattgtatgcatctttgggatctgatggctcaatgatttcaaccagtcactcttgatatatacgctattctgattgctgctgttgaaaaaaatatccatgagagcaccattgtaccctatcaacatgctttgtagataccttttctcttgcgttctggagttatttttcaattttagaagttttttactaactccatgttcattcttttatcttattattagcttttcaagtggtggtgaag

SEQ ID NO: 7172 - DNA, 995 bp, Zea mays
  Intron number 1 from transcript GRMZM2G126586_T01 (locus G RMZM2G126586) derived from phytozome v7.0 (chr-ID 10; pos 105035956 to 105036950)
tgtcgcgctcctgggtcgtcttcctcctcgaccaggtccgttcttgccctgcgtgtctgctctctgcctctcacacacttttgttgcagagtagcatgtgaagactgcttgcaagaataaaaaatttagtctttatgtgcttgattcatcagttcatcatcatgcctactgttaaatttagacatgaacaatgggtcccgatccccgattctccgcgatgaattatgtctgttcggttattttcaatttatatgaattgaaggggattaatacggattatgagagattttgacttactggtgattgaaactctctcaatttatatgaactgtggtagaatcgaacatggccttaggggtggggatagggaagtttctccccccgtgacgatgtaaacgaggaaaaatcttctcccgacgagtaaacgggggcggggacgggaaacattctccatccccgttatctgcgagacccgttaaacttatatatgatgatgttttcatgtaatatataatgataaaataaataattacattgttaagaaataactcgttgtataaatatatttattttgatgtacacataaagatttctaacatctaacaatgtgtataagttacaatgttttgtattaataaaaagaaagtatgtcataattataatttaagtggggacagggatccctaacgggaatttatccctgcggggaacggggatggggaagaaatgtcctccacaagagttcgtggggatttccgtggggatttttttttttgtcgcggagactggtatgaggagccaaaacccaaccgggaatttccggttgccatctcttgttaaattctgcaacgaatcctatcagatcctaagtttggttccaaaccactgcgtaagaggacttgatgactgacacgtgagggagaacaagattgatccatccatggcatgtttattccgcaggtgttcacgtacctgatcctggcggcaggtgctgc

SEQ ID NO: 7173 - DNA, 501 bp, Zea mays
  Intron number 1 from transcript GRMZM5G883043_T01 (locus G RMZM5G883043) derived from phytozome v7.0 (chr-ID 5; pos 2 04932092 to 204932592 reverse strand)
gaaggaccggtaattggaaccatttagtatattacttactgaaaattttattaagtcaatgacattaagtaattatacaattacatatctcatgtttgatatttgtgttacatggcacccatataataaacagtttccattaaaaaaagctgtgttcttttgaatagcaatttaatctatttatggcatagttagattaatttggttgtctgatcaatttgatattttggatgttctggtcatgtttttggccaatatggtttcatattaggattattttatctgtggtcagtgcttgtttgtccatttatacccagctttaaactaattattgtaatatatgctgcacctattccaaaactataaagctactattggctgtcaacttaccaaacagaaagtgaggttttcttctgagatacatattgttttgttttcaatggtggtaatagaatcttgatgtcctctagttttgttgatgcagctatccacccttcttcg

SEQ ID NO: 7174 - DNA, 306 bp, Zea mays
  Intron number 1 from transcript GRMZM2G462647_T01 (locus G RMZM2G462647) derived from phytozome v7.0 (chr-ID 5; pos 9 6404481 to 96404786)
atcaatagaccattttctgctttcttgccatatcggttgtcgtctccatccatttaagctgaattttaggggatgtttggtttgaggattcaatctatttaaaatgaggtggttcatgagtctattccttaagtttggtgggataaacacattcctcatattagtactaactaactattaggaatgagacggtgatgaaaaactcattccattccataaatcaaacaaaaaaatttgaggagcgagaagatgatgaatgtactcgttgttaaaccaaacaccctgttagtgtccaaattctgtttt

SEQ ID NO: 7175 - DNA, 509 bp, Zea mays
  Intron number 2 from transcript GRMZM2G063478_T01 (locus G RMZM2G063478) derived from phytozome v7.0 (chr-ID 10; pos 89931627 to 89932135 reverse strand)
ccgaaccgaagggagcagaggtaaggactgtcctgcagctcctgctctcaagtttttaattattgctgtccatatgaaagctgtgtgtcgttatattaaggatagtagaagggatctaaaaagacccatatacaaacctttgcaacttttttccgaatgcataggaaatctgtgtatccttatattaaggatagtagaagggacctaagaagacccatacaaacctttgcaactgacatgccacattactgaataacactcattgattgaattacacttgacttaagataattttttagaaaatttagtcgtggttaactttttggtgttcctttcagaattattctatctatcagtattatttatgtaaatatttgttttttatatttaaaagaatattttgatacctgctgcctttgcattcttggttctcaatgatcacttggtaagtaatataggctacatcattcttaggagatcagttgatcttggaagttcattgagagctc

SEQ ID NO: 7176 - DNA, 941 bp, Zea mays
  Intron number 2 from transcript GRMZM2G363292_T01 (locus G RMZM2G363292) derived from phytozome v7.0 (chr-ID 10; pos 94686098 to 94687038 reverse strand)
cgaactccgaggagttcagaaatctttgtgacaatgtatgattcatcccagagcacatgttactttacctgcaccttttgtcctgcatcatatgggatttgtgagagattcaaatggggtgacatcatgtagtatgtcaagctcaacctattgttggatataaatgccagtgcatttaggatccaatttggggtctgtttgaaaggggagatccatcggagctaaatcacttggaggattcctgggacaatctcttctttttgtctaccaggtgttcagataatggtgcagagtgcagacaatggaacttgagataactttggtgtctggccttagaagttgatagtaatttcttataaaccttgcaaattgacatgatagcacagaaggaagtaaacaaaagagctctttcataaagtatatgtgctgtgagctaaattagtaaattttgacatatattccaagctcttttgtacccatgaatggagtcaattggcggttgaatttgcctgccctcatctattgtcagggtgacactaacctcatgtgtatgcagactaccaaatacccatgaaccactgtctctcacataagggcattagtttagaaacttttttcatctttactccctaaatccctaatgatcctggttctattataaggatacaaaggagatctgctttgacctacatagcagtccagatcttcatgtaacgatgtgttgatgttgatccaattcccgttgatatttccttcgtagtatgtgaggttttgttctggaatggcctgagcttgcattgaactatgtttaacattcagtcaaacctgtcatcaggatttagcattgtaggttgtgggaaagcattccacttttattaatccaaacattcctcagttaacttaaatgtgtttcgtttgatatgcagaaattcaagcacata

SEQ ID NO: 7177 - DNA, 701 bp, Zea mays
  Intron number 2 from transcript GRMZM2G127168_T02 (locus G RMZM2G127168) derived from phytozome v7.0 (chr-ID 1; pos 8 6171038 to 86171738 reverse strand)
gtccaagcaggtttgagctaatctaagtcaaacaggatgaatgtttggcattgttcttccaaacatcactcttcctctcgttgtcatatatatatttggctaaatgctatgtgaatgggtcgtacacagtttaagttcgtggtggtagaataaccatgtttatttgatttatatgtaaagttttctctatatttatcccattataatcacttgtgcatgtatgtagcataaataaggacacttgatattggttaatgatagctctagttcatctaaaagtctagtaaaacaaaatgtaatagagtagggtaaaatgatttaggattcaaatttttcgatgaattcatgttgtggcatgaaggacacttggcgcagtggtgagaagcctttccactgggccaaaggtccttggtccaacacaacctctctgcaaaaatacaggattaaggcttgcctcggttattccttccccatgccccactcatgtgggagccgcaagcactgggtctgtcctttaattcatgttgtggtatggttttaggaggaagcttctgtgtgggattgtaactagatgagtcatgaaaaaaatggtgaaattactaaacgatttatgctaatggaaatggaatatattattattcagacatttggaaggttatgtatcctttagttatttctgtttccattgtgcaggtttcgta

SEQ ID NO: 7178 - DNA, 865 bp, Zea mays
  Intron number 1 from transcript GRMZM5G882378_T04 (locus G RMZM5G882378) derived from phytozome v7.0 (chr-ID 5; pos 4 6944261 to 46945125)
aagtctccggtcacctgtcactctacgcaaccgtaagcgattctcttctcatctggttaaggctcacacgcggatctagtttccagcacagtagcggtggatttgattgttttgtttagatatggattcctgagagcgtggatttggctgttatttagggttattgttgtttcggctgattaccgtggtggaaaatgttgttttgggctggtaaattacattttgagatctgcccttcgctaaattagttcgtacagtgatgctcggttttactaatctgatcatgatttatgagtgttctaagtgaccgtgtttcatatgccaaatgctatatttgagatgtgctgttaaaaccgttgaagcatcatgattagaacctattattacaagctgagagtgagaatactgattatgtaggggtttgcttgggctgagttgcttacgattctggaaagtgtatgttttgcaaggataattgttgacaatatacatcgtgatgcaagtattatttagttcttgaaatggtgattattagactgagactgatttcctgttcaatggcttctatcagtttctctgctcaataccgtttttattagtagctttatcttactgtaaatctactgtggaccactgttggttggcttgaaatgactggcgtttagcttactgtattgcgctcaattagtatatttttgttccttttaggctcttacagtcacagcatgactatatcaaatcaagttaacccgtgtactatgcaatagtttctggaggatgttaacacgaaattgaggtcaatgtcatcttatagttgtatatgtttgtagtcgaggaggaagaccagggagcctaaggaggagaa

SEQ ID NO: 7179 - DNA, 628 bp, Zea mays
  Intron number 2 from transcript GRMZM2G406135_T01 (locus G RMZM2G406135) derived from phytozome v7.0 (chr-ID 10; pos 148824617 to 148825244 reverse strand)
agtagagtcgcttggtaggactccttgctacaaaggtactttgttttctagaacccatagcaaatcaaggaattctggacggattttctattggcagacacacactgaatataacattctatacatgatagtatgggaaaagctttagaagacaacctatataggatccgacaaggggaggcatgacttggttattaaaagaatatgaaaaaacactagctaccccttcgtaagcttttcccattgctactttgcagtaattactaaggcaattactacatgaacaatggataaatcatacctagaaaaataatagcatatccacatatgagcatggggagcgacaaccaccagctaatgtggccaccgctgtcggcatgtctgatgccgtcgagcagcagtcgcctaaagataatgatgctgacatacaggaggacacattttttgtgttgctaaatatatgtatgtcaggcgacagtcaaaatgaacccaacccagtgcgaccatgtcttcatctaaatcgaggagtgtcagggagaaagacgcctcgcctcgtcttcttctgcggtgtacgttcttcaagctttaacccccatctggggcgtccatttctaaattggtggcagag

SEQ ID NO: 7180 - DNA, 823 bp, Zea mays
  Intron number 3 from transcript GRMZM2G110952_T07 (locus G RMZM2G110952) derived from phytozome v7.0 (chr-ID 5; pos 2 590023 to 2590845)
tccaatagtgtcaggttgaagtcccccaagctgatgtaagcaacttatagccttaataattcctgctttgagctgcttcgtgcaagatattgctcgcatctgtaggcttagtggtatttagtttatggaatgaaattgtccattatcatctcactctttatttttgtttggtttatggaatgaaatgagttgatcaagctggcttcgacaagtggcaacctcgtgctatacaagtaatcatgttttttgtcagtgagttcgtttcttttgtcacctacggtgcatctggctataagaagataagatttggtaaagacgtttgttctgagttatccaacctagagaccgagcataacgaccttacatatagggattgtataaagtcaagctatcaaggctagctaccatgctgcatccagtggagaactagagattaacacgtattttatggatgcatgtttacatccttaaaacattaatatataggattagaataaaactgcagagttgtttgagggatatggccatatcatacatgaactgattgtcaatcgtgcgatccgtacagaggaaaatgtaacctattttagcctttttgatttgagatggagtttttgttgttcatatatgagcaattaatatttgtgattttgaattgtttgatgagtcatactgtaccttcctataaaatgggatatttaaagttcatgtgaaagttcaatcttgttttctctaatcgtgtgacttggactgttggagaaatgttggctaatttcacttgttttcaggaaataggtggattgctctggttgttgagaagttt

SEQ ID NO: 7181 - DNA, 521 bp, Zea mays
  Intron number 1 from transcript GRMZM2G413796_T03 (locus G RMZM2G413796) derived from phytozome v7.0 (chr-ID 10; pos 135273796 to 135274316)
attgttcctgtggtgaattgcatgtaagtcagcatttatctttattcttctttctctcattcattctttttcgtctacaggttcgttcaatctagacaaagtttcttttttttccatcgacttcaccaagaaacagtgtgaacaggctaggcaccagccaattgccaattttgatctgcaaggtttagacatttttattaaaaaaactttagggttcaaacaaaaacaggatgggacaggttaccttgatgttctgccttttcagatttgaatagagagaaatgctgctgtttgttgtatctgtcttatcctttactccctgtcggtgcttcaactttaaaagtatcctaaaacttagaggaccctgtttgaactttgattttatcatataccagtgatgtacaaaaaacataacattttttaactacttacgaactatatgtatgaatgtttaccagctggattgttattacagacaacagaactgtatttatcttgaataatgattgatgcttaagtgc

SEQ ID NO: 7182 - DNA, 858 bp, Zea mays
  Intron number 1 from transcript GRMZM2G388148_T01 (locus G RMZM2G388148) derived from phytozome v7.0 (chr-ID 5; pos 1 34191329 to 134192186)
gtgcctagacagtggccgatagctttcaaccccctgtgagaactgagaagctcctcagcttgggattccttttcccttttgttggtgtgtttgcatatggttttgttctcgattcgtgtggcttgctgggtttagctcaggtgttttaatttacctcttgttgcttgttggtgccatattgtttaaatgagttggagatttttgaatatttccaagaattatgaagatcttagagttaaaaggacccattcccttctctcacctatgacttctgtaaaaatgtttgctgcgtagtagagcttagagttttattagtattgtagcttgtgggtgaacatatttgtgctaatcaaaacagatggccctgaacgctgtgtcaaaggcaaatgtgactgaatacgtttttgcatatcatggttttcaattgattagcatcaatgcttaaatttttttggttgtggaaaggcaagtgtgacatgactcagattgctattggctatcatggtttgtagtagtattggcgcttaaacatttctatagagaagttttggacacctggtttgaaatgttgacgtctttgaggtcaaacacatagtgcatacctttcaaggtcaagtgttgcaacttttacgggcagaccaactgttaaattttcaatgttgtcaacataaatggtcaggatttgtcttgcatgtcttcctaccgaaatttgtgtttctactttcttgtgatatgattcatttacatttagaaaaacaaaaaagagcacactgctgaaacatattccttgcattaaactttgcactctattttttttttgcaggaagtcctccactgaagaaaaaagtgttactccaa

SEQ ID NO: 7183 - DNA, 797 bp, Zea mays
  Intron number 2 from transcript GRMZM2G136098_T01 (locus G RMZM2G136098) derived from phytozome v7.0 (chr-ID 5; pos 2 09392183 to 209392979 reverse strand)
tcgcggggttccagtcccgcgtccagcagtgcgtggtatgtctcctcaatcggctccgtgcctgcgcacggaaccgcacatgttttccattccttttccttcaaactcaacagtgacacaaccccatttgtttcgcatttgatgctgaaatgctataattaatgttacaatcgtggtgaccgggaacaatgccagtctgccagtgatgttgtagctatcaaggactttagtacaataacacataggttcttccgaagttacagtagtctatcaactgttgattcacgctactcatagaaacaagtatcgtttcatgttatgtagaggaattgtttagttctctttatctttcctgtgataagtgcagagcatattccttggttatggatatgtgtattgggtaactgggcattcacgttttgtatttgttgttgcaaggtccatatggatagtccgactgatcttggtatctctggtaggctgtcgttcattgctgaaaacttttgtgcccgttgttatctctgatagcctgttgttcattgcctgatatttgtttcatatattatctttggtgtttgtgtctccacatgagtacaggaggcaaaataatcatccactttgagctcattttaataaatcttctcaagacataaaagtcttgcgactatatgcaacatttcctcagcagtgctaagcttgcttgcttatttttcttctgttgtttgatcatcttctatcttctgaaatctcgtctttatttaggctagcagaggacttggtctcacaacacatattat

SEQ ID NO: 7184 - DNA, 368 bp, Zea mays
  Intron number 1 from transcript GRMZM2G008247_T01 (locus G RMZM2G008247) derived from phytozome v7.0 (chr-ID 10; pos 37755250 to 37755617)
acttcatctttggtgccgccacttcagcgtaccaagtactactaatatttatcgctcgttagtttatttttaaactaaatcacgacaaataaaaaagaacgaaaagagtattattttctagcacggacgttttaggtcagatgaaaagaaactagtgttaactgttacatataatgacaatatatatatatatatatatatatatatatatatatatatatataaaagtttagggttatatctaaatcaaaaggagatgatgtgtgtgtgcatatgcgcgcgaacgtattgtattatatattacttgtttgatatgcgcaaaagtaaacggtatatatcttcgtagattgaaggtgcttggaacgaag

SEQ ID NO: 7185 - DNA, 241 bp, Zea mays
  Intron number 4 from transcript GRMZM2G312091_T01 (locus G RMZM2G312091) derived from phytozome v7.0 (chr-ID 1; pos 2 88864306 to 288864546)
gtgctaagtttgctgttggtggtgaggtatgagctcatcttttcttgttattccaatttccaattatttaaccttttttactatattaatgatgttatatgagtttcatttttgtttgaagtattgatcatccatatggtggtaattttcgaaataacttttcttcaagagtcatgacatatggtttactaaattttgaatgttacatctacaattcactagcctatttcacaatgacagg

SEQ ID NO: 7186 - DNA, 1010 bp, Zea mays
  Intron number 1 from transcript GRMZM2G045376_T01 (locus G RMZM2G045376) derived from phytozome v7.0 (chr-ID 5; pos 2 17701986 to 217702995 reverse strand)
tacttcctggacgtcaagctcggcgtccagtacaggtccgtgctatcaggatcgcgctcctccatgatatatagagctcttgactgctttgcttttgtagagtagttgcatgcttcaattgatggcgatgattccagactccgtgtgtttcatgtcgttaggtgatggcgttagttaccagtgttcgtcggtgttagttacttagttatcagtgttcattggttgtgttcaagtatgcaattcagtataacatgactgatcgtaggggacatagtatgtagaccatgctacctaacttatgggtcaattaaccgatccagctgtctctacagacacctagcaaccttttctttatagagctcacatgcaatccgttgtcgcattcaaaaggattctaaggatgctttgcctcacctgtattggtgttagtggttttcagtgacagggtttatgaaaacacagttcgagctcgttttcttctccattatttccccttcgtttattgcgataaaactttttggtttgggtgtacgtaggatttcagtttcctttttgtgaatgtggtcatgcttagcatattatcataaagatgcattgattattcaggacaatgatttggtcaactcaatcccttgcaaaaatgtacttgagcagttgaggatgcttttggagaagttcctgctgcggctgtttttcaggcattcaactcattagacagatgataacaatcaattacttgccttgaaatcacaatcaatatggacacttcttatctcagctatatggttttgtttcttttgatgatgggcccagatccaaactctgtcgccatatattatgagttgtacatttcaacatatttgaatttgtggaaatgtccttctggattaaattttgtagccagctatgtactctctatctgatagaagtcttagtctctcatatagtattaactttacctccttgctaatgcagtctctggggtggttctgtcataaatctaggaacca

SEQ ID NO: 7187 - DNA, 868 bp, Zea mays
  Intron number 1 from transcript GRMZM2G123807_T02 (locus G RMZM2G123807) derived from phytozome v7.0 (chr-ID 10; pos 111144541 to 111145408)
ccgaggagcgccgaagttacgcccttctcgtgaaggtgtgcgctccgactcacttagatgtaggtctatgtaagaagaagaatcccaaacaataagatggacaccaaacgcatagcttttttgtatagtacttctttaggaagtggcttccctggccagctctagaaaagccagctcaagcagatccagacggggccgactgcgcaacctgttcgaccggtcctgcaccgcctctcggtcgccgagcttggctctcgatcccgccgctggggcacggttgggggcttgactcacatttggtgctaaaaatttactattctagagcattttgcctcctcattcattaactcagattgttgagatggcaaaagatgatgtttattccgcctgaaatcttatttgcacaatacataggcatttttatggcatttctagcagctgaaacaataaatactgtttgtcggttcactgaagcatatatcgtttctaatttggtaattgagcctcacttagatgatggcatcaaatgtttgaccttgatgttctgctaggtaacattagttggttacttttatctggatcatgttcatcacggtagcatcatatgtaatgctgtccacacaagtcaatcccagggatttctttagatataaatttgtaatagttcgattcatctaatctttgattatgttaacagagatctgattgttgattttttttgaaacttgcctttttattttttgctttgtttatgcaacaaaagttctgttaaagtttcttttttattactaggagtagaaaatttagaattaggaagtccctaatgttatttcctcatttacaaatttagacatccttgataaacctg

SEQ ID NO: 7188 - DNA, 516 bp, Zea mays
  Intron number 2 from transcript GRMZM2G134439_T01 (locus G RMZM2G134439) derived from phytozome v7.0 (chr-ID 5; pos 9 8271888 to 98272403)
tccttctttattcagctaaggttgtgctatttatccttcactttattttgaccatagctttcgcaatatttcatattagtcacatgggaggtgttatacatgttagctgtctaggtctttttaatattggtcatatgtcttcacattagtgggtgcttttaatgctcgcaactgtattgaacaggacttacttatattatgaagcatatttttttggtatttgaaggcctgtacaaattattatttgctattagtaagataatgcctggaaaatggcaccaaattttctagtgcagaacattggaaagtaatgtatcctttgcatttgatactgaacatgctagtgaagaaacacatctgaaaatagttctgtatgtttttcttaatctttataatcgttccactattccagaatgttaatgctaccttatacgcaaaaaaatgctttggttttgggagttagcattgcaatttattgtcctgcatatacttttctttttcaggtcattcctggaa

SEQ ID NO: 7189 - DNA, 919 bp, Zea mays
  Intron number 1 from transcript GRMZM2G030013_T01 (locus G RMZM2G030013) derived from phytozome v7.0 (chr-ID 5; pos 7 3050571 to 73051489)
acgccccgcacggggacggggccttcagccggattgtaagactcgcgctccttccctccgcaaaattttgatcgttccagacgaaagggttttagtgtggtttatatttatgactggagatcggaacctcggtgcctagcaattaatgaaggtgatgtaatccactgatgttttgcgtagtttcgtgtgctttgtgaactgtgaagcggccaagcaaagcagtgctcactcggcttgttcgattgcttgtttgagtgtgtgcacgtcggcacgtggagcaatgtgcgtagatgtacatattagctcaaagttactcaagcatattggaatttgacactttgaattgctgacgtgctgcataagctgcatgatgtctgctatagtgttatatgatttggtgtcgagaccacatttatctgagttgtgacaatggcaaccattgggtgcccttcaccccataggcccatacccttccaactgtgccaccatgtaaaattttgaaccctcacggcctcacttggttagaaaatgttaacaaattgcatcagtagtagctttatctgtttgtgcacgcatgtgtgtgccagacacgctttgcataatcaatcgtgttacaaaactgcattcttgtcatggatcatgctttgttttgaatttatgtttcattctccttctttgttgcaagcattggaacaaagctcttaaccatgtatttaagggtagaaaacgcggtacacggtgactaatgtatcatactaacatgtacaggttgtacggtgcatatcagaattccaaatgaggtcactgcacatgttgtttttgtccagaaaaaaagttgcagtaacatgtaacatccttttatttgttttgttgccttcatttaggttttagtgtctgcaagagaagaagttgaagcaga

SEQ ID NO: 7190 - DNA, 1051 bp, Zea mays
  Intron number 2 from transcript GRMZM2G434170_T01 (locus G RMZM2G434170) derived from phytozome v7.0 (chr-ID 10; pos 5222872 to 5223922)
acgacgccggcgccgacgggcagacgccgcagcaggtacgccgcgttgctctgtctggataattatgaaaatacctgcgattgcttgagtaagtttttgttggccttccatctcggacgcgcacacgagattgtctgtctgttgcgggggcagcaaacatgcatcctggtcgtcactgccagatccatggtcgtcatctgcagcgtggcatttctctcgttaatggctcatattttttttgattatggaaacaaaatgttccagccttttgcaatctcttacatacggccttacaaatcgaaaaaacaaccatccatcgtaaacattctttgaaataaaacatcaacaaatcaagctccttttaatttagcattggacctccatccatggcttgcaaagatctccatagccaccacttctaaggatcgacataccgcaagaatctcgtgttgaggttgttctttctgcaacaatctccagaatctgagccagtatgttgccctgaaaagaacctgcataattgatggttttggtttaaaagtaaaaacaacatcattgcgacaaagccaaatagaccaaaacattgccgccactccaattagaagtttttttctatgtgttgttttcttgttagcaatccaggacctaattatatgattaatattgtctcatatgccgttccaaattaggagaataaatatttttatcttttctttgtatattacttttgctttatatatatgccgtacacgatgatacatgtagtgctgggaaagtttcaaggtaggaaggaattattgtgcctggactcagcacgtatgggtccacacagctagctgagagaagagacgcagctcagtttcctgcctaatcacgggccattgccctgacaacgcacgacgtgtcagcacgcgtgccggttacctgttgcttgtgcctaatcacgggcgccgcatcgaaaaattagctttaggttagtgagctaactaactagtgcatgccgacgcgaattccaggtgcacatatcactggtagggccagacaaggtacg

SEQ ID NO: 7191 - DNA, 614 bp, Zea mays
  Intron number 3 from transcript GRMZM2G108087_T01 (locus G RMZM2G108087) derived from phytozome v7.0 (chr-ID 5; pos 2 00527290 to 200527903 reverse strand)
tataagccagttgttccacagaatacgcagtcaaagtaaccctgttcacgattaaaccaatccatagtgaaattcttcttatgtattccattttttctgtaccatggaaatgctttagtttgtcacttatgtttacagattacattagatacacaagatactcataacatgtgaagttgagctatatgaattgctgctaatataaaactttgcacacaattgttcaaaacggtaaggttaaagtgcagttatgtaagtgaaccatgatgactaagctagtccacacaggatactaaacactattcatccatgacttggatatgttagaatgtaaaacaacttgatgtatggagaaagtcatcagtagtcagtgtatggttttttgcagatagctataaacagatgcatagtctttgacatgtttttattctgtacgtatcatggccctatttttgaccgaataccttggtcctactgttaacttgtaatttgcttggcctttacttagtgtaatataaacttaagggttttaattgtgctgttttgactttgactgggctgtcttctaatcttctggatgttattgtggttgttgtgatgcagctattctacag

SEQ ID NO: 7192 - DNA, 617 bp, Zea mays
  Intron number 2 from transcript GRMZM2G008647_T01 (locus G RMZM2G008647) derived from phytozome v7.0 (chr-ID 5; pos 1 13065193 to 113065809 reverse strand)
gcgtgcatcgcagattcacagtacacaactctaaggtattaaaatatgatgcatcaacgtcgtttaatttagcaagcaaaaaatgttctttcttccactcataacacagggaaatagggcatttgatttttgtgtgtatattaattacaaatgataaatcatgtaatgtgttggtatttgcccgaatgatgcctattcccttggcaccattaagccagttgggagatgctttgtgcatttatgaataagacaagaaaacatgattacttctggtgtttttaggaatgctagtaactaaaaagctaatgttatctaccgatttgtgattttcggacttgagtctaaatgtaattatgaagtttaacatagcaagactggagacgtcgtttgagagggccgatgagaaacacagccaaataacctccaactaacctttgtggtgagtagtttgtttttgctatggataagcccgtaagccatttgctatcatgcgaaagctcctcaattaattatgttttatgcacatgatgttatctttattttgattgaagtcctatcaagtgctacctgttgaagaattggatgttgtcaactaatgcacattgtttcaggtacca

SEQ ID NO: 7193 - DNA, 563 bp, Zea mays
  Intron number 1 from transcript GRMZM2G180471_T04 (locus G RMZM2G180471) derived from phytozome v7.0 (chr-ID 10; pos 143674383 to 143674945 reverse strand)
ttgcttcggcgccggttgctccgatgtaagtcccacttttgatcggtttccgcgtctttttttttgggccacggatatactagcatctctagaatttttgtcaattacttttgtgtttcaatcactaatacaacaagatactgactttctcctgtttataagtcaaataaatctgaggtttctgttaaggtttagttttttctttatcctttcatcttatagctgaacttgaagtgaagaaaatattatgttgaagtaatatgtagtatgctcctttggcactagtaataacaactagtgaccaatattgacttgttggcatgaaataccattattatgctagcgtctagcgacacgagttgcactaaacataatctctccagtctccacctgtaagcgctccaaaaaaagatgttcatgagctgtcattattcatgaaacttgtgagtaagctaggagctctgcaaattgcaatctggcttgtgttagcacttcagccctcttgctgattgttctgcttgtatgcagttcacggggcaagggtcaatagcatccggtaaagg

SEQ ID NO: 7194 - DNA, 976 bp, Zea mays
  Intron number 2 from transcript GRMZM2G372812_T01 (locus G RMZM2G372812) derived from phytozome v7.0 (chr-ID 5; pos 1 46432360 to 146433335 reverse strand)
gagaaaccccgcacacgtatgtactccgttgacgcgcacccgaccaagccatggtgatgcgttgtttgatcttcgttcgcacacagatagaagcaaaagcgtacgatacatttcggtttacttctgaagggggtcataactttttttgggtggatatacaggatcataactggtcatgaacaaggacgcattaccattaggaaccatgacacacaggcaagccattcattccatctttcacatgctagttcgcttgactttaatttatatcggcttctactgtctttacattatttttgtccctttaaattatagctacagcagtctataaataactgtatctgaagcgaattgttcggctggggtatgctgccgtgccggggactgcggtggcttcccgctctctcacaatagtactattgcaacagcagctgcagtaacaactttttttttttgttatcatagccgaacagagaatcactaacacgtgcaatacttaggaccaagcgtcgatgacccaactgcagataatgcctttttcatattgccaatagtataatgacaacttcatttattttttacaacagatataaatttttcaagttaaggttctagttatattcatatgctatggacgcgagtttgtaagtataacatgccaattaagctaaaaaaacaaaaaatctcactagctagaattaataaatagtgcgacaacaagttaccttagtttctttgtaatttggtatgtgttatgacatatatttaattaagctgacactctattttgctaccactggcagaagctactgtattcgtttaaagtctcgcggggaccaggcatgcatgcgcactcccgatcccttccttgttcacttaattcttgatacttaatttgattattattaggtcttgatgctaaattttgtacatgcatgcatgcagtttgttctgtcaaattcattgcgcggaagca

SEQ ID NO: 7195 - DNA, 305 bp, Zea mays
  Intron number 2 from transcript GRMZM2G548714_T01 (locus G RMZM2G548714) derived from phytozome v7.0 (chr-ID 5; pos 1 48725748 to 148726052 reverse strand)
ccctgttttatgcgtagttcagtcagcatatgcagaaatcagaaaagggatcaatatcagctgtttacgaatttgtataagttttgatcttcaaaacatatcatgaagtcaaaaggaaattttattaaaactaccaaactccggcctcgcttgccaagaaatcctaataattatctctagcacagctgtcatgtgattctgactattttaggacaaacaaaccatttggaagccaaacaaatccctgttcaatttgccaaacaaatccactggaacaatcaaacaggctaacaagagaatagtgg

SEQ ID NO: 7196 - DNA, 907 bp, Zea mays
  Intron number 1 from transcript GRMZM2G097848_T01 (locus G RMZM2G097848) derived from phytozome v7.0 (chr-ID 10; pos 134975961 to 134976867 reverse strand)
cgctcgtagcctccgtgcctcctgctgttgcttcggtaaggactcccttggttagtgtcacgagatggttattgctgtggaggggagggatactaatctagtagataaactgagacagtgcgacgagtgccagggaggttttgttttgaacgaagcaaacgcaaaacatagctgtgtttcctatggttctataaacaactaagtggcatatcgatattaatttggacggacgatttgttgaattgattagtacacagtggcagtatgaatctagtgcctgcatagataggttgaagacacggaatgtagaatgctatcatctgtgattagacatccttgtttctctgtccatgattctcatccaggataccttaaaggtcatcaactatttttttagcacattagggaattggtcgaatggtgtagcccttgttctttctgaacatccgccctgccatttccgggttttaccaggggtgcaaacagtccgatacgacctgatacatatggatacaaatacaaatagctacaatgtttctcggattcagatttgaatacgagtaacgtcacctatgtccaataggatatgaatggatatcgacatcatatatatgtgatttgagtattcttatacggatacattatcggatattgaatatccggacttggatacggatgtatctaaactcctctaacggattcgaactcacatatggttggagtatatctgtaccctttgcacccctagtttttgcaatacatgcattttatttattatttattgtgtgccttccttttattcttttagcataaaccaaatacctttttctgctttaacatgctcattattgagttgtaccagtggcatgttgtgtacttgatgttcttactttctattttcatacag

SEQ ID NO: 7197 - DNA, 605 bp, Zea mays
  Intron number 1 from transcript GRMZM2G068350_T01 (locus G RMZM2G068350) derived from phytozome v7.0 (chr-ID 10; pos 95382760 to 95383364 reverse strand)
tccctcgacctcttcaaacgtctgcgccaagtcaggtactgcttccattccttccttccttgctcatcttcttcttctccaatcttccccctccacagtcggccagtcaccccatcacctgttgaattgaaggtcccatcttaatttgatgatgaatacattcctactagtgccaatatttatgggtaccttaatgttttgcggttgcccttatccaacacgattgcattcagcctctggaattctttccgattgcaaagggagtctgctgtctaatttagggtcaccttttcctgttatatgctgtctgaatcgactgaaaaaaccggtaccttttctttgttttttctatctgaggcacaacacaatgaatactgactgctgcttgtactggacataggactcaaaagttcttacatttcaactcaagaatgttggttttgtagtctaatataacagtaacatgccaacatcagatgagagacacgggccggcagtgaaatatgatgttcttttttattggagaaaacttcatttattatataaattaaaccctgctgttgacttattgcaaactctcctcccatgattaggaggttcggcac

SEQ ID NO: 7198 - DNA, 880 bp, Zea mays
  Intron number 1 from transcript GRMZM2G391815_T01 (locus G RMZM2G391815) derived from phytozome v7.0 (chr-ID 1; pos 3 00527763 to 300528642)
ccacgctctggaacgccgccaccaattttctccaggttcggtttgtggattggtcggaattcaatagatattttaaaattttacatttttaatagatattttgaataagacgagtgatttaagttttttttttttaaaaaaattaatgacgtaagaacggagcgagtatactgtttgtttttgtctttacctttctaagatattgattatacaaaaaaacaaagctttatgtctatcataaaattcttattgaaattagcctttttaatcaacgccgctcatgtaatttaactcgaatgcatgcatgtgactcagagttttgaaactagcaccgctcatgtaatttaactttgacacacgtgtatagtatattatatcataaagaaaaaactagagaagaaaatttgtatttgttgggggacgagaccgcaaaaacgttgccgtctaaccggcgtacggtagaatcgaacatgaaattcttccgcctccgcccgccggtcgccagagcccggagggagagcgctgagaagcagcggtagctggggaccgggggctcagcttcatcatttcccaaagcccccgagctagcagagggagtggtgcgaggtacatcgaatgggggggaattaggtcatggatgcgaggtacattatgctcccagattccctccgtcttcttcggcaacttgttcttttttgtttgtttcccccagtataatataaggcatgaaaccatctcctatcgacaacatgtgtatgattgacgcatcatgccatggcgatacctgctattattattatgacagactagagtagtactaacttactcatgtcatgccgttgcagggtctcattggacgatttggttcttcaaacaagaa

SEQ ID NO: 7199 - DNA, 659 bp, Zea mays
  Intron number 4 from transcript GRMZM2G062142_T01 (locus G RMZM2G062142) derived from phytozome v7.0 (chr-ID 5; pos 2 08191314 to 208191972)
gctagggtctttgctcaccaagtatggtcatgagttgcataattaagatttcttttatgtggtcttttaccaacataaccaacaacagcacataacctggatcatttttctttttacatatttgatctattttctccgtgctgcttaagcacaacaatcggatatcattctcaaaactacaagcactatagtcgttagttaaagtaaaattttgttagtgggaatatattattatgaaacaacaactggtatttatttaactgaaatagtaagtgtgtttaattctaataaaccaacttgggtcctgatatgtatatgaatgcgtggtgtttttgaactgatatcatcatcttggcagttttttcagtgttttcttggtttgtttgtgttctatctgatatgaagatcaaactcattttatttggatgtaaacacataattggtgttttgagttgatatcttgcctcgagatcatgtttgtttagttgtcttggatattgttactttatgttcatagttcataatttatcgctgtcatttgtccttctcatattgatcttaggtggttccagttggttttgattccttttgtttccatccaaacattgtctcctaacttctcatatggttttggtaggatattctggacttggcaaaat

SEQ ID NO: 7200 - DNA, 783 bp, Zea mays; identical to SEQ ID NO: 6961
  Intron number 2 from transcript GRMZM2G130432_T05 (locus G RMZM2G130432) derived from phytozome v7.0 (chr-ID 5; pos 1 91483855 to 191484637 reverse strand)

SEQ ID NO: 7201 - DNA, 472 bp, Zea mays
  Intron number 2 from transcript AC186028.3_FGT003 (locus A C186028.3_FG003) derived from phytozome v7.0 (chr-ID 5; po s 19749274 to 19749745)
aggagcagagctgagaaacacattacttgctcaaggtgctttgtagccacttgcccatttaatgttgtcaaataaggttctacaacaagaactgctgcttgggcattatcaaatctcaacaaggttgtatcgattaagttcctctctggcttgttatgtcacagttgtctctttaccaagggcattttagtagttagaagaaataagataaagcctttccaagatggtattactgcaatggtttactccttccatcccgcttaagtcaaatcattcaaaatttcaccaagtttgttgaaaagaacatgaatatttacagtaccaaggaggtaaattgtgaaaacacatttcataatgtatctaatggagctcatttgatattgtaaatattcttcaggtgttctttactaggacgtcatgtgatttgtatctcataattgtgctgttactaatataggataccagttcgact

SEQ ID NO: 7202 - DNA, 909 bp, Zea mays
  Intron number 1 from transcript GRMZM2G400109_T01 (locus G RMZM2G400109) derived from phytozome v7.0 (chr-ID 10; pos 146334714 to 146335622 reverse strand)
ttggtgggccgggccgcgtacctcgaggccgccaggcatcggagcgacgacctcggcgtcctggtgtggtcaccgccgacgggtcctgctaggtagctggatgcgctcgtctgctgctccgagatcgatggagcttctgaatcctaggtagctcacgctcgttcacctatcggtcccgtgcatgtacatagttggggacacacgtcgctaggacgatgagagagagagagagagcatggtagggtgaagactggaagatgcttgtaaactgtaatttgatcttggctagagattgggccacctgaagtttaatattaaaaaagcctgccaaaaaacaatttaatcttgaaggcactttacacttcctgacttctatatgatccccgcgacccgactaaggactcctatgttggttaaacctcatgcaaccaacaatcttgccaaaatttacgagtctcaccatcccctaccttaaaaacagctccccatagaaaagtgtttgactatgtgtagaccttgccagagccggagatggccaaacagctccccatagaaaagtgtttgactatgtgtagaccttgccagagccggagatggccaaacgggccgtccgacccgggcccgtgaagtccggtatgttttgggcccgctccatcaggcacggttagaaaaccgggtcgagccatttaaacctacgggctcgtttctctgtccgagttcggcccggtaagcacgaaaaaagcgggccggtaagcacgatttagtacaaaaagcggacttaacgggcttagaggtaaacaggccgtgccgggccagcctaccatgcttagtttcttgttcgaacctggcccgcttattcgtgtcgggccgccaggcatcggagggacgacctcggcgtcctggtggtca

SEQ ID NO: 7203 - DNA, 808 bp, Zea mays
  Intron number 2 from transcript AF466202.2_FGT008 (locus A F466202.2_FG008) derived from phytozome v7.0 (chr-ID 10; p os 138593539 to 138594346)
agaaaagaaagatactgctgtaggaatcttgagtaagtggttggtccattatgttggagcaatatgtaattttctaatgtatttcagtaatcaaaatatgcactgaaattagtgttacagcagctgatttcgaacttatccagttttttgtagttccattttataaaaaaccatatttcttcaatacacattcctctctgtgggctgtaacataatatgacagagacgccgtgacatttcttctcaaatgttaccattcaaatattgaaacctcagcatggttaaccggttaacccgtctatgactatcagtgtattacatttctgggtttgttaattgttatatatcatgtaaaaataagaccgcgttcgaaagccttccacctgagtcctgccttatagttttgtgtttgctgtacacatgtatggaatacttctttggttatgttctctactcagaagcagcttttattggaaacaagccgctatgttctgtaatctattcgaaatgcaaaagaaataatagaactgtgcatcatattatcagttattatgaaatacactggtcagcagctttctttcaaaatgcatatactctttcttttttctttttgctattagattgcctcttgttttgtggtatgtaaatactacctgggcatgagcgcatgggtcttatgtttaaacgattttacacatttttgatatataatgacttctttttcatgcatatgtacatatgtatgcataaatatttggagaattaaatctaacttgtctgccctctgctcttcttttgccttacagag

SEQ ID NO: 7204 - DNA, 826 bp, Zea mays; identical to SEQ ID NO: 6917
  Intron number 3 from transcript GRMZM2G163544_T04 (locus G RMZM2G163544) derived from phytozome v7.0 (chr-ID 5; pos 4 8446625 to 48447450 reverse strand)

SEQ ID NO: 7205 - DNA, 678 bp, Zea mays; identical to SEQ ID NO: 7047
  Intron number 1 from transcript GRMZM2G014366_T03 (locus G RMZM2G014366) derived from phytozome v7.0 (chr-ID 1; pos 6 365312 to 6365989)

SEQ ID NO: 7206 - DNA, 454 bp, Zea mays
  Intron number 1 from transcript AC234203.1_FGT008 (locus A C234203.1_FG008) derived from phytozome v7.0 (chr-ID 1; po s 188050712 to 188051165 reverse strand)
taatttcttgcagtgagtataagttccagtaggtcatgcttattagtttcatgtttgccactactggttggtagtgttaaagtactgagcacgcactactggttttgattgccactgatgcaacacgaaatgtaaggcagtgattgaaggatcatgaggatagttgcatatgttcttccttaagcttaatgatgatagcatgagcaagattactgatgcactactggctgtatttttccctctagtctagcttgtaaccttcagttcatgatggtaccaggatcaatgtatgtgttggtgactacattttttctctagcttataaccttcagttcatgctggctgcattttttttctctagcttgcaacatttttttctctagcatgtattcaacatttttgttctttcttgcatgcaggattaaaagttggttcaagtatttcgcaatattaa

SEQ ID NO: 7207 - DNA, 584 bp, Zea mays
  Intron number 5 from transcript GRMZM2G010093_T03 (locus G RMZM2G010093) derived from phytozome v7.0 (chr-ID 10; pos 7728930 to 7729513 reverse strand)
acaaaattgattgtgagccttctttcttaactttattcattcattcatttattcttgattacgctacataagtgaccgaatatcgagttatgggtttaatttgtgataatactaattcaagataagacgatgagtcagtgcttaatacatatcatgaaaacacttctggacatgataggcagctggggttgcaatgcatgttatggcctttcgaagactaaataatgaacattgtaaaaattgaaatatacatttcctgctgtggtacatgggttaaatggactgccacttactccattttgttgtgactagaaatagtttcttttgattttgtttctttctaaggctctgtagggagggataagctttgtagagagtatattagtgcgaggcctgcaacctgcatctttaccatgcacatacaaaatctttaggtcgggaagttttctatgatgaactatttagaacgagtatgtagttaaccaattcagtttatcctattttgggaaattatgctcgtgtcgtactaatcattcacttccatgatcttgtttcctattaacttgcagttgctttcaaattgt

SEQ ID NO: 7208 - DNA, 969 bp, Zea mays
  Intron number 2 from transcript GRMZM2G359333_T02 (locus G RMZM2G359333) derived from phytozome v7.0 (chr-ID 5; pos 6 4248891 to 64249859)
tgctgttgcggcttatcagagaggtgcgtgcttcgtaggcttccaattttgtcagataccgcacaagctttgttgagtgcttgcgcatttgtttatgttccatgtttgcaattggaagcatttcatcttggaatagtggcatcagcagtgggtagttatttgtagcctcccgtgtcctgattcggcgttgctgcttcgttactttcgattgttctgttggtagaacagcagtggtggattcattgggatggaggatggaatatgacctggaactagattgttggtattgggctatcggggattggtataaatccggacaggaatacaggatgtctcgttgcaaacttatcttgctacaatgtcattgccacaacttgttggaaaaaaatgtaaacatattggggttaaattttttaggaacccctctccatggtagccacagggatctgtactctggtgaaatgttccgagatattccccaacattggcaaaatcccatagctacttcttcctcctgttatgccaattttatgtgcttccttagcatcaattatcttacagctgttatggctgtcgtgacattctgttactacgctgctgcatgtatgattgtgaagttctaagagattactgcatctccttaagatgggcgttttctctctgttttttttggcaaaaatcaagtgttgccatcaagctaccatttatcacgagtgtacatagacagctagtgtaaacattttctaattgtgtgtggagccagcctattgcagcttctttttcattaagtgtgactttgaattttcacattgcgcaaaaatcacatgaatttagttgccattttaagaagacatgttacatttggtaagttattacgaagcacttcccagtttctagtgtatttgagacttctgatacatagtaaaatttgcaggttgggagttccagagaattggagaaggatttgct

SEQ ID NO: 7209 - DNA, 850 bp, Zea mays
  Intron number 2 from transcript GRMZM2G126679_T02 (locus G RMZM2G126679) derived from phytozome v7.0 (chr-ID 10; pos 122764003 to 122764852)
aggagcagagccatcacagaaattcttgtctccaggtatgttgaagtttcaacaacttggtttataaattaacatgattttaaaaaatcacagtgactcctcttgcagattttgtaaaatgttttttttctctagtgcactgcctatcatttgctgcaatttgaggatgataacattctagacacactaaaatctatcatctatcataaacagtagctatttccccctctgttctttgtgtctctgattgtgtggtaccagctactttggcatacatttgttttttgctttaatcttctgttcagcttctaattcagaaatctttacttcagataaccagaatacttcagcttccatagttccacttccacagttgtaacaatctagcctgtaatggcttgtaacagtacagtgagttgggacacctctgatgtttagagctccaatggtcctgtgggagggatatatttttgttttcatagtgtttagccatggggtgccagggtctacgttctaccttggtttggttctctccttttctcctatctgtcaacacatagtcgtctattacttataaaaaaccacattttcccattttgatccctttatgaacaatgctggaaatcaaattctattcattttggaaaataattacatatttattcgtcgtagctatattccattgttttattaggtgctcaaaaattgtgttgaccggacacatgctattttggcctatgtgctatccatttctatgttttatcggtagggttttccatgcttagataacttcctaatttctcattttttttgtaaataaataaatacttggagattcttggtcaaagga

SEQ ID NO: 7210 - DNA, 637 bp, Zea mays
  Intron number 2 from transcript GRMZM2G133684_T02 (locus G RMZM2G133684) derived from phytozome v7.0 (chr-ID 1; pos 2 61664919 to 261665555 reverse strand)
tgcttttcagcgctccagactcgcctgcggccaaggtgcatggtcaacatacattttaaatatcttttttttaagaaaaatgtattttaaaatttagctcagcagtgtttaatttatgacggtaacgtagcacgcaatgtttcttagtgttacacaacgttccctggtcaacttgagtgctacaaagaaaccctatgttcaaaacagtacgatgatatcattaaagtagccgacacaatgaggtggaaaagactccgtagttccagaaacaaaatatccagcaaaaaagcatggagctaatatttgtttcgtaaaaataggaacttagcaacaaggacttaatcatttgtcggtttgacgccgtaggcaatttttttttcctcatgaagaactcagctccaagccattattgtaaccataaattcaaatgttcacgagttatgtaatgttttcaaaacagtaaaataccattgctgcacgcctacagttactttcttccactgtgagatggttcaagatcgtagaaacctgcagctacttgcctacttgataccactgaatcaaaatctcttgaaatctatgtttcatctatgataatcaaatactaacgcacgtggtaaacttgcagaaatacaat

SEQ ID NO: 7211 - DNA, 720 bp, Zea mays
  Intron number 1 from transcript GRMZM2G364285_T01 (locus G RMZM2G364285) derived from phytozome v7.0 (chr-ID 10; pos 55451259 to 55451978)
aaattgtagttcatcattacattcaggtgggtttaattacatggacatttatcatcttaggaatgcctattgctacgatcattgaacctattttagtcaatgtttttaactgtagtagtgtagttgctacccaatttttgcagctgacatactatctgttatatcatgtgtctgcaaagcacactccgataaatgacatatatgctactgtgctttagttctacttgagttcaaaaaggtgctagaactttgcacaatcccactaattgttttaacaatacagctgagactggctgtgcttagggttggtttgtggttgttgtgttgtgctttgctttgcttgtcttgggtagagttcaggctgtaatgatcttgcattattgctatatttctaccattgactataccttttatattttctttgattaattataattcttaaaccattttttttcttatgtaagtaaacagaaatgaaaagattatttgacattgaatgataatgcatagttgtctgtctcaactctcaatacatcttcatttcttaatcaatgggattttctgcaaacaattatatttcatgacacattcttgacttagatggagtgtgattcatcttttattatgcactcagtggcttcagctgagacaccaggtctaatgtctttttccattattgcgtcagcaaggagaagcaagaaaagcattggaagtgcttcc

SEQ ID NO: 7212 - DNA, 365 bp, Zea mays
  Intron number 3 from transcript GRMZM2G364285_T01 (locus G RMZM2G364285) derived from phytozome v7.0 (chr-ID 10; pos 55452234 to 55452598)
caaagtatgataggcagaaagtttattctttcttccattgtaacattatatccatgggtcttcatattttaacggcttttctgcagaaggaaataaatcatgttagagaaccctataatctttttttgttatgaaacttttgttatattctcattttatttctgtagcttctttgtatggaaagaggctccattaaacttaaatcccaagctgtggttccaaaacattgaatcaaaccataaaaatgctttttacttcaatttggactttcttgagttccagagcaaactgcaatttaaagtggctaacatggttttctgcaacatgcatggcgtaatgaaattatgtttgtgactcttgcagga

SEQ ID NO: 7213 - DNA, 287 bp, Zea mays
  Intron number 4 from transcript GRMZM2G364285_T01 (locus G RMZM2G364285) derived from phytozome v7.0 (chr-ID 10; pos 55452695 to 55452981)
ccaagaaggtaaatccttttgctaaggtgcatcactttttgtcatgctgtatgctaacaactggatcttcctgtcattctttcagactataaacaaaacatgtgtattaatttaactttgtgtctgttggacacaatcatagtagcaagattacttctgttattcatgctatatttgtttttttttctttgagggaataaatacccatatccataaggttaagtggatatttgcatacaggacccattataatgttcatgtactctgatctacacatctgtaggagg

SEQ ID NO: 7214 - DNA, 974 bp, Zea mays
  Intron number 1 from transcript GRMZM2G075624_T02 (locus G RMZM2G075624) derived from phytozome v7.0 (chr-ID 5; pos 6 7823644 to 67824617 reverse strand)
ttggtttatcaagacctcctatctggtgcgtcctttctctgtttttgttttccttttttttgtttcgcctggttcccgattcccggatctggttaccgtcggtgttgttctagtcgtgtcgcgatcggtagagaagtcgatctcatcgtttgctgcggcctgggtggctagatctgcgatcgattcgctgagttactgtgcgcgcgtgtattgcaggcgacgagctcctgtcggattcattcacctacaaggagctcgagaacggcgtcctgtgggaggtcgagggaaaggtatgttcgctccatcatcggatggctagcttgtgttgtgatccgatattctgatatcatttgtttgatgcagtcagtatcatatgtgtttagacagtacctgtgtggttggtatgtgacctatggcgctgttaggttctttcctgcgctaggttttttagtctagatgtaatttgcttgatgtggcatgccatatagtttacccaaactattatgctatttttagtttattttagttgcctttacatcccaggacttattactgacctgcagctgcaccaaaacttaattttgatgtgtgccaacttctccacatttgtaactttcttgctgtggtatgccatgtagtcaatatgtagtttacccttcgttcagattgatgtatgctaccgttagtttggtctcattgtcttcacaggctagaacttctatgttggttcatgagtgtaacctggaggtgcatcaacatgatttcatgcgcacccctggcctgagtgtgtttttttttctgtatgcttggtgttgtaccaacatttattggtctcccttattaagttatgtagacatgattgtgcagcgataatactctgttttgcttaatccattacttggttagctgtttttgtgtgattgttacttacgtttgtgctggatgattgcagtgggtcacccaaggtcctgttg

SEQ ID NO: 7215 - DNA, 414 bp, Zea mays
  Intron number 1 from transcript AC199398.4_FGT004 (locus A C199398.4_FG004) derived from phytozome v7.0 (chr-ID 10; p os 103072604 to 103073017 reverse strand)
gaaggtacatggcatgcttgaacatcattaggctggaaatggtagactgagatcatggtatgaagaacactatgcctctggtaatactaaaaaaaatttaaattcggcatggaacagaaacagacttaccatcttctgtagttgttgtgttttcctcatcagttattccttgttacggctattctcttccaactaaaaaggaatcaaaccactcaaaaaatcaaactaagctggtattgcagatccatggcattgggtacaagaaaatcaagatgaaagcgcagatctagatatgagtaggcaggatccatacctaggggcgtggttgagtaggcaggatccacaggacaggcgttggcaacatgatggctgcttgcaggtgtagcgtcgtgggcatttgctagatacctcgtt

SEQ ID NO: 7216 - DNA, 946 bp, Zea mays
  Intron number 2 from transcript GRMZM2G349988_T01 (locus G RMZM2G349988) derived from phytozome v7.0 (chr-ID 10; pos 142410587 to 142411532 reverse strand)
cgacggtcaaaaagctgaccaggaatttggcgaaggtgcgtcctttactatctttctaggtccatctgttgtgcgaattctatcaattctgatctgaagttttggctttggcatgaattgttatgtgaaccctgcaacatttgattagaggtgtgtttcaagtgtacagttactggaattgttggggactttgaccagacactgttcttttagtgttgtttgcttgtgtatgtcagaaacgtgcttttcagtgaccatgattttgggcacttggtagagatgggacaaacacacatttgattgttgtgactttgtatgatacgtgtgtctagccttgtttgtagcgtagttgtcatcgcagtggagacaggagagtatgtcttttattttatgatttcttacttgctatgtatgatggaaaaaatacaatttgtgatttgttcttgatgatttggacaacacagtatatttttttagtttgaccagatggttcagctttggctgggtacaaaattgtgaccactgcaggcgtttttctatctttcagtcttagttaaggattttgtatggaaaatagataattttgctgcaaacattgaaactgtgacaaatttaattaatgatagtttagagaagcccgcccatattaaataattttgaacgcaatgttattagtaccagattgtcaagccaatgtcagttactttactttgcagtttcaggcacagtgttccagaaactataataatttgtctgtgactctggtcattgatgattcataaactagttatttgctatttcattgaatgatgtcacatgcatgagcctggcaaagaattctaaccagcatgaagtttgtcaaactctacttctgttcaatatgaactcccaaattgtaccagacattgtttgttctgtgcagttggaggcttttaagaaacaattg

SEQ ID NO: 7217 - DNA, 765 bp, Zea mays
  Intron number 1 from transcript GRMZM2G033538_T01 (locus G RMZM2G033538) derived from phytozome v7.0 (chr-ID 5; pos 1 45958558 to 145959322)
ctaatcactacggacttggtgttcgacggtggaaggtaataagacccggcctttcgctatatatatattacatacatatatgtgcatttccaatattcgaaaagaatattttatcatacttctctggaaaaacagcctcgcagggtcctcacttcaagtgatggggcagcatgagtcttcaggccagtggagcattatgggcggcactggacaatttaccatggcacgaggtgttatagacagggatggattcggatcggatacgcatggaaacggattcaaatgtcactatttaccatattttaatccgaatacggatacgaatacgaatattatcatatacgaatacaaaacggataatttgaattcggatttacattcggatacttacttgatttagaacatagcatcataaccagtattaatttgttttatcaatggatttatagttgataaaatcacattacaaacaaattattaacaatagcacatatacattatttagttgaatatcatatttttaaacaaattatttataccgggtatatttatattttagactctaattataatctttttgtatattaagtatatttgtattttggactctaaaactccaataatctaatgtattcaaaaatagacttttttaatattattaaaatttataattgtatatcactagtactataactataagattaacacagtcatttgtttatgatataaatatttttaacattttaaatggtgtatttcagtttt

SEQ ID NO: 7218 - DNA, 611 bp, Zea mays
  Intron number 4 from transcript GRMZM2G048205_T06 (locus G RMZM2G048205) derived from phytozome v7.0 (chr-ID 5; pos 3 9799573 to 39800183)
cttcaagcttgcacgcaccaacaatcgtggagacggtgagccctgattactcatttaagcttgagcctggaaggatgaggaaacagatattgtgctgtgttgttgctgccaccggctgtttgtgcaaactgttttttgtttgtattttgaaggttcatacaaatataaaataatttattgatctaggaaatcctgatcataggctataataagaggtgacatttccgggactgtgcttttgaaggggacaatggtaggaattcgacttcgccactgtgtccccttttcgaaacccaaagtgaattgatgttggggttgatggtctctttgtgttgaataccactgttgatgatgtctaaaatgattatcattgtattgtgacacctatttccctttccagtgtggataatggctttgccaaatgcctatggtgttgacatctgtggtgattgtcaattagtatgggatctatgttctcttcctgaatgttttgaaaatgcacatagacagatttgaatttgatgccatgtaatgcaccttggtgttttgtttccttaaagatgaatttctatgcaggtcttcttactgctgtacatagaaactacttcaac

SEQ ID NO: 7219 - DNA, 632 bp, Zea mays
  Intron number 1 from transcript GRMZM2G481305_T01 (locus G RMZM2G481305) derived from phytozome v7.0 (chr-ID 5; pos 1 0112318 to 10112949)
acacgtccgctttctccctgcttgaccgtgccctggtgagctcgggggccatccgatgagtatgtttacaccttcaatcattgattttattttgtgttaacatgtcaagcatgtaggaaaagctaaatctaaatcaacattcttcacacaaactgtctttatcgattcatggacaaaacaaacaacattgtatatagtaacaggtacacaacagtgggattcatctttgcagtagatatgttaataaatttgtgcggtgtctaatccccgtacccttttttaatgtcttggttagatttcgtgtcaggagggagtgtgtatgattaccgccataaaaattgtaatgctaccaggtttcctgaaatactaaagtggtgaccgacgccactaaaaagtatttggaatatattttgcaggatgtaaaggtttcataagtcggtgttgcacgtgtggaagaccaatctagagtgatgactgtacaaactgaaacttagatttggatggcacctgaggtgcaccgtcatgaatatgtatttcagaagaaaaaaatgcatattttgccttttcttatattccatgttattattgaaatttcaggtcatagaacataagccctacgatcgtagagcaga

SEQ ID NO: 7220 - DNA, 758 bp, Zea mays
  Intron number 1 from transcript GRMZM5G823157_T01 (locus G RMZM5G823157) derived from phytozome v7.0 (chr-ID 5; pos 1 99647339 to 199648096)
tcgccgcacgcgcacggtggcgggatcaagcgcaggtgcggcaccgcgatcgtcgctgccagatttaacaagttcttgatctatcgttgtcgttcatgaagcaataagctcttccttaatttcttctccgtggcgtgtttgaattttgcatggattttcttgcgctagagtcatagctcgagatttgcaattcagggaaggcactgctaatcgcttttttttttctgctccccacctgctcttttcgccattctgcatcttccaagaaagatattatatagtatgatgaagaaaagagagtaagacatagacagccaatatttttttgttctaacaaattaaaaatagcaagatcaaatgttctagaatctagatacacaagaaatggcagctagctgttggtgaaaatcttctgagtaaaaataaaaacaactagcatctactcggttgaaaaacaaatacactatctatagctactaaaatttcagctaagttaattagtattattgtgcccagaactaggtttatttcttgagctcaacttcctgccttgcaaccctagttttctgattttctgcaagatgcgtgctttgagatgatcattcacgcatataacaatgtggctgttctaaaatcaaattgagattaaccatctatgatgtgatctctggcactagctgcttgttgttgctttaatttaattaatttgtgtttgatatccaggaaaaaccaggcaaggaaggtggtctgcatcccag

SEQ ID NO: 7221 - DNA, 923 bp, Zea mays
  Intron number 4 from transcript GRMZM2G398809_T01 (locus G RMZM2G398809) derived from phytozome v7.0 (chr-ID 5; pos 1 87195011 to 187195933)
cttctatataagatacaggcaaggagaaaaaagaggtttggcccttaaacgatctgtcaaatattttgaacatttgatctcgctgtgtaccgttcaatgttcagttcaacagcttgataagtgaggttcaatatcgtgcctatgtctcctatgtttaatgtcatggcatgggcacaaccaagagtggtgagcaccagcggtgcactttaccaatttaggattaggactatagtttctttgttagttagttttttagctgtcgccattgtaagatcatttgaggcttggcttattggagtttctcttccagtttcctttactattctttaggaactatgtacatagaataagtaatataattgttggtgtcttcttctcatgattctgtttttacttggctacagctccaaaggttgtaggattaatatatcattttggtgtcaaataattggagttagtcatttatttgtttgtgtcagaaatctggagtcttttattgctctgaatgcccagcagctaaataagggtattgttctgaatttagtcacacctttttcattaataagaccaaaacatttcatttcataaatgtcaatgaggtttggagaagagaagaaacttgtttgttgctgttattggtcgacctaccagtaatatttcgcttgagggggtaggtgcaactctcttcagtttgtgaaaacgagtaatgaatttttaagtttgcctactataggatcttatttctgatgcactattcatttttcagcattctccgatatatcgaatcaatagggcttgtttgcttacaaattttagtgaatttggaaataaagacaaaactgaagccacattcatcatctctgtcgaccttgcttcctacctccataggctccaaccgcgcctcctcaagttacttcgcagca

SEQ ID NO: 7222 - DNA, 880 bp, Zea mays
  Intron number 2 from transcript GRMZM2G046909_T02 (locus G RMZM2G046909) derived from phytozome v7.0 (chr-ID 5; pos 2 00777633 to 200778512 reverse strand)
catttgaaggtaccaatcagtttcttacacttcatttgtcagctattttcctgtttttctagctataactctaccaggtttccatggtattagactgttaaaacaacattgaaaataagcattctagtgagtcaatattatttgcaagatgcttcctgcagatattctttgcaggctatttctagttcactatagcaataccatatctatttaaaagctgctgaaagggtatggatatgaactaaactaagtaccaactggtaggagaaaatatcctggtcatgggtctcttaagatgtaaggttcatcatgttctgctttttcgtataacttttgttatagcgtttttaaagtagaattcatcataggagtttacccatttgccagattgacaattttctctagtcttaaaattttcttcttctgatatatttaatgtgcaaaaataatgctcacagcaatttttaatgttgttagaggtatgcaaaagtcatcctttctacatatgaatttccacgatataagttagttgcaggctagaactagaaatgtggagtacgtgtagtctctcccagttatgcctttagcttggtaaggtttgatttttttacaatagccattgttccgatttgcctcagtcatctttatttggttgaatctatcttcttttgaaccgtgtgatacactgcaatcgtttattccgctgcaatgactgatcaccatgagctaaggtcttttaccccaaatgagggaactgtttaggatacattaaatgttgcatggagataatttctgctattttttctatttactgggaaaattgctatggtgtttttgtgctaacttcaatggtatttgccaaactcagaaatatcaagtg

SEQ ID NO: 7223 - DNA, 725 bp, Zea mays
  Intron number 1 from transcript GRMZM2G145909_T02 (locus G RMZM2G145909) derived from phytozome v7.0 (chr-ID 10; pos 50581875 to 50582599 reverse strand)
tctcacatctcagggtaaagtctcgtgtcctcgctctagctctgcaatcttttgaacttgttgtgcgtcttttgataatttgatggtatgtgatctagtttaatgtatatgcgatgtgaagtaattatagatatattagtccttggatctcctatttgtttctttatattttgttgagcatcataatgtttaatattctgaattcagggtttttatcttgagttattattaatacatcgctagtaccgtactgctgtaccactcgttagtgattgaaatgtctcttcttttacacgagtgtgacgatgtatctgtggtacattccatatggcattatattactctcaagttttaggttacccttccacttccatgtcacacaccttattctttctgcaaattaaaaagtccatgacttgaatttccatttaaatgcacagtacgttgtttactgaaatatatagctaacttgcctccttttctagttcatgattgtgatctgcccaaaaggatcgatcttctttacttaataagcttacttttgcgacattaacagcacgacaatctatctaaaggtgcttctttttaaccttacttgggacactgaagaatatgaatgacttgctgtgacaaacaatttcccatatataccctccatcgctgtcagtaacgtttgcctggtgattgcagggacggagcagcaactgcgagactgcaggggccat

SEQ ID NO: 7224 - DNA, 897 bp, Zea mays
  Intron number 1 from transcript GRMZM2G346391_T01 (locus G RMZM2G346391) derived from phytozome v7.0 (chr-ID 5; pos 2 16851221 to 216852117 reverse strand)
tccgcaaggtccgcgcctcccccttcctttctcgcccgcatcgcttgcacctagatcccgctgctcggtttcgcacgatctatagtgggcatgggctgcacgcctgcacgacacagtgtatgggtcgtcggcttttagcgtgctcggatcgagctgaattgctctcagatttggttacctgtgggttctaggcttgggatttgggtgatgttggcggttactgtcgtggatctcttgggatctagccagcattggtggtcaggtgggggtgccttggtgcagtggttctggagatttgcggggtggtgttttgattgcaatgttgtgatttgactacctcgattctcgagagctattggggtctttggttcgcgctgccatgtaattagttgaattagtgaaagatgtgcataagtttaccattttgtagaagctagattcattttttgagcttggtattgatcgatcatggccattttcaggtgagttttactgcactaataatgtgtgatttaggtggggcaagtgcgtggaccaacagagtgttttgtgttgcattttgtttgtagaagtattaacattgtttttctttgcataatcaaagagaatgaagtcccatagtgcacatacgacgctagaggttggcagtggttgcaacgccgaaagcagaagctgttggctaactggccattgaatactttgtagtacaaccattgatcaacctgttagtagagccttggcttaccaagttcatgtgttgtgatcctcttttccttagtttcaatataatgcagacatgctggttagatttgttctgctactgtcacccacatcttgtttgcaccatttgcatccgtcccagtgatccctatgctgttcgtgtatcttgtgtaggac

SEQ ID NO: 7225 - DNA, 637 bp, Zea mays
  Intron number 1 from transcript GRMZM2G126827_T01 (locus G RMZM2G126827) derived from phytozome v7.0 (chr-ID 5; pos 8 6783528 to 86784164)
ggccaggagcgccggttctgccagcagtgcagccggtgggtcgtcttctcgcttgctctcgcttgcctcctccacgcctcttctctcgcttgctctgtgcgattgcttccgtcttccttcctttgattgctttctgcaacgatggttcgcgcttttgcgctgcaattatcgcgtgatttgttgattggtttggacaagcagttgttttttacgtgttctctattagttttgtggctacatgctgtgtgtgtgtacggcgcgtgagctgcgtgcgcggttgtgccgtttttttgggtacggaactacatttttttcctgatctagcaatgaaagatgcttcctttccactattggtactgttgtacttgttgtggagaatcgtacgcatgggtgaaatgagaaatggctactatgcctgtttcccttttccagttttggtatggctctcgatatatgggtatgcttttgggatgagcgtttttttgtgggctactgacccgtgtctattttattccattaaaactatgtgaatattgcaggcatatatctcctgtattgcacttttacatggcatttaaccataaatagtgtctattttgtttttgctgattgcttgggttctggcaatccagattcc

SEQ ID NO: 7226 - DNA, 558 bp, Zea mays
  Intron number 1 from transcript GRMZM5G826588_T01 (locus G RMZM5G826588) derived from phytozome v7.0 (chr-ID 5; pos 1 46948413 to 146948970)
agggtcagtcgtcaataccagtgtgggattttctttgagctgcctgcctctagcactttggcactttgccatcctcccctccacgcgagaggccgcgtttcaccatagaggcggaagcagtggtcgatcgtcggtgcaaggctccctgccttcttcctccaacggtagatgtggatgcgagcgaaacccatgctgacgaccgattggatcagagggagcgatcatccgcctgctcctcattcagccaaaacagtttgacctcattcagaagacaaaaccaagttccgagacttgtacaaaaccttttgagccaaaacagtttgtccccctgatcctggttgagttctcattaaagaatgagaaagatgagtacataatggattttgattgtactgaaagttgtgaaaggggagaagaacagcctagacttaaaggtatttgtaaacctcaatacttcctggtgatcatgcatgtttgcttagagaaaaaaacagacttgaagagcatctgttataaccatttctgcccatataaattttgtagcggatagacaaccat

SEQ ID NO: 7227 - DNA, 991 bp, Zea mays
  Intron number 2 from transcript GRMZM2G079908_T01 (locus G RMZM2G079908) derived from phytozome v7.0 (chr-ID 10; pos 76403378 to 76404368)
tgaataccggttagtatgtaatcacgcagctaattttgttctcttcttttcagttccctttctaagtttggtgtgtggatgaagctcttggtttgcagaaacctaattcaatttaagtgtcatggctcaaaactattcctagcatggatagtgtttaataactttatgtgtcataatacgaattccctgaaaggttgacgatttgcttcctctgtataaattaaacagcagggcctgctagtttgcttttgaagtttaacgatttaatttagaaatctgaacagtggtgaatatgtattgtgaatccgtgataaaatataaaatagggggaaatcctaagaatataaaatgcgggcaaaatcctagtaagcaaacaagacggtattataaagaataagatgaacatatttactgtaatatctttttatttcttcccaagtttggacaacaaattttgaccatgattctagggcttgtttatgtagtacatagcaacagaagttcagcagtaatggaacagggatgtattagatgttgaccaacctcttggggttcaactaatactgaattgtagatttctatgctctgtcctgcaacatctatttactgatgaaatttgctgcaccgagatgcagttgaatggtaaattcaggttcatagggtttggctgagtaacttaacatagagttaaaaaaatgtaatgttcatatcattatatagttcaaaacactcaaatgtgttttttcttccatatgtcagttgtaaccaagtcatgattatgctctgtttgcgttgtactaaatgaacctctagtctgttcgaccagttgccattaactcatgggaccatgatagtgtctgttgaaaaacttatctgcgcatcttttctgtttacaatagtatatattttttaacacagctgtgcttacatgtttgttcgttaataaacttttgaagatcgtccgggcatattctaccaaaaggacagggcc

SEQ ID NO: 7228 - DNA, 637 bp, Zea mays
  Intron number 1 from transcript AC199175.2_FGT006 (locus A C199175.2_FG006) derived from phytozome v7.0 (chr-ID 1; po s 243158854 to 243159490 reverse strand)
caattgcaaggtacctgatagcaaggaactgggacgtaaagaaggctactaaaatgctgaagaaaaccttaaaatggcgttagaatataagctaaaatcattaccatttgcacaaacgttcaaagttgacagaggtgttagtcaaaaaaccactacacactaaaccagttgaatcactatggatatttgccactatggatgaaaggtgctcatgaaaaaaacatccacatggaagacatgtatcaaagaagggggcactacactttgttgcagtggaaatcatggaatgccatcgaaaaataaacaccacctcacgaagggagcactacactttagcagatatttgatatgattatatgacatcattatttagcaagaataacattacggttagcaaatgtatgaacttaaaatattttttctgtgtagtgtgtacccttaactgaagcatgcacctgatgaaacaatcaaaagatacctcaatcaaaagatacctgttgtttcttaccatctaatataacatactgaagcatagtatactgaatcagttcggtttagttagaataacattacagtttaatctaatataatacaatcaaaagaagtacttgaagaagcacaaggtgcgagattggct

SEQ ID NO: 7229 - DNA, 674 bp, Zea mays; identical to SEQ ID NO: 6877
  Intron number 1 from transcript GRMZM2G159860_T01 (locus G RMZM2G159860) derived from phytozome v7.0 (chr-ID 5; pos 1 49085857 to 149086530 reverse strand)

SEQ ID NO: 7230 - DNA, 913 bp, Zea mays
  Intron number 2 from transcript GRMZM2G084164_T03 (locus G RMZM2G084164) derived from phytozome v7.0 (chr-ID 5; pos 8 83314 to 884226)
ggctgtttcggcttatcagagaggtgtgtgcttcatatgcttccgattttgtcagataccgcacaagttttgttgagtgcttgcacatttgtttctgttccatgttttggaactggaagcatttcatccatggaatagtggaagcagcagcggtagtttcctaattcggcgttgctgccttgttacttttgattggtctgttggtagaacagaacagcagtggtggattcattgggatggagcatggaatatgatctggaactagattgttggtattggggcattgggctatcggggattggtataaatctggacaggaatacatatcggggttaaatttttaggaatccctctccatggcagccacagggatctgtactctggtgacatgctccgagatattccccaacattggcaaaatcccatagctacttcttccttctgttgtgccaattatatgtgcttccttagcatcaattatcttacacctgttaggctgttatggctgttgtgacgttctgttactgctctgctgcatgtttgattgtgaagttctaagagattactgcatccccttaagttgcacgttttcctcatctttttcttttttgaaaaaaaacaaatctagtgttgccatcacactattatttatcacgtgtacatggacacctagtgtaaatttttttttctaattatgtgtgcagccaacctatcactgcttctttttcattaagcgtgacttttaattttcacattgtgcaaaaatcatatgatttagtttatattttaagaagacatgtagcatctggtaagttattacgaatcacttcccagtttctattgtatttgagacttttgatacatggtaaaacttgcaggttggaagtttcggagaattggagaaggatttgct

SEQ ID NO: 7231 - DNA, 617 bp, Zea mays
  Intron number 1 from transcript GRMZM2G352788_T01 (locus G RMZM2G352788) derived from phytozome v7.0 (chr-ID 10; pos 60168642 to 60169258 reverse strand)
gagcccaagcggcgacggtgcagctatagccagcggtgggtgaccgtgaggcggctgcgggagcggtgcaagcccggtgggcacatgctttgtttttcttcttattttgatttgcgaaaggatccaagagagaaagggggagaaggcgagaatccaagacaggagcgagcatggagtttgctacgggtgccatgggtaccctcctccccaagctgggcatcctgctccaagaagaattccgcctgaggccatgttcgttttgtgccaatccatagggattgagggggattaaatcccctacaagtcaaaatcctctccaatcccttccaatccccctcaatccttatggttttgggatcaagcgaacatggcctgaagaataatgtgaaggaggggatcaagagcctcactgacgagcttgaaagcatgcaagctgcacttgtgaaggtgtccgacgtgccattagaccagcgtgacccaaacgtcaggatttaggctaatgaagtcaaggggttgtcctatgatattgaggacagactcgactccttcatggtgcgcatggagggtcttgattcaaccaagcgcaaaaccatcataggattcaactaacaaactcg

SEQ ID NO: 7232 - DNA, 742 bp, Zea mays
  Intron number 1 from transcript GRMZM2G070471_T01 (locus G RMZM2G070471) derived from phytozome v7.0 (chr-ID 5; pos 1 34238410 to 134239151)
ggatcggccagccccgtcgccgcaagataagcaaggtctgttgctgctgtaaaggcctcctcccttttcctccacgcttcccttccctgctccagttctcctcgtgcttcctcgtgccctctccgttctcaccggttttcgtggagatcaagcgcaggctccaggcttggggctagttaaggttgattcggtgggatttaaggctgctcgtagttcctggtttgactcttagggttgtttcatgacggatgctattgcgctcccctcgtgcctgctgtcttgcgctgctctcccctcttcacggttgcacaactcctgcgcatagattctgctacttcagtccaaatcaaaggcgtgtttttgggctcggcgctgtctgaatttgaggtttgtttgggctttgtactgattattagaggctccttttttcttatcaaatatgttatagctgaacagccatgggtcgctggctacagagccagttaggttctcacttcagctttcgttcaattgcgaatcactaatcatgttaatttgtctccacttgctgcatctaaaaatttccatgcatgtttatcatctgggggggttggggggggggggaatctgcacttggttgcctgttcttgtcccacaacacctgttaccaaaacattattttgcatgaccccaattatgtaatctgcatttgcgttttatgcctggttttgtttccctaattggtccccactgcattgcagct

SEQ ID NO: 7233 - DNA, 626 bp, Zea mays
  Intron number 3 from transcript GRMZM2G008287_T02 (locus G RMZM2G008287) derived from phytozome v7.0 (chr-ID 10; pos 148266070 to 148266695 reverse strand)
tctctgtgttctgtgctcgtgctggcgcaaagcgagtaagctatgccaatgtttcgcggcaacactgcttattttagaagcatattgttcttcttgtagcactttggtagttattgacttctggttccttttttttcctcgaaagcgtaggggagctacacatcatcatatatattaagaagaaacaggtctaaaatagaccaatcaaatgtctgtttaagttgaaggaacatagcaatcaacattccaatatccattgtacagcctacagtgtgctaggatccaaatgtagtttacacttagttttgcttgcaagttagcagcttgattcaattgtattgtatgttctaactgaaagcactaaaagttgtaaaatgtggcctatattttgtttgtgctattggaaaagtagaaacagtctaagtgcctgttctgtttctttttggcacatattagttctgtgtttctgtttgcactgatgatattggaaggaatctgggataactgaaaatatcggtaagagttgcgggatttgtatctagcaatgacctgttttcactaacctattagttctgcacattaccattgattttgctccctccctctttgtatgctctttcaggtgt

SEQ ID NO: 7234 - DNA, 390 bp, Zea mays
  Intron number 1 from transcript GRMZM2G571251_T01 (locus G RMZM2G571251) derived from phytozome v7.0 (chr-ID 5; pos 3 1643524 to 31643913)
cagccgtgcgggtgggtcgcgggatcggacgactggtgagatcggacgattgaaaaacataatgagaaaacagacgattgagattacataacggcagaacggcaggctacttttgctgtcttaataagtagtagagatttcaataactggtttaatgttttatatcacttatttcaataactggttattatattctccaaaaataataaattgaattcaacatcttagtcagtttggtgatatatatttggaagaatattttatcaaatatctgaaatctggtattcatatttgagtatttgacatgaaaaaatactgtcaattttactgagaaacagaattgttcactttatagaatttggcaatcgcttatctttgactcaatacctt

SEQ ID NO: 7235 - DNA, 806 bp, Zea mays
  Intron number 2 from transcript GRMZM2G571251_T01 (locus G RMZM2G571251) derived from phytozome v7.0 (chr-ID 5; pos 3 1643917 to 31644722)
acctcggaaaggtttgaacccgtcagggactaaagatgccaaaggtatattgtttgtcttctcattctactatgctataactatttctcctctactgttttttaccctacgaactgtgttgcccattttattctacactacatctacttaaactcaattgttcagtgtcatagctttgctggaagccacatgacatattacttacatgccttcttagagtcttttagttatttatgtaatctgtattataggaatcataattaatgttgttttataacaataaatttatattgttgttttttagtcagaaaaaatgtttttcatttggtcaattagctagcgacatgatattaagtgttgtagcgtggtcaagggttagctatgtctatgtgccatgtgttaaaagtattaggctacaaaaatccgaaaatgtcttgataaaagcaaaaaatagtaggaccattgaaaatttaaattagtatcgttgttacaagtttacccaactttgagtataagagagcacagttcagcccctcgtctatcacttgtatgtaaggtgaactgttttgtttttctacagcccgaccaatgtgcctctaagcatattcccaacaggttaaaaataaaattaaactacaaaacacccttttaaattcttatagatttgcgacatatcatgaatgcattagtcagtgtggtaccaggctttaacatattgaaaaatgtatacatattttcccccctagctcattttgtacacctgtttgtcaggttgaagaagggtcacgagcaaagagggcatttac

SEQ ID NO: 7236 - DNA, 808 bp, Zea mays; identical to SEQ ID NO: 6948
  Intron number 3 from transcript GRMZM2G142507_T01 (locus G RMZM2G142507) derived from phytozome v7.0 (chr-ID 1; pos 1 87381822 to 187382629)

SEQ ID NO: 7237 - DNA, 836 bp, Zea mays
  Intron number 1 from transcript AC199571.3_FGT004 (locus A C199571.3_FG004) derived from phytozome v7.0 (chr-ID 10; p os 93223136 to 93223971)
aaagccggtaagaccgacaattcgccgccgcatgcgtctgcgttttcctgtcgaggtggtttgcgtgcatttgaattagaaaaccagaaccccgagcagtgccaattgttgtgtaatctgaaagaattcctctcttaaaatgatcatcaaggaggagtgctcctacctagcacagatgctctacggtagggtcatcatggatgtggtcaccaagagcaggcatgcatcgcagattcacagtacacaactctaaggtattaaaatatgatgcatcaacgtcgtttaatttagcaagcaaaaaatgttctttcttccactcataacacagggaaatagggcatttgatttttgtgtgtatattaattacaaatgataaatcatgtaatgtgttggtatttgcccgaatgatgcctattcccttggcaccattaagccatttgggagatgctttgtgcatttatgaataagacaagaaaacatgattacttctggtgtttttaggaatgctagtaactaaaaagctaatgttatctaccgatttgtgattttcggacttgagtctaaatgtaattatgaagtttaacatagcaagactggagacgtcgtttgagagggtcgatgagaaacatagccaaataacctccaactaacctttgtggtgagtagtttgtttttgctatggataagcccgtaagccatttgctatcatgcgaaagctcctcaattaattatgttttatgcacatgatgttatctttattttgattgaagtcctatcaagtgctacctgttgaagaattggatgttgtcaactaatgcacattgtttcaggtacca

SEQ ID NO: 7238 - DNA, 610 bp, Zea mays
  Intron number 5 from transcript GRMZM2G150901_T01 (locus G RMZM2G150901) derived from phytozome v7.0 (chr-ID 10; pos 143257972 to 143258581)
tgccgtctgtaagtgcttcgatctattcttatgtgtttttgattgtttcatttatttcgccttcattggataatactatattatcctcttgatatttaaaaaggctattggatggcaacttgtaacatgcctttggttcaagttgataacttgctgcatatggcttaggcttactccgttatcatttgttctatatttgaggccatgcacgtactcagttactcctatgtgctttgcctttgcagttgagctattcaagccattcttacctgttagctgtctaatttacttgtctgttggattaaatgaataaattgaacttgtaaactgattcttcatgtcaacttacagcttatcagctttaatttaattctgatgcaagaaaaaaaatctttttactccgaactgaaaaacctagctcacatgtaaatgtattttttatgtttgaaagcttcttttaacaacttgccttttatgttctattactgtactttgtgcaagcatattttaatacacttaaatttggtcttgcttgttgcctctatcatggatgtctaacattaccatgcttctggattctggtactacttaaccttttgggtcatagatc

SEQ ID NO: 7239 - DNA, 502 bp, Zea mays
  Intron number 2 from transcript GRMZM2G089931_T01 (locus G RMZM2G089931) derived from phytozome v7.0 (chr-ID 5; pos 3 9294782 to 39295283)
gatatattaactattggacctgtcacaatcccattatcttgcaacactaaattatagtgagtttttgaagattaggaatttgggacctcatatcttgaatttctttggttctgatgaggttcatggtttacctatgtagatttaggagtgtatctagctgaaaagatgaatagatacccagaagagaactggaagagctttaccactaggaattttttgatcgttctgtagttttcatctttttcatctggtttgggccccttatcatcatatctattgttagtgtggttggtaaaaaatatggattaccattatattaagctttctatttattacatttagatgtttatttgcaatttagcttatatatgttgtttatctttctactctttgatcattccagattagcaacctcattgccttatgtcgattgctggtgaaatggaaaagagtagaatataattttaccatatgttatttttagcttaaagagctagagaaa

SEQ ID NO: 7240 - DNA, 340 bp, Zea mays
  Intron number 2 from transcript GRMZM2G581103_T01 (locus G RMZM2G581103) derived from phytozome v7.0 (chr-ID 5; pos 2 11745837 to 211746176 reverse strand)
tttgttggctgtttcccaagccgggctaggcctttttatggaggtaccaaattacatcctttcctttgcctctagaggagtgtttggtttgcatagaataagtcatgctagttacacttacacccaagcaagaaatagcgataaataactttgtcaatgccaggtgctcttttctttttcttgattcaactatatatcttctttggggattaaattctggcatgctcaactcaaatcctatagctcgctagcccatatccactctacagactagtgtgcattgtgctttgttttttttttttttgttgacagctttttgtgaacacgcagttgttctcag

SEQ ID NO: 7241 - DNA, 750 bp, Zea mays
  Intron number 2 from transcript GRMZM2G151589_T01 (locus G RMZM2G151589) derived from phytozome v7.0 (chr-ID 5; pos 3 9359856 to 39360605 reverse strand)
tacaccgtcaccttctgccccggcgccaccccaaggtccggcctttgattcactcacccacccttctcttctctcccaccattgcatattattggtcattctcatcattcacgttgcaatttgtggagagaggtgcgtgtgtgatggatcatgatttggcactgtgcttctgccaagattgtctgggtcttcggcttgtgaaggtggggttgatctgccgcagctcttttaccgtctctgccagtgccagctaatctatccacacagcctgctgtcgtccttttaactcctcttgtcaactgtcagaggttgctgactttactgcaagatttttttcagctattaattatttttttcagaggctactgttgttacaagatttacattgtcagagatttctggttcttctctgagaaattgaagtagacgcaatgcaagctagtgactgaacctgtgttgttgtgttcctagaatgaggaaagactaggaacatggggctacaacgtacaagatcttggcataataaattttttatatctttgatttacagcagaggggacgaaacgaaaagcgcatgggcgaaatgctttttttggggcgttattagtagtatttcccatttgcgtgcaaaatgattttgtccgtactactgagcacgtgaacttctgaccggatggatacgctgctcttgtatgtacccgtgacatgagcgcagccagaagtcgacgaccacaccgggcgcgacgccgg

SEQ ID NO: 7242 - DNA, 509 bp, Zea mays
  Intron number 2 from transcript GRMZM2G461496_T01 (locus G RMZM2G461496) derived from phytozome v7.0 (chr-ID 1; pos 2 6756718 to 26757226 reverse strand)
aaactacactaattgatccaaatcaggttcagttgacatgcttaacttggttttatgtattatgaattcttctgatttacaagaaccttagtttgatttacataaacctattcttttcatttttaattagatgctttggttctgtttctgttttccttctattccattttcattttttgggtatggaatcagagttccttagtgtacacatgagttttttgtttggtttgatgagaaattttttctttgtatcttgaaatgatcctttttctattcgtagaattccttgtcatgattgtggtgatgccatcacatattagcatgttagttcaaccaggagatagtaagctgtcaatgtcttccattggtggtgttacctgtattttgttgtggttcttgctcaagccattctaacaactataccgtgaatctatgtgctagattattagctaatctgttaaattgtttgatgtacaggtggcagtcctgttttctgagtggtgtcagat

SEQ ID NO: 7243 - DNA, 916 bp, Zea mays
  Intron number 3 from transcript GRMZM5G860835_T01 (locus G RMZM5G860835) derived from phytozome v7.0 (chr-ID 10; pos 118022422 to 118023337 reverse strand)
tccaggtaatttggaagctcgtcgtccggtgctggaatccctgtgcccgtacatctaaaacatatctccattcctctctctgtctgtctaggaccgggaaccggcagtgagaggatcaccgtccaccgtcgggcgtctgcaagggcacgagcggcggctaggcggtgcttatcagcggttacagcgacggcaaaagcatgttcagcatggtcagtgcactgcactgcacacccatcctatactcctactatggcgtgccctcccacttgatttcctctcagttgtttggccaggtggttggtgcgggatccatggagatttcctacctctggaaatgaaatacacatgggcagaatcaaacaacagtagatttttgatgaaatttaggattgtttacggagctaaatatgggtacatgcaggtggccttttttacagaggaaggaatgagtattaattaagttctaattagttgcgagttgtgttctgtcctatagatctggggagttttgctccatggtgggtgttcctaggccgcagacagctcaatactgaggttgaggcctcacacctttctgcaaaaatgcacataaggtgctccaccttgtcagaattttcgtgtgtttttggtttataattggtcatctaaaagtttatgattagttgttgcatcaatggattggctagaattttcaaagtacatgtgcttggtgtcttctcaaggtcataaggaagatatcatagttgatcttttcacagaagtgaaggatccacaaaagggatttgttcactgtggaatgatcaagcatgctaaacatcttagttgtctaacttagttcttcagataaacaatctgtcctttttttaaatgtcatatttttgcttcagggaactactcgtgtcattctataaggcaa

SEQ ID NO: 7244 - DNA, 1054 bp, Zea mays
  Intron number 1 from transcript GRMZM2G080524_T01 (locus G RMZM2G080524) derived from phytozome v7.0 (chr-ID 1; pos 1 6371009 to 16372062 reverse strand)
tgacgccggacttcctgctccgtgacttcatccaggtgcggtgcggtgcttgtgccttgtgctaagcggaatcctccctctttttgaccgtttcttttgcgccggaagtcaacgtcacctcggaatcctggacactagaattgctcgtgtttttttttattaaacaatagtcaaagtaacgtggaaggagtgcccaagtttagatgttctagacaaatgggtgcgatgcagcattacattctgcaggagtatatagcgacaaactaacaacacggtcggtaactctgcagtcgcagcagcttccttttcgttagattcagatcgacgggaaacccacagatggctgcagctgtttaggatgttgctgcaggttcaattttttcccccctgttggtacttgcctacttggtactgtggctgttacggaaagatgtgcaacagctacaagctacagcgttgcaaaaaccgcagccgatcagggcagcagcaacgtgtaacatgtaaaataactggctctctcgtactattcttcgggagtcaatctcttctgctacaggggtataataactgaccgaatatatagaacatactatcgacttttatatctttagataattaactttgttacaaaaaatatacttcataataaatctaaggatacctttcatggattacgaaatcaatatatctttatatatgtagttaaaatcttaaaactgacttctcgagaaaccatacgagtaattttattgtttttttttgttgtactgaggagtattgtagtacgcactttcgtttcgtcagcgcaactcgccagccgtcattaatgcccaaccactagcttgacccgacaggaatcgcgaatcgaccgtatatatggttggagtctgtccgttctcttctgcgactgggcctagatgttgcctgtccagtgtccactggtccagccagttcagcattcagcgaagaactcctagcactgaactttttttttcttccctttacctgtcatctgtcagaaactcttcacgcagaacagggagcggcttgtcca

SEQ ID NO: 7245 - DNA, 1016 bp, Zea mays
  Intron number 1 from transcript GRMZM2G170137_T05 (locus G RMZM2G170137) derived from phytozome v7.0 (chr-ID 1; pos 2 96773760 to 296774775 reverse strand)
cccgtgtcaggcgaactgctcccattggttctgtggcaagtcccttccactaccctgcctcctctcccttcttgcccccccgcgcctcgcccctcttccccctacggggattaatttgggtgtcctttcccttctcgatccgactgcgctgagggaaatcgagcaagcggccagccacgcagaactgtcagctaccgatttggggctggctgcctcctgttcttttctcctacctgtagatagaaaggaactttgttggtttgaggttgtcaaggattcgtgggtttgctaaattgccacgctctgcgaatcgggtgctcgaattggtcttgaaccctctttaccataggctctgcttaggaataaactgcacgagtcgatgcaaaatgaaggtgtagggtactcaaacaatggaagttttagaggcgcctacaggtgagtagactggataatggcacttggtagatagcgtcgagcggtcgatgacaagaatcgatgctaaagagaggccagatcttggaagggtggttggtggtcatgggatccaaccgaaaccgatgaactgctacccgagccaaacaactctcctgcccgacaccgacacagggtgtactgattcagggcaatgagaagcagaagttaagaagaccgctgcgccccctgcagatcagtatcacccatcactacctctattagaaataacaagccaacacaaaggcggggggttatcttttgtgttcaaagtttgtgccttctgtgttgcatcatgttcatgttcagtattatctacaagtagatgtgtggtcttgtgtgctagaaatgaccagatatacatatgaagaaatgattttgtttctccttttttttcccgaatttggtgaactacatatcatcttataaattgtgccatgcctacacaactctaccactgccttggcccttggagttctccctattactgaatgtggttatgcgatcatgttttccaggagagtgcatcatccgcgtttggaatt

SEQ ID NO: 7246 - DNA, 1070 bp, Zea mays
  Intron number 1 from transcript AC208110.2_FGT007 (locus A C208110.2_FG007) derived from phytozome v7.0 (chr-ID 10; p os 140742074 to 140743143 reverse strand)
agccgcgtcctggccggcaaggccgcctccccgaggtactgggacgacggcaacacgaacgcggtttcgccccgtggttcattctctttcggtttgctcgtctgtgctagtagaactactgtgtttttttttaggatgcgcgttcttgttaagttggtccaatccaagttcctgtggtagttgcagcagagcagagcgatttgcttgcttgcttcttagctctgtggatgactctgattctcaatgtgtgtgctgctgctggtggcaagattttgctcggcagaaaatctactggaatttgccaactgtaggaggaggagctactattatcttctctcccatggtctacgactacgactctacgtagagtcgtagacatggcaactgtctgctttgggaccatcaccagcttgtttaatccactttcctagttcttttcgggcgttttgcgagtaccacacacagtagattttgattttctgcccacttcaaactgtcaaatctgcaagactcgcatggtagccgcggagagagagagaggaagtgcacatcctcaaactggaggcacgcaggacgtgcacgtcctcaaagccaagccacgccggggcctgatgggtctggtactctggtgcgcggcagttgtcgtccatccaccctctgctctgccaactgccatggctcgatgacggtggggtcgggaccaggcgtggtacggtaagctatggagtgcgacggaacggaggtccacctggctggcctgtgggctgtgacctcgcaattatcctcggcccccacccacgtgtcctcttctgctgcaggttggcccaggcattattagcaatccgggtttcatgcgcccgcccatgtgcagccgtacccgtgcgcggaacctgatcctgacgtgtactcctagcaacgattttgttgggtcctatcgattcttgagaaaaaagaaggaacatcacttccagctcttgttgcgtttgctcaccgcccctcattgcattgcatcgcgtgtttcgttccgtaacgcaggagggccgtgcacgcctcgtcgtacgacaagaacc

SEQ ID NO: 7247 - DNA, 676 bp, Zea mays
  Intron number 2 from transcript AC191803.3_FGT006 (locus A C191803.3_FG006) derived from phytozome v7.0 (chr-ID 5; po s 181549941 to 181550616)
gcgtgattatcgcgcgaggaagaaggctgagacaggtatcccctatgaataatatattctattgttttttcctcgcccggacagtcctaactttattgttttggatcttcgatcgtaatgcaatctcctggaggggacaacacacatgtggcacgggctgagacgccatatgctacgagattcttgttgcagacaccatgttcaacaatttctcaggcatccggattgcaatacatggactcgactggtcccagtgatcctatggagtacacaatgggaacaatacgacaaactgcgcttactgatatatctaaccaaattatcacaggttcatgcataatcaaaccaagtagcataatgttttcattttattattttttattactgatgtcgaacctttttgcaaatatatgttcccacaaccaagtccgtccgatgaacatgagcgtcatcgggaggagaggaatagaaaacaacgagaataccgtgcaagaagaaaggctgaagaaaccaacgaagaaagggaggcgagaaataaaagaatgtgtgattaccgagcgatgaagaaggctgacacaggtacttcctgcccataattaacattgtcctattttttagttactaatactcattcttcctgttgtagtactatactcgcccagacagacgcaggctt

SEQ ID NO: 7248 - DNA, 631 bp, Zea mays
  Intron number 5 from transcript GRMZM2G300841_T02 (locus G RMZM2G300841) derived from phytozome v7.0 (chr-ID 5; pos 1 39832199 to 139832829 reverse strand)
ggagaagagtcaacaatccgtaggcgtaatctccagtaagttgatttccatgagttcatctttattttatgactatgtatgcgatatttaaggagtttcataatttagtcacttacatctgtatcccgtccatttgtgtcacttaaaatttgaagaaccagataagggctatttgcttgtggattctagttttctacattttaaactaagaatggcggaatacttcattcattccaacatgtaattcattttagttttgttttaagtcaaacttttgagcaagtttatagacaaatgatagaacatatacaatatagtttcacaaaaatcaccatgaaatatgtactgatagtacattctttctgaaattgtgatgcttggtcaaagttggagaagtttgacttaggataaactgaatgacttacatttctggaacggagggagagaaacaattaagatttgttgtgttaatgcatttcactactgaacaggtcatccttttagattcatgctcagatcagtgttcttgcatcacagtaatgaatgaatcgcccttctacattatgtagctcaagaaacatctagctctgttgtataatgtgatttttgatggtgtaggacaaaggttggg

SEQ ID NO: 7249 - DNA, 563 bp, Zea mays
  Intron number 6 from transcript GRMZM2G034276_T02 (locus G RMZM2G034276) derived from phytozome v7.0 (chr-ID 5; pos 2 4716798 to 24717360 reverse strand)
accttttagaagattgccttttggcatcagttaaggtaatgaatcatgtttccttttgatcttccttgtcttgtttttacctctataacttttcttgcctggcatcttttaaatctttataaaaaattatgaggctgtgcctgtatccttcagatggttgtgaattatcgtgatttttctatacaaaatttccagatatcagtgcttctatagttctattccatgtgtcaatttgtatattcacccaccgtaagaacattcactcctgctggttatccacaatagcaatgttaaccatttctgacggatgcatagtttttttaccaaattatgcttgagcagtgggtgagctttatgcaaaattaaaactttacaagttttaagcttagttgctacttctactttgcctagttattgtgaaagttttgatcagccagctttaccaaacaaacatcttttgcagcaggccagtccagtggcatattattgaggggctacttgtttgtattacatttgcaatgagatgtatctaacatctaaatttaattttgtggtaggttctt

SEQ ID NO: 7250 - DNA, 722 bp, Zea mays
  Intron number 2 from transcript GRMZM2G034276_T02 (locus G RMZM2G034276) derived from phytozome v7.0 (chr-ID 5; pos 2 4721264 to 24721985 reverse strand)
ctgcaggagctcttttatttgttttggcaagtgatgtgagtacctcttgatctctgtctaaatcacacatgctgttatgcatattaaatacctcttatctcaaatttgccttcacctagatgattacaaggtggataaaagctatcaatttcccttgtgttttctcttttagctgcaaccacttctttcacattacaatgccacttgttttcatattgcaaggctggcatgttctataaaagaatcaaataagaaacaccatgattgaatctcaatattttgaatgtaaaaactaactagaaatctgttggaaataaatctcaggcagtattgtcatttaaactttttcattagtttgacctaaatgactctctttaatattgtactagttaactaaccaatggttcttctctttcaccactttctttctttttacttaataaagtttttgacttttcattatctatgagatgcagctttgtccattgttacaacttaatggaggcattctaactgtaactttaatgatattttcatatttttatatagtgaacctatgtaactctaaccttacaggcatacaaaaggccaacctttagaaatttgattgatgacactagattctggaactcaggtagtagtacttcaatatgagttcagcttattgtttcctttgttattattcaggtccaagacaataattcgctggattcagaaacttg

SEQ ID NO: 7251 - DNA, 697 bp, Zea mays
  Intron number 7 from transcript GRMZM2G098900_T02 (locus G RMZM2G098900) derived from phytozome v7.0 (chr-ID 5; pos 5 7374252 to 57374948)
ctaaggtgctcgtttttaattttgggggtcaggtgggtcacttgtcatataggtggtttggtaagcttatggaatatgtttctattttctcatgtggtaatgttatgtggctattttaatgtgcttacagccctatttggcacagcttatttcacagtttctttaagcagaagttgtattatacagtaaacttctgcagtagcttatcagttcagctacttctcaaaatgaactaaaaacagacaatacacaaaagttgcttttcgccagcttcccagataaactgcttttccaacaagcaacagctaccaaatagggcctatcgtttcttctgcaccgatatctgctgattctgattctttcagtaatcacagccttttttgtaacgaagtggtgcttattacctattatttaaatcaaaagtgatgccttttcaattacttggaagtattatggttagctattacccagatactgcattttgtaatgaagtccctgcaatacttgaataattatcattatacctcctagtttttagcagaacacatcatcattaaattttgtatgtatcatgcttccttcaaaagcttagcgatccattcttctatcctgtatgctctaaactttttgtgaactacacaaaacttatcaccaacataataaaataatcagtgcgtcatggttcccagccagcagg

SEQ ID NO: 7252 - DNA, 586 bp, Zea mays
  Intron number 2 from transcript GRMZM2G463036_T01 (locus G RMZM2G463036) derived from phytozome v7.0 (chr-ID 5; pos 1 85628995 to 185629580)
cggctggtgaaggacgagaaaggtgagcaccttagccttgtcacagatatttttctttttcatcgattatttttctttttccatcaatcatcggtggctagtgacccgctgcaccctctttatttcttttctgaagctgaaaacatgcatatctgtgatgcataatatatatattaatttttgactaaacgatgacacttgcttagttgggagctattttacatgtggattcagtcatggcctttcacgttgtgtgtagctagcctcctgaattcacttctttagctaagatatttctgtagaacggccaccaaggctaggctggttcagtagtccatgattttcacattgtgtacaacctctgacctcagttctaaatctagtacaaagatttattgcagaacaccagtatgcccgggactctgttctgctaatgcgtttgtgccatgtggagtatttgcttactctattctagcttttgtaataaagtatattggatgatgtccctagcaagtttactatctaaagatgtggacagtgtattttctattgcgttttatctattcttttgatatgatatagcagt

SEQ ID NO: 7253 - DNA, 808 bp, Zea mays
  Intron number 1 from transcript GRMZM2G118714_T01 (locus G RMZM2G118714) derived from phytozome v7.0 (chr-ID 10; pos 12607279 to 12608086 reverse strand)
tggcctctgcgtgttgatttcttcgtttgtgcttggtaagaacgccctaaattgctgttttccctcccatttgggcctgttgaaccgttcctttgctctgaggccaacaatccgaatgtttgcctatgctttgacgctccgatccatctggtttcgttgtggattgttcgctgcgtggtgaggctattgcaaatgtaaagttttttcttagggtggttcagttgaacacctcgccaccataatacgtacaccgctgagagagagttcattgttgttgccataatattgtatcagaatgtcatgtgtgaagctgtacagtgtacactactggaatattagatgattggtgagcttgatgagccatatgagatgatcaaaccataattttgatagacaaaggtagcttcttgaatgctgtttgtaggatccgtggggctggggaagagcaggaagcttggtagtaggtgggttcttttttgtgctgcatggaattcaggattcaatggttttcatcaaggatttggatgtcactagcccgtcatattggcgacaaccaattcctggtattatggctggaataatcaaatatgggatttttgaaggtcgagaaaccatatattattattattattatcattttacattatgagccatgacagacttgggcggcctagtatttttttcactccatttttgtcatgtttgacttcattattgatttacttcacaccccaatgatttcactaccattatcttggtttgaactcaatttattttcctattgcaggctgcataaacttttaaaaaa

SEQ ID NO: 7254 - DNA, 761 bp, Zea mays
  Intron number 2 from transcript GRMZM2G085691_T02 (locus G RMZM2G085691) derived from phytozome v7.0 (chr-ID 1; pos 2 686306 to 2687066)
gacccgtggacctcccaaggtccgcatcgcatcaggtcaccaatgccgctaattcgctcttcgcgtttttgttgtttgtgcccattatggagacatctcttcaaattcacattaatgataaagtaaaattcagacgtatcacaagctgtagctcattaatgattgttccacggaatatagatagaaatggctaggtatccttttcaatttgtactagcaagacagttgaatgccacagagaatgtagcattgcacatcaagtttctattgtcgccatgtgctccctccgttccaaaaaaaatcgtatatgtcgtttttagctttgtcctaaatcaaactttgaccatgtttataaaaaaatacagtacaataccaagtcaacacactatagaaaaaatagtggcatttacaatatcaagtaaatgctgtggtgagagctgtctcactgaacagatcgcgaattcgaagcagcctctccacatttgtggggaaggcttgtctcgatttatccctccctggccccgctcatgtggtagcctccggcattgggtctgttctttctgttataatatcaagtaaatgaactatcaaaatacagtttatggcgtaggatagtctaaaacgccttacaatttggaatgagggagtattttcttcatgttcagttgggttttgatataggacaatcttatcctgtcttgaatgttcaatgacaccacctgaaacgccttactttgtgacattctctgcagttgtatccc

SEQ ID NO: 7255 - DNA, 798 bp, Zea mays
  Intron number 4 from transcript GRMZM2G015902_T01 (locus G RMZM2G015902) derived from phytozome v7.0 (chr-ID 1; pos 6 4601404 to 64602201 reverse strand)
acaactggcattgctgaagttcagctgcctattgagtgcgttcttcaatcattatatgctctaatttggagtaaagcttgctatgacttagttgaatgctattttagggttcaattggattggaatggtatcttaaaggtgaaaaccgtggaagttgtaccaaatatcatgatgataaatgtactagtgtaatcaagaagccagaattgatgtgcatacataaaaatttatgccgtctttgaattggatacagatcgtttaaatgcctcaacattttcttttctctgttgcactatttgtttttgtttgacaaaagtctggtccacacttaacagtgcttaataatttggcttgaaatacttacatattgcaactaataagtccttgagaatattgtgtgaaaaaggaagctagctaatgatctagtttatgcttaattggacttacattgattggtatacactatacacagaacatgatctccatatgtatccactcaccattaatttattgtgatgtaaactataaaacaaggatatgttcaaattaacctaggcagagcttatacaaagatatgccatgcatcaccacagttctatgagcatcatggacccaacaatgtaacctaggcagatcttcttctccatttttctatttttttatatgttgtagtttaaattttattctagtactagtctttcttttcaaaggcagatgcacaattacatgcaattccatgttatcattatttttatctccacaggtacaaattaagaaacatcgaagaaaccgaggcgg

SEQ ID NO: 7256 - DNA, 445 bp, Zea mays
  Intron number 2 from transcript GRMZM2G095239_T01 (locus G RMZM2G095239) derived from phytozome v7.0 (chr-ID 5; pos 1 7106175 to 17106619)
ttttgactggtcgggttgcataggccattgttgaggttagtaccatttaactagtacctgtatactacaatggatatgataggctgtatttgaattgaaatatgtggagtctctgagggctgaggcacagtatggcaaatgttttcttgtataatttgctttacccgtgaatggctatatattgtacacatgaaaagaatctttcgtttctgtttagtttttcttgcatatgttagattctttttgtcaaaatttcttacagtaatcatttttaaggatactcaatgcttggcatgggcaatgactaaatatagttcagcccttgtcatattccttgtagctatttattttacctgcatgtgcaaagttcttacaaatagaattcatgttagaaggtccacactcatgtttgcattatactgaccagaggtgatttggcctaaga

SEQ ID NO: 7257 - DNA, 942 bp, Zea mays
  Intron number 4 from transcript GRMZM2G095239_T01 (locus G RMZM2G095239) derived from phytozome v7.0 (chr-ID 5; pos 1 7107114 to 17108055)
gcaaagaacacatcaagttcgaagaaatctcacaggtatttatttatgtcaaattttaacacacaaatctgacatttaaccctttttctgtgtctgaaccttgacttgtgcattttgttgtgtttcaactctaacctatcccaacttacttgggagttgggactacaatgcgttgttgttgttgtaacctttttttttctcagttgccatttgtcaatagaactaaaaccgaatatatgagatgtgacttcgacactgctacacatgaggaagatgttagttttgaaggtcaagtaatgctcagagaaacaaggatattgatgaagatcttagacatagaatcaaagcaagatggatgaagtgttgtgaaacatctggcgttctatatgacaagagggtatcacagaagctaaaatgtaatttttataggatgacgattagaccgtgcaaaatgttggcctacaaaaagatgacatgttcagcaaataagtgttgcgaaaatgtgtatgttatgttgggtttgtggtcatacaagaagggattgagttcaaaacgataatatacatgatagactagaggtagcactaatttgaagaaaagcttgtctaacaccggttgagattttttgaacatatccaaagaagaccttcagagacaccagcgcgtagtgggtttttaagacgtgatagcaatgtgaagaggtatgggaaggtcgaaattgatatgggaaggggcagtaaaaggaggcttgaagggatggaatataaacaaagatttagccttgaaccttgacttatggtttctattgggttttaactctagcctaccccaacttgcttagggctaaaaggctttattgttatcattattcaatagaaacctagatacttttgatgttccgcgtcagtttaatagctttcctgcaggctagataatattata

SEQ ID NO: 7258 - DNA, 978 bp, Zea mays
  Intron number 1 from transcript GRMZM2G467640_T01 (locus G RMZM2G467640) derived from phytozome v7.0 (chr-ID 10; pos 110820059 to 110821036 reverse strand)
ccgccaagctcgacgagctcgtctacgccgcccaggtctcctctccgccgcgaacgcctctgttcattcctctcggttattgccgttcgttctgccgtgtggttacgcgttaaagtcggatcgtgtgtgctcgtcgaggagccgctgtcccgtcgcttgcttatgccgctgattttcatgggctgtgttggccgcagtgatttgttcctggggcacgatgattttttaggatcgaatgaccttcgcctatacattcttttctgagctataaatcctttttcgtgtttatttcttatatatagttttgcgctttttcttttagactgggaattctacttagtaatctgttcatacattatttggatatgatcagtgaaatgtgtggatttgatcgctttcatgtattattgtggccactagagatttggagtccagaagcacatagtattcattttgtggcctgtttcttcctggtcaaagtccacggtaggaagcttgggtcgcagaaagtagctatctagaactcgtctacagtcagcaattcaaagtcgtcatgagaggaactgatcatttgtttaacctagcattgcctgctgggcgttattatattcaataccagtggaaatacgttttctgaaattcaggggaattgagtcttttttttcagcatttccgtctcagatacaatgaacagttcctgtctttacttgactgcatcttaatggataaattatggtgaaagctgttcagacatgaatgtgatgttggatagtgattgaagtttattatatggtacaagtttgacaggactataagctgatccatgatttaaattttcagacaaattcacaagtcattcactttctcatgtgaactgtaataggaagaaaagatttggggccacaactgccctctagtggaaattaaaaaaatttaacccaccttttgcaacaaacatggaattgtactttgcaggaa

SEQ ID NO: 7259 - DNA, 623 bp, Zea mays
  Intron number 1 from transcript GRMZM2G073630_T01 (locus G RMZM2G073630) derived from phytozome v7.0 (chr-ID 5; pos 1 55810575 to 155811197)
agacgagatcggagccgctccccttacgcctctcggtactcgtcccctaccccctacccattttctctgtttttatctctaggtttctttttgtcagagcttggattcaattctttctgttttatgcttcgatgtcgatgtattagcccggctaggtcctgttgtacaaacatgaatcacttattgatgattacccttccatcttacagtagttttcggcggacatcaggtgggcttgcttgcttgcaaggcctcgcgaattttgtccaggatttttgaatgataatgtttcttttctcccatgaaatgttatcaaatatcaatgtgaatctgggacaaataaaacaaacagaacatgagcgtccaatctgatttcaaagaaaaagcatctgaaatcagatagtactaccaacatatcgatactaaatcacatggcctgaaaatgggcaagcctctcccaacactctttttcctgttggagagtatatggacatgtccactctactacttgtagttaattataattagttaacattataagctttttttttcctgctgttgcattttcctgttttaaaggtcaaccttttcattaggcgaaaaactcgttctccttctccact

SEQ ID NO: 7260 - DNA, 731 bp, Zea mays
  Intron number 3 from transcript GRMZM2G004356_T01 (locus G RMZM2G004356) derived from phytozome v7.0 (chr-ID 5; pos 4 220794 to 4221524 reverse strand)
ggcaggcgaccgacccccacagcatcgcggagagggtaacaaagcgatatctgaagtctgaacttttatcgtctggcttggccgcctgagtccttggtttcagaattgatgttgttgtgatgtgtgatctgtataagttataacctgcatatttagtaaggtttttaggtttcgattcagtgttttccgtggtttacaaatcggttgctgagtaatttacagttcatgtaggctgacatgctcgggcaaccatttgtcacgtctctctgtgattgtccgatcagcttcaaatggtcttcttatctcttgttttcaatgctatgcattttctttggttgcaagcaatcgataaccacaggttcaaagagggctgattgtgttaagctagattatgtgctgtagtttggcggtgctgggggcatgtggtatttttcgttaagtttcagctgccataccactgtattgtagtataagttggatggtgcatgttatatagcatatgcttttttcttaaggtatctgcttgctttgaacttcagtaacatgcttctgatagcagaagaattatgcctgctgcttgtgcttattgttatggttcttctcacttagtttagatctgtgctttttcacttttcatttccactcattacagtcctctatcttcttattcagcagttttttgaaccatgtttgatctactgcagctaagaagagagagaatagcagaaagg

SEQ ID NO: 7261 - DNA, 1001 bp, Zea mays
  Intron number 2 from transcript GRMZM2G382052_T01 (locus G RMZM2G382052) derived from phytozome v7.0 (chr-ID 5; pos 1 17689096 to 117690096)
tgcagtttggaccaaggcgaagtctactatcgctggtgtttgatgttcagttgctgaagatcatgtgattctgcatttctgcaaccatcgttatcatcatccttggtcaatgcaaacagtgcttcaagggaatcacagagttcattgtaaacttacttgttctccctttgaaatcaaggtctataaactaaattagtgaaataattaagcagcagcaatctggcttgtcaaaatatcgttaacttgactcagaacagttctctgaatatcgttaacttgactcagaacagtcctgtgaagcgaagaaatgggtcaaactttctgaatggttctgcactgaaacggacacgtgaattagaatttttagaatttctttatgaccatttgcaaatatgtgattcaaaaactacacgccatagcttatgttcatatcgacaattttccgataagaaccagaacataaattatgtcaatctatgtttcaaataaacaaatgcgtcgagatgtatcgatgtctggctctaataggatatgatcatcttaaaagttgggatcagtcgcaccaaaagtgcttcccaaaatcttattcgtcatctctttgtataagttcacaaagacgatggttacggagacatgctcttcaaatcatcagtgcatgtatacgctcgtgatagagagactatgacgaaagtgtagcagcaagaagagagaaaaattaattgtgagacatcgatacaattaattgtgactttaattctcttattgctgctacactttcgtcatagtctctctattgcgagtgtatacgtgcactgatgatttgaagagcatgtctccgtaaccatcgtctttgtgaacttatacaaagagatgacgaataagattttgggaagcacttttggtgcgactgatcccaacttttaagatgatcatatcctattaaagccagacatcgatacatctctaacatttgtttattataaatatagttcgacatattt

SEQ ID NO: 7262 - DNA, 927 bp, Zea mays
  Intron number 1 from transcript GRMZM2G504046_T01 (locus G RMZM2G504046) derived from phytozome v7.0 (chr-ID 10; pos 26898772 to 26899698 reverse strand)
caggtaccgctttaatattgaaaagtatatacaattttgctacattagccattaaatagtgaacctgctgaaattggatagctttttagcagcagttttgtatttaatccatatgtttggttgccgtagaagtcaagccaggccagtacaaacctagccggtattagtggaaccaggatgagttcattcatacgcttttgtttggttgcttgtacgtactcgtctaaacacagactttgtttggttgattgtactgaaacatgtgttacaaaaaattgtataaataaactttggctgaaaagctgccaggcaaggtccaagagatcagaggaaccgaagctgtctctgtatcattttagtactaaattataagtcgctttgacttttttttttggtattggactgagggggtactgaagaaaaataagtacatccattctgtattataagtcgttcagttttttttagaataaaaactatgtattcaggtatagtgtgtatctaaatgcatagcaatatactacaaaagctagaatgacttatagtttagaacgagtactactactttaggccttgttcggttgcacagggatcgaaggggattaaattcccttctatataaatttgactaggttcctaaccgaacatgctcttagatggctttagaggttgactagttttttttaatattctttagaaagcagacttgattttttctttactccattttgcagtaaagcgcttattattagcctgatgtgtctaaaattaaatttcacttagttatgactaatagctgcaagaatctgtttgtctgattgtgagcggcattgatgagatattggtttcttgacaactgacatgatgcgtgttttgttcatccctttgacaggcttcttctggagattacatactgtggaacacctt

SEQ ID NO: 7263 - DNA, 796 bp, Zea mays
  Intron number 3 from transcript GRMZM2G109039_T02 (locus G RMZM2G109039) derived from phytozome v7.0 (chr-ID 5; pos 2 03820456 to 203821251 reverse strand)
ctagatcggttaaatcaactattctacattttcaggtgagttaacttcctttgtgtattcttaatcctttgatagattatgatacatggtaattatgagtttagttattttgttgatagagcacactaattttctggacattccctcacaggagtatgctataaatttcataaactaattttgtacttatagtcactttgtctcttggagttattattatttttttgtaataaatccgctgagcaatttcttcatgaatatcagcatatgacaatacattacaagattatctcaattgtgacttagctgctggtctatttcactcaacttgatatttgtgattgcgaactaactattgattctgagaggaagctgcatgtacattggaacaacaacacactggtgttggtttcttcgatgtatactgagttatgcaaaaaatactcaagctttgcatgcaagccatgcatagtgacggaagcacatggtatacctgttaaatgtgtggagggttgtggtaccttcagtattaattcaactccatctttttggagatattatactgacataatagttcattatattcagggaccagggctatcttcatggtccaattacacagttctgcctatgtttgcttttcaaaagtaaacttagatttccgtgcattttaactaacctattgagatggtcttgaacttttgttcaatgttgccctctcttttatatggttttggtataatactgtaatatgaaacaaagaatctgatttgtgcctgcagcttagaaatttggt

SEQ ID NO: 7264 - DNA, 861 bp, Zea mays
  Intron number 1 from transcript GRMZM5G872147_T01 (locus G RMZM5G872147) derived from phytozome v7.0 (chr-ID 5; pos 7 1848978 to 71849838 reverse strand)
tcgccaggtcttcgacggtaacgagcaccaaccgggtatgcgcaccccttctcctcccttcatgctgcgcgaaaccgagcgcccgaaccctaacttggatctgatccagttgcaagcgcgggccccatgtattatgcctaatatcttccatttttctgcaaaatattactgggtttacacgtgcatgccctttgctggggtccgcccctgtctgaaccctaacctaagctgtttggatctgatttagttacgagtgtatacgtgtattggcacctattcggatctccgaactcttttcgccaaaaaattactggttgaacatgtgtacaccatgggtccgccaccctatctttcagtgttcattggtttctgtgtttccttctcacttgtgttgctactgtgggtactgggtatagaaggtttcgctcagtttcctttgcttccatttgaaatggtctgtttcttaaacccccgcagaatgtgtgaaaattttgagttgtaattggttcgtgcgctcaaaacaaactgcaaatgttagtgtctgtttgttcagagaggtatatactgtgtactagcgttgaccagtctgctagttgaatggtctatcctgttggacaccttattagtgtttagacaggcagcatatcttgtatcctataaaggaagcgaaattgtgctgaactgctgatcattagtaaaaatggaagcgatgtgtttatttatgttctttattttggattttgagggtggaggggagggtgtgtgtgaacgcaagcatgtgatgttatctattcttttggtggaattcctgaactgacgtttttttattactgctgtccagattcagggaatataagtaaa

SEQ ID NO: 7265 - DNA, 586 bp, Zea mays
  Intron number 1 from transcript GRMZM2G466265_T01 (locus G RMZM2G466265) derived from phytozome v7.0 (chr-ID 5; pos 7 0756535 to 70757120)
actccgactcgtcgcaggcgccgtgcaacgcctcggtgggcttcaagaacttcatcagcctctgcctacagaagaacccagtgaaccgttcgtccgcgatgcggctgctgcagcacccgttcatggcccagccgcagccgcaacccctggccgccccgccgtcatgatggctcgccgtaccctacaaatctacaattcatgcccgatttgattgattgattgcttcccgtcatgatacagctgaagacggcggacagattgatctttggggtggatggatggttggttgcatgattgattagctctgcacttgcgcttttcaatataatgtgggaagtactgaattgcatagaacaattgctccaaaaaactatatttttatggtttataataaagtatcaggacttacctttctttgccattgggaaccttgtgcttccctgggcaagtgctcgcattggtacttaagattctatctatgcatcactttcagcttgaataccttaacaatggtacttctctgagatcattaaatcagtttatgtacttttacatagtaataagccatctgctcaagtgagaatag

SEQ ID NO: 7266 - DNA, 630 bp, Zea mays
  Intron number 1 from transcript GRMZM2G142083_T01 (locus G RMZM2G142083) derived from phytozome v7.0 (chr-ID 5; pos 1 61308119 to 161308748)
aaagacatatatctgccaaaggattactacactcggtaaggcaccttgacttaattattgtgagtgggtgtttgcccatggacacctatgtgcaaattggtgatctttcctgaactttatagtacactaaagcatatttgctccagaacaggattatgattgttgttgtttgtttttaacatattataagcatgtcctttacagatttttaattattattttctgtatcgtatggtttacactgggttgctttacgcaccccctgagattaacagtgaaagtaacttttttgaagacgcaagtcttaagagtattattgaagaaaaggaagaaatagaggtttaaagagatatgcaagttatgaagagtttcaagtgtatctctaaacactaatgattgcaaggtcagcagcttagtgcctgctttacctttgagattgatttgtgtatcgactgaaattgatttgtttgtatcaccattcttgaaaggaagagtttgcaacatcttgatttgattgtctctgcaggggtcttctccttaatggttctgaagcattgttgcttttagtgaaatactaatttgctttctgttttagggaacttagaggatttgggttaatccaatactttg

SEQ ID NO: 7267 - DNA, 982 bp, Zea mays
  Intron number 1 from transcript GRMZM2G089976_T01 (locus G RMZM2G089976) derived from phytozome v7.0 (chr-ID 1; pos 5 386972 to 5387953)
aaacaagtacgtgatctgaccagtagctatcgtcctcgcgcatgtttttttgttggttgaaaaaactgagtgttctgtgacctggaaaatctgatacgtgtattaaggtagtcatgtttgccagtttcaaccgtcaatagttctttagcacttgcagttgtttgaatgaattttcgagactaaaaaggtgttaatgctaattagatagaaaccgtagcattttagtcacgcgatgaggcttaatgtgaatcaaaataatggagaggcgtgaattgtgcggtagctggtgtctcttgcgagtgaactttgttctaatgcttggaattgctgggccaacaacaaacatgaacgaacgaacgaactgtggtttatgcaaattgcttgcttctcctagttttgctaaaagcccgtttgtttccaccggactaaattttagttggatatttagatgctagttagaagtattaaatatagtctaattaccagggggcgtagcgtcccgcactgtgcggggtatggggaagtgtatctttaagcgccaagccttacccgcataatatgcataggctggagatcaaacccggaccttccgcttacagacggtaggttttaccgctgcaccagactcgccctttgaatatagtctaattacaaaactaattaaatagacgaggactaaatgataagacgagtctattaagtctaattagtccatgattcactcatgtgatgctaccgtaaatatttgctaatcatgagtaaatttgtcttgtttagtcttcagttgtgtaattagttttataattagactatatttaatacttgtaatagtcattcaaacattcaatgtggcccgaactaaactttagtctctagaaccaaacggtgactaactctatgtgtaattattttcggtatacttaatcatttacaatgatcaatacacttactcatcctatatcatggtaaatacattttaggg

SEQ ID NO: 7268 - DNA, 741 bp, Zea mays
  Intron number 4 from transcript GRMZM2G030744_T03 (locus G RMZM2G030744) derived from phytozome v7.0 (chr-ID 5; pos 2 14429926 to 214430666 reverse strand)
ttgagtacctgaagcatcttcagctccaggtgcaggtgaccaaactgacgccgcactgctcgtttgctactagtactgctattaattacctacagtttgggatatgctggactgcctacatatagctgcgtaggctaaatggttaacaattgacatggccatattcgaatgtcaaatggctaacaggtggtaagacccttgcaaaattcccaaacagcatagagcttgggaagcttggactctgtcaagatccgaagaagaacggcggagcactcatttacatgtttaatatgtagctgtctttttctattttgattttagcgagcaggcgtttacatgagattagttgagttggcaccaaaatgaaaaatgatggcgcctttgaaagaaaaaccgtttgcatctgtttgtggtcagcaactagagtcagtaatcaggaggtaatatttaagtctaaaaaggtatcatcaggaggtataagtttctacgagatgctttaaagttctatacccgatgttgtagtatgtacaccatggaattggtggctgggattaatcacaatgctccgatcctatcgtaaaagagaaatggagaacacaacattttgccatcattgttttctgtattgttctataatctatactactagctctgaagtgctttagccattccagtcatgattcatgtattcctcatttctgcagcccaatatcagcttgttttccttctttttttttacag

SEQ ID NO: 7269 - DNA, 833 bp, Zea mays
  Intron number 1 from transcript GRMZM2G140561_T01 (locus G RMZM2G140561) derived from phytozome v7.0 (chr-ID 5; pos 1 38807899 to 138808731 reverse strand)
agcaagtgccaggtgctcctgtttagagtacggtgagttgagttcattcataatttcatatagcactgcttagataaattgtttttttcttgttcttcttctctcggtgtgtttcaattactaccgtcgttattgttactctatttcgaaactgtacgcatcttcacatcatgcatgttgcgcttctgcccatcatccatctaataattgtatggaggctagagcacaacaaggaagattcatcaattgtagtacttgtattatatgtcaatgaagcatcaaaacacaagacaaaaagccactaggccacacatgtgtggcgctgtacggccacgagaggtcgcgtcgctgtcgagcagccgcccgggtcccgtcccgtgatcgaccgacgacgatccctgctctccctagcaagagagacaatccgtggcaccaccggccaccgcagcgcacgaggtgacacagtggatcgcgcagatccggggacggggggtgctgcacggtggaatgtcggagacggtgcggtgccgctgctgcatgtcgctcgtagtgtcactagctagctagctagcgcggatccatccatgatggaacttgctggcctggccccattcggtgtgccaagttttcgcatgttcagctgctagttgggccgtcaggggtagctgatagtacaatttagcttgtgtggccactaaccatggccatcaactatgcgttggtaaacagttagtatcatctttaagcatgatttacaacagcccacagctctttgaacaggttgattcgtcgtttcaggtttagcctcaactgaaggagcactggataaggct

SEQ ID NO: 7270 - DNA, 684 bp, Zea mays
  Intron number 5 from transcript GRMZM2G451716_T02 (locus G RMZM2G451716) derived from phytozome v7.0 (chr-ID 10; pos 111431699 to 111432382)
tgatcaatcctgacaatattgttccattttataaggtgagattctaaaacatacttaaaaaaacagacgaacctatgaggagctaggtagcattttattaagaaattaaactccccaaatttgtcttgacaaggacttgaaccaacggacctagttcagcttccttgattctacaacatacttatagtgttgattatgttgaatctattaatctctctttttatttgtacattctctttgattttctatgtgaacacaagaaaaaaacattattggtgacttaggttgccaagttctcaaagttgtttatttagaatttttttgttgcatattactagccattttctataaatgtttaatggttctccctgtgtttttcaatcataaaaaatataaggcacggtttgggtcagtgcggtctccaatgctatcctttgaccattgatatcgcttatgccacatagttatgaccacaagctcatcacctaatgaaagtgcattgaaatatgaatccagtggtactaaagttgtatccaagtatccaacaagcgacaaactcatattgctaagattagccaaagattatgaaggctaaatcttcgaatgcatgcacgcttcataaatagaaatggaaggagtataaaaatgaagaactttaacacatctgtctcttgcagacatttc

SEQ ID NO: 7271 - DNA, 952 bp, Zea mays
  Intron number 1 from transcript GRMZM2G120579_T01 (locus G RMZM2G120579) derived from phytozome v7.0 (chr-ID 5; pos 3 4611884 to 34612835 reverse strand)
cctcttgcaccagcggcgcccgccaacttgaagtgaggggattggccaagattcagttttttttaaccatcctcttttcgctgcactaaacaccgagcctttgtttagcatttttttcttttctgccaaaggttgcagttgacttgcagagaatatacgtttgttcgattgggactgtacaatttagcttcattcttgaatttgttagtacatgatgctctttggttcacatcatgatggcatggcttgtttctttgattctatttgaggggaagaatatactacacaatgattgcagaccggcttttgcttggcatcatatatggatgttatatttcacagtatgagtgaggcttggaagccgcttccaaaaaattccttacactcatcatccttccaagcttgttcgagttcttaatttctagttaattgcagtcaaaatattttagattggtcttagaacaaaacagtctagccctatgtccttgaactccaaccgtatgatatttttatgttaagaatctgacaatatattatcttgtttgtctctgacgtcatggatttgacagtttctatggtcttatgtactaatttaaacattctatagtttgctgagtccatttgccgcagcaagtcggtatgaaccaaaagttggggtttcatattttagtctctgagtctatcgtaaataaaagctgaagtaagagtatacttatctgtaatatttcaaaaatagtgcatgaatttttcttaggaggctcctagtttagttgtttcgtagtgcaatgatgttaatactgacctattgttatttgttattctgtgtcttatagtgtcatggtatctcaatattgaactccactatgttgccttttttcagtttggagtgtttgtaactgatcttttcctatctccagattgttctctccagctgtgagggttccaagggcta

SEQ ID NO: 7272 - DNA, 552 bp, Zea mays
  Intron number 1 from transcript GRMZM2G020433_T01 (locus G RMZM2G020433) derived from phytozome v7.0 (chr-ID 10; pos 121339138 to 121339689)
aattgacatccagggtgagtggatgtgctcgtatactgtgttccattagtctgcatttgatttgaacatcctagaaacatgatatgagttattttaaatatcattcaaaagatgtcctaactatatggtgcagagatgttgcgcacacttcatatatttatcttcagcattagtgcaaattgttgcattggttttttatgccctttgacagtgaagattgcaactgtatctttaaggtacagataaattatgaaagatataatgataaattatgcaagatatatctgatcaatacagaattacttatgaagatgcaaaaaagctgcaatagatgcatctggtaggatgttttcttaattgtagtttctgcacatgttttcttaattgtagtttctacatgaaaattagtaaaacaactataaagaagattttttttgatgtttggtcaatgataatatatatgttgttagactttttttgtgatattcatactatagtgtattttgatttgtaccagtttagtgcaatatttgttgttggtaaaaaaaattt

SEQ ID NO: 7273 - DNA, 375 bp, Zea mays
  Intron number 1 from transcript GRMZM2G023422_T01 (locus G RMZM2G023422) derived from phytozome v7.0 (chr-ID 10; pos 71265671 to 71266045)
ttgctcctttctttgaagattcatcgatcaagaaggtgcaataattttcctatgacctatgtcgaacaatttaatgtctatttttctctttctatgttagttgaggtcgtactctacactgtttttcctcacttttctatttactgttacaaacttgaaacaaattggatgtacttcactattttatccttgtcggtttcatgagatcatcaacatgacaaaattgcaagctttgggttagcaaaaccatacctggttaataacaaatgcatcacatgtgaactacttttagctttgttttttttgaattttctgaagtcaacatccatgttctcttcatcatgtaggtttggcataactatagttttgatagcc

SEQ ID NO: 7274 - DNA, 397 bp, Zea mays
  Intron number 1 from transcript GRMZM2G080000_T01 (locus G RMZM2G080000) derived from phytozome v7.0 (chr-ID 10; pos 62476482 to 62476878)
ttattggaacctggtttgggaaaaagagtattgaggtaaaagtgttatccagaaattcaattttgttgtgatttttttgtgtttccggttgatgcttgtaccaatctctgactttctagaccatagttgcctaattttagttgtcatctttgaagtttgtaaataagatctgaaagatttgaagtaccagataacaccgatttcatgttcttggtgtgtgaactaaaaccaaaaggttacctatgctgtttgtgcatattaatgagattctggataaccttatgcttgttgattatgtagtctttagttatcttgttaaatcaacttgaacaataaaggctttttttccaattcttatccaggaggataggctaatagcagtttcacttgcaagcaa

SEQ ID NO: 7275 - DNA, 982 bp, Zea mays
  Intron number 3 from transcript GRMZM2G023884_T01 (locus G RMZM2G023884) derived from phytozome v7.0 (chr-ID 1; pos 5 4269585 to 54270566)
catctctcttcactctcgcaatcaatcacaaacaggtttgcctcatgtctagaaaattgtgttcattcggtcattcataaactttgttaccatacatgcacaatcaatcatcctggagaattctatgtttttataaggccacgtgtttccaattacacaatgttgtgaaatagtagttcctatggtggatacttccttacttagatcaggaggttgtcactgttaatacaaagcagaccatatgatccaactgaaaaccgtgtcaacaaccagccaaattgttaattttattctttaccttttatgtttgagtcctagtaaacagtgattgacaatagactgttaagatgtgatgctggcctgtggactacctagtacctactatttttttatacattttatcctgaaataatagttaatacaatatgctatcgtaaggcatgcatatgtattggtgcagtattagttctcaaatgttgattcatacatcgtacttactggattttcagctcactcaaattggcaatagcaattgagttgggaagtgggcatcattacatcctgccaattgttttgatgaaatcatgggaaagctacaatgagacacacgcacagttgcacacatacccaatctatacatgaactttagtttattataatgtttacgacccttccaagtgactaatctaggacactttatgcccattaatacaaagagtttgttggatatggtttcgagttctaatatccaatgaccacagtcagtcagtcacaaagtttatgggaagacatggttgagatacgtggtcgccgaacatggcaggctacttgtgagagatttttacacttcaagttcaaaatgaacccgcgaacctggttaggatcaactaacctgggtcgagggtcgatgccttcgaacccattttatgtgactatgcccatgacctccctatagatcttacaactttatgatgtactgcag

SEQ ID NO: 7276 - DNA, 813 bp, Zea mays
  Intron number 1 from transcript GRMZM2G118786_T01 (locus G RMZM2G118786) derived from phytozome v7.0 (chr-ID 5; pos 1 46928982 to 146929794 reverse strand)
cccacgggccaccgccgttgtccagccgagcaaccgtgagccaagcagagcaggggtttgtgatttgaagtttgatctgaagttttgacttgaatttgattatttatttgatagtaatctcatatttaattataggaataaggtggacatgatgtttaattatattgcttgatgttttcgatgtgattggtttaaatttttttgttatagtcttagtagcccccctcttggatcaatcctggatccgccactgattactgctacgaatatatgtacacagtaatataatctctaagctcctcatgttgctacatttgtaaacttcaatatttcattactgctacaaatctatgtacggttccagttgactatggtagcttccttgctttctgttcttgtcttaccagtctgagctaaagttttatttattaaattgtgatgcaatgttgcatcaatgctggacttcggcatttgaattttacgtgcactctggtttttatgttgtttactgtccatctttctcctaatcaataaaatgctttgattactattgacataatgtgaacttcgatttatatgttgtttattatccatatttggccctatccatgaaattatttgattcatgttcatataatacttagaagaatgtaatgtaagcctcaaattctctaatttgagttgctatccagtttaacacattaatttaactgtctaaatgtatcgtttaaaaaaactcgcgcaaagcgcgagcaagttactagtaataaatgcatgaattgaatggccaggtttaccactctagtttcgctg

SEQ ID NO: 7277 - DNA, 595 bp, Zea mays
  Intron number 1 from transcript GRMZM2G011383_T01 (locus G RMZM2G011383) derived from phytozome v7.0 (chr-ID 5; pos 8 550095 to 8550689 reverse strand)
gcaccgccgatcatcggtaagtctacttttggtgttaaaaaatcgttagccagctctttcaggattaacattgttactacatactgagcagctccatctaaggatgtcacagaaaatttacccccttgataaacacacccctaatataaaatacaatattttagggcaactacgaatcgattatatcaaattaatataaattaaacaagcaatatttaaaattataggggaaatctattttacagtttaatttgttatttaagctaaacgggcacggaggatggttgtccatttccgtccctgtgaatctaagagctaaattttcttttcggacaagtttagcaaccctatattttaagttattttcattttttaagggaaattagtttattttcgtttagaaaaataggaattctttgaaaaagaaatggagttgttaaactagcccttaaattgcgttcatctctgagaattcgatcaggaggatcgggtatggggttgacgggtcctatgcttgatctccaaaccctagcttaatttttatcaaaacggattcccaggattttgtccccgacgatctggaggtggcgctgcg

SEQ ID NO: 7278 - DNA, 333 bp, Zea mays
  Intron number 2 from transcript GRMZM2G420276_T01 (locus G RMZM2G420276) derived from phytozome v7.0 (chr-ID 5; pos 2 09446502 to 209446834)
aatcgttgttgttggtctgcacctattgtggaaaggtatattctggctttctgacggaatgaacgaaatggaagagcagatggcgagacaaaggcatcaaagggtgcaatattgtaaaaaaagagataaaagagttactttgagcctaataatcaatattgacatgtggattaattaatagacgttagggattcagttctgcaagatcataaacatgttgtcgttttctttctcgctacaaattagcatttgtatacgtaatgtattgttttattttcattttgctactctgataattgtatacgtttcttgtgcagaactgcaaaagcttga

SEQ ID NO: 7279 - DNA, 913 bp, Zea mays
  Intron number 2 from transcript GRMZM2G134415_T01 (locus G RMZM2G134415) derived from phytozome v7.0 (chr-ID 5; pos 1 4228584 to 14229496)
acaggtaatttgattcttgaagttacatgctggggtttgttgatgtctggtataagtaatggaatcacctgcgaccttttcattttcttttcttgatggctcatcagttggtagtagtttacatttttctgtgcacgaaagcaatgatgagcatgttttgagttatcagtaagcacatggtttaattgtgttgctgatagactggagagaagagggctggagcacccggatggttgccctctctgcaaccatgaacaagaaactactcaacatcttctagcttcttgcatttctggcacatcattctttcaccttttgggttggggcacctctctcctggggaacatgtgtcgtcttttgcttattggtggaaagaggtgagcagcaaagtacataaggaatggagaaagggcttcaatagtgtcaccattttaggagcttggtgcttatggatgcaaaggaactgggctatctttgatggtgattctcctaccattggaaaagtgcaaagatccctgtttgatgagctagcatgttaggtgatggctggggccaagaatctggaaagcttaggcctagcaacaacccttagctcggcaggaatgttctagtgggtattgtgtggtcgtgtttctattgtgcctcctgacggatcagtttttgtttttttgtttttggccaccttaagtggcctaggatgcttgtatctgtccgcttggacttcttttcccccctctacttaatataatgatgcacaaccctcctgcgttttccgagaaaaaaaactgtgttgtgttttccccctctacttaatagtaacctgaaattattaggaagacataattagacattcccgctagatatgttccttatgaatcacatgttttaggcacacatacaaccacctggcagt

SEQ ID NO: 7280 - DNA, 959 bp, Zea mays
  Intron number 1 from transcript GRMZM2G055154_T01 (locus G RMZM2G055154) derived from phytozome v7.0 (chr-ID 5; pos 6 3623054 to 63624012 reverse strand)
gcgcggcaacagggcgtcgccggccgctactgctggtacgttaacatcctcaaacgtttcctcctatcgatcttctctcctaaagcttcaatctttggcctgcaagtgcaaccggcgattctgttgggctgttgcctgaaatcctctgttcttctattcctccgtcggccccctttagcttcagcatatgcatatccgcagcgccgcccatcctctgcttgaaccatgcatgtcgtcttgttcttcttggtgtcgcttttacaaatttctgttacatcattaacaaacccactttccaagaatcacatgctattaatggatcaactgaaattcttcaacctctctgcaattatatttgtttaattcgacagatggttggtttctggcaattaagacttctccgttgcatgcttgcaacaggataagtgattgcataggatattttcctgttgcaagcgtgcaatcaaactatccagagcatccagtctagatccgacggtttcatatggaagtggttaaatgtaaaatagacactaggtttcaggttgaaggggttaaatgtaaaataacagttaccattagatctagatcggatgcatcagatcgcttgattgcatgcttgcaacaggataagtgattgcataggatattttccctagaataaaaccacctctctctttcgtaagaaaaaattaccagggtccgtcaacccttggcctctagcctctgcacttttcacgcccactgtctctatctatatataattacaaacttgagagcatgattttcttttcctatccaaaatgactcaaggcctatctcggcgagcaagattaggctcttgtaaatttctaatggcatggcagattattatatatgcatttggaacttgtgatcatcattccctctctccaaataactcaagtcaaggcctcacatttcctatctcgcgtgcagga

SEQ ID NO: 7281 - DNA, 827 bp, Zea mays
  Intron number 1 from transcript GRMZM2G065804_T01 (locus G RMZM2G065804) derived from phytozome v7.0 (chr-ID 10; pos 5896461 to 5897287)
aaacagtaggacaccgcacgcatcacgacatcagggtaagaacgatgatcacccgtttctgcttctgttttccttctgtgcattagacattcgttcgtcagagaaaccggggtgggggttggtgctgccgtttggagtttagaccgagtcacggttgccggttctctctctgcctgggcggcggaggattttggcaactctgcaggttgaacacgtattagggaacagaactttatggcagccaacgagatcattgagctcttctgtgagtatggcaaaggttttgtttctgctgcagttgacttgcgcccagatttgtaagcatcaacgattcttcgatgcaactaatgcccgttcttcttcactctgaacttttgatccccttttgaagctgaatgagaagctgtcagttaagaagccttctggtcaaattaagttgaaagttctaaagggtatatcaaaagagcatcaaattgtttgggataccactaagagtgagcaggagcttttgaaagttgacctcctgaagagttgattatatgcgctgctgaacctctattgtgctgagatcaaagcttgtcaattctagtattaaagattagcgtcgctggttttacattaaaattagaaatatatactcaatatttacattttcatcttattataaaattagtggaagcactggtagagtagatttttggaagcatggttagtattacatattcccttgaaattattagtctatacttgatttgagattttaagttaactttagaagtttataatggtacccaggcttcgattccaggctggctccaccactggaa

SEQ ID NO: 7282 - DNA, 949 bp, Zea mays
  Intron number 1 from transcript GRMZM2G026892_T02 (locus G RMZM2G026892) derived from phytozome v7.0 (chr-ID 5; pos 2 3267591 to 23268539 reverse strand)
ctttcctgcctcggcttgcaccttcaaccttacttgtaagttccatcgttttaactctagagaggctttttgctcgcgaatattttggaacgaagatgctccgccttgattttggtttagctgttgttaatctgaatcgtttggttgcgtttatcgtggatttggacgtcgagacgccgctatatgaggaattaatttgattttattgcttatgataggggttgttgtcggttggcgggttaccgttcagatctagtgtagtaaaattgcagtggtgatgggaggagaggagtgggcaagttaggttattaggtttctaggtccatgtttgtttatttttttggtgaggatggtttctggttcacctaacggttgaaagggatgcgtgctgacttggcaaaggtcgttgtgtttttgtttgtacgtacgagattttttttatatctacttggctaattttaaaacggttcaaggttcaatgccactatgccggcggtactatctgcatctcagattcgggtttggtaccatgatttttttacagatttggccaaactgcatgaagttcagtggattatgtcaattatagagtcaggcgcctgagtgaacctttacagattttatgacgtcgagagttgggtaaagttggcgcgaaatcgttgcgctatgatttatttatttatctgtagttacgctagattacacactgtcggttaatctgttcctaatttcctatcacaatacaatcgccaatgcacagttgactaccttttgttccgcgtattgctcagatgagttggctcagcagtagcatcaagaaaaaacacattgtggtcatttccaacagcccccaaacagaactctgaagcaatttttttgttttgggttgcagaaagctctgacctcaaactgaaagggacctgcgaagagttttttttgcggcagtaca

SEQ ID NO: 7283 - DNA, 754 bp, Zea mays
  Intron number 1 from transcript GRMZM2G024550_T01 (locus G RMZM2G024550) derived from phytozome v7.0 (chr-ID 5; pos 1 81887746 to 181888499)
caggtactctcgcttcctccccccttcgaagtgtgtcctctgtagagcgagggtgagatgtagggtctccttcttccagaacaacctaggtacccagcggcgtacgtgccttcctagctaccccactgctagtctgctagtaactgtgcgttctaggttttttttttggtagctttggcaaccagtttaaattacctcaagaaagcttctttcttcggggggtcaaaattatctgggacaaaccctgccccttggcacagtaatggggtgtttggtttgagtaatgagctagtatatcattttctcactcctaacttttttgtttggtttgtggaatagaataagttgatacatcaccactcaattcctcatagttagttaattagtactaatatgtggaatgaagttatcccatcaaatttgaggaatggatccatgatgcaccactttattttggatggagtagtttctcaaaccaaacaccacataagtttgtaaagaatgcactacctggttgctggcccagttctcctcaacgattttcgtaaaaacgtcatccacacccggccacttgggttagaagtggatcgaagggattgaaggagtttaaatcttgttagtcaaaattgaatagaaatggactaatctccgtcaagcatccccatgcaaccgctaatggatggttccagtgcactgattgttgtcttgtgtccatgcagatcttgcacccttgtgtctcgccagcttccaattt

SEQ ID NO: 7284 - DNA, 714 bp, Zea mays
  Intron number 1 from transcript GRMZM2G129781_T02 (locus G RMZM2G129781) derived from phytozome v7.0 (chr-ID 10; pos 115834635 to 115835348 reverse strand)
cttcacaggtatagatatcattgtcataaacatactgggttgtcccaaaacattaggctacacatatttcaaaatccaaactttgttatcttcgactaacaattagtctaattatatggaaagtttctgctacaatagtgattacattggatttgtatagaaatattttatagcaatcaaacctttgttagcacaaatgatatatgtaaaagagaaatccgtgggcaaagtatgaacttgaggactgcatcaagccaaaccgcaccttatactaagccatatggaccacccgctcgatccgcccctgtgaccgacttgggcgattaattgcgattgatccaaaccgacttggacgattaatcacgactaatcttgattaatcagacgacttgaaaacagtggttgttggctccaaacccatattcacactcacctatccaacagaacacacatatctctgtgttttatactctatacttataaatagaaattgtatcaacatacggacatggacactttgctagtaagatattatttgccagtaccatgtttattacattatagtaacattttattctatatttattttgcacagctttcatcattattaatacaattgtggtcaaataagatatagtgacttaattgtcttatcaggaaattgtgaatttattactctgtggagaggctgttccaaatgtatttgatggcaag

SEQ ID NO: 7285 - DNA, 822 bp, Zea mays
  Intron number 1 from transcript GRMZM2G009443_T01 (locus G RMZM2G009443) derived from phytozome v7.0 (chr-ID 10; pos 35583681 to 35584502)
ttccctttcctcctcctcctccctctcctcggaaggtgagaacctccagcgatcctcgtcttctgtgtgtgagttctttgttcttggatgggattcttgcctgctaccacctgattctcgtttcgaggtgtccatccctggatacatggatggattaggattagcaatcatgtgttgttagtgggctctgattcttgtccacttaatcgctgtttttttggggttggggtgggggggggggtattgattttgtttttgtttaaagttttggttgtggataagcggcaaggtatctttctccgtctttaggtataatcgatgtaaatgcgaggttgaaacactaattcaatcggtaaacggagctcggttgtgaatttctctgtcgccggaaatgaaacatcttttttgtgagccctcaattccaaatctttgcgcgttgtatcggtgcccctatccatccagattgccgcggattgatttgctaggaagcggcagaacatctgccgctatgtttaagcctgcacataattttttttcatttttgtttggcacagtttttcttttgaaacgaggctttccccgtttccagtatagaatattgtttggcacagtttattctccattttctagcacattttgattttgcaatttgtttgagatgagatggatcaagggcaacatactgatgattgttatgcactattcctgcgcatgattataactgaccttttgtgtgtatcggagaattttagaagattggtttttaatattgattaaccgttgtaatgtctttgtgcaggtcaagtgacggtatttgtgacc

SEQ ID NO: 7286 - DNA, 1051 bp, Zea mays
  Intron number 1 from transcript GRMZM2G069198_T04 (locus G RMZM2G069198) derived from phytozome v7.0 (chr-ID 5; pos 4 3147260 to 43148310)
ttcggctcctcacgcggcctcgccgagacccgcaggtacgccttcggccttcccattgggactcctccgtgactccgtctccctggggtcacgggtccgcgccgcctcagatccgggcaacccgttgcgacaccgccttggtgcggctgcggtggtgggcagttccgtggtactgcggcaggcacgccaaagacagtttctcttttctttcttccctgctgcccatggcggcggccgggcggagaaagattgaactcttgactcttctcactgccatagcagatgtatgcacgcacgcaaacgttcctttcggttgcgtcagtagcctgtaagcttggctgctcggctctgtgatcttcgttcctcctctttcgggcaaccaggttcaatctaatttcgatttggtagctaactttttcagcaagtggttgttaggtgttgttgcatttgtggtgtccgagattgattggtaaccacacgccacttgcgagcgaccctttttgactgttttagtttctcccttcgcatgcgcctgtgtccgtaggattctgttgcgtcgattagcttaggtatggggaaaaggtcgagccttgcatttcaatactacgtgctgtcatttctatattcctgatgctccgctgctgatcacacgctcaactgcctttagctctagaccgctcaatctgctctggggaatatttcatcatgtgtaaagtaggtgcccggcgtcgtcccatttgctggatcaagttaggttcaaaaaaattgaaattactacttttccggtttccaaacacatacagtgatctccactttgtcttcgatgcactgtgctctggtcgctcgtttatcttatcttcgcctgcctgtggcctgtggtggtactgattcgtgctatcctactggagaatttgtcaaacccccgctaggcatatttttcaaactcacggcacaaagctagcgtcacttggaagagtacctatataaataacacccccttgctgccttgtgcttgcagaacagggggttcagacttcttggtgagagcgat

SEQ ID NO: 7287 - DNA, 422 bp, Zea mays
  Intron number 3 from transcript GRMZM2G484344_T01 (locus G RMZM2G484344) derived from phytozome v7.0 (chr-ID 5; pos 7 7251000 to 77251421)
gaccctaaggtcagtgtcacttgtcttttcagtctaatcttcattctactatgaaagtttgtcttggaagtgtttttagagttttagggccatgccccagtcctttcactgaagtcaaaagacagattaaaccacaacaccgaatctgtcagtttcctgagatccttatctttaaacgactctttattctctgcctggcacaaaattaaccaattctgtaccatagccactacctggagcaaatccaaacccatacctttccacccagttatctagaagcataaattcatgtttgaagtcactgatcagttgttatgttcaaacagttcagataaactttggttttgttttcaagttgtaccactcttacctatacatgatagacaggcaactttaagagcagaggacattttgaattcttg

SEQ ID NO: 7288 - DNA, 656 bp, Zea mays
  Intron number 2 from transcript GRMZM2G039600_T01 (locus G RMZM2G039600) derived from phytozome v7.0 (chr-ID 10; pos 126027647 to 126028302 reverse strand)
ccgacctcggccccgtcaccgtgaagtccttccaggtgctgtttcgtagtagtcgtttttcatgggaagttttgtgactgcaatcagcccatgaagatcgcatagacgcattttagttaggcgctagagctagtcatattttggtgtcaagtaattgtttctaaggtttgggggttgcatcccgcagaggattcttgatggactcgtcactcgtcagttggtgctgaattagtttatcacgcctagaggtgctatgagtctgcaaatgtgattttctccataaacatcaatagtggtgtagctttaagtaatggatgggtggttcttgcatgtaatctgccatttgctttgttgtattttgaccaattaagtcaaatgatttgttatcttattgcagtttcataatctggtttagctgtgcatgcaaattttggagggtcatgttctgatggacatgtttcttaagatatattcaaaattattatgtaaatcgaaggcatggggtcaaagtcacttattgataattgagggaataactaggaatgtagcatttctatctaatcatatcaaaaccttgcaaaataatattgttagcttatataagtgtttgctattcaccaggtccggcggaagggtgtactgtatcgcctctctga

SEQ ID NO: 7289 - DNA, 892 bp, Zea mays
  Intron number 1 from transcript GRMZM2G309840_T01 (locus G RMZM2G309840) derived from phytozome v7.0 (chr-ID 5; pos 8 9599218 to 89600109)
agtacccgcacctagacaaggtatgcctcaactatgacgcgagagccccctccccccatccccgcaatgctcgtcgtgacagtccctccaccccgtgcagacatcatggagcgtgtcacccagcagaccgtgcacaccatggctccgcccaatccccctgttctccacggcttcaacgttgcgacctccaccgccacatcgtcattcccctaggaacctgctcccccactgtcgttgtacgtcgtaaccaccttgcctcacaaccaatgcgaagaagtaaacctgcttaatttgagcatattatcttagcatgccttcaagatcatcataaattgccctaatcaactgtgaagtataattgaccgtttatgtttcgtactttagaaattgaatttcaatggttcaaggtaccctgattatttctggtgtgcattctgcacctttagttattttgcattggttcagtacataatgtgtgttttctcattgttgtacatgtcactatagtgctgatagaaacaaaaaattagcaacaatattggatttcaggcttctatgctacatattcagtgttgttcgctcgtgctgtatttgtcgctgcgtgagcagttattggcttagtttctaatgtccaccttcccatctctatttttcttctttcagaacttctttgatgatcttttggaccacccctgctaatacaaacataatcattttgtggcaggaaatcaccatattaaagttgacaaccttcacatcatctatccttttgtaactgtttgtgcaaatatgagtttatcttaagttctattttttggtaatatcggtttactgcgcttaagttttcgataaagcatctttgatgtcactttttaggaagaatttgacgctc

SEQ ID NO: 7290 - DNA, 879 bp, Zea mays
  Intron number 1 from transcript GRMZM2G130207_T05 (locus G RMZM2G130207) derived from phytozome v7.0 (chr-ID 5; pos 1 84703321 to 184704199)
ttctccggcccttcgccgccgacaagctcccccaggtacgcccaccattctcttccgtccatgctttgcgatggtgagcacccactacccaaaccctaactggatctgtcaagtgtttacatgtattttgcctactaacttcgttttttttaattatcggtgtacgtctatgccgtttactgcattcaactctgctcgtttgtttgattcagttgagcagtgacatcgtgagcttatatgctagtgtagcttattggtgtttcaagcaatgtatgtcaaatatctagattagcaatttataaaccacgtaaaaccgtgacagtatcataatggcataagaggttcttttattttgtttgaacattctagtcagagtaagttatgtatctgttttctacatgctgaaggttatactcaaaccacttgtgaaatggctctcaccctatatctttctttagtgaatcaatgttggtattttagtagtagacttcagtcgtcagccatacttagcttttttctgctagtactgtactaatgttttgttcctccaagagaccgggaagtaaaatttaattggttcatatctttggtttatcattgtgtttttttggctattgcagtacttatgttaccaaagcaaggctagtaaatcataccggaaagaatggtgatggcgtcttggtcttgggtctgctagatgcatgcctactgccttatcgcaaagctagcttacctggtcatacgaatttgtagtcggttctgatctaattgcaagtgcatctagtaacttggattttttcgcaaaaaaatatcgggtgttcacgcctggcccctgcgcttgcagctactaaagagacaggagcaaagagttaacaggag

SEQ ID NO: 7291 - DNA, 566 bp, Zea mays
  Intron number 1 from transcript GRMZM2G171718_T02 (locus G RMZM2G171718) derived from phytozome v7.0 (chr-ID 5; pos 1 2834118 to 12834683)
gctcattctgccttggccataggtatgcaatttatctgtttacttgttttagtattttcaatttatcaagcagtttttgagttttgctgattctctcgattattgtgtactttactatttaaagtaatacatcatgaaacttttcacaagctcattctatcagacactttttacaacacttaatcatgattcatggaatttgtaatgctcgatgcactttaattactttctataaactgtaaaactgtactgtcataaaaaagtgtaagaaattgtgtaattacgttttctctttatgaattatctttatgaggtctgaactgttgatctcgtatgttctaaagaagaatgtcatactcagttgtcttacgctggtttatttatttacctcacacagttttcttgctctcgtttggaccattgcgtatgctaaccttttacaccttttattttcctttagaatttatgttcacacacactaatcaagctaatttctttactttaataaataactataattggtttttgcagcaagaatcttgaagtgaaatttgctgtaaccactg

SEQ ID NO: 7292 - DNA, 619 bp, Zea mays
  Intron number 1 from transcript GRMZM2G161794_T01 (locus G RMZM2G161794) derived from phytozome v7.0 (chr-ID 5; pos 2 03148904 to 203149522 reverse strand)
gagatctgccatcctggtgctaggtaaaagccgcttaaaagaacatctcacaggatgctggctccctctgtccatgattgcaagttactagattcttgttttgtaaagaactccagaacgaaacagttaattcatctgtgcaatttatatatcatcactgcaacctttttcgtttgcaagcaattttttttttgccatgtactgcctgcctgagctgaatgcagttcagaacccaaactggaccttcaacaagaacccccttcttcggctgaatagcaacaaactccaacgtgagatggttgctccattcactggaaaagcatcctagtactctatagggagggctgatcgaaactaatgaggtgtttggtttaatgaatcactatatccaaaatgaagtggtgcatcatgggtccattcctcaaatttggtgggatgactccgttccatatattagtactaaataaataactataaggaatgaggtggtgatggattaactcactctattccacaaaccaaacaaaaaagtgaggagtgagaaaatgatagactatatcattcctcaaaccaaacactccataactcgatcacgcctctgctactgatgcagctaact

SEQ ID NO: 7293 - DNA, 612 bp, Zea mays
  Intron number 1 from transcript GRMZM2G005199_T02 (locus G RMZM2G005199) derived from phytozome v7.0 (chr-ID 5; pos 2 5436790 to 25437401)
aggtaacgttttgttgcctcatgagttattcttctttgtttagattttatagtttcttctgtaattttgctatgcaacacagtttgaaaagtttgtttttgtcttttttggtgaatatcattaaacagtttgaaaacagaccgcatgcaatagtttgtaggaatgacaatatctgttacctttgatgggaatcataatctaagaaatttgtaaatctgtgcaaaattttgcatgctaatactctgttcaagctgcaagtgagcgaatggacatttttgtaggcagctttttgtttgaggcatgctagtcctcactatatgcatcattatcatgatacacagaatgaaatttagtaacgaagtcacagtaggggagatccttgatgtatttttctcatgaagttgtgaaaggctaattgaactgtttccattgtagcattataccctttgtgtcaactgctgctatactttctgcacttaattttttcattccaagtcttgaacttaatttttttcattcgaagatttgaacttgcttcttatacccttttctgtttgttgtttccccccttttgcagcgtgctttgaaggtaccacacctcaactttttgtg

SEQ ID NO: 7294 - DNA, 838 bp, Zea mays
  Intron number 1 from transcript GRMZM2G121309_T01 (locus G RMZM2G121309) derived from phytozome v7.0 (chr-ID 5; pos 1 51713351 to 151714188)
ctactccgccccagctttctcgccccgctcaccaggtatgaatgctagtgcagttctcagtagtcagtacattcaagtcaaactttagtccttcaattgcttgcattgcattattaggtgtgctatagctagtctagtaataactcttgaaatacgatgagaaaaaatatcttcgctcacttaaaaaaaaagcttttaggttttaggctatctcgagcagtttgctgatttccgtcgtctatttcaaatttcacacaatgcaaaaatgtgtaaaacagcgttttgcacgatcaaatgagccttaggcaataagagtgtcttaaaaaattgccgtttcacaaatatgagtacaacagctttaatttttttacacaagctaagcctacgccctacagaggagttgatcatttgttttaaaataaaatatgtacagtctgatttcagagattctattttttttcaatgaacacctatagaggagcctatacatttgtggtcaacaactgctgtttcacatagtgacactcaacgtttgaatactaaaaaagtagattcttttatttcataattgtagtatgagctaatcagttcaggctttgcaaattgacgagctgagaccccatcaatgcatgtccattactcattcttttttatcctatggtcttgttctgcacaaagtcctttcgtttgttcctggtgtatgattgtttcctcctttgttcttgagtcagtagcagcagcaatgaaagtgaaaagttctcagcatgtactcctcttgttcctttctccctgttcttgtgcaggcaaggcaaaggggtccccagcagcagctacagag

SEQ ID NO: 7295 - DNA, 779 bp, Zea mays
  Intron number 2 from transcript GRMZM2G126679_T05 (locus G RMZM2G126679) derived from phytozome v7.0 (chr-ID 10; pos 122763191 to 122763969)
tagtccttggaaccaaacaggcccttaacccgaaggtaattgagattgcgaagaagatgaaagaggagagggtcaagttgtttacttcagaatattttgcttacagatgatacgactagatcaaatcagttgcattgtgagttgtgacatgttggcaggatgtcagtttcccttttcacctggctcttgtttgcttcctgtgtaatttgtgtatatccctgtgatgaacattttagtaatctgggtgctcattcaattggcgcgccctcctcatcactcttagatggggaggttgaaggaacccatatcgatgatgtatacaccgttgagatgtttgcttctcgtgtaatttgtgtatatccccgtgatgaacattttagtaatttgagtgctcattcagttggtgctccctcctcatcacgcaaataggtactgaagcccatatgactatgcagatctaggacagaatgtttgcaataaatactgacatggatatctagctttggctttgaaagatgtagggatcttttgttaaattgatttacctagggtcctgctacaagagcttacctgttacctcgttatatctttgtgagattacagcaaaagtatccaatttctacatattttactgctacacagatctgtctgtctgtttggtcatggatatggttcggttttactgctgtaaaaagggattgaaaaatctgcaacctgatttcaatttttattttttatttgcatcacgatgaaatggtagggtcctcccaggacaaacc

SEQ ID NO: 7296 - DNA, 373 bp, Zea mays
  Intron number 1 from transcript GRMZM2G017416_T01 (locus G RMZM2G017416) derived from phytozome v7.0 (chr-ID 5; pos 3 291556 to 3291928)
ctccggtcactcggcatcacctactaccctagtaagtatgacacgcttctcttctccccttcacccccccttactgtctatgccttttttctcctttcgtttttgttccttgctcttgctcactctgaaaaaaatctatatcatcagcaacactgggatagacagttagacactgaatggttgcaattccgatgaaatcaaatgaaacctgaaattcatcaatgtgtggcatggacagccctgctgcttgtattattatattattatagcttaaaaaacagctcgattcggatggttgccacttgctgtagctgattgcaggcttttccttcgttcaggtactgggcactggcggtgccatcgttcgtggttg

SEQ ID NO: 7297 - DNA, 878 bp, Zea mays
  Intron number 5 from transcript GRMZM2G172132_T04 (locus G RMZM2G172132) derived from phytozome v7.0 (chr-ID 5; pos 7 237398 to 7238275)
caatacattctgcaccgtcctagaatattgcagtggtattatatgtttttatgatcttcggaatcctgattgatatgacaacataacaaactcttttatttgttcgcttttcctgatacctgtatgcggatgacttcattctgtagtcatgctaacataaattcataatttggaagtgttagagatactgtcttaccgaactttaggcatatattgttattggccacatgcgtttgtgtttatagttcttggatgaatttgtttcattttgccaataaaaaaactgtggtggttcttagataagtaatagctgctgacccatataaaaatgaagtgaatgcataaactgatgctaaatagatttggtgatggtttatacaattatttctcccacatttaccaattggtcagaataggataggttgtcaatgggggaaaaaaggcaggggcaacatgctgttgaccggatttgtatcccatcctctgtctcgacaataacaagcaagttgacaaataaataaataagactcatctgccgcaaactctaatgtatttacttctagcaattctatgtttgatactttctattttgagccacaactgttacagcaagccactacgaatactaataactacaaggatatgttttctcacagaaaacaaaaggtttcttccaatgctcactatcttcttaatcaacatgcattccattttacatgtatttgtatcagttatgtgaagcttttattttacaatgttgtagtctttaatgatggttttccttcctaaatctatagctcttagatcaggaaatcatcaatcatgagatgtgataatgttctcttcattgttattgtttcaaccaggcaaggatcttg

SEQ ID NO: 7298 - DNA, 758 bp, Zea mays
  Intron number 1 from transcript GRMZM2G168892_T01 (locus G RMZM2G168892) derived from phytozome v7.0 (chr-ID 5; pos 2 5878211 to 25878968)
gtcaggtggcacagaagcagcattcctctgcatagaggagcggctggacgacgagaatctgaagccgggtagcttcctctgcacatcttccatcatttcacggcactgaatgtttcgggtcattatgaagtcgctgcactgctgttttattttgccaattgcttcctgtgcagagggagggggggtcatcccaatatcagtagcccattcgagacgagacatctgcattcctatgttcgacgcaaatatttaaaaaaaaattgaaaatgcaatcgcacctgtaaagtcacataaaagtttaggccctcgttgatgttctttttaaactcctggtatttcacaacagcagcagcgatttgcttgtaacatctctcacgggcagctgaaggaaaaaggagattaacaaatcaaaactacacattagcacccgaatatgataacagatccatgttaacgataatcacaggttacacctccgttcaaaattatagaccatttttttttgtcctaagccaaacttctctaagttcaatttaagtttacaagaaaatacatcgatatttacaacaacaaactgggtttcatcaagttcttcatgaaatatgtcttgacggtgcatttatttgaacttgtaaatgttagtaatttttcaaaaataaaattagtcaaagttagagatgtttgacttaggagaaagctgaagtgacctctaatttggaacagagggagtagagattaagcagagcaatagcaatttg

SEQ ID NO: 7299 - DNA, 1011 bp, Zea mays
  Intron number 1 from transcript GRMZM2G445791_T01 (locus G RMZM2G445791) derived from phytozome v7.0 (chr-ID 1; pos 6 0225700 to 60226710 reverse strand)
atctccctcggcgtcaagctcggcgtccagtacaggtccgtgctagcaggatcgcgcgcctccgtgatatattgagctcttgactgctttgcttttgtagagtagtttgcatgcttcaattgatggcgatgattccagactccgcgtgtttcatgtcgttaggtggtggcgttagttaccagtgtttgttggtgttagttacttagttatcagtgttcattggttgtgttcaagtatgcaattcagtataacatgactgatcgtaggggacatagtacgtagaccatgctacctaacttatgggtcaattaaccgatccagctgtctctacaaacacctagcaaccttttctttatagagctcacatgcaatccgttgtcgcattcaaaaggattctaaggatgctttgccttacctgtattggtgccagtggttttcagtgacagggtttatgaaaacacagttcgagctcgttttcttctccattatttccccttcttttattgcgataaaactttttggtttgggtgtacgtatgatttcagtttcctttttgtgaatgaggtcatgcttagcatattatcataaagatgcgttgattattcaggacaatgatttggtcaactcaatcccttgcaaaaatgtacttgagcagttgaggatgcttttggagaagttcctgctgcggctgtttttcaggcattcaactcatcagacagatgataacaatcaattacttgccttgaaatcacaatcaatatggacacttcttatctcagctatatggttttgtttcttttgatgatgggcccagatccaaactctgtcgccatatattatcagttgtacatttcaacatattcgaatttgtggaaatgtccttctggattaaattttgtagccagctatgtactctctatctgatagaagtcttagtctctcatatagtattaactttacctccttgctaatgcagtctctggggtggttctgtcataaatctaggaacca

SEQ ID NO: 7300 - DNA, 389 bp, Zea mays
  Intron number 1 from transcript GRMZM2G068717_T01 (locus G RMZM2G068717) derived from phytozome v7.0 (chr-ID 5; pos 1 54698589 to 154698977)
ggaaaacatcataaagtaagtttttgactccagctttatatctaattgtgaacttacctagtgtagttattcacctacagtcttctgttctaactttggtaggtttagtttaggaagtaacaagcaaagtagtttaggaacttaattgaaatgactgaatagagggtacatgtaacaacgagaaggtctactgcatcaacaatcaatcaagataaggaagcaaagaggatgaagaaggattctttggaagggcttgttgggagatatctagatctaaaatcaaaacaagttgaggatgatgttacacaaatggcgaaaggaaaataatctgctcaaggtaaataggtaatgacttctccatcatgagatgcatttatgttcttagatcc

SEQ ID NO: 7301 - DNA, 996 bp, Zea mays
  Intron number 1 from transcript GRMZM2G158097_T03 (locus G RMZM2G158097) derived from phytozome v7.0 (chr-ID 10; pos 118828825 to 118829820)
ccttccttgcctccggccctcgctaccgccgccgcgtgagtgctcttgtgattcttcccgctcccccccccgagtgtaatttggtgatgtattcggctggtggaatccacgcgcagcgatacggttagtagggttccaacgccgtacctcgttccgaagctgccatattcttctgggaggccgcttaaccatggatcatctggttctaattgacacgaaactgtacagttgagtgagtgttagatttggaggctgatccggacacaattgtttggatgatcgttttgtaccgaagggccagattgatggtttggattttcagtatatgctcgatctgcgggggtaagaccttccccacaacatttcatttaagagaccttcaaaccctcgaactcttgcaccatacacaatggtactgtagctcatgtgagaatgtccgcgactgagaccaggccttaaacccgtgctttgatgtcggacagacgagactacaagagtcaaattcagaggagagctactcaaatcacctaaccaactcagctagaagtactcaccacctaaccaactcaggtagaagccctttcacgattgtcagtatatgctatacacataaatcatgatttccaggtatgacacatactgattcagtgattctgttagataatggtagtttgttggagtgcttcattaagcaggagaaaaatggatatatcacacacacacactacaagttgcttgtctgagccttgtgcgtgtaacattcaagattgaacgcggcaaaccgactgggctgttccagaataagtttggtctaaagtagccatatggtttacgcccattctggcatctgtttagtttcctttgtttacttatattctgttcagtataatgtttgttcatcctgctacataattttgttctcaaaactaagtttgcttactctggcgatgatcatttgcagggacatccatcttcgaaggtcagcttccgaaggtt

SEQ ID NO: 7302 - DNA, 950 bp, Zea mays
  Intron number 1 from transcript GRMZM2G126517_T03 (locus G RMZM2G126517) derived from phytozome v7.0 (chr-ID 5; pos 1 98027645 to 198028594)
ccaggttaataccttttcttctgtaagattttttattgttgatacttggaattaattgccatactgttgaaagagccaaatgctttcatctgaaccaatgatggcttagcatgatccaattgcaacttttgattgttcataattcaatgaagttgtggtttggacagagtgtagtatggtttgaagagaaggtttggtaaactgctttatgtatcttttactttggatggtgtgctagagcacagtcattggaaataactaacctaaagctttcaagggataaccataaccttttaaatctttcgagcttcaccatcctagaaggctagaacctcccttcctattcacgttttcattgttatttttcttttacccagactctgctatctgtatcctgtcctgtaacttctaaaccctcccttctatctttgaaagggtaacacctttttttactttaataaaaaactttttactatttgtaatattttgttttttctcgtccaactgcatttgtatttataaatacttcacgtgccacatagtctatcagctaagtgctaaggcaactaggcaagtatggatatttttaaatatacgattttagcttaacaggattttgtgccacttctgtgcctatgtctatgttagtctaaagggcattttcgtcatctcagtgtttgacaactatgcaatatgacctcttgcaaataatccagtagagtacatactgccggtcttgcaataatttagcactatcacataataatgattagatatgtagttaggccctgctgcaagggacgcttttctggattcttatggacttagtttggagttgaaacgttccttgcaatattcctgcaatttctttttcatccaagttccaagcatgccctattaactcctgttctggatatttattgacatgtacttaacccaacataggtgcc

SEQ ID NO: 7303 - DNA, 1012 bp, Zea mays
  Intron number 2 from transcript GRMZM2G126517_T03 (locus G RMZM2G126517) derived from phytozome v7.0 (chr-ID 5; pos 1 98028601 to 198029612)
tgttgattctccagaagagtgtgccaaaataatatgtgagtagtaaattacagtattttacttaatatctttacatttttcatgagatgaacttttagtgatgacttgatccaccgttccatcgatgagcttctactccctgagttgtctgatttcttgattttacagagatattgactggtatgtagatagaaccatttcgatatgttgtaccagtttaaaaatctacagccagactgccggattaataaggtagctccaaatttatgtgctataaatccaaaaccaaaaggcatcatgtagaatgcttgtattcttctaacgtgcaaaactcgatcacattacaaagcagtgttttcagatcgcctgatcggctgatcgtttggactgggcgatcagccgattactcgcccctgatcgaccctagccgttcacctggctgtcctgcatatttccaggacacacacgcatacacatatataatagtatatacttatatagtatagaatatacttagaatatagagattagaagggtgtcggagggagagagaagggagccgccggtcctgggaagcagaagagtcgcctagggtacaggtaagtggaagagtctgggcggctatattaattctggtccgaaaatgactgttggacttccctgagcattaaaccctgttgatcgactgatagcccatcaggacgattaattgctacagatcgccgattaggcggacgatatggacgatcagcacatctgatcgaatcgaaacctctaatcgagtactgagtaccgatcagcccgactaatcgcaactaattgcgattagtcggacgatatgaaatcactgttacaaagtctaattagcaacccacacattgagttgttcaaacttttgacttgtgtagtataactatttttgcttgctagcttctgcactgattagaatcttggttgtcacttgtcagtggttccagagttctttgtttgtaagatttctgatgtcatgcag

SEQ ID NO: 7304 - DNA, 872 bp, Zea mays
  Intron number 1 from transcript GRMZM2G131934_T01 (locus G RMZM2G131934) derived from phytozome v7.0 (chr-ID 1; pos 3 00887038 to 300887909)
atacgatctgcagtttggaaacaaaattgctaagggtgtttcagtcattaaagttagtaaaaataaaaaagagagtaaaaaggaacttaattatattttaaagaagagattaacttataagtactattttagagaaggtagatttaagaatactggaagacagaagccagcttaaatctctacaactctgtttggttgggctgtggctgtgaaaaaagttgctgtgagctgtgagctgtggaaaaagctgctgtaggctgtaagctgttaaaaagctaaaaactgtttgatgaaaaccactaaaagtcgttaaaaattcttcgatatatgttttcacagttccatccgaaaagccactaaaagcaggtctaggggtgctttcagatttgcactacgagaaagtcgacttttagaaaaaactgcttcctctatctagccctttggttggattttggcttttagggggcaaaagccaaagccaaaagtcaaaccaaacacaccctaagacccatctgtagactgcccgcgcctgcgcgaaccgcccgccgctccgctgcccgccgcacgccagccgccgcgactcccgcacgccagctgctaccgaactcctcacctaccacacgcacgccgctcgccgcgaagcactccccaatcccttccccttcccttcccccacccccatcggcgatgccctgatccgcgaccgccgccgtccaaccccaacctctgtgtgtgaccgctccgtggtggcgcaggcgctggaggcatccataggaccgcatatttcacgacgccgtggactggtggcgcgacatcaatgagtcgccgctgtggcaggaccgcatatttcacgcgctcgccgtgctctaccg

SEQ ID NO: 7305 - DNA, 1059 bp, Zea mays
  Intron number 2 from transcript GRMZM2G167347_T01 (locus G RMZM2G167347) derived from phytozome v7.0 (chr-ID 5; pos 1 54993871 to 154994929 reverse strand)
ggcaattcaaaacctggagggtgcagcctgtaggttgtccaaggactccaagttcaaaaggcatgagtagtggagaagagcacctggaaggtgaattcctgtggtgcattcctcaaaacaaaaacaaaaacatgtgtggggtgattgtttcgagtacataggataggactaattgattcatcagtattttttttcatttttctggttgacaacttgacatcattctgttggcatttccctgactccccgtttgaatcattggaattgaattccattctagtaatagtaatttagtcatatatcaattaagctaattcagttttatgtaaaatatatttatatactattattaccaagttgtcgaagatatttatgtgttacatttttattgtagaggagtgagacgaagagtgtcatgtaagttacagagtagaaacaaattctactgatgcttaaaattatttctcgtcctccaccccatgaatttgagatagacttatatctgaactttaaaaagtgatagaatgttaaattacaaactaaataagttgaatttcaattcttttaaaatgaatggatccaaacgtcccgtgaagataaaccgaagaagcctcctgtcaaacatgtgttcaagagaagaggtaagcagcagcaaccagcaagtcactggaactgaggacatcgatgtatacggcagcttcagtgacatgggtcttcatgaaaacctactcaagggaatatatatatatcagtacggtgagtcatacatatgctatacttgtttcctttagatgctaatatgtaacacagctatatatctctggactgcaaacatttcggagacccgattttttatttgtgcgttcatcatccaaggtttcctttgcaaactctgttcgaaaggtttggagaagcctccgtggtgcatcagagagggatcgtcccattctgcaacggccagagtgttatccaccacgagttcttgtctggaacgaccgtgactctttgcgctggagttcttcagcggcttgactacggatcggcacagtgccaagctct

SEQ ID NO: 7306 - DNA, 896 bp, Zea mays
  Intron number 2 from transcript GRMZM2G023387_T01 (locus G RMZM2G023387) derived from phytozome v7.0 (chr-ID 10; pos 143717620 to 143718515 reverse strand)
tccaggtaaacaaacagctctttgatcctgtatatgtatatgcaggtctcatgtcttggttttccttaggtcccctttcggattcttaggaaaaactggttgaatcactgtgagacggattagacgagaaacatttcacctggaaattactagaaacgcctctcttgcttttatgcctcgcaaacgcacgattatgattctcgtctcttttctccattggcaaccatagttttttttggttagttcttctagaattcagtaagttcaaatacgttgcatttagttgttctaggaccaccaaaaaactgtaaaattatttgaataatatattcatatgatttttatggggaaaaaatatattcttttgaatcataatccagcttaccagccagattgttttcgtggagtatttctgattccaaaaacgttttttaagagaatataaatctgaaacatttaaaaaaaatctaaaactgtacccacacactcttagtgcatacttcgaagaaaaaaagcagaaaataaatgggatgttcgtttcggcaaactgtttggactgatatagcagtaatctatataaacaaaaacaccgtaaaatcagtggaagttggtacaaattaaagctaaatgaatagaccgaaagaaatgtcaaacttttaggtatgataatttcgatggtttatatatttgattaattttttttgcgttcaaaaaacaataacaatgcatttcccaaggccagaataaaaacatgtagggaaaaagttggtgtctcttgtatgcctcaagtgacctcgtgcagctgtgtagtgctgacagaccgactaaaagctagctgcgacctgacgagccgtaaattggtgcagagtgtttcatccaggtacggagtgaaggcc

SEQ ID NO: 7307 - DNA, 704 bp, Zea mays
  Intron number 2 from transcript GRMZM2G039857_T01 (locus G RMZM2G039857) derived from phytozome v7.0 (chr-ID 10; pos 89435467 to 89436170)
cggaggacgagaagttcatctacaacctgcgcagggtaaggaggccccaaattgccctttttttttcgtttcctcgtgaaaatcaggagtgcgaatcgatcccttgaattgttatgtttttttaatgtgttgcgccctgtatggtttatttatggagaggaatcgggaatgtaggctgtgtaatgttaaagaaaatgtattggtattgaggcattggcacaaataagtgttcatccctagctgtatgtttggagttttgctctgtctgcctgaaggaatcaaatagctatgatttctaaggtttaggatccaaaattatgtggtaatgtatgccgtgtgaataatcatggtatattttaagcccttcggagcatttcttctgttctgaatgactagatgtgataggtaatgaacacagtgcttgcatttttttaagcttaaagaaaaaactctgtcagtaaatggcaaaaattatatggcttatttgtatagtgattgtatgtttaatactagctgagttggcacacctgttaaaaatatatataaaaaagtgtaatatccagatatatcatgaagatctaagtaagctgcatcgtatattgtatgtggtctattcttttagtagcaaagttcatgacttatcatattctccatttcctttttatctaggccaagaaaaaagttgctttgcttctacagaagct

SEQ ID NO: 7308 - DNA, 778 bp, Zea mays
  Intron number 1 from transcript GRMZM2G150637_T01 (locus G RMZM2G150637) derived from phytozome v7.0 (chr-ID 10; pos 74549105 to 74549882)
acagaagctttcagacattttatctcaaagaagcaagtcttgtgtttgttattcatgttctagttaacttatagagagcaaatgtctgcatgcctgcaaattatagtggttaaaggggggctggtagcctaggccatggatcacacactctgattttgatatctacactcttctcatccaaagatagttctttgggtaacctgcctcttagatatctctttcattttcttcttcccatgtcatgattaatacggtattgtccttgcgtcttctttacattatggacaaaccttaggattcctctttacaatggtgcatctagaggactatattggttatttccaaaccatatcgaaacatgcatgttgactaagctttccatctttgttggcacccatacggtcatgcctcatcactatataacaatatcaatctcgatttccagtatgaccactaatttagtagaacatacacatctccttcaaaatgtgctttgaatagatcacgcactaatagagaaaagccatcgtagccagtacttaacccccctataaccgttggttggaagcaagagacgacggtgatgatgagacctattttcacatgttgtaccagaagaattcaaaacttatcttaaattcacaacaactttcagaattttagatatgtattcactacatactattgtcttcatgggatcctcatgacttaacaattatgtgaacatagaacatgaattcactaatctcttcaatttgttacatgcagctaaagttgt

SEQ ID NO: 7309 - DNA, 784 bp, Zea mays
  Intron number 2 from transcript GRMZM2G149933_T01 (locus G RMZM2G149933) derived from phytozome v7.0 (chr-ID 10; pos 23792498 to 23793281)
gcagcgaaccagaggtgcgtgtgtctccaccatttcatcattatactgaattctatagcacggttgtaaatgttatctttgaggctgtcatagtgcgatggcacttgagggttaccgctttccagtctctgttgccaagtcggtgcaggtttaccatgtgagcttgttaatgcaaaaggagggaaaatgtagttgtgtagttgtgacttgtgaggttcttcaaatacttttagatgcagatttcagccttcaaatcaacttggtagcttgagctcttataatttgcctagctatagatcgggacatctaccaatctaagcatcatcaaagtattttaggtcacttagtgtatctttattatattcactatttcacaagcataccagattttcagtatgtataccatacatgtctcactctctaacatggaccggggctatgttttattaaattctgatctataagttttgtgtattgaatggttgttaatcaattgaagtgtcatcgtgtttccaatccaacaaaatgtttattatatttatatgaccagctatgttctggctgttaaacaattgaagtgatatcatgttttcaatcctaaacaaacgaacaagatatatatatcttttttgcactactaaagaaaagtagatataaatatctcactatgttgcttccttttttatctctaggttatggacaatcagaaaatgtttaatacagtctgttaatctgaattgttcccatagagtaaagtttcatccattatttttttgttttttag

SEQ ID NO: 7310 - DNA, 833 bp, Zea mays
  Intron number 2 from transcript GRMZM2G135691_T01 (locus G RMZM2G135691) derived from phytozome v7.0 (chr-ID 5; pos 1 59269424 to 159270256)
atagataccaccgcgaagatcaagcaggttgctcccttggtcccgttctctgaccggtttcataggttccggtcgtgcctcatcttagggctttttagttgtcgggtcttggtttgtccggcgggttgaaactttgacggttgctcttcatattgtctgttcagtgcggctgctgctcgtagtacaactgtagattcttctggatctcgtccggtcagctattgagctatcacactttgctgtgctggaaacccttttttcagccagtaatatgctttggttgtatgggtggctcattacatgcattacttctacaacagtcactcacaatttatgtaaaaatggccagctcgatgtccaagaattttggcttcttaatgcagtgatattgttttcctttaatttattttttctccaagagctcccatatgaagtgtaatgttgaaccttttaaattcagattaacatatgtgctttacaaaattttctatcttgtttatttcctagtaggaactccaaagcatgagtagaaaaggaattgatttggtttttgttagttattattgaaagagaaatcaacagtttgctagtaatgttgtgactcaatcatttctgtcggtgtacaatcatattgcacaaaattatttacagcctttgtaaatgcaagcatattagttctgtttgactaccttgatgggttctacacttgtactctgttgtgattttacctttgatggaagcttctttgtaaggaaatttctatagtaacttctagcctatgtcatagaacctctgttgcaataatacctttctttcatcagttacaaacccaa

SEQ ID NO: 7311 - DNA, 798 bp, Zea mays
  Intron number 1 from transcript GRMZM2G055125_T02 (locus G RMZM2G055125) derived from phytozome v7.0 (chr-ID 10; pos 75674119 to 75674916 reverse strand)
agtctcttcgggcttggacggtgagctctcgccctcgcgcgatctcgatcatacacatgcttcttcgctctactccctttgccttttacccccctcgtccctggcttggcgcccgttgctttgtgacgcgggatccaggcccgttgctgatggaattgagatctcgcgcgaggggggatcggggaattaccctgtttgatccgctgctctagctgggtgggtgtgccggtgtgggtctcttctgacggccctaattagtattctgcgttcagcagtcacggttgctccgtcatgctagtgccactgtggcaagtcctacccgcgctgctcaacccttgtttctccaccttgatttggggtttctctcaaacgggtattttatacaacaccagaatccagatcatgggaaaatttaactatttgccactattttgatgtgagtggtaaataaaatggcacgattaaaggattttttgtaaggattacaaatagttaaaagcccccagatcatgctgggagctcggcgggctgagccttctctttagggcttgttcggttattcccaatacacatggattggatgggattggaaaaaattgtgaagaagtttgagctgtttgggattcaaacccatccaatcccgctcaatccacatggattgagagctaaccgaacaagcccttactcgttactgaggaattcggctggtttcagctcctgatgcagcaatcatcctgatcagtgttttttgttcttctggcagaaaccagaagacattccgccccaagaagagcgctc

SEQ ID NO: 7312 - DNA, 873 bp, Zea mays
  Intron number 1 from transcript GRMZM2G578314_T01 (locus G RMZM2G578314) derived from phytozome v7.0 (chr-ID 5; pos 2 08256181 to 208257053)
caattctgcttcaactcttcgtcaccagttgtgcggtgacactgcatgcatggtgcctgttttttacctgttcattatacatatacgccagttgcagttatcgatatttaatgctgctacaacattgaacaggggaatctgattttagcatgactagaaaaacacaatattagcattgttgcactgaagttgctaaaaataatttttttgaattttatgaccttacctatagaaaaacactaaatatcgaatcattgcatgctgtagcagctaacaatataataattcttagctactagaatgaaatttataatggagtatctacgtatacgtcactgtgcactaaggttttaggatggttcgtatgaataaaattatctgctcttggtggtcgcctccacctttttcaccctaagaactgcacttactacaactccttgatgattagatcatggcattattttattccgcatgtgctcgtttggaacgtacgttaggtcattggattagcaggtcaagcacaaagtgcacagccgtctgccttaatttacggtaggaacactttgatgattagtgctttgaatagctaattacctcttcggcaagcatggctacccccttctttttcaagctcatgattgcactaattgagaactctcagagaaacaagtccttgccttcattttcctacagcaaattgtttaggatgttattattaggattaagaatcacctagagtcagatgccaaacattgtactggattatatagaattgtggcaatcggttaaatatgtataggaattcattgcatatcgtaacgagtttacgtgttactcatcggattaggagaacctgacaaagccatctaccac

SEQ ID NO: 7313 - DNA, 961 bp, Zea mays
  Intron number 2 from transcript GRMZM2G115138_T01 (locus G RMZM2G115138) derived from phytozome v7.0 (chr-ID 5; pos 1 02551242 to 102552202 reverse strand)
gtcagaccatccgcctctctccttccagcatcaaggtaacctctccttatttagtacgtttgtatcaagaaaacagtgttccatgttccatcacaaatgcaaagagggttctcacggaaacaggatgcctcacaccgatggagctggctctttgctacatattaagcaaagagtgtatttgtgttgttactgcttggacttttaaacatttgctctctataatatactgatttagtcatatcttttatttgtagtaggttgcttttatggcatcttgatccatcaattattaggcttgatctctcagtgatgctcaaggaggtaattagaaggctcttgctttgcctgagaaagaaattaaataataggatggaatgacgtaccttaaacactcatatggaataccctatgcttttgcttgcactgagttttgatgtgtcctgaatcctaattttggtcaatgggcttctacacatacttttaatcttgcaaatagaactacaccaaacagaagggtatcctatgggagcaacaagatgtttctagatcttacatataagcagacgcatcccttgtaatctatgttgttactggttttgtaggaacttagaagagtttgcaatcattaaatccttagcatgacaagaagtcatctgtatatgctatagcatttgtgtcatctgagtttgtgccgcgtcctcttcgaccgtctcggggaagaggttctgtgcgagctcgttggggtcgacggtggggtagagggagttgcccgtggcggcgccggtggaggtggtgggtgcggagaagaaaggggtgttgagatcagggtgggactggtccacatccgggtagaggctctgcttggcattcgaggaagcgaaagccatggttgcgtagctggtcggttgctatttaattttgcattcggttcttactatgcttcagggattaagtggttgta

SEQ ID NO: 7314 - DNA, 875 bp, Zea mays
  Intron number 2 from transcript GRMZM2G041123_T04 (locus G RMZM2G041123) derived from phytozome v7.0 (chr-ID 10; pos 122524824 to 122525698)
aggagcagagccatcacagaaattcttgtctccaggtatgttgaagtttcaacaacttggtttataaattaacatgattttaaaaaatcacagtgactcctcttgcagattttgtaaaatgtttttttctctactgcactgcctatcatttgctgcaatttgaggattataacattctagacacactaaaatctatcatctatcataaacagtagctatttccccctctgttctttgtgtctctgattgtgtggtaccagctactttggcatacatttgttttttgctttaatcttctgttcagcttctaattcagaaatctttacttcagataaccagaatacttcagcttccatagttccacttacacagttgtaacaatctagcctgtaatggcttgtaacagtacagtgagttgggagttgggacacctctgatgtttagagctccaatggtcctgtgggagggatatatttttgttttcatattgtttagccatggggtgccagggtctacgttctaccttggtttggttctctccttttctcctatctgtcaacacatagtcgtctattacttataaaaaaccacattttcccattttgatccctttatgaacaatgctggaaatcaaattctattcattttggaaaataattacatatttattcgtcgtagctatattccattgttttattaggtgctcaaaaattgtgttgaccggacacatgctattttggcctatgtgctatccattgctatgttttatcggtagggttttccatgcttagataacttcctaatttctcattttttgtaaataaataaatacttggagattcttggtcaaaggaatgttggacacctgctagcca

SEQ ID NO: 7315 - DNA, 534 bp, Zea mays
  Intron number 1 from transcript GRMZM2G148567_T01 (locus G RMZM2G148567) derived from phytozome v7.0 (chr-ID 5; pos 1 48690311 to 148690844 reverse strand)
aaataggtgagggtggctttggacctgtttacaaggtaaaaactatgaacttcaatatgctctctcttctggttgcatggagaaaacagtttacttcatctcctcattagttaatatattttcacacaaactgatgattagccataattttttcagttgccaaataccagcattacaatatagaaatatagaacttggaaggaataatattttccctggtgatctatattgccggtagttttctgacattagaaaaccatcatttggtatcctttttgttttcaagaacgaaaggacggccattaaaaaacaaaaggatggagaatttgtaactgttgaggctaaacaactcatcatggcacactcaagggaacaaggttcccataaacagatagaggaagtaatcgttaaggggaatcaaacctagctgcaaaacaagaattttagtttctttttgttatctctcattggttagcatttatgtaattattccacatattgttaatatactttgtcttcagggcacactagcaa

SEQ ID NO: 7316 - DNA, 999 bp, Zea mays
  Intron number 1 from transcript GRMZM2G011355_T01 (locus G RMZM2G011355) derived from phytozome v7.0 (chr-ID 10; pos 13635479 to 13636477 reverse strand)
ctgaacgagataaaacattttactagaccattttattatgctgttgctttctatcaataagcttttgtgtggcaagtttttgaattttgcatctttggtgtcattcacgtggcagagagcataatcggctaagctgagtgaatgtcattcttcagcaactttgaaaaatggaatatgaaacaaacaagaaataatttgtcttcttcaatgaaaaagttgtgcaagtttttttggttttattatattatattatttgtttattgatatatccaaggctattatggtgtcgtctaggcgttgagccgctaaaaaaacctgggtgtcccgtcgccatgacaaaaaaatcagcaaaatgaggcgaggcagaagagaagaattggaggaccgggaaggccaagcacttgtctctgcttctatccccatcggctctagacgctatggccatcacaaacttctgcaacatcaggcatctggcaggggcagcagcagtcagcaacccttgatctgcgatctaatggcaactggaagggatctggaaggggaccagcaccagcagtgaggcaggggagaggaagcggtagggaggaaggggttgcgggcgagcgcaaatggagaacgggagaggggcactggcagcggcaacctggaatgcttatcatggggagggctgagggaacaggtaggtcacacaatatgccaggaaggatatatgggctggtgggctgggacttagggtcttgtccttttctttcctttgtgctgttgctttaaagtttcttataatcatatggcatcttcttgcctcgctttatgatcacctaggaactgcctaggcgattggaagcggtgtctcaccacaccttgccttggtgccttagtaatcttgaatatatcgtatagatctttggtcttcagtactctaatgaaaataagacaaaatctcttgaaaatacaaatcttgtgatagtgaaatgaaattcattttgtttgtatggcagg

SEQ ID NO: 7317 - DNA, 762 bp, Zea mays
  Intron number 1 from transcript GRMZM2G056582_T01 (locus G RMZM2G056582) derived from phytozome v7.0 (chr-ID 5; pos 2 15793825 to 215794586)
gggctgctagtatgcatgtctactcgtgtccatgaaacactggtagacaaatgaattatttgatccatataaataaatttaatttcttgacgaaatcacgaaagtacctagttttgcactccattctaatgagttgtttgaatgcactagaactaatatttagttggctaaaaattattaatggaattagctagctaacaaataactatctaactactctctctgtttctttttagttgtgataatgcaaaattgactatcagatattggttccactaccttttagttagtatttttagttgttcagctattaactaatttaccaaaaatagctaattgctgaactattaactaggttgtttggatgtctcaactaattttagcctctaactattagctaagttatctactagatgcataattgctataattatacatttagatataaacactatatgtagatacatatagtaaaactaatgtatgcaagtaagtcaaaacgtttttatatataataatttggagggtgttcatgtcacagaacatactgtgtgtatgtccataatgcatggtatgaacaactattcgttgtagcgagtccatgcatgtacttcagtactttcatagtttcatttatacttatatactctagtttaggcaatgcatgcacatctgcttgtttttttctttgaaaaagaaaagaacgtacgtccatggtgacctttaggtcaagcgagagagaagaacaagggcaaaggcaga

SEQ ID NO: 7318 - DNA, 738 bp, Zea mays
  Intron number 2 from transcript GRMZM5G810727_T01 (locus G RMZM5G810727) derived from phytozome v7.0 (chr-ID 10; pos 130286924 to 130287661 reverse strand)
tgttcacccacacacacagtgagtcgtttctttcgtacatacacacacacacacactcgattggtctctttccccttcgcgtggccgggcattaacacacttggagaagaactggaaactagtgagagttttcgaacgcttgctaggttgggactgggaaacgcctataacatcggtccattactctgtttttcgtcacagcttcgaaatcttcattcacaagatccctcctcgtcctcctattattaaaaaaacaaagagaagaataaaccttcaaccttcacccgcgcccacgaaacagattcgagtggtaagcaagtttcggctaatcatctgaatgatctagctcgatccacgctacttgctgaatgaaatgataagtaaattatgtattgtacatgacagcgacgtacgcgcataaatactgatcttatcatttcattgtcacgccacgccacgcaactgctcttatccttaattatccgtacggactcttgcttgtagagggagcactagattttacactataaaacttacaggattttaaggtttagggtctattgcttttcatttttaactaaaatttattttgagtgccctaatttattgtgaaaactatttggatcgcgatccattaccgcattgtcgaactcgctcactcacgagctgcatgacaaacatcacaattaattcatggtcctgcactcctgcctttgctcttctgcaggtggaggggtg

SEQ ID NO: 7319 - DNA, 580 bp, Zea mays
  Intron number 2 from transcript GRMZM2G071172_T01 (locus G RMZM2G071172) derived from phytozome v7.0 (chr-ID 1; pos 8 8001735 to 88002314)
cgttccgggaggtcagcggtaagttttcttcactaatcagtagccacagtttccatgacaccttttttttactaatgcataaactagggtaattgtaacagtatgagcaagatagcaaaagatgtttgagttccacttcaagcttgccaaagatgtttttttttatatatttgtcgctgtgaagttcaagtttgaactaaacaccgtcgaataaaaaaacagagtgagtactattttttctgtcagcgtcaaataaacatcacctcagatgtgtataggggtgacaatgagctctaaattttacgctataagatttaaggatcggatcggattaggatcgggtcctatctctatttatttttgaactaaattttatttagggccttaacattttgtaaagaagcatttggatcgcgatatattacccccctagatgtgtgtggtttggaattagccaaaatagttcagaaagaaacagtgtgaagtactatttcccctgtcaacttgggtattgatggataattattctaatgatgggccattgtttgtgcagggagggggcattcagcaaagaggccaa

SEQ ID NO: 7320 - DNA, 1020 bp, Zea mays
  Intron number 1 from transcript GRMZM2G022926_T01 (locus G RMZM2G022926) derived from phytozome v7.0 (chr-ID 10; pos 142034665 to 142035684 reverse strand)
gtcttcgtccgggaatccaactacgatatctaccggtgggtaaagagagccatttcccctttgtctgtcgctatttcagttaatttttggtaaggtctttcagaatcgatcgcacttgttgtatgaattagatttttgatagttagttgctgatcgtggagaagcttcgaggggattaaaggtcaaatatatagattgagcaactgatggtcactgactcactcggtgctttgcatagtagatacatacaggaatagtcgccactggctagcacgaacacgatgagtgatgccagtcatgattctagaaatgaagtatgctacagtaattgtttgtttatttcacctagccttctgctgcaactgataatttgtcatatgcaattttgagaactgagaatcgataagtgaacacgtttttttttttgcttgtttctaagactaggttgtttagagggcaatgagatgcaacagtcatcattttttccatgaccgtgtatcaaggcacgctttttcctcaagaggaaagaagttttacaggtgctcttaagtcatagcttactgtccagactccaaaggagaacaggcatcaccctaacactgaaaacaattacggactatatggcacactagtttgtgacaacgacaaattcagcacatggatggggatctagtcttaggtgccaggacctctctttgtgtcgtgtctctggctctgtgccttttgcagatcagaagtttgctcaacatatataatcagtaattgtatcaacttgatgtaatgatcttgaattaataaaaccctttatttgtcaaaacaaattcagcacaaataccatatgcgagtcaccatcaacagctatgctattaattatctctgataagaacactaggcctgaattgctatcgcttgcaaatgcattctttataggcatgcttcttacactcatgtaaaactgaaaatattctttttacatctgttgcagtgaagacatcacatttgtcgacccactaaacactt

SEQ ID NO: 7321 - DNA, 587 bp, Zea mays
  Intron number 1 from transcript GRMZM2G519193_T01 (locus G RMZM2G519193) derived from phytozome v7.0 (chr-ID 5; pos 8 5023554 to 85024140)
agatattgtgctctagttgaggtaactaacaatcatctacgtgtttacctctatgcatccttttttgcaactattatgtctacctatggtaccattttgcatacaactacattatctatgcttttgatttgttccaagtctgactatgcttttcagatgtacatatcatcgcaccatatatgcatcccttttgcaactgttgtaactagccatggcaccatttatgaatccaactgttataacattggaaatccatgcaactacactatatccattggaatttcgtgcttttgtcagtaattggcatgatggatttgaatttctgatccccaagtataatggcagatgcttaaatagttattggaaaatggaaaatctttctgctagaaatgtatagggactttttgcgctcacagctagttgattggaagcacattaagtccttagctctgctagtttatggaatattgaatgcttcatttttttatacgtgtcttttggaaataaaacattgttacattaattttcctaacaatctgtttttcttttcaggtttgtgcatcaagaatactttttatcagagttcg

SEQ ID NO: 7322 - DNA, 764 bp, Zea mays
  Intron number 1 from transcript GRMZM2G403953_T01 (locus G RMZM2G403953) derived from phytozome v7.0 (chr-ID 10; pos 129352855 to 129353618 reverse strand)
gaggtgagctcctttcgtcggcgctctcagtggcctgtcgtctctcccgggaaatgcatgtagctggggagctagattaagttgcgaattcgaactaagagatcgagcaggagcagattggggatttgaggcttgttttttttaggtaggtcgggtggggcacggtacattgcatagttgtgctgaagtgaggaatccaaaggtctattcggctgaccattatagattgacaggcatcacatttaaatggatcaatggtctaacatttttgtaggaatcgtgtgctcttgggcttgactgtcgcgctaagttgaacttccagtggcatatcttattcttctatgattttggttctagcaaacaaagataaatttgggattcaagtaaagacttggctgcttccctgtatgcattgcattctgatatagataattcttttatcgtttttaccctttagcattagaactaggatctctttgggagccgtgatttttcataaaacgtatcagtgcttcaatctttggctgtctgcaatgaaaatgacctttaaattctgatcccttttttactagtcaatgttttatcgcagtatattaagatagtattcataaatcatgttacatatgtactttgtcctttgactatcgaaacattcaagccaatcatgtttggtgtgttccagagtttaggactgttatcttgcaatatttttgattgtccaaccctcaggtttcttcaccaacaatcatagttgaaagagctgg

SEQ ID NO: 7323 - DNA, 812 bp, Zea mays
  Intron number 1 from transcript AC203309.3_FGT003 (locus A C203309.3_FG003) derived from phytozome v7.0 (chr-ID 10; p os 64350779 to 64351590)
aactacagccagctacaagagatcctcctctattagtaagtggtttgggtaagaaattggaatgctcctatcattagtctatttaattctatgattaattgttgataacaagttcaatttaatcaggttagaggtagagaatgtcctaccaaattgatatcctttgtatatggccgtggttatgcctagttacagttttctttatctctagcacatgaagtagcataaatagatcattcatatgtttgtttttattagtatagttacttattttgagtctatattattttacatgcttacttgatacacaagatagttgtttgaagaacaaatttactcgtgaaaaagtacaatatcaacaatgcacagactctcagtcctacattgcaaaggcttatatattggtaagaaaataatcattgtttacttatctcatagttgaatgatctgtgaatgtgttgcctagacagtgaggtgctggttgctagggatgtgggagacgacccatgaaatagacagtttgggagggtgggactagattgtttcattgtttatcacatcactgtaacctgtaagcatatgacatatcttctaatcttaatgattgcaactaatttatttagagttaagtttgattgttttaggaatttgggtgtgttgctataatatgacacaccactgtttattggtcaatctctctataccacatgtttaggagtaggactgtaggaggtaacttagttacatttacacaattacaagttttttttgtctcagttctgcattcactagtgattttgggagtttatata

SEQ ID NO: 7324 - DNA, 682 bp, Zea mays
  Intron number 1 from transcript GRMZM2G139300_T01 (locus G RMZM2G139300) derived from phytozome v7.0 (chr-ID 5; pos 1 69454865 to 169455546)
aactggatcaacggtatgctagctacttgtctttggagatcacccctcctcccgcttgggcatcctttaattttgcgccatgctcatctaatctctctctctctctctctctctctatctatctctccctgttctcaagccacccacgcgttgctcgtgttgcttcttgttcttgatgcactagaagcgtttcaattgtggcgtcaggctatgcatacagagaatgcagccttgtgtgggagaaatcaaggaattagtattttttttttggtagactcggttgttagcacggagctcgctgcatgcagttgttttccttgtcctgtccccggaaaagtctaagctgcaagctatacattcaagctttgacagtagagagccgccggaaacgacgaaagacttgcggcgaattgagaaacgccgcgcgtgtggtggttaaaatgcaataatacagatgctctgtgtttgattaagtactgtactatgcacgacgctgatggttcttgtgctgttcgttcttatgtccggtcgtcgcaaagctttgttctgatatgcatggtgttgttttcttcctctctctttctctctctgtccttgctggcggttctgacgattgctgggacgacggcgaaactcatcggctgcagaccccaacggtacgcctttcttgtacccggctccg

SEQ ID NO: 7325 - DNA, 643 bp, Zea mays
  Intron number 2 from transcript GRMZM2G093022_T01 (locus G RMZM2G093022) derived from phytozome v7.0 (chr-ID 10; pos 98220517 to 98221159)
aagattgatcccaagctagctaatactctcattaggtaaatgacctttttccctgttcttttgatctggatttgaaacattttggtaatactatttactgtttagggattttttaataaaaattaacaagaattgagggcactgtctgttttatgataatttggctcaaataatagatggtgggatgtgctttccgttaaggaatggtgtccaggaaatgaaccaatatttcattttgaatgctaataaccctatggggtaggaactagctgtcatgtttcttgtactcctttcatttttagtctttaattctgttccatccacttggtatgacattcaatcccaatgttcttatttagttttctttctaggaaatcaatggtaagtttgatgatttcatggcctttgtttgtgatctgaatgtggtcgttgtatgtagttggcatgttggtcttctttgtcttttgaatttttgtgatgcaaacatactacatctctctcttttataagttgtgacattttttttctgggttcactgtttgacccaaaatcaactaatttctgtgataacattccaagtgatgttttaatggcttctcggctttcaggcagttaagccaggtgtgtccattggaaaatctga

SEQ ID NO: 7326 - DNA, 733 bp, Zea mays
  Intron number 1 from transcript GRMZM2G445575_T02 (locus G RMZM2G445575) derived from phytozome v7.0 (chr-ID 10; pos 144524760 to 144525492)
atccttggtttgaggaagaacaacacttcagccaggtactaattaagtttcatacttgattagcttgctcggtggtttttgcttgttcatcagtgtgtgcgtgtgttgatctttagtagtagcacgtaaggagcaagtgagaattatgttctttggcttctcttcatgtgcataataagagttaatgctagctgctgtgtcggtagagattggcaaggaaggcgtcagcactagagctttgacaaatatggctttgtttgtctcttcgttcctgctaggttgaaaaagcaagaagcaggcatggttttccgggtctaacgacacatgttagcttcccagtgtccgtgtccgtgtccgtgtccatgttcttctagctatggttcatgactattttgaactttagtcagtcatgcatgcccaatttgttgctgccttcttactctgaacgactgccaaatctctgcaaggatacaaaacgaataaccaatcattgttcttttgaactgagatgttgctctgcttttaagggaagcaaaaacatctgtattttcaaacgaaacatatcttcgttaggagtatctttttctaggaccatatcttcttccatatatgttcattcagcactaagcagcataaggctagatgctgaaccttgagattcgcgcgaaccattcagctactaagtgatcttgttttggtagtaaacgaactactctttttctgcttggcagac

SEQ ID NO: 7327 - DNA, 427 bp, Zea mays
  Intron number 3 from transcript GRMZM5G858310_T02 (locus G RMZM5G858310) derived from phytozome v7.0 (chr-ID 5; pos 7 2821072 to 72821498 reverse strand)
cgcaagctaagtataaagagccgaaagttcttgaggtgggtttcttttttggtttctactattatacatttataccccctacatttaaatggtaattagtgcaatatttcaccttttcacccctttgaatgtttctagtggtgcctactgtaatatctgtatgctgtattcttctatgaggatatgatcggtagtttgttacataatttctgattagttatgagtttatatgatgtccccatatatgtttgaaagaatatgtttctgctgctccttctgaaataatttgctactaatttgattcatctgctttcagtaaacaatcaatgttctgctggtataaacaatgctgatcctaccattttggattcctgtcttgatgatttttgcaggcattagctgcatcagggctaagagccattaggta

SEQ ID NO: 7328 - DNA, 944 bp, Zea mays
  Intron number 2 from transcript GRMZM2G523549_T01 (locus G RMZM2G523549) derived from phytozome v7.0 (chr-ID 10; pos 63628001 to 63628944 reverse strand)
gtatatttggtggagcgccactcagcctaacttaggtcagtacactctacactatccattggaagttgatgtcctgtttagagtttttaggtgaagcccgcgtctttcagatagatcaaaagacaacaattcagattacagtttggatgctctattttgcgagtgacgttatacactacgattgaaacacttgttcattacgtagcttcctttgtggcgattggatgaaccctctgtgttcatttcaatgtggctttccttagattcgttgtgtttgcttttactttgttacaaatagttgtggtaattaatcagtgacaggttgtcatatttattttttcaccaaattaatgaatgagatgaacaatattaatcaatgacaggttgtgcccctctgattatcttgtgcataaaacccttgggactattattgcttaatctttgtcctccctggataaagtaaacaaggcgatatgcatgattgaataaaatctaacgaaacaattttctaggctagtgtattgctgcattgagagcagtagataacatgcttttcaagatatcacatgttttattctgctatgtgtaattgcttcatgttctactagaaaatgaacataacatgaagcagatattccggtttatttcctttttggagtggaattactagttcaccttctaattttgttttatgcttggagcggaattaccagtttgccttcaagttactactatttatgttgtgttgtcttctctattttcactttcttcatgccctctatcctagcgtgctccattttctatcgtaccaaaatgactgtatgatattatatcccatgcaacgatccaacaactttatgataaatgaccttgctcattttttaaatctgcattttggaattgtctattccatctttatcaaaaacaggagcatcaatacttga

SEQ ID NO: 7329 - DNA, 399 bp, Zea mays
  Intron number 2 from transcript GRMZM2G168953_T03 (locus G RMZM2G168953) derived from phytozome v7.0 (chr-ID 10; pos 132553672 to 132554070)
gtgatccagttttgtctgctgcggtcaaggataaggtacccttaatctaaagcaaaagaatacaaagtactgcgtttgtgcagtttgtgagcgattctcacgcaccacagtttcaatgaggcacattacaggctaacacaactgcctctcacatttcacaaggctaacacaatagcttgaagaatagtggttaggatattagcattctcattgcacgttgataatcttaagttatgcaactcaggtaccatgttactaaagctatttgattggtaagttcttgtctgaccgaactaaccgtgcactgaattgcatagtcatatgctcatattgtaccagaaaaaatggatatgtatagttctagaagaattaacatgtccatgaaaaatacataggtcg

SEQ ID NO: 7330 - DNA, 547 bp, Zea mays
  Intron number 3 from transcript GRMZM2G168953_T03 (locus G RMZM2G168953) derived from phytozome v7.0 (chr-ID 10; pos 132554227 to 132554773)
ttgtcaacgtttcgtcaggctttggactactgagagtaagttttgtgaatctcaacaaaaatagatagaaaagtaaatgattaccgcatctcatcaacatattttttgggggaaaatattattcttgtttattctctctaatatataaaattgcacaactcttttgcgcattcgagaaaaaaaaattcttgtttacgtcattcgcttcggattaagccagctgtttggactgctgctgctgcaatctatagagacaaaaacattatagaagcagtagaagccggtacggaataaagcaaagcgaacacacatatgtagccactgtccactgagcttgtttaatgttcatttttcaaatggtgatgataatgttaattggtattgcctatttgagtctgctctttttatttcttctagggattgcatgcaatgaagtgcccagtttcagttcactcgacttgctcttgtgcacctgtaattacttaagcctgccattcgttctttctgagcagaatttcaacagcgaagaccttaggaaggagtttga

SEQ ID NO: 7331 - DNA, 598 bp, Zea mays
  Intron number 2 from transcript GRMZM2G101744_T01 (locus G RMZM2G101744) derived from phytozome v7.0 (chr-ID 1; pos 6 0869078 to 60869675 reverse strand)
catttagtcctccagtgctgccctgaaacagccatgtatgttgccaagcttgcttccagtaaaatctcttgacttgttgcctgtcatctctatgcctttgcttttctgttctctagattatgttctaacattagatcagaatccccactgtaccacaatattagtatgtttcaagtatatctttcaaccagcatttgatgcttgcatgaatgcaggagaaacaaagttacagccaattcagttaaacactcaagacacaactttctaatagtgtttcaatatatgtaatccgctgtagtaccagttgcaccctaactcattttgtgttctataatttggatctatgcatgttcttttgggtaccatactattgtgagcttcaactgcaccatgtatccttagcatcttacatgttgctttcttcatgtttgatgtaccttttgttgctgctctcacctgctctgttctttctacattatatttatctcaaaagctatgctatatcttattgattgagtaaatacgtagctgttgtgttttcccgttaggttgaattagtcatctcgtttgttgcagcccatctgtccttgttagtgat

SEQ ID NO: 7332 - DNA, 368 bp, Zea mays
  Intron number 1 from transcript AC199349.2_FGT004 (locus A C199349.2_FG004) derived from phytozome v7.0 (chr-ID 10; p os 129202349 to 129202716 reverse strand)
aagggtaaaaaaaaggcgacattaatgtacattacacgcctgttttgtttgtgggtacaatagaacaataccccctgagctttggaagctagataagttggtcacgtttgatctgtgcaacaacaagctccatggtccgatacctgatgagattggaaatatggcatcgcatcacttcaggaattggtgggatacatcaataatctcagtggttcactgcctcgttcacttggcaagctgaagaagctgaaaaatattcggtttggtcagaatcttatatcaggcaacatttggttgagataggtgaatgcctgaacattaactgtgtttggtcttgcacaaaaaaagttagagggtcctttgcctaa

SEQ ID NO: 7333 - DNA, 664 bp, Zea mays
  Intron number 1 from transcript GRMZM5G807217_T01 (locus G RMZM5G807217) derived from phytozome v7.0 (chr-ID 10; pos 24956781 to 24957444)
caggtaggtttccatttgttgccttcagagattttcctgttgaattacttcaaaaattcaaagctaaaaatgatgttttgtgcattgccatgaaaaaaatggtagcactattttgggtactttagatttcattaacatgactttttaacccaaaagactaagcagttagcattagcaaacatgaagggtctcttggcgcgatcttgtcagcactgaggttattcaatatgttctttgacttagtgttaataaaactttacatatttgtcgttagttggagcttgctccttaagacaccaccaccttgaatgaagggtctcttgacatgatcaaccagtcttctggacagcactgaggttagtttgtcaaatactttggtactagaggaccctatgttttattaaccaaaaaacaagctgattcatgcaaacgcagacatttgaaaagatccttgagaaaatattttataaaacatggttctcttaaatacaacttgtgaattgttgtgcaagttgccatacataattgtttctagattgatggatctgttgccgagtgcctgtttgttgccagtgtttttcatacactgctgtacctagaagcataagaagctgacactgatatttataatggcatctgtcaggacttgctggctcgaaacgca

SEQ ID NO: 7334 - DNA, 434 bp, Zea mays
  Intron number 2 from transcript AC226199.2_FGT002 (locus A C226199.2_FG002) derived from phytozome v7.0 (chr-ID 5; po s 144865553 to 144865986 reverse strand)
tgggtgggtgcgttgctcttgctcgtgccacggccgtgagaagactattactataatgaggaaggtcgggagaagagttttgccccctggcgccaccactttttgtcgccgatggcgatgggcatggtgcctcttttcatgtttttttttcctatggaacgaagccgccttaggccttattcgtttctgccggattggtgggtcggaacgattcctgaccggattgcttctctaatttatataaactttgattagctggaacgattccgggtgcaatccgacggaaacgaacaaggccttaggatcagttcgtttctgctgaaacagaccaaaattaattctaaatctctaaagcttatagtaattattgaaggaatccaaaccagatttattacaccccttcgttccatacaaaacgaacaggtagctgccgg

SEQ ID NO: 7335 - DNA, 955 bp, Zea mays
  Intron number 1 from transcript GRMZM2G035223_T01 (locus G RMZM2G035223) derived from phytozome v7.0 (chr-ID 5; pos 6 329780 to 6330734)
tttttttgttaacattttttaatgttttcttggagttggtattctttgttgtgattttttcagcacccggttcaagccaaagattgcatcagttgctttgggacaaatgtcttagtttagtaatttgggttttattttgagtttttgacacaacttatgctttgtttctgtacgccattacaaaactttgcttgtcttgagcatatttttctttttattatctcactgaagtggtatagacatatagggctgtaaaaaaaaaaggattttaccctcttagaatggtaagctcgagttcagactatcctcttttgttgagaagcatggtgtctttgtcgaactttttgctatgttcttagcatgtcaaatgttgttatatagtctaatttttcttgcatatgatgtttatttatcagttgacttgtttttttgacgtttccacatatctatagtgcccgctaggaaccttggtagccaggatgacagggctgaatgctaccaggtgcttgctatccttattgaagctacctggaataaccagctcaaattaggtttggttcacaagcagcttacacggttacactgtacttgaaacccccaagtttctgctgtctcagatctaagaacccatatgtgattgagaaatattatccttttaacctagaggaaattacctgaattcttatgtttagctgaccattatctcgagatcttgtactttttcagttgtcttgcaggttagtggttcgtggattgcacgtcatgcccatggacagcgatggagattcagcaaggtgcaatcatgtttctaaatttgtgaatgccatctgctgattcatgttgatcaaatctttgatgtcaatcaagcctccttttctggatggattctcatcaaggaatatccccatttctgtctgttctgccaattttcagggctctggagtcacacactgtc

SEQ ID NO: 7336 - DNA, 881 bp, Zea mays
  Intron number 3 from transcript GRMZM2G058158_T02 (locus G RMZM2G058158) derived from phytozome v7.0 (chr-ID 1; pos 2 76976042 to 276976922)
cttctttataagatacaggcaaggagaaaaaagaggtttggcccttaaatgatctgtcaaatattttgaacatttgatctcgctgtgtaccgttccatgttgagttcaacagcttgataagtgaggttcaatatcgtgcctatgtctcctatgtttaatgtcatggcatgggcacagccaagagtggtgagcaccagcggtgcaatttaccagtttaggattaggactatagtttctttgttagttagttttttagctgtcgccgttgtaagatcatttgaggcttggcttattggagtttctcttccagtttcctttactattccttaggaactatgtacatagaataagtaatataaattgttggtgtcttcttctcatgattctgtttttacttggctacagctccaaaggttgtaggattaatatatcattttggtgtcaaataattggagttagtcatttatttgtttgtgtcagaaatctggagtcttttattgctctgaatgcccaacagctaaataagggtattgttctgaatttagtcacaccttttcattaataagaccaaaacatttcataaatgtcaatgaggtttggagaagagaagaaagagcaataaccaagtaaccaacaatccacacactgttatgcttctattttttttatacattcaagttttcaacttttaatagacgtcttaactagatggcttcatattcttcatgtgcatagtaaataattactcaggggttctttttgatgaactacctgcactattcaaacaagaaacttgtttgttgctgttattggtctgtgtttgacagtttatctctaccaatgcaggattcagataactgtatcactttctgcaagtacaa

SEQ ID NO: 7337 - DNA, 541 bp, Zea mays
  Intron number 1 from transcript GRMZM2G327234_T01 (locus G RMZM2G327234) derived from phytozome v7.0 (chr-ID 10; pos 142165467 to 142166007 reverse strand)
tacagagaaaaggtctggcatttctctcttttcagtccttttcatgttgattttgttttttccccctcaaggcctcaatgctttgcagtagatactgcacacaagattagtgtctgcgttaatgcgtatgacgatccatctcattgttcatgtgcactccgttctctgagaacatctagattctggaataaatgaaccatttcaacacgactacattttgactgcacgaacatgtgtcctttccaaattgtagatgacacatgttcgtaaccaaggagcgagcccttttgttttaaaaacttggttcggctcctgggaccatattaccatttttcctaaccaaggagcgagcccttttattttaaacaagtctatgatccattctacttccaatgaaatcactaccagaaatttctctggtttggaagaagaatactagtttttgatttaagtaaatagattgctaaatcaagaatttctgttgactctggtttcttttcttgcagaagttctcatcagctttgttactacggctggcatt

SEQ ID NO: 7338 - DNA, 1053 bp, Zea mays
  Intron number 1 from transcript GRMZM2G069198_T01 (locus G RMZM2G069198) derived from phytozome v7.0 (chr-ID 5; pos 4 3147260 to 43148312)
ttcggctcctcacgcggcctcgccgagacccgcaggtacgccttcggccttcccattgggactcctccgtgactccgtctccctggggtcacgggtccgcgccgcctcagatccgggcaacccgttgcgacaccgccttggtgcggctgcggtggtgggcagttccgtggtactgcggcaggcacgccaaagacagtttctcttttctttcttccctgctgcccatggcggcggccgggcggagaaagattgaactcttgactcttctcactgccatagcagatgtatgcacgcacgcaaacgttcctttcggttgcgtcagtagcctgtaagcttggctgctcggctctgtgatcttcgttcctcctctttcgggcaaccaggttcaatctaatttcgatttggtagctaactttttcagcaagtggttgttaggtgttgttgcatttgtggtgtccgagattgattggtaaccacacgccacttgcgagcgaccctttttgactgttttagtttctcccttcgcatgcgcctgtgtccgtaggattctgttgcgtcgattagcttaggtatggggaaaaggtcgagccttgcatttcaatactacgtgctgtcatttctatattcctgatgctccgctgctgatcacacgctcaactgcctttagctctagaccgctcaatctgctctggggaatatttcatcatgtgtaaagtaggtgcccggcgtcgtcccatttgctggatcaagttaggttcaaaaaaattgaaattactacttttccggtttccaaacacatacagtgatctccactttgtcttcgatgcactgtgctctggtcgctcgtttatcttatcttcgcctgcctgtggcctgtggtggtactgattcgtgctatcctactggagaatttgtcaaacccccgctaggcatatttttcaaactcacggcacaaagctagcgtcacttggaagagtacctatataaataacacccccttgctgccttgtgcttgcagaacagggggttcagacttcttggtgagagcgatat

SEQ ID NO: 7339 - DNA, 988 bp, Zea mays
  Intron number 2 from transcript GRMZM2G113228_T01 (locus G RMZM2G113228) derived from phytozome v7.0 (chr-ID 10; pos 5731218 to 5732205)
ggagaaaaaggttggagtttcttcagttataaaaggtatgcataaatcggaaggctacttgaagagataagttattgcatatacgtttaccatgctgcttttgttgttatgccatgtttcgtttttttttgcaagcctatacctattgacgtcagcaatgcttcatttaagttttgggctttgtgttactaacttactactaagatgaagtcactggattggaactttttttctgctagcatgtgatcaatcttgccacaaccacaagtgggatcttacatggtcaggatatgctgtggcattttcagtttcccatacataactatcatttgtaagctcattttttttaattatgtttgaaattagattgcatggaaaacagctatacacgtgcctaaatcttgacttgtggcttctgttgtaattctagcctaccccaacttgtttgggaccaaaagactttgttgttgttgctgttgtttggaattagattgcattgttcttggttcctctaattgtaatggtagccaaaaagccttagcgcagtggtaaaactgctgccctgtgactaggtggtcactggttcgagtcatgaaaaccgcctcttctcttgcaaatgcacgaaaagactgagtactataaacacaaactggtccgacccttccccggacccgcgcaagtgggagcacatgcaccgcgctgccctttttttaatgttagccaaaaagacgggctcattatagtcactgattaaaaacttatatgaatcttagttcttcattctgcacatctgtgcattttttcaacctaaattcttcactgttgcaccatgaaaaataagtgcattaggtccaggtttgttgacttcttattaagcattcatatctttcatttgattggtatctttcttatgtccatgtacgataagaaacccaaagtagtcatttgcgcagttggagctccagataactgggaggcagttcttgga

SEQ ID NO: 7340 - DNA, 777 bp, Zea mays
  Intron number 2 from transcript GRMZM2G465283_T01 (locus G RMZM2G465283) derived from phytozome v7.0 (chr-ID 5; pos 1 87488373 to 187489149 reverse strand)
ttgatagtctgcaccaattggcatgtaagttctggtagtcttcaatgaactgagaacaatagatagcacatacttgactttcaaatgtggcattgttcttttgatattttggcttctaaatctacagtcgtacatgtacatttgtatttgcatatcttaagaatttcatgttatgacaataaattgagatattaatgttgtcagctttcactttataatttcagcaaaaaatatgatagcctgagaaatattcaagtcatctagctgacgaagcatatcctcattactaagggagcaaaaagaactcaagctttacaagcaacatgttgatgttcttttgttgagattggtttaagtgctgtctctggttttcgttcttctttctgactactctcaacccaaaataagtgaggataggatgcttgattacagattcataattatttttctgttacagtttgttgttacagttgacattcttttatgttcccttttccaatcattagatgcttggcaaatatattcttcttactgaagtaaaaattaatgaagttagtatccatttcagatttcaccggtgattctaataaacctttaagggcttaaataatagtaattgtcaaagcagaaacactttgaacaagttgtgtgagtgttgttctacaagatttgatattaagtgattcatatagatatagtttatcttgctggacaaataatcaatatgcatttttttatttaggttgtactgtctcccacaaccggtactctgagcat

SEQ ID NO: 7341 - DNA, 868 bp, Zea mays
  Intron number 5 from transcript GRMZM2G024811_T01 (locus G RMZM2G024811) derived from phytozome v7.0 (chr-ID 10; pos 120116557 to 120117424)
gcatacaatcagggtaggggcaaaagttcaggtaaggcactaccactacatattcttccattgcccatttgccttgtcaattgtcatatgacctgtgaaacaatgcacataggatatctctgtgaatgtcaattgtattttgtgatgcctccctggtcattattctgaaccgtagaacttggtctatctctactcgtgttttttcacctttcataggatcactgccattggttaattgttaggtgtgctatttcccttttttgtatcaccgctgttaatgtaaggttataggttgaaagttacaaagcagaacagtgaaccacagtccacagctatgatatgggaattgtacttgcatatgcccttgaataattgacgagagtaaatgtaatattgattttaagtttggttaagggtgtgtagcaaatagctttatgaataactgatgaaaataaatgtagtattgatttgaagtttgtatataaaacatatcaatggaagatggctgttgtgaattattaattgtcagcgtggaacttcttatgaagcttatttcatgtgtcatgaaccttcttttaatacactctaaaatgttacaggacttatgcatgctgttattgcaggacgttttagttattctataccttttcacgtttagttggttcgagcacgtcccattggcattgaagttatctcgtcacattaaagaaatacttcattaccatgcattcatttagtttgaatttcacttctcattggcatcaaaattaccccaaagtcatacaccttaggtgctggccaacatatttttaatggattttcttactcataatgaattttgcagttgttattgaggaaattgaagagg

SEQ ID NO: 7342 - DNA, 714 bp, Zea mays
  Intron number 1 from transcript GRMZM5G884270_T01 (locus G RMZM5G884270) derived from phytozome v7.0 (chr-ID 5; pos 1 78085488 to 178086201)
actattcatttctttttcctggtatgtacacgctttcccttctacaattcataacctaattccatgcattatacatttaagaaaaagacatgctccatgaccttgaccatatttagttgctatataatgttcttccaattttgtccattagttggtaaattttgtttggtttgccatgttctggacactctagtttgctttgctgctatatgctaacagagtaaagtagcaaactatctgtggactccttgtccaggagctcaaaggctctctctgtgactgcatcgttggaaatttgaattgtgactgcatcattggtaatttgtgttagcatgagctatattaggcagggatcttgctatgtttgttaggtcccttgggtttgggtagtggacggcagcacgggcttgttgccttgtgcgccttccccctgttttggttagttgattgtattaggcaaggatttctctgattagactatttcctattccagtgggtaaccttgcctatatgtactcgagccttgctctcaatactcaatcaccaattccctagttcattttctcaatttgaactgcaccaagtcgttttgtatttcatttttctgatgactgcattagccttatgtattcaatgtggacttcctacttaaaaaattagtgtaatgaatattcctgttcattttacccacaggtacggaataccggtagttgg

SEQ ID NO: 7343 - DNA, 835 bp, Zea mays
  Intron number 1 from transcript GRMZM2G019153_T01 (locus G RMZM2G019153) derived from phytozome v7.0 (chr-ID nd; pos 3755884 to 3756718)
aaccatctctgatacagcaggttttcatcaacctatttcttttttgcttttacttgtgttgaagagaaagaactatattttgtgtttgtaacggagattttactttttgtttttaatgtcattagagaatacatagcaaacgggaagagccgtctcaatcccaactggttgtgctctctctctctctttcttttgaattcggttaattttctattcgttttttttttttaagattctggtgtccagaaacatggaaaaatatactctgtgatttaatgtatattttacgttaatttatatttaattttcatgttcagaaaatggctagcagaaaggaagactcgtctccagcgcaactggttttgagcaatctctctctctctctctctctctctcattctgttaattttctatttgtttttagaagattttggtgttcagaaacagggaagaaatacattgtgatttaacgtatattttatgttaatttatttttaattttcctgttcagaaaatggctagcagaaaggaagagccgtctccagcgcaactggttttgatcaatcactctctcttctttttccgcttctattaattttctattcgtttttcgaagattttggtgttctgtagatttagcggagattttacgttaattccttttttttttcttgcttagaaaatggctatcaaaaaggaagacccttctgtattacaacaggcagttttttttctttccttcttttcttttctggtttacattttagtttttatgaagaaattggacttctttgttttgtttttgattgtttgggtgtaatgttgtttgcagagg

SEQ ID NO: 7344 - DNA, 638 bp, Zea mays
  Intron number 1 from transcript GRMZM2G045507_T01 (locus G RMZM2G045507) derived from phytozome v7.0 (chr-ID 10; pos 71159525 to 71160162)
aggtcgcccgaccatgccctcttcctggtgcccctgcctttcaataagatcaacattcaacaagatacacatgacttcgattcagtattgttgttttttattcgattgacagattgagtatgagattgaatatttggattagattggaatattcacttttggttgtgaattggagacatattgatgaaactgttgcatatctagcattaagaagataaattgatgatgatatcattattagatgattgatgatgagatcttcaaatccatcgattatttcgacgatttcaacatctcaaaactagaaggatgcatttgtctcggttaacaaaaatttagtgatatgttttcttcttttgcttatatagttaccttctttaaacctatatcgtgtattgatatgaaacttagattctatacaacattagttttgacggtcttgcttgattttgtcgtgtggtctttttgccccccatgaattctcatcctgcgtctgccactgttcgtgttagatgttgaattggaataaaccgataattttgttttctttataggcatacaattttgctattcacatgtttctgtggagaatggcaaagaaattccagtaagttcctttcatttctttttaaatgcag

SEQ ID NO: 7345 - DNA, 643 bp, Zea mays
  Intron number 4 from transcript GRMZM2G147814_T01 (locus G RMZM2G147814) derived from phytozome v7.0 (chr-ID 5; pos 7 857111 to 7857753 reverse strand)
atacggtcagtagatatcttcgagatatatgtttccttagtaaattaactgtgaaggttataaaatatgggttttctttagcttagaaatccgatagtctgatagctggttgtgtaagtacacgagcaatcccatcatgctggtgttactggtaagttacttgcatcggaaatatttggcactagtatttagcatgtcaaccaggcaaacttctagtaaacatcatgaggatatggtagtgatgaaatgctgaatcatgaagtgacagctttcagatttatcaccttgacatcttatcaacatgttctattggaaattgtgatcataatcacagtattggatgtggatgtatgctttgcactagaaaataaaattaattatgcaggagtggtgatttagtggtcaaaggggcaattgagttttagggtacgcaagaatttgctatatatatagaattctagatgcataacagaatggatgtagcgaaaaagtcaaagcggcttagaatttggaacgagagggagtactatttttttcttgagatgttgatgcattgatgctgtgttggtgtaaatgccaacacttggtgctcttgcaatctgtaacaggctgctgggagttctcagggtattagtggcggggc

SEQ ID NO: 7346 - DNA, 969 bp, Zea mays
  Intron number 1 from transcript GRMZM2G463291_T01 (locus G RMZM2G463291) derived from phytozome v7.0 (chr-ID 5; pos 1 89810019 to 189810987 reverse strand)
ccgggtcctcaggctacggcaactacaggcaccaggtgagcgcgataccttacgggcgtgttacacgcgctcatggatgcgtccgatgttcgatttttagcgagaggagcgtggtgtaatactgttgttgcgatactgcttcgtcaggttcttgtggttcaaaaagcgcttctgaaattattgtcgtcgaaccgtgaagttgcacttttggatatcagttcttttttcttggtggtggggggttcgtaagctataggatgctcgggttctaagttctaacatgacatcctgagttaagttagttgtgggtccaactaaagacctaaagttcaggaaagaacagttcggctccaggggtttccactttccgcgggtttaaggatcaagggagagtgcagctagaatagaagtgacaaatgaaagtttgggacgttgttgtagtcttttcatggatggaaattgtttaagcaacaatataattcaggaacgtgaagggatttggaactttgcaagttttggtttttttttttgcagtggatggattggtaccaaattttgctactgtctaaagagatgcataagttggcaagaacattagatgacagttgaaagaacagataaaatatttgatggcaagtgcttgtactttgagtcagtaaactggaatatgcaccagtagctaaaaactcttctgaatatcatctttcttgggcaatgatctccatgttctttttttgccttgttttgtctccttttaagggctagtttgggaacactaatttctcataggattttcatttttccaagggaaaacgaactaatttcccttgggaaaatgaaaatcccatgtgaaattagtgttcccaaactagccctaagtagggaacagtcatcgtagatcagcaagcaattattttccatggtgctttgctcacagggttcatgtgactttttgttgcaggctgatat

SEQ ID NO: 7347 - DNA, 827 bp, Zea mays
  Intron number 2 from transcript AC235534.1_FGT005 (locus A C235534.1_FG005) derived from phytozome v7.0 (chr-ID 10; p os 136857489 to 136858315 reverse strand)
gacaaagctactgataaggtcatttatttacttaggtgctgtttggttcacatatttgtaatgtaatagataactgatgacgttacatcatgtttgtttaactccaactaaaatcagataccacactagaaatttgatatcggcctattcaaaacttattaccggctggacgctggtactcgagcgtgaatcattaccgttgcccattaacgttacatttcgtgaaccaaaacaacaccttagttgctctgcatggaatggcattattaactgtaaacatgatacagtttccacatattaagatacatcttgcttttactatttgggttagcttgtgtacgagagccctatttgaatgcattagagctaatagttagctgctaaaattagctacatacatccaaacaactcaactaatagtttagctattagctacttttagttggagacatccaaacacctctagctaatagtccagctaactattagctataccctcaactaaccattagttatttgctggttcaacctagctaaaattagctaatagttatccagctatttattagttagctaattccactagcaagtttttagccaactaactattagctctagtgcattcaaacgggccctaaggccctatacataaataaatagtttcatagctatgtcattgtgttttcttctgcatcactgagtttttattggtccattcaaggaaatttatcaaattaatgctatttattttttgtatttgaactattagagtttttttgctcgattatctacccctatgaaaacactcaactcacaggataagtttt

SEQ ID NO: 7348 - DNA, 749 bp, Zea mays
  Intron number 1 from transcript GRMZM2G161435_T01 (locus G RMZM2G161435) derived from phytozome v7.0 (chr-ID 5; pos 1 52405467 to 152406215 reverse strand)
gagggacctgctccctggggggtgccctttttgaggtttgtgtgttctttgcctccctcccctttaattttcttttaatttcccatgtcatgcattgttgcctgagaagtgatggcgtctcccgctgccgtgccctgcccccctttgctatcctgctccttgcaggcgttccatttggaagtgttcatctttccattttagaggacgtccatggggggtcatggggagctcaatcttcgagttttgatatattttttttcttgacgtctgccttggttcttgtgttcgtcttatattttatcgcttctgcttgctgtctcctctcaatccgtcaatctttgtcctactacttgtttacttccatcgaggtccttggctccttgcccattacttgtctgtttatctccatcaccgataattacttcgccagtcattgcacttacacacagtgggtttatctgttcatgcactttcgtatgcttgaattcagtttggctctatgtgccttccaataatgacagtagtagttatcaaaccctcctttttttccttcccaatgaatcatttcgcaatcaccatggggatctttttagttacgcggctcgtcttctcgccttcttttttctctagtgctactgccactactgatccgacaggaaaaccgcagagaacaacgtgttcagagttctaactcgtgctgcttgctgtctgtaggcgtgctgaaatcactacaaactttacaagattcc

SEQ ID NO: 7349 - DNA, 815 bp, Zea mays
  Intron number 4 from transcript GRMZM2G401603_T01 (locus G RMZM2G401603) derived from phytozome v7.0 (chr-ID 5; pos 1 74662156 to 174662970)
ggacggacgtcatcaggtttgatctctcacccagggtaagctcaatgttcctctttttattagctttgaatgtgatatgcatgtgtttagctaaatgtttggaatatgatcgctactggttttttgtgtgtttaatcaagtggtcatttagttttgagggtgtagggactttaggatctatttgtttgtcaatcggagcaaagaaaatcataattcaaatttgatttctttgtggttctttaagtttttctttatcctaaatttagtcaaaaaatgtgttgttataactggctggtgagtctggtaatgtcttctattttttcatcaattcatgttaaaaaccatcaagatgcaactagaaaaattgccccaaggcatatccactcttctacttgccaaaataattataaacttactcctcactttttacattcgacgcatgagagaaatgttgtgtttttatttggctgtatcattgttgccatcacggccgggtaatacgtaggacaaagttagtatggagcgactctgctccataagcacatatgattagtggacgctgccctctgtctttggctagctccccaaaccatgctataaggtccactttcatttttcttggctatcgaatttaactttgttcatttagtgacatgttgtttgtgatgactgcaacatggagctatggtgattcagcaaaagatgctctattacaaaagacattctactaattataactatgtatactaatatatatttcctttactacatccttttcaggatcataggaccaagaatagagtgccagcagttgc

SEQ ID NO: 7350 - DNA, 493 bp, Zea mays
  Intron number 2 from transcript GRMZM5G818728_T01 (locus G RMZM5G818728) derived from phytozome v7.0 (chr-ID 1; pos 5 2226539 to 52227031 reverse strand)
tggtggattgtgggcagagcttgtaagcaacagaggtaatgggaattcaatgcctaaggttgaccagcagtccagcactttgccagaagcaagtcatgatcaatttgatcctctttttatcttctgttgacaaacaatttgattgttttatcatcagagcctactctgtatctgtaatgacttgtggataatattcaggaaaattacttcatgatggtactgatgatctctgtttgtgataatcatactggtttgtgtagattgttaaaagcagacctactagatgcccagagcttattctattgaatgtctccatcaaaggagctaacaatcatttatagctactttttttgtagcagagatttctttgtagatcataaggaataggatctcaaggatgggctctagattcagtcttaacttttatcattccttacaagttttcgtttctgttacaggttttgaagctggtggttctaatactccttcaaac

SEQ ID NO: 7351 - DNA, 892 bp, Zea mays
  Intron number 1 from transcript GRMZM2G078396_T02 (locus G RMZM2G078396) derived from phytozome v7.0 (chr-ID 5; pos 2 15478665 to 215479556)
tcgaagcgaggtaattaccatgcccccttctcactcgatcttctcgtgtatctttcggcgcttgtgctgctgtttttaatcgttcaggatatatgctgagaattttttctgatgcgcgacagcgcgagtccttgtatttggaagtcatcgtaaacaagtagatcatctgatgtcgcagaaaatgggctcgggacgagtgatctttttacacgaattattctgaattttgatgccacgatcatgagtttgatacgtagttagatctgaggttagacgttgagctttgtggtttagatgttagttggtttattacggatgtcaaatctatatatttgattgcagttctaatgcttcaagtgtcacacttccttacttgcagttgcagtcagatccacacttggattgaaaaatgatgctatttattagattattagatgactggtggcagctacgtttagccaatattgttgttaaatgattacctgctaccaatcctccccagtgttctctttaatgtgtaaagagttaatcgaattgtcacatgatgttttcctcttttgtatgcgaagagctaacctggttggttttaagtgaagcccagcatatcacatttctcagcctaggctttctgtattttatcatttactcctacttaggtttctctattacttgacaatcagatgaaagctctctttaaacaaacttggcaatgtgtacaattcatttcacatctatatgctttaaatgctgcttgttatctatagttcacacttcacaatgatgcattggagttctgcttgtgttttgaactgcagggcgtggaggttcggctggtaacaagttccggatgtcactgggtctaccagtggcagctactgtgaactgtgccgat

SEQ ID NO: 7352 - DNA, 660 bp, Zea mays
  Intron number 6 from transcript GRMZM2G087692_T01 (locus G RMZM2G087692) derived from phytozome v7.0 (chr-ID 10; pos 30194708 to 30195367 reverse strand)
ttgatcagtataccgttagatacaatagtttgtagaaaaaagaaagcttcagtttctgatgagtgttgtgtattgttcatcttcccttttccttacaatattacatgatggtagaataaacgtgtatttcgacttgtatgcctggcttttgtgtggttgatgttacatctatcaaaaaaaaaaactcgacctgcggggggttagacagcccccggatattgtattaagaagaagaccttttcacacagaccgagaaaaccctcgaacccctgccccacccatacacagcggcatcgaagcccatgtgagaacgaccacgaccggggctgagccttaacctatgctttggcgtgggacagacgaggggattttttaaccacaacctgaaatttgctcccacggggagtcgaacccaggacctgaggaatgctactcagaccacctaaccaactcagctagaggccctttcgctgttacatctatcaagataacaaatagttattcctgtatttaatttagaaataatttgctataagagttcattcaatatcaacgaaatacactgattttgattatggagatttacgagttacctacccatgctgatggttttgctacttctgtcaactagctttggaacttgttgaacatcttagagca

SEQ ID NO: 7353 - DNA, 848 bp, Zea mays
  Intron number 3 from transcript GRMZM2G178082_T01 (locus G RMZM2G178082) derived from phytozome v7.0 (chr-ID 10; pos 77178132 to 77178979)
taacaatcccttccattgctatcattggaagagaggtagttactcagccaatctgcatttccacttccaaagtatttagtgaattcatttgttcattgtattttttttgacttggtgaggaatcataaatctggaaggttcagagtgcggtttcaacttatgttgacacatgtttatgtgtcattgtctgcttagttcacattttgtttatcccttaacattacaattgccagcctggtcattaacttggtgcttgtagtatcagttgcatgcatttgtacacactattatatatgcttataactttatgaaatggaaaagtgttttggaatctctaccaccttggagccagtgtggcttgcctctttagtatgatggagtcatttcaccatgcagtttattttttggatgaacactaactacatcttatctgtatatgaccccgatgtggcatggcatttttgcctcatcccgagacaaatacattgttggtagcttatggatttccagtaacgagtagagtagcttcgatctgggtttagggtcgcatgacttggtggctacgtacatctctctgtttttaatagataatgaagtcaagatttgttgcgagaaccaaaaaagtacgctaatggttatgaggtgaataaagtaccctgctatgagtttgagataattcaatgttgtgtgagaaagagcaaaaccttgacgaggattcccttgtatgagataatttcatgtgattctaaactgaatggttatactctctcttcttttgatttggccacttctattttctctgttttgttatagcatcaagctgatttgtgtctaatttataggaacga

SEQ ID NO: 7354 - DNA, 593 bp, Zea mays
  Intron number 2 from transcript GRMZM2G060257_T02 (locus G RMZM2G060257) derived from phytozome v7.0 (chr-ID 1; pos 8 0501527 to 80502119)
ccaacttcagaatcgaggtgaatatggctttgatatcacatttactaatatttgtctgttcaatttatgccagttttctgaaaacaaagatggtctgttggcattaattgcgatggaatgggctgaagatatttactcatggtgtgattgatctgttccttttctttcttaacttagcacgtcattgattttatattcagctttcgaaagtagtgttactttctccctataatgatttatatggatgaatacctggtctcataattgtaggtatttattttaagatctgcataagcttttttttaccctggaacacaatagatgtgaatgcatacatgttgtcaaatgttaggattgagtaattgagctgattgtctctcttgaacaagagaagtagcttcctgcctcttgcacaagaggcctgcatctgttttgcaatattcatctatagaatgtttagaagtaatccaattcaatatttctagttcaaagtataggtgatatcatattcttggaagtcaaatatctgaccaatagttattgtttcttatcatgcagattccagtctgtagcctaccttcagcaaatctggt

SEQ ID NO: 7355 - DNA, 703 bp, Zea mays
  Intron number 1 from transcript GRMZM2G426847_T01 (locus G RMZM2G426847) derived from phytozome v7.0 (chr-ID 5; pos 1 64330548 to 164331250)
gcttctcaccttttcaccggtgagttcgatctcgccctctctggtctcttcgttgcagttgttttgggttgagtctcaactgtggatctcccgggaattaggggcggacctgcacgatgccgtgatccgcgttggattgaattggcatacattagaaatgaggtcgaaagtcaagtagaaatgtgcaaatcagcaagaaagattttagtttctgtttggttagtatagctctagccattgaagcgactaccaccgtatgctggcaggtaggaacgctcagtgaattttgatgtagcttagtgaaaacttgtgtgcatactagtgtctactcactaatataacatcttgaaataccacaaaaactggtccttctagtttcatatatagagctacataaattgttgaaatttcattgaatgtaaataaagtgtttcaatgtagatgattcacaatatattttaaggagcgacttgaaggttcttgtcttgtgaaacagtattatttgacccttattgtaaatatattaataaaaagttaaaagagagaattcatgtacttaaaaagaggaaaaagaaaaatacatgtcatctgatcaactgacattaccttaaattttcttaattgtaaaatgaaatcaagactgagctttgtttaaggaaaaaagtaagattacaatttaacccctataacacctgcagtcatc

SEQ ID NO: 7356 - DNA, 753 bp, Zea mays
  Intron number 1 from transcript GRMZM2G086116_T01 (locus G RMZM2G086116) derived from phytozome v7.0 (chr-ID 5; pos 2 3891719 to 23892471)
aagacggcgtctcagcttgacgccgtaggctcgaggtactggttttgcttatcttcatatctcctctggtgaaccattcctgtagactctgcttggagctctggcggtctctagggtttgttctttgttttgttagatcgcatgcggggtgttggagtgattttgggtgcttcattgtttacgttacttctactattatatcatgctgacgtaactattctttgattattacatgtttctggaaaaaggaaatataaccaattaaacattgctgtaaaaatgactaacgcagtaatgctgttgtgaacttaatctgccttgtatttgtttgccttattgcactcgattgcctttctcttgtgttttctatgtctaaggccatgttttaatgcactagagctaatagttattagctggctagatgttactagtagaattagttggctaactattagctgatttgctaaaagtagctattagctgggctgtttggatgtctgcatctaattttagcaggtaactattagctctagtgcattcaaacatggcctaagtgtgtgatttgacatttttctttatcctttgctgctattctctgtttacccacattacataaatgactcacatggcactgtattggattcagcactggcatgattctaattagactttatctattactagcatcctcagtgagcccttcatttgtttgttccagctcccaagactggaaggctcaactaaatataccag

SEQ ID NO: 7357 - DNA, 918 bp, Zea mays
  Intron number 1 from transcript GRMZM2G029101_T02 (locus G RMZM2G029101) derived from phytozome v7.0 (chr-ID 5; pos 4 765859 to 4766776)
cgctcctcaccgtcaactcctcctccttcgacccggtgagctcctccatcgccatgttaaaccttactaactgcgcttgtggatttcgtatagttgccaaaagtttgcgcgaggtgtgataggaattgtgacgcaaaggatcgatgattcgattccctctataattctcttataggataaataaatttgggaacggtattggctcgctaggaaaataaatttaggttgattattataattttccaaactgcgaaggaaaaccgagtaataagttagttatagaagaacttgtcagaaacgtaggtgaccacggccagcttggaggggttaagctgcctaaccgttgagctggacgttgtagttgtctcacgtcccatcggctatcgacatgttgaggtagcgccacttttggacgcatttgtgtagctgaactggggcaaggcaagctgtcctttgaagccgggacacgcctcgtgtagttctgtggtccgagtgttgggttgttagcattcacgatgcaatttattcggaagtttatgagcgtcttgtcttcacagatttggaagctcctgttctatacactcctacttaattgatttcgtcaaggaattggttggagctggtggggccgctctataacttttcgtgtaccaggagaaacacagcctctactgaagcaattggctttgcataaatctcaactcgtgatcctgggatattttttcctgtcttaattcaaaggcagagctcctgccgcttatgtaaaaaaaaatcatggaatatgatatgtcagcggaattgtgaactgcatgcggtcgattgctcttcttagatgatcgaaggtgtacaattgaaatcacatctagtgactaatgcacaacccttttcgccctgttccagtcttcttctggtgtgtac

SEQ ID NO: 7358 - DNA, 820 bp, Zea mays
  Intron number 1 from transcript GRMZM2G585540_T01 (locus G RMZM2G585540) derived from phytozome v7.0 (chr-ID 10; pos 26311899 to 26312718 reverse strand)
actgcgacaatctattttctatccacgatttgaaggtagaagaacggtccaatttatttatatgctacctcttatcatctacgtttaattttgaactaaccactacgacaattttttcccattctaaaatgcacatgtgagactgaaataaattaaatattaatttgttaacttcataaatttatgttaaacatttgaaattaatgtttttgataattttacatgttttcataaataaattcgaattatgtttgctataattgatttatgtgtattcaatatctaaataaattaaatagtatcgagatagctatgtgttaatgtgctgattagttgaattgatagttgcagcgatttaattatttttgtaaattaatttgttttgtgtttattgtaacgtgtagttttaaattaagaaattaaaaagaattacaaccttatgtttttataacaaagaaaataagagataattatttataatgacgtatgtatacaaaaatataaatttattagctaactcttctagtctagctttatttatgtgtaggtccctgttacagtataaaatgtatattagaaacccaattaaatagaaatggttttgttagtttaataattatgtgttaaacaattttaaatagtatttttaaacggttcacatgatttagtaaattaattgatttatgctgttataatcattttatacatagttttccaaatatgaaattaaaaaaaatggtagaccatcttttcgtaaataaaaacattaggtaaataattatatgttgctcataaagtgtgattcagatttataatcaaa

SEQ ID NO: 7359 - DNA, 845 bp, Zea mays
  Intron number 1 from transcript GRMZM2G114182_T01 (locus G RMZM2G114182) derived from phytozome v7.0 (chr-ID 10; pos 142329481 to 142330325)
ctccagccgatcttaaggcgcctgataagacgacggtaagataacatgtccttggtgacgataatcagaccatactatccactactaatggccacttagggcttgttcggttctaccccaatacatatggattgaaggggtttcaatccctagtaagtcaaaatctctcacaatccgtatcaatcctcttcaatccgtatggattgaaaataaccgaacaagcccttagcaacaagattgttgttatgggtttcctgtttacgatgcttgactgatgccccttgcaatagctttgctaaggccctgagatacacacattttcaactacttaaaacatttagcttccagtacctgtcatacacacatttccctgagggacaaaaaactgctctagctgaacttattttatgtggtgtttgtcatgctaatgaactattgttgactaaaataaatttctagctcttaaaaaaatgttccaagtactttgtgctgatcttcatctctctcatatcctggttatatttgtttctgtgtatacatagtatgaaaaatcttactgtgctgcgctgtgaacactgcagtgcattttaaggattggtttgttggggttatattggaaaatcaaatgcagttttcagttcctggtcataattatttgcatccattgcattaataaggttatagaaaagggtagagattacaaaactaccagcaatgcttaatatatttcccacactgttattcatccttcagctcttgaagtttacaaaaccttttcttttgaaaaatgaagttccaaacagatcactgatttttatcaatgttttttttgcaggtacacggtg

SEQ ID NO: 7360 - DNA, 707 bp, Zea mays
  Intron number 3 from transcript GRMZM2G017789_T02 (locus G RMZM2G017789) derived from phytozome v7.0 (chr-ID 10; pos 134415982 to 134416688)
ctacttccagaatcaagttaggtacttcctttttttcctcctaggactttgagctcttaattaacatttcacccatgacatttttatgtcttagaatctccaataagggagaggcattttgatgaaactcaaaacatatgttaaaactagtcatatgctcgtgcattgctacgttttttatatatgacataggataaattttgttttaataaaacacaaaatatatgttttctattgattaggtgagtgtgaatgtggagccaacaaccaaggttcaaacactcacttatacataatttcaacttatttttttacataaactctcttattatagtagtaaagaagggattataggagtgtggattgattctaaataaatgtagggatttttttggaaaatattgacgtggtacgaccgttgcaactggtgctttaatatagtatagaaattaattaccctaagcaatcccactacactaatttagcagtcggactgcgaaaggcatagcaactttcagcccattctctcaccaatagtaatttgcattgtctgtaaaaaacaaaaagtaatctgcacgatcctctgaaagtttcatatgattccttagaggacgttttttagtatagctatcttccagttgtgagatcttattaaaacttttttctctgcaggtgaggggtcatattttgatagattttataaacga

SEQ ID NO: 7361 - DNA, 673 bp, Zea mays
  Intron number 1 from transcript AC185313.5_FGT006 (locus A C185313.5_FG006) derived from phytozome v7.0 (chr-ID 5; po s 13473587 to 13474259 reverse strand)
cagtgccgcagcagggtcaaatgcacaaatcacttttttttcaaaacactgatctgataaaaagggaagagagagagagagagaaaacacatctggagaaggctaggggatattaacttgtcaacttgcataaaccccatatataggccattgcaagtgctaagatcataagaactaacccatgtggcactacagttttttatttagaatttgcatagatgacatacaatatatgtcagtaaacaggtagattgagcatctgtgcaagaaagagacaatatattttatggtcgggcgaattttattgtttatcctataggccgtagcaagtgctaagatcataaattatcccatgagatactattttttcgaaggaagtgaggacatttctttcattaataaccttaatttacaaaaatacaatggacaaactaccaacaagtgaggacatttctttctttaataaactctgttatgcatacttccaatattgtagaacttgagaatcaaagccctattatgcacatatgctgaatacaaaattcattctttttcctgaaccctccctaacacatagctataatacttaagttgtctctactaggaattgtataactaaagaataacaaatcttacagttcaaaaggctggtgaggttgccgaacagcgccgg

SEQ ID NO: 7362 - DNA, 1009 bp, Zea mays
  Intron number 1 from transcript GRMZM5G803874_T01 (locus G RMZM5G803874) derived from phytozome v7.0 (chr-ID 10; pos 138486479 to 138487487 reverse strand)
cttcagctgctgctttccttcccatccttcaacaggtctgtataatcctctaatgtgtccggatcttgtgaagtagctactgattgggttaagatgaagcattgtgttgttcatttgttgtttgctgtctgtcgttcctggaaaaaaatgttcgtaaatggcggagtttcgctgcaagattgcgccttgttgcttcgcatttgttgtccaatagttgggatggagctaattaaactgagctccttatgctaaagttcgccttttattctgacacttgttgtaagttcgcctaaaatgcggaaggcatgtctataggaaaagttactgttaggttgttctttttataggtccatatgatgatctatctgtagaaatgctttcaagaagtgaggctctgcatatgctttcttcctaaactctaagtatactgccagcagaactaagataacgaaccaattgcttatccccagctagctgattttaatggaaaaaggaattcttgccccccttttgcagatttctttagtatttttgtttttggatcaaaggcttttacctagctttattagaaagcatattgctcaaaccctgacccagcactgggtttgccagtaaaaaacaaacaaacaaaactcgcataccagcgtgcaaagcacttctagttaacccctgctcacagatttctttagtttctcactgaagctaacactctataactaaacaagctgttaacatggagcatctatctctcgattgatgctggcaatgaatttatgcactgtgcattatgttgttataactttgcgaaagcaccattggtacagttgtaagatgtggaagtatagctccactcactatggctcaaatcctagtgtgcacatattgaagagaggtaaatggtggcgtgtacctctagttggtgcagaaggtggatataccccctccaatattttgtaaatttttttataccttttgcttgttcttaatgcaggtgcaatttgcatttccc

SEQ ID NO: 7363 - DNA, 1037 bp, Zea mays
  Intron number 2 from transcript GRMZM2G057412_T02 (locus G RMZM2G057412) derived from phytozome v7.0 (chr-ID 1; pos 7 7250604 to 77251640 reverse strand)
gagcatattagctcgcaggaattcgttcttgacaagtacgtcgacgctctctatgagaagaggtgggtgcctgggtggtcctattcgtagtctagcaccttgctggttgctatggctgtctgttagtcaggtttgtgccagtagttgattgtttggatgtgcagactgttaatgttcatgcttgcttggttagcaacttattcatgttgttgctgaaacgtcaaacaatgcacaacaacttacttcggaagtgaccgcttcatatatattgacaacacaactgatagccgctacagtacattttctcctggcactaactccacacattgcctagtttttcagtcgacgatcctagcaatgtgtgttagggggtagaaaacatcctttactccctttgttctcgtgccaagttttctcttgtcttgcgcgaaattcggtagtgtggcaaggtttggagtcatttgagtattacatttctacatgctggaataggcctcatgcaactatctgtaccttacctttatgcttttcacaattacagaactggctttttgtttttttataggtgttatgaatttgtcaaaatgctcacagatgttggacttgatcgagtccttgccatatttgtttaagattgatgaactaatatccattgaccatgacatcaatgttccctagagtaaatgcatcaaaagtcggaaggaatggactttcagtagttctatttgatgcttatagtatactgaaggtttcgtttgttctcatctctctgatgttttttctttcattctcaacaacctacattcactttatcacttaacaaggcactttttcttgagaataataaaatgtactcctttcactatcatcacaaagtgttgcttgtgggctttctttttgtaatatccgcctgatgttgatcagaatttaccaattggtgatttgaatgaccaaataacattactaaacactttgttactgtaacatacatggctgatgcaggggatccacaagagaggaagcattgggctctctta

SEQ ID NO: 7364 - DNA, 871 bp, Zea mays
  Intron number 1 from transcript GRMZM2G458087_T01 (locus G RMZM2G458087) derived from phytozome v7.0 (chr-ID 10; pos 110204057 to 110204927 reverse strand)
cgcccatcgactgcctcgtcgacgccgccgaccaggtggctgtagtcactggaggacgaccgacgctgatgaaggggagagagcaggggagcaactcaagcacttgttgtttgacagactcgaggtaggagctagccacggaaagggaagaagcagaggcagtgacaacggttttgattggccaccgcctcttattgaagaacacagctgcggcgagctgggatggatcaagcacttgcgtgagagttcttcgcgcagagctggagtgctacttccagtattgcttgcagctcgaggagttgatgagatgcaaacggcaaaatgcccaaggtgatttcttgtatgctatgcaaacatgcataaaacattgtatataggtgattcccattacgtaattaggctatatggttcgttgctagctacatagtacaaataaatcaactgggttctctataaatcaatagtcatgagcctggggttgtgttatccacttttggttaatgacaagtaataatcttatcataattagctagtgttgtttgtcaatttttcatatatactcgtgctaatgatatttgttgcttcattctttacaattatgagacattttatatttatatatatatatatattttggttatgcatatatattggtttttagtgtatatatattatttaagtacataacattaaaaaccaaaacatctttgagtttttctttggcatatgctatcactttagaactgtaattaaccagtgcttactgctttcaggttctctttccagatcacaatttaattatttaattttttgtttattttttttatcatttaaagattctaggagttgggaagaccacttctcaacaaga

SEQ ID NO: 7365 - DNA, 896 bp, Zea mays
  Intron number 2 from transcript GRMZM2G029039_T01 (locus G RMZM2G029039) derived from phytozome v7.0 (chr-ID 10; pos 142791807 to 142792702)
tttcccggatctcgccggcgccgcgtctcggcgaggtgaggagtggaggcgcctcaattctctcgtgctcaccttttctcgttcccgttacaaagtagtgtgctgtttttttttgttttctgttattattattattattttatccttttgctcggtacagagtgcgtgcaaaccgttgtggcgagctgccgaagaaactttagcattcgatatattttatttttcttcagttctgagacaacggataacagaaatgtgcctagtaaacggctctccgtgtttctccggcgaagcttgtctacagctgtatgcgcatcaagcgttgttcaaccaggaatcaatcgagttggcattgtgttggaattttttttttatcttgtggcagctgttatgttgcaaatgtaagcctagtcatggtaacgactcatcaagtgcttgctcttgtgtgatttattgggagattggtatgatatttttttgcctgattgaattaggaatctgccgtgcaacagtattcttgcagcctttcatactgtttgcgacaacgaaagaagagtagctttatctcaaaagaaaatttctatgggagagtatctttgagatttttagcgctgtactttgtaattttagttgatttcggatacggcaaagtatgagatcggcgacgaagatatttcttatgaatagttcaaatataaagttgaatggctacctgtgacctagtatctgtatctgccatggaagtaaaaaatatcgtgtatctattacatactctgtttttagtccacgattcctgtgaatcttaccaaatatcatgtaacattacgcattttctgaaagtttgtctcttgatttttccagagggggcctctggcctttctgacctcaggccctcg

SEQ ID NO: 7366 - DNA, 974 bp, Zea mays
  Intron number 1 from transcript GRMZM2G078379_T01 (locus G RMZM2G078379) derived from phytozome v7.0 (chr-ID 5; pos 2 2749688 to 22750661 reverse strand)
gtgcaaaggtacccaacttttaactcatgtttgtgctttccacttcttcagctagagaagcgccttttacacagatatttatagagaatgttaggtcccactcttattgaagaagtaaaaatagttgaataaatattgctactggccgtctggccccaagctttacttaagcttcatttcgatccctatactttcaaaattttcgattgagcctttcatccttcagtatatggttaaatagatactttcagccagcaggctgaaatggcatcaagaagtcgtaaattggcaaaggcaacagccagtccgtaagttgtgctaatgttggaagacaagtcttgatagttgataagggataatttggcatagattatgatttattttcttattgatatttttccacaacgattttcttatcttgctactgagccatgtttttgtgtcaagatcccttgttattctgcatcttttacgctattttcaattgtcatatcaaatgccatgcctttcctgaggtttttacattagtgcttaaaattttgctacagggtattgtgcgtatgctgttggtaccttttttagttggtttatccagtgtattagctttaagtttttggtatgggtagccttggcttcaatttactgcgcaaaaaaatagttttagattgcaggaatgttggataatgtacgtggagtaaaaaactggtatgcctttaaactcaaaattcaattttgacttcattcacttggacgaactggatactgtgatttttttataagtcaccctttaactaaatagacactgatcctgatacatcacacaactgtattggctgggcttttgcttttggcagacacctgcctgaaacaagcagtactactttgttggcatacaattaccttgagcaaataatagttccatcctaggtctattgatcatcctatttcgccctttcaggttggtgttgattttg

SEQ ID NO: 7367 - DNA, 919 bp, Zea mays
  Intron number 1 from transcript GRMZM2G026580_T01 (locus G RMZM2G026580) derived from phytozome v7.0 (chr-ID 10; pos 125969127 to 125970045)
ccgccgccgcctccgtgcgcccaggcttctttctggtaagaaggcgtcctccattgttcctcgcacgcacattcttcgcttttaatcccgacggtttcccctcccctctgttccggacgggggtctcctgccttcctcgctgcgcgtctcgttgtttacttgctccgcgcgatggatctcgtggttcattcgcaatgccgcgccactgatttgtgggcggggtggcggggtccgttctgcttctgatccgtgctcttgcgatgcgaggagctgaacgacaaggattgcggccggtgctgcatctatacgaggtagcaggaaaatggccattgcggttgggagatgtgtgtgcccaaagatttttgcaaccttcagtgatttcatttgaggttccaagaggggttcttcgctgtcgtttgacggttttatctgggttgtttctgtttgctgtgccatccatccaagtcatatttctacgagacaagaggttgatgacttggtggtgattggtacatgcaactgtgcaaatctcttgtgtttttaagtgcaggctactggggttctagggtaggatttgactttttgattgtttttttttgtcccacacttgctgtttgtttttttttcttgggagccccacgtttctaagaaaaggagataatgtgtggattatccgcactgttttacctttcatttcggtgaggtaacggacaagtcaagccagattcttgtacagcaaaagtgaggcatttccttttactatcttgatctgtgcttgttgaatggcttctgtgacctcgcgatttcatacttcttttctatgggcctgtcgtagtgcatactcctagtataaatatttgctccaaatactgcgttcttatggttcttgtgtctggtcttctgcagtgacttcgctaaa

SEQ ID NO: 7368 - DNA, 998 bp, Zea mays
  Intron number 3 from transcript GRMZM2G300812_T01 (locus G RMZM2G300812) derived from phytozome v7.0 (chr-ID 5; pos 1 82582846 to 182583843 reverse strand)
acttcaatttcctggtcgaacaactcccggtagaggtaagcaacaaaaccagcagcctcctcactactcagttcctcactgcatttgaattttgaagtgcgcagacagctgaaaaaaaagtgaaagccactgtatccatctttccagttccatttattactaccagcattccaagcgactaggcagccagccctcttcaaagcatgcctgctagaactttcagttcgattatggacgtgtcagttcccagcaaaatgatggatgcctcaacacgagttaacccagccacgcattcatccacactgcttagcttgtctgtcagaagcgtgagagaacagcaacagtttgtttattctagacaaatgctccgttacagatggcccagtacctgtgcacgccagccttgttctgatacaaaactattgctttgccactgcagtaccgctagaactacagttgtcagctttttagaaccttcgttcaaggaacagcgaaaccgtttccttttgctgcttgagtgacactgagaaatttgattaaaaaaatagtacacaaaataaaaacaaaagcgctttgccgcgtcataatcatgtgacaatttttttcccacggcaacatcccacccccagccccactcaggactagtggtccacatgacagcatagacctatcgaactgaatatttgagttgtggataccaacctgcagaaagttgtataaagcaccatcggtaagcagcatattaaacttgagagtacagggtgtgctatgctttctgctgcatagcttctccgaagcctcttcacctcagagcggctgggatactaatttaagttagggttgggtcaatggtgcgctagccccagagtggcactgaatgaaaagttcagaacatcgaaagaagacggtttttccctgaatttctgatgccagaaacttgatatgataaaacgtgtgacatgcattgttgctttctgcataggtaaccataacaatat

SEQ ID NO: 7369 - DNA, 725 bp, Zea mays
  Intron number 5 from transcript GRMZM2G416751_T01 (locus G RMZM2G416751) derived from phytozome v7.0 (chr-ID 5; pos 1 59113318 to 159114042)
tttagccaaaacatgtatcacttcttcattttacaatctaaatatgtactcatatttcttgtcatgtgtacctcagcatgagctgagatgattttttttaaaataatagtagtaataataatatgaagtagtcttatgaagttatgagaggattttaaataatcaaaatggaatccatatatcaaagtttatgcatcttgctagatatctttttaatttttatgttactttctaaattctaatagttcgtttggagcgaattactgaacttattagactaaccatggtaagagattgtaaggtctggcgaaagggcctctagcgtaatggttaaggcttccgagtagcacctccaagtcccggatttgatccctcttgggggcgaatttcgggcttggttaaaaaaatcccctcgctgtgtcctgcccgctctcggggatcgatatcctgcgcgccaccctccggctaggccgttgcagagtgggcagttgattcggaccgttagtgatgggggccagggttcggggttttctcgaccgggaccaatgtttcggtttcttcttaatataataccgggaggacggtctttccctcctcggctgagtttttttagattgtaaggtctgaaaacttgttgcaaatttgttaatatttttctcggtaacaagaagttgaaattatacgtgtcgatatgtaggctgtcattgtcagaggatccatcattg

SEQ ID NO: 7370 - DNA, 849 bp, Zea mays
  Intron number 1 from transcript GRMZM2G170061_T01 (locus G RMZM2G170061) derived from phytozome v7.0 (chr-ID 5; pos 1 88931279 to 188932127)
aggtaatttatttcaagctttatctgagtgctttcatattgctacctcatgtaaatgaccacttttatcaccattgtgctgcattttgttcagtaatgtatcttgccacttgtttgtaaccctaatgtcaaagagaatcctgttggaaggagaattcttgccaagttgttcaatgttaagcttttaattaacaaccaatgattgtgccaaaatcaaatttatctataagtcagtgaacgtctctgtcaaatttgcaccctaactggattacctactggttgattcagcctgcacctatctaaattcagttttcacctggaacctgttaatcaactagtcaccttttgcatttcaacatagaatgggagtttttcttattttaacagtggaactctgaatattagatttgacccaaaaatagcagggtttagtgttggttgcaagatggtggtgcactcttttttgaaaccgtggtgtgcatggcgttgtcacttggactctattaagataattccataagatgtgtaaaataagaatgaacgaagtggctagattgctagaatgatcctgaaagatcatatctaagctttaatatgtcccttcataacttttcagtttgaatttgtgcttagggacaaaaatagtacctactgaatagaaacatgctagtactctgttacgcattatctaagttagtaatgaactgttctttttctcgaataatattttgtttgaaatattttatttttgtgattttggttctacatttttgacgtttccacaaataattatatagatatctcttcctttccaggcagacaagcttctctctcctgagtttcaaccttc

SEQ ID NO: 7371 - DNA, 416 bp, Zea mays
  Intron number 2 from transcript GRMZM2G057329_T02 (locus G RMZM2G057329) derived from phytozome v7.0 (chr-ID 5; pos 3 071507 to 3071922)
tggtatttggggtaagcttacttgattcaaatgcttccttttttgtgaacactccttaggataattggttttattgcaagtatgtatatgcatacctacagtattagggttcaaaggttaaattgacacactataattcgtttggtttgttgataataagttttgagcaagataaatcaaatgttagcatacctacagtattagggttcaaaggttaaattgagacactataattcgtttggtttgttgataacaagttttgagcaagataaatcaaatgttagcatttgaaggttcgtgatatagaattgtaaactgcctttgtgtttttcttttccttttgagtttaatgcccagcattgtcatgtttatccaattcagagagtgcttggagacggtttgctcgtcgtgaggaa

SEQ ID NO: 7372 - DNA, 880 bp, Zea mays
  Intron number 2 from transcript GRMZM2G156824_T02 (locus G RMZM2G156824) derived from phytozome v7.0 (chr-ID 5; pos 7 0083873 to 70084752)
gcaggtaaccgaaatcttgcccctccttttttgctactatatattttacttagggcatatttagaaccacctagtttttaattccaaacataccagtttataccttagtttatagaaattggattcacagtttcttaaaaaccaagaagctagcctcttctaactaaaaaataaaaactggtttcttaaaaactggtttgattccaaacataaccttattaaatagcaacaatgataataataatattggaatagactcgtagaggatgccagactgatgaacattagtactagatagtgacaattgggctttgacttggtattgtttgccctgatctgatgatggttcatggtaccagtacaagcaaaacaattgccttgttagctacagatgcagttcagagtctggtgatacagcactaatggagcttaaacttaagcacaacgattttgaagattctccgatgctttatggttctttatgctttgttttactgttgatgaccagttttgttcgtgtgtgatggttgattgtttaatccagctgccttatctcggtagtgtcaatggtccactgctgaccacaaacatattgttggaagtgttatacaatattacaactagccacatgtttatcacaatgcagttactttttgtttggtgcctcacgtttgtttgagaagatcttttgtttgtttggcgaactatgccattttaagaaaacccaacaatttcatcagcgtgccacatgtgcaaattgttagtttagtgtaataaatgtcattgttttgttttgctagatgttaactagcatagctaatttacactgctcaatctacctgcagtcggagataaattttctaggaaggctctcccatcc

SEQ ID NO: 7373 - DNA, 921 bp, Zea mays
  Intron number 2 from transcript GRMZM2G070045_T01 (locus G RMZM2G070045) derived from phytozome v7.0 (chr-ID 5; pos 2 07728979 to 207729899 reverse strand)
catatctctaactttttcaaactttcaaaagagaggtaacttttttttggccacacatattgtctatcctatacgattatgacatatggctataaattgaggcactattttggattcctagattctggtcatttttttcttatatgcaccttctgcaaagtactaaatattaagtcttacaacaaatgggtttatttagcaattagcatttaaacaccagatagaataattgtctttcaaaactgaaatataatgcttttgcatttgagcaggataaattcacattcttgttggaaatgacataaacagacaatgagacaacccctagagacaacagacaagtataggctatcttatatttgaagcaacctgttgcctttaatgttaccttaccctcttctacatgtggcttttttctggaggatatatccaaatatgatatgactcttgttccagacattttttcacattatatttcattgacaacaaagatgcatgcaataaacatgttactgcttgttatgtccttgtgccaaactgccaattttgagttaaattcttggatgtggttgggttttattttgtaacataggtgagttctctgatctctatctgtgtgtgtgtttgtaagggctctttccctttattttcctccgtaatatagtgatatgcagctctcctgcttgttcaagaaaaaaaatgtcactgcttgttatgatctaaatggcacatagttttgttattttattctttctatttatttatccaaaaacttggtttaccaatattgcaacagtaaagtcataatacatgttttaattacatttaaaggtacctcatgcactatgtatgctagtatttaagcttccaccttttatttttgcagtcctcagacattggttcgagctttgaggtacatct

SEQ ID NO: 7374 - DNA, 858 bp, Zea mays
  Intron number 1 from transcript GRMZM2G111525_T01 (locus G RMZM2G111525) derived from phytozome v7.0 (chr-ID 5; pos 1 44153144 to 144154001 reverse strand)
atcttaattcagaagcagctgaacaaagacaacaggtaactcttttttttttaaaaaaaatgagcacaccttatttttgcactcacgcacttatttttgcacaaatttgctctattgacttgaattgacccaaaaggctagtctgatgctgtgattgcttcacaagtccaatgtattgcttgaaatattatcacactgtatacatcacttattagaactctcaaggtataaagagttggaacacctttttctatgtgctttgatataattcaccatgctgtaatctctatgatgcatgttttttcatgtacatgtactcagaggatgctcatgtttgggtacatttgtttgattttgttgtttacttgttgctctgcatttttttgtggtactgcatagcaagctatgagttccagttctcaacagagatggttgggaaaaacgaattttgttgaggtccgttctttttggcatctcttcagaagctttgataggatgtggacactccttgtgcttgggcttcaggtttactttctatctttaatgaatggctcgatgcatttaggattactttcataattctgccagacattttgacacatttatttatttattttattttcaggttctgataataatggcatggcatggattagaaagccctactcagttacttgatccaataatttttgaggatattctaagtattttcatcacgaatgcagtacttcgagttattcaaggttgtcatgagtattgtattgtgtgaatatatattatcagttattatgttatgaaaactagtgcttaataaaatgaaatacctaattcctttttcactttcttcatcaatgattg

SEQ ID NO: 7375 - DNA, 593 bp, Zea mays
  Intron number 2 from transcript GRMZM2G175265_T01 (locus G RMZM2G175265) derived from phytozome v7.0 (chr-ID 10; pos 78343674 to 78344266 reverse strand)
aggtgaattcctctggtgaggaaacggtgataaaggtgagttgttctacaatgtgcttctttgatttatggtaaaaaaggaacattttatcactgttctttgttggaaacaaaatcactttgtttctcttatatattaacacaggtagtttcacttcacacagcttgactgaccttcataaccaaagctacataaacactagctttctatacattatacactagcttgatcttcacaaccaagccctatcttctctatctggctcacatagcttcaacttttgttgggctgcaataatctgctgcttgctggtgcctttacctcttatttatagctgaaaatagagtaagaaaacatccctagtggcttccctagaaattacctagtgactttcctacaaactaagaggaagattagagtgtgatgactgacttcactgtacagattttgactcattaactagacccactaacaaaagaccatcagcagctaggatatgctacactggtttcatgtcttcatccatacatgacaaaattactcctacattctttgtaggtaaggaagccatacacaataaccaagcagcggga

SEQ ID NO: 7376 - DNA, 1036 bp, Zea mays
  Intron number 1 from transcript GRMZM2G142820_T01 (locus G RMZM2G142820) derived from phytozome v7.0 (chr-ID 10; pos 148435247 to 148436282 reverse strand)
gtcgccgacctccaacaacacctcccggtcccctggtcagcaaccgcttcttcttcctccccctcctcatcctctctttcctgcttactagcagatctcggcctacgagtcaagcaagctcctagatttgcaggttctcttgccccatcccttcgctgttattggtttcttctcgcaacccgtccttcgcttcgcttcgcttcgagaaacgcgtctgctttcagggccaaattcgcagcgaactgtattcactgtactgtttcaccgaaccctttccacccgttaagattagaatttagtcccgcgacgaccaaccgacgatgccgtgcagaaacgagagatgcgaagcggtggcgtacaacacggaactacccagccaccaccaggaggcaccagccgtcactcctttcaggatgggtgcacggcctcgtctcatcacgccactatcgccgcagatttggctacagttagtgacgcgtgacaaggaagaagcactatcctatccttctagtcgacgctagtgctattctgtgggcacggtgatcggcttccgtgttgtgctttagaggagattttggtggcgtcagatcgggacgcatgatgtgatgcaatggacggcctaactctaaagttgattggtggggcaagggcgctgatgaagaatatacaaaagaatgacgatgctgatgtgaaacaaccaaatagtgagcatgtttaaccatcgctttcctcatcctaacaactgcagcagtagcagtagtattagttaaatggctcccctcatcctaacaactgtagtagtattaatcaaatggaccaaacgtccatgcttttgctgcggtcgttacgaatctaattgttagtgcagcatagaactgatactttaagtgattaaatctgatttttgagcaccatgtcgaaaaactataccttgcaatattttggagtatatactatgcgactggttgttttactgagaaaaaaaaataccggtcatgcaggtgcatctacacatttcttggactggggatctttc

SEQ ID NO: 7377 - DNA, 989 bp, Zea mays
  Intron number 2 from transcript GRMZM5G832420_T01 (locus G RMZM5G832420) derived from phytozome v7.0 (chr-ID 10; pos 1737561 to 1738549 reverse strand)
gtgaggtgggtcgagggtacaggtaaagttcccttttcttttttttcattttccaatttcagttttaaatccctacttcaaatttttattctatgttttacactttgataaaattcacaacaaataaacaaaatacccagcatgagttgcaagtattcattttattgtatttattcatttatttatcatcctacataagaaaatgtttttggatatgtagcacacatataattatttcaagacaaatagtttctgttgtatgattacttattagaagatgttcttatacatttcaacaaaagataatttatagaagaatcttttattgaatctttattataaaaatttttattttaggagatgtgacttcaaaagttatgggaactctaaaaaaattctaattcaagatctttggaaattttttacctaattctcaaaatgagattttgaggtgttacaaaagaggcgaagagggaacacgcgcacgcgatgcgaggggctgaccgcccggtccctcatgtcggcaccgcgaacacatccgttagccagtggaggagctggctagtgggcccccggagccagtgcgcgcgcgcccgtggagtctggctggccgtgcgcgagaaaaggggatggcttgctgggccgaggacagggaaagtcgacccaatgcgaatggttctcttcttttcttttcctatttcttttcttttatattctgtattttcattttgaattcaaattcaaatcttaaattaaatgcaaacaaggttcatatttaaagtatatttaagtgctcaaggaaaactctaatttgttacacatggtttattttattttatatatcccttatttacttagtcaaatgagatattcacatattatttgatttttcaaaattcaaattccaagatttaggaattcaaattttaatacatactcaaaatcaatcatgaagcaatttattttaaattatttattttgtttgatag

SEQ ID NO: 7378 - DNA, 533 bp, Zea mays
  Intron number 1 from transcript GRMZM5G832420_T01 (locus G RMZM5G832420) derived from phytozome v7.0 (chr-ID 10; pos 1738623 to 1739155 reverse strand)
gggaagtattggctgtggcttcaggtatcgaccaggtaagcttctatttttttattctgtatattatttctatttttatttctaatttcagtttccatatttttcttcaaaattcaaatccttttttttaatctaagttggaatttccacttttaatccaaacgcacaaacaaaattcccaacataaaatttaaggtctcattttattttatttattgtttcattcatgtatataaatacttctaattatatacatatatatatatatataaataaataatccactccaatagatgaaaatctttctatttacttaaattcaaactctgaagccaatattcaaatctaaacttgaaccatcaaaattttaatattaccatctatttatctgaaacaaatgaattcaaaaatagtaaaatctttcttaaattgacattataattcacatcttttaaagagttcttctaaatcctaaaatagaattttggggtgttacagcgagtgagaaggaggagctgacgacgtggccccac

SEQ ID NO: 7379 - DNA, 482 bp, Zea mays
  Intron number 1 from transcript AC234527.1_FGT001 (locus A C234527.1_FG001) derived from phytozome v7.0 (chr-ID 10; p os 19012130 to 19012611 reverse strand)
gataaggtactccttgatacatttgtgtactattacaataaaggtgatagatgtcataatgggtggaagtctcatgtatacacaactgctatgaagaatgtttgtgagaagtgtaatgtcaccattacaaaggaaaatattagctctcgcagcaagacctttcataagcactacaatatcattaatggtttgttgtccactagtggttttggatgggattgggagaagaacaagctcaaagttgatagtgacactgtatgggatgagtacgttgaggcaagaaaatttttgtagttcaatttttgcactacaaaatctttagtttttgcagttcaatttttgtagttcagttttttgcagtttagtttattccattttttgcagtttagtttatgtttcaattccaagtttatttgttgatgtatctttgtaacaatttttttgcagaggaataaggaagcaaaaggttatagacataaggt

SEQ ID NO: 7380 - DNA, 957 bp, Zea mays
  Intron number 1 from transcript GRMZM2G010604_T02 (locus G RMZM2G010604) derived from phytozome v7.0 (chr-ID 5; pos 1 4185312 to 14186268)
caactgcgcgactaccagatccgatcccagcacaagtaaatcccccgcccgtctccattcccctgaacctgaaaccccaaccggtaactccgcctagtaataatggggtagtcacggtcgcggtgtgctcagatctcgtgggcctggacgcgggtggtgctagatttggttccattagtctgtggttaggttttgtgtcggaacttcagtgggtcgagttgcattagttgtagctaatggtggttttgccgattgaattctgtttctcttcgcgcatgcattgttagttcatagtgtagaactgtagctaatccaatacagtcggtggctattgatctttcttagagcagtgtttgtgctagtgattattttgtcgatcttgccgtgttctctatcgtgatatgtgatgttaacctcgggggagtattggtacttgacatgcccatactcaagcactgaactgtcaattccaccttctgccacttgacccatgaccagtgacccgctctttgcaaatgaacaggggtactcagattcaaactgtcctggtttttgcatctcataactttgcctgaacgtagcactatggcatctggtgggtttgatccctggttgataaattgtcttgactcttgacttactatttaccactgcatttttaaccacatcactataaggaacttattgtctgtgccctaagttgtacaacatgcactttcttgattatcctagagtggcaatggtaaaccttgctagcgtaccacttcatgcttcatgtcagtctggaagctgatagttctttaacatatcatacaataccgatggaaagcataaaactatttcttctctctgctagttgttacttggtagatcacacattcacacctgcttcttcaacgacctgaacatgaatctgctttctgcattctgtaggcgtgacgttatcggagctatatc

SEQ ID NO: 7381 - DNA, 993 bp, Zea mays
  Intron number 4 from transcript GRMZM2G458266_T01 (locus G RMZM2G458266) derived from phytozome v7.0 (chr-ID 5; pos 2 527464 to 2528456)
tgacccttttcctataggagtggttaagagagaaggtaaacctgttatttgcattactcatctcccagaggacttgcttaacttggacatttgtgttaattatgtggtacaatgaatgaagatgtaattcacatatactgtatccaaaaatttgttggcttgacagttgacaccagttttgtaatgtgaatgtgtggtgctgtcaaaagtaacatgaaattttgggaactgtaacaaataaactgtcttgctatttggctgttcagttttcaatgtttgaagaaaacatcattaaaatttaaaggctcacttagacgctcttaagcacgaggtggagctctggcgatgaggtcaggatttcaaaattgtttgttgggggtgtgattccatccgtgcttatgtcatggcatccatgttgcttgattgtagcaactctctgcttgatttcaccatggttcgttcacacagccagagcagagttacatctcctgatatgcagctagtggttactgcaacataaacacctgcttaggaatctacggttttactagtcatattatacttataccttgtgaagttcattcaaactactatgatgggtgcacgttccacctcctgaacaaatgtcatggcattttatatttatagcctcgtgcttcatctgtccaatagtaaggcaaggtgcattgtaaggttcaaacttcgaccaacaaagtggttaaattggatatgtatttagaaatactttatagtgatcatttttttgtgttgccacacacaatatgttatgagagaaattagctgtcaaagtacgatcttgatgactgtgccaagttaccacaccttataatcttatattgtgacacaaggagccatttcaccaaatagtaggaaaaagcaggaagcacagtgagagcatgtaggattataagtgtattaattctgtttgatctaaaattttcaattatcaatatttgcagatctcttggagcc

SEQ ID NO: 7382 - DNA, 682 bp, Zea mays
  Intron number 1 from transcript GRMZM2G133764_T02 (locus G RMZM2G133764) derived from phytozome v7.0 (chr-ID 5; pos 2 16737796 to 216738477)
gagaagctcacggcgctgatcaacatcgccgcgacgtgcgtggctgcggacccggccaggcgccccaccacggcggagctgctccggatggtgagggaggcgagggccgaggccatgtcatcgtcaaacagcagcgaccggtcaccagctcggtggtcggatgccatgctgggcgtaccactgccacgggatcaggccgcggaaagcttcacggacagggagaggctagactagaagaagcttccttgcttgcatcactgtgatgagatattgagatggatggtttggattgggttttgtttgtttgtttgttgtgcattttttttctttttaaatcagagactgatgatgatgagacaccaaagcaaagcaatgcaatgcaagcaagctatagatgctgccagtgttttatgttaatcttccagtcaatgattatctacaacatagtacgtatttgttttgaattactactatatatatggcatacaacatctgctattgatgtctgtataaataaataaatgaacctcaatcagcagttgaacctgctttgtcttctcaaaacgttgttacttcttcttcagaagacaccaccccttccggccttgtaaacaacaagacaaggcccagaccagcccatctcacagagcaccctgtgacgcacgcagaggaaaaatttgca

SEQ ID NO: 7383 - DNA, 581 bp, Zea mays
  Intron number 1 from transcript GRMZM2G414028_T01 (locus G RMZM2G414028) derived from phytozome v7.0 (chr-ID 5; pos 1 47019265 to 147019845 reverse strand)
cggcgctgttcggcaacctcaccagccttttgactgtaagatttgttattcttttagttatacaatttctagtagagacacttaagtattacagctatgtgtttagggagggttcaagaaaaagaatgaattttgtattcagcatatgtgcataatagggctttgattcttcaagtcctgcaatattggaagtatgcataacagagtttattaaagaaagaaatgtcctcacttgctggcagtttgtgcattgtatttttgtaaattaaggttattaaagaaaaaatgtcctcacttccttcgaaaaatatagtatctcatgggttaatttacgatattagcacttgctacggcctatagggtttatataggttcacaacttcttattgtccactaggcttctccagctgcattgttttgtaagggacataaactagctaattgctgtcacttaattactcctccattttccctgttgattaaactagtatataggttcatggatttacttatgcttattctgacgtgtctttatgatttatacaggcttacacagacctgttttgattagagtcgagcag

SEQ ID NO: 7384 - DNA, 802 bp, Zea mays
  Intron number 2 from transcript GRMZM2G398668_T01 (locus G RMZM2G398668) derived from phytozome v7.0 (chr-ID 5; pos 1 879464 to 1880265)
ccgtagacgccagcgtcagcatctaccagttcctcgtgagtcctcgcgccagcccgcccctgtctgttcggcccctttcttcagttttttcgtgagttgtcgttgcgtctgtgaagtgggaacagtggatttctgcggattgtattgcggctgggttggatttatccgatgatgtggtgatatgacctgcagagtgttcccggtttcaaatttggtgcgatacattcctacctctacctgttagtctgttactgttgtgagtagcacggtcagtttgaagattcacgcccgtgtcggttcataggggtacaaaaatgtgttgagagccagctgctacgtactgttacatttggcatctgctgtattatgtgcatgcatacaatcatgatggtttatcagttcaaaattcgcttatgtaaacaacaacacctagtgcttcttgtcttgtcaggttcgtttgggtaagcctaggctcctcacttttcagtaacagtaacggttcttgatttcttcctcttaaaggaatatgtgcttcggcatggccgccaaaaaaaaataaaaaataaaaaattcggaggttaatgttgctgtcagaattttttttttgaaaactgcagcacagttttttattctctcaaagtttcatgctgttagcatgtgcagacatttgtatatattgtatttaactgtttattgggtcgtcgtactgtagtggatctgtctagttttcatttcattcatatcaaatgtatcatcaatttctgcaggccgtggttggaaggaaaggatcagagcttctgac

SEQ ID NO: 7385 - DNA, 755 bp, Zea mays
  Intron number 6 from transcript GRMZM2G039855_T01 (locus G RMZM2G039855) derived from phytozome v7.0 (chr-ID 5; pos 2 06302872 to 206303626)
caagagtaagtctttgttgtgcattcataatttgtagatgctgaccttctagtgctttttgttattttgtggtgctctatatatgcatgtatatgcattattttgggcatttttatgatgagacatagatttgtagttattcaatgtaaatatgaactcaaaatagtttgctattgtgctcccttgtggttagaccactagagctttgggccaatccatagaactcaaaatgttgaataggttcttttccttctgccaagttgtttatattacaactccattgatttcccaacacagaagagaaataatgggatagtagtaagattttgcattgaccataatctataccactatataatccactagtttaaattttgcaaaacccacccaaccaaatcacccccacacccataactcccactaaatccaccaaacaaattgcactcaaacttaacacaccatcaaacccaactgttcagatcgctgtataatccactctaccaacccctggcaaaactgtggcatcattaactgtctccaaaattcctgatttgatatacctattacctagatagattattcactccttttctatctaacctcagcagcataataaatgaactgtagttgaaatatggtggattctgtatacgtgttccacggcattagcttttgcacaactgcccctgtttgaaatttgttttttcctccttaaaacaggagagcagcaatatccaaggaaatagcaaaactaa

SEQ ID NO: 7386 - DNA, 870 bp, Zea mays
  Intron number 1 from transcript GRMZM2G069970_T03 (locus G RMZM2G069970) derived from phytozome v7.0 (chr-ID 5; pos 6 1840976 to 61841845 reverse strand)
cgagcccgccaattgggcgccccgcccacgccaaggtgcgacttttttgccttcctcccctcctcctggagccgcgtgcggcgtgccccaggactgggctgggggcttctgcttgattcgaatcagcgtgcctgttctattagttttcggcgcttgcgtgccctggtacagtgccaattttgtgttttttttggctcgtgggctaagagaaatcatgttttgttcctccaattgacgggggtgcctgtcatgtgtgtgggatgcacgtgcacatgattcagaagaggagtatagtgttctcggcgaaattaatgtgtcaattgtggtgtgcaatcgtatctttcaagtttccctgtttgattggtggtgatgatgcggttcatccgcgttgtgaagcataaggactcagggagagcttaataatctaccttgacgaggggaggaggttttgtgtagttatagttcctggggattggctttgattggcatttacatgcctctaatacatatatatttcttgtccggtggtaggagtcctacaaaattgtgcatttgtcattagatttttagtatttgaagttcgatgctagctttgaataattgttggattgacatgtcatgtttattcccatttttactctagtgctattaaggagtttcttggggtccaaggggtttagagagcagttatgccaacatttatataatacctgtagcgttatttgttaactggtatgaagaaacatcgttagccacttatccttgatttgtgcttccaggctgaaagtcagtggagttctcagttctcaccaacattcagaaaactgttggctcgctgacaagtccaactgtgtttttcttggactacag

SEQ ID NO: 7387 - DNA, 500 bp, Zea mays
  Intron number 3 from transcript GRMZM2G168747_T02 (locus G RMZM2G168747) derived from phytozome v7.0 (chr-ID 5; pos 7 4612741 to 74613240)
caagctggggctgacttcaagtaccaggtagttcattcttgtccgaaattatatcattttttatgttttaaaaaataaatctatttgatttttgaactagaatttccgaaattttctgtttttcgctgggtgccgaaattttttcttttccgaaactgtaaaccctggactggccactgctaccaacttagccaaacgattatcaagtctctattgccctcgcggaaacaggaaccaaaccaaaagattgcaaatttcagccgcaataaaatcaacgattaaaagagatttccgacgagttttaaacgatatataagggaagaagaacatatgttgttgcctgaaaaggcaacagtgattttgagatcgaaatactagtccatagtaggatttcaattgtgaaagttggtagattattcatcaaatacctcagttagacattttcagaacttttaacggaatttcacgacgaacagcttctgtgggtgattttagtcggg

SEQ ID NO: 7388 - DNA, 902 bp, Zea mays
  Intron number 3 from transcript GRMZM2G006948_T01 (locus G RMZM2G006948) derived from phytozome v7.0 (chr-ID 10; pos 124530035 to 124530936 reverse strand)
gatctggtccaaccttatcccaagttctccataaggtgaaagagagatatatatacctttgattcagtaccttgggagatagattatttttggtgtttaagttcttgatgctggatctctgtctttatggtgcgtcgattatgggggtgtttggatacccccgtctaaagtttagtttggtttttcggatgtcgatttgaaggattagacagaacctaattataaagctgattgcataagtagtggctaattctgtagacgaatctattgagtctaattaatccatgattagaacatgtttactgtagcgaaacatgggctgatcatagattaacttggcttaatagatttgtgtcacgaattagccataatttatacaatcagttttataattagctcatggtcctaattgacatccaaaacttgactaaactctagtccggaggatccaaacaccctaattattggctgctgctttgaggggtcggattgggtatgcatggctgctttcagggttaatccgtgttattgtctggggttgtttgtatagtttacttttctgttgattaatataaaagtggcctcttttcttccccaaaatctgaaaataaaaggatgctcctctgatgaattttgtccactgcctactaatgttttcttttccatatgtggtggttctgcgatacacaagcaggccacatatttttggagatttcagtttttcatcctgacagcatgttcagtaggtccacgttgatgttgtttctctctctcttcttttcaacctattgtggagggtttaaatgacactatttggcaacactattcttgagcgttcgtcatctaggcacgtattaccatatgctaatgggtccatatttctgcccctatttccagagatt

SEQ ID NO: 7389 - DNA, 746 bp, Zea mays
  Intron number 1 from transcript GRMZM2G124520_T01 (locus G RMZM2G124520) derived from phytozome v7.0 (chr-ID 10; pos 147130475 to 147131220)
tttatagcataaaattcgataccctaaaaccgtataattcaattatcaggccttgaggacacaacgaaaaaacatacaataattgccacagttaaatctattggactcgtaccgttgggtaggtattcgaaaaattacagaactaagcataccagcatcgacccgggggggcgaaaataagcccagttttcaaaatgtgagcatctcaaaatagtgctcaaaaaataaaatactacatcctttaaattgttgaagatactaaaaacaaattaacctccaatagttaaaccctaaatcatgtatttttataaagtaaattacatttaggaaagaaaatgttgagcatgatatagagacaatgatatgacactaatctagagtgtgtagtatatctgggatcacttcacattgtgctctatattttttgatacaaaaattataaaatatagcacaattggagcttttttatgggttaaaccttatatttaaagatagtacactgatttaggtcactcttggagatgttatcgagccaatgagggtccgccaacctgccactgctaatgggtgacaatgggctctaaattttacactataagatttaaagatcgaatcggattatgattgagccctatttatattaatttgtgagctaaaatttatttagggcataccattttgtgaagaaacgtttggatcgtgatccattaccacccctagccaccgcctagaggccgctccagatc

SEQ ID NO: 7390 - DNA, 692 bp, Zea mays
  Intron number 1 from transcript GRMZM5G845601_T03 (locus G RMZM5G845601) derived from phytozome v7.0 (chr-ID 10; pos 136878225 to 136878916)
ccgttcggatccaggccgctttccgtggctacctggttagcttctcacagactcctcacctcactcttcagttactaaatctttttttttgttgtcaaatttccaataaataaacaaatctgtgtaagctacagcttgtcacgaaaagctagcttgaaaaacggaagaaggggccttttgttggttcaaaaagaaaacaaaaatatctccctcttctgcgtggtatgctatgctcatgatgtgtaacctacgagctgctctggtaaccgcttcccctccagcaaggagaacgccaccttgtggcgtcagctctgccgtcgtctttactgcctgcgccttccaggcttcttcgtttcaggaagcaaggcatggccatggccgctttaactccgcttccttcgcaggaaatcggaaggcctgtattattttgccgttttgcgcctagttactgcgttactgttattggaagcggctaccgccgtagccgtagtaatggcggtggtggtcggtatgcaaagtttttttttgttgatgttgaacaaaagcctggcaagttgagagatgccaacctcagttttgcactgtagatgcccgtgggctatggtggagccaaggggccattgctgattaacacctctgcttctgcttgttgttccgtgcgaaggcgaggcgggcgctgaaggcgttgcggg

SEQ ID NO: 7391 - DNA, 724 bp, Zea mays
  Intron number 4 from transcript GRMZM2G410479_T01 (locus G RMZM2G410479) derived from phytozome v7.0 (chr-ID 1; pos 6 7532077 to 67532800 reverse strand)
tatttcattttagacaaaacgtaagaggtagtgagaagtcaatattagttggtggtgaattaagaacatcagatttgatcaccaaagcttaagtttggcgttttaaattgatcctgttgcacagcagatggtttccccacttaattgtgcagttgttttgaactccagttgaagagcttgtgcacatcatttctttctcagatgctgtggtgcaattcttctcaatctcaagtagtctatgtgcctaggttgttactacctccgttctagaatacttgtcacccgctagttcatttttgaactgaaacacgacaaataaaaaagaacggagggagtattttctactggctgggtcatagagttgagaggcatcaggggacaggggatattggttctttgttgcttacgttcttttttgatttttgttgtgcataccagctgttttcataattcatatacaagttgttagagttactgtgtattgcttaatgtaacgggcctaggcccaactactactaatataaatacatctcccaaccctggttacggttaggttttccaacaagtagttatttgtttgttcatctccagctcaaaacttatctgcttatgtcagtatggtatctgtggcttctggatggtttacttatgaaaatattttgatattacgatgtttgttctgaaattttcttcttatgctatcatgcaggaaagggctcttaat

SEQ ID NO: 7392 - DNA, 764 bp, Zea mays
  Intron number 2 from transcript GRMZM2G530839_T01 (locus G RMZM2G530839) derived from phytozome v7.0 (chr-ID 5; pos 1 61704541 to 161705304)
caagggtaagcgacccaagggttcttatctgtccactatttaatcaaatccccgtggcgttttcgattcctttttgtgtgctcagttctttctttgtgtcatgagttttagaacttgattgggatggtttttgttccatgagaattattagggtttgatcgggatgattcgagtattagttcttacggtcactggattttgcatattgtcatagtctaatgccattaaattttgaaggtagcgatactgttttcaccctattgaatagggtatatgatgatgttggcaatcactagagcaggtaatattttgttattaaagttttcatgtcgtttctgcactgccatggcttgatctgtgaggatccatacatgcgtatggtttatgcttgtaagttttctccttcccttgctttacacatctgccatatcatgcttgacaaacacatcagttttggccctaatgttccggtgtgtttctgtgtaactttgcccctttctttgtgccaagattttgttcattgggtctgcatgggctaccagggattaaggttaatgattcaatgatgctctttgtattatgcttatggttgagtatggcgtttaacactaactacgagataggttagaacagaattggaagaccagcttctctacacatatagatgccattttctcgatggggggttcagtgatttcaaggcgctgcctagagcaagtggagaattgagtgatttttaggagctcctacgctattttttatag

SEQ ID NO: 7393 - DNA, 903 bp, Zea mays; identical to SEQ ID NO: 4283
  Intron number 2 from transcript GRMZM5G827265_T01 (locus G RMZM5G827265) derived from phytozome v7.0 (chr-ID 5; pos 1 73752220 to 173753122)

SEQ ID NO: 7394 - DNA, 1011 bp, Zea mays
  Intron number 1 from transcript GRMZM2G081500_T01 (locus G RMZM2G081500) derived from phytozome v7.0 (chr-ID 5; pos 3 3879567 to 33880577 reverse strand)
gcttctcgaaaggtatgttcggtaatctcattgtgttgcttacaattgtagcatgaattagaaatataaatttggtattctcaaatcagttatcctaatttaaaaatgttgtgtgacataggatggattcaaatatctcatatctattgaaaattagattgcttggcaaccgtaaaaagattagaaaatatataagttgtatgttggttgagaagcttgttgatccgtacttcataaattttaaggattttgttgaatcaattgtagaagagttcccttcaggttatttagaagtatcacatattcaatattatgatgaggtcataaaagatttccaaaagtaaaaccagaccaaacattaatgtaaatgttatttaagcattcacatgcaaaggttgtccatgtgtttgttgattattgtagtccttctaagccatatgacctagtaactgagtgggattttgatgagcaacttcaactaactacaacatagaagaggatgaggataattatcatagtaatccatttgtagataatgaacatgttggtgttgatgaggaggttttatattttaaagggcaaacatgttcatcctctagatgtggttgtgtgttttgataaaggaaaggagaaggtaaataatcatagctcaaaggatgaatgagatgagtgagaggacctaaatgatgagatagaggatgaagtagaggcagatgatgagctggaacggatgagttcaaattagctctttgccaacatgcaataaaacatcaatttgaattcaaagaatagagaagagtgcaccatataggtttagggaatattgttataggagagacttagaaaagtgtccaagaaggatatatgcatctacaacagaggaccaaatgattgttgtggtaatcgctcaatgttatttatcaatgttgctctttctcattttttcatgtatgttattgataatttaatacatatgttctctttgtgtaggtgaaaaaaatctttgtgctc

SEQ ID NO: 7395 - DNA, 839 bp, Zea mays
  Intron number 1 from transcript GRMZM2G143627_T01 (locus G RMZM2G143627) derived from phytozome v7.0 (chr-ID 5; pos 2 15653222 to 215654060)
agaagggcgccgatccctacgacctcaaacagcaggtgctgacaggtcctttgattctcagagcattcttctatcactactttttttctgttactgaactcacccactctgccctagtgattgcaaagcatactaaggtgccgtttggtttatatatttgtaatgtaataggtaacggataacgttaaatcatgtttgttttagtccaactgtaatcagataccacactaaaatttgataccagcctattcaaatttgttaccgccagtaatcgagccgaaaccattaccattaccatttacgttacattttttgaaccaaacagcacctaagatcctagtgtgttgcgttgctcccactggttgtgatctgatatatttgtggcagtccttagcattgctcggtggcctttcagtctgcagctagttaggttaatacttccggattgccatgccataatcggttcagtttagcctttccgtgacaggagattccatttgattgtaacaatgtactgtcaactattttgacgaaagcatatgagcatataatctcttgatgctataatcataggagtaattgactgacgttgatgttttcttttggtctttgacactttgaacttataaggtaagctcgtcatagttcatctttctgtgttcaataattaaactgacttcccgtttctcagatgtgttgtatttgtcatactacatgaagccacatatgtgttcttcatgtaaacgtgattgtgaaaaggtcattgttcaaattgcctgatcatctgatctcagaactgacgggtctgtcgaaacttgtaacttcatctccgcaggaga

SEQ ID NO: 7396 - DNA, 820 bp, Zea mays
  Intron number 1 from transcript GRMZM2G585536_T01 (locus G RMZM2G585536) derived from phytozome v7.0 (chr-ID 10; pos 26304987 to 26305806 reverse strand)
actgcgacaatctattttctatccacgatttgaaggtagaagaacggtccaatttatttatacgctacctcttatcatctacgtttaattttgatctaaccaccacgacaattttttcccattctaaaatgcacatgtgagactgaaataaattaaatattaatttgttaacttcataaatttatgttaaacatttgaaattaatgtttttgataattttacatgttttcgtaaataaattcgaattatgtttgctataattgatttatgtgtattcaatatctaaataaattaaatagtatcgagatagctatgtgttaatgtgctgatcagttgaattgatagttgcagcgatttaattatttttgtaaattaatttgttttgtgtttattgtaacgtatagttttaaattaagaaattaaaaagaattacaaccttatgtttttataacaaagaaaataagagataattatttataatgacgtatgtatacaaaaatataaatttattagctaactcttctagtctagctttatttatgtgtaggtccctgttacagtataaaatgtatattaggaacccaattaaatagaaatggttttgttagtttaataattatgtgttaaacaattttaaatagtatttttaaacggtttatatgatttagtaaattaattgatttatgctgttataatcattttatacatagttttccaaatatgaaattaaaaagaatggtagaccatcttttcgtaaataaaaacattaggtaaataattatatgttgctcataaagtgtgattcagatttataatcaaa

SEQ ID NO: 7397 - DNA, 966 bp, Zea mays
  Intron number 1 from transcript GRMZM2G037989_T01 (locus G RMZM2G037989) derived from phytozome v7.0 (chr-ID 5; pos 2 03197090 to 203198055)
tctcctcaccatcattctcggtatgacctgttgccactgattcgccgtgttcatagcttcgtgtagctccatttaatttgatggtggtgctcgggggagaccgattgggtcacggtcgatctcctccaccgcgcggtcatggcggaggcgcccctgcttggttggtgggggggagatgaacggcgaccgttgatctggcctgggtggccacgattaaatggttcgcgtaccggttcgctgggtgaacctgggccgttgatcaaagaatgggcgggcaagatttaatgatagggaattaagatctggccgtcgatctggaatcgaacgaccagcgtggtgtaccggttcgtgagacttggatctaatcagagccatagatggggaatccaacggctcaaaacacaagttaccctttcggccgtcaatgttgcatatgagccatcgtccttttagtgaattgacccgaagtccacacagtagcgctatgtgtcttaggatttcttatgcgttagcccctgcgctttcctataattgacgcccagtccagaaaattagaaaatcggggaaaatgaaataggaatttatttttagtgcaaaaataaatactagaaacttgtgtaaatcatagaaaattcattttaactcgtttttgacccgttccaatttctataattttgtattaatattgtttagcacttaatgactctgttttagcatgaaaactatattaaatttgaccacttaattatttccgtatcaaacacataaaatcttcagaaattcataactccttaactgtaactccgattttaggggttctcattcccacgatctcgtagcaacgcgtagatcattattatgcagtatattcttatgtttggtgtgatattaattttatctataccatgtttgtttgtattgctacgactagcgcgaggacacgtgtcatctgagcaaattggtacc

SEQ ID NO: 7398 - DNA, 866 bp, Zea mays
  Intron number 2 from transcript GRMZM2G046849_T01 (locus G RMZM2G046849) derived from phytozome v7.0 (chr-ID 1; pos 2 69023975 to 269024840)
ctggctccgacaggtggcgacctcgtgctgtacaggtaattgtggtttttagccagtgagtttgttccctttgttacttacggtgcatctagataaaagaagtgatttggtaaagatgtttgttctgagttatcccataacagcctgtcacataggaattgtataactgtcaatctatcaaggctagttgtcattgctgcatccagcgcagattaactcgtgcattttagggatgcctgtttacatccttacaaatcaatccaagggttggacgggatcgaggggtttcagtccctagcaagtcaaaatccccccctaatccttctcaatcccctccaatttccatggaggcttcgttcggtttctcccccagccaagggaaatagaggattgagagcgatttaatccccaacaagtcaaaatcccactcaaccccctggtttagggatgaaatgaacaaggctggactggagaataatcgaacactgcctaagacattatgtaggattggaatgtatctgcagagttgttcgagggagatggtcatatcataggaactgattgtcaattgcgcgatccgtagagaagaaaaatgacaaaatattctagcctttctgattgagatagagtgactgtagttcatgtatgagcaattgatatttatggtttagaattgtttgttgagtcatactgtagtttcctataaaatgagaatattcaaagttcatgtcaaagttcaatcttatttacttctaacaacgaactaattgtttcctgtgacttggattattggagagatgttggctaatttcccttgttttcttgaaataggcggattgctgaagtaaaagagaaggaacggagaa

SEQ ID NO: 7399 - DNA, 1057 bp, Zea mays
  Intron number 1 from transcript GRMZM2G091373_T02 (locus G RMZM2G091373) derived from phytozome v7.0 (chr-ID 10; pos 69794216 to 69795272)
catagtgagctgggattacaagaagctaagagacggtatgacctttgattaggaatcggacgtcctaaaaaatttgcgccgacgtggacaacgtatctggtctcgtttcttaccggctttcatataatagaatgtaaatttacatagtaaaagtcgtgcacctgtagtgtcggattaaaaagatgagtgttttttggaaacaaaaaattcagacaagtgggccgatacgtatgggttcatttagaatacggcccaaacattgactcgttaaactgcaacccataacctgtaggcgagcgacgcctcgatgctttaggcctttagcccagccagacgaccgctgccacctgtgtcgtccgcaagggatccatcgccggcgaaggaagccctccgaaagccgcactaagctcatttgacgacgcccgcacacgcgcaacgagctcgttcacctaccagcggtttaccggcgtcgtggtggctacggatcagcggttagctgaatttcttccttatttcctcctagtccctccctgtcccctctctcatgtccctggccaagattagactggaacagcaagtcgatgaatggtagcgcagcatctgcaagcacttcaagtagtatgtgttgggctgtcggttggatcagtgattaactgatctcgtgtctcgtccaagcctgaaggcacaagtcaaaggcgattacttgaatatactagtggattaagaacttatgcattactagtgggggcttgcaacttcgatttcgaaaattcaatggaaatgcacggcaggcttgtctattggagtgctgtcaaaatggaaatatgcaaaattggagtgggaagtacaaataatagaattcaagggaatttcaatgttcctggcaggctgatattgttttagaattttaatatactgtttgtttacccaaaaaaagtactaaaacgtgtaatattcctgttagtattgtttttcttgaaaaaaaatggcttacgcatgtatctgtatttgctcaatactagatatagtaccctgtatccgttaccaagttggtgta

SEQ ID NO: 7400 - DNA, 987 bp, Zea mays
  Intron number 2 from transcript AC209374.4_FGT002 (locus A C209374.4_FG002) derived from phytozome v7.0 (chr-ID 5; po s 196279520 to 196280506 reverse strand)
agggaagctgtgagtttctcttctttctagtgcgttatctctggttcattcgattcaatcaatttcgtcctgtttctcatgttaggatctgcggtattttgtataagtagcatggtatcaacaaaatgtagagtctcagagaaattttggaggtttcagaaaactgttgggtaatctctactgattaatgattaatatgaagcatgtcaggattttgatatcatgtgtaaattggacggttgcttaaagttctggattaattatcagagcatactatagattgattacctaaaatttggtaaaccgttcgtaattccacataatttttttgagtgaataacttcacatcatatagcatatcatggtgcttatacttattttttctgctcggtttggttttgttatagacttacaattttatgtcaaagtgtaacatgtgtaaataccacaagacttacagccttgtggtatttggagcggagaacatccttgaaaacgccatagttcattccccgcttgctcactgtttcgctggtcaatttttcctgaaccattagatgctcagtcgttattacgtcacaaaatgtcttggcagttcttgcacgagttgctgactgcaaaatgtgttttgacctttgttctcttcaagggcagaaagtattccacgttttagatttcgtacaaggcatgggccacgtgcatagaactctgaccgcacatttactattggtacttgagttggacagaaatcttccccatacgcatataaacccgttgactagtgacatttgtcttgcgtcacttatttagcattacacactgtttgttgccccttcaaacaatatgcagggtgtttacatctaaactgagcatgtctgttctctcttgtagaaaacaattgcttctattttagcattgaagtgcctgaagtctcaatatgcaacactttaagctcctaggattgccatgtcatttcaggtgaaattg

SEQ ID NO: 7401 - DNA, 1047 bp, Zea mays
  Intron number 2 from transcript GRMZM5G819452_T01 (locus G RMZM5G819452) derived from phytozome v7.0 (chr-ID 5; pos 3 828944 to 3829990)
tcttgttgctctaagggttctaaacaacaatcctggtatgctccactcgtgagtagtttctgcaatcatattgtgtcaaatgttctgtgccctgttgcaacttttggtctctttcagcgaattgatgttgctgactgagtaatcctttttattgccatggttcttaaatggtatatattcagtattactacacatgtggcatttgatttctgaggatagaaaatatggtgttggttagggacgaggatacgggattttattcatttcccacgctttttctggatttgggttgggttatgtgatgggacccacaaaataaaaaaacataaaacatcttttcttcttcgtgacatcgctgtgctcagttccatcttcgtcagatccaatcgtgaaggcaaacagtgccagcagcttcccgccgacggctcacacccacacgggcacatgaggtggccagctcttcggcagctgcggccactggcacgtgtgatgcttctgtggcttcaatggtttattcgcgcatgcgaggctccatgagacagtggtgatggactgatggtgtctcgtgatgcgcttggcgaggcagctatggccggcggagcagatggaggcggcacaactatgtggggttgaggcaagttcccttcgtaacttcagcccgtgtgtgccgccctgctgccaacgacatgtgatgttggtaacccatccctcctggtgggatttgaggttccagtttcccaaacccaaacccaaacccacagtatatcccaatccataaaaccaaacatgggttatgaggccattgggttatgatattcctttcccatcctttctatcccatgaaccaaacgccaccacattagtgccacatttcaatgttttacattatatcactgtgcctgtcttgtcactctttctgccttggtctgttctatgaacaaacatattggctgttttttttttgcttgaggccatctcagttatatgatttaatgtatttcactctttgcagaaacttttggttcagaacgtcgcccaattgtagag

SEQ ID NO: 7402 - DNA, 399 bp, Zea mays
  Intron number 1 from transcript GRMZM2G088415_T02 (locus G RMZM2G088415) derived from phytozome v7.0 (chr-ID 5; pos 3 7309255 to 37309653)
cttcttacggtataggtttttgcgttggtttctacggtctactacaaattatttatgacgatgatcatcttcatacactttgccaatgaaataagggcgtgcaaatttagtattatatccactgattttgttgaatgagagatggttactactactacttctctttttctagatttgagagtcctgaacttaatatgaatatgcagtttgcatacatggtttcttccatgaaactgtcgtgtatgatgtgttcttgttattggtctttaactactatattttccatctcatttgattttcttgtcttttacctaactatgtgttaaaggtaacctttctacacttatgaattctattacgtaaatccgtgctttaatgcagggagcgactatagaagat

SEQ ID NO: 7403 - DNA, 724 bp, Zea mays
  Intron number 3 from transcript GRMZM2G016890_T02 (locus G RMZM2G016890) derived from phytozome v7.0 (chr-ID 10; pos 34233537 to 34234260)
tacaaagtaagtccactcccggcccgtaggaattcggagcggagacacctttaattttgcaatatgagtttcgggcagtttcagatcccatttttcttttacccaaatattcggccgcctggatccgaaacaggcagcagccccgccgcgggaaaaatttctttgcccatggagctcatgatctgtaatttggcctgttgttggaccgccatggagctctccaacatgaagctaatcatcattgacaacatccaagatgtaaaaatgattatagaacaatataacatataatatttcttatggaagttttaaatattatgttattagtctattacaaacctgaaaaaaaaacaaaggagtccacagttttcaaattaatattaggtcggacatgaactatttccttgcgcaggaaatattttctgcttattattctaagctaaaattttggatctcggttggaaaggttgtccttttcttgtgtgaaataggatgaaattttgggtaaccagctgacataatgtttgtttgcagttaactctcttaaacatgtaaaaatggttatagaagaatatatttcgtatcgtggagatccttttcgagcaaaataactgttgatgtatacgcacttctaactaaaaatgtctgcgaatatatattattgctaccatttttgatatcagcatttttaaatgtgcagacggacgtcagattgctcaaggaa

SEQ ID NO: 7404 - DNA, 338 bp, Zea mays
  Intron number 3 from transcript GRMZM2G704403_T01 (locus G RMZM2G704403) derived from phytozome v7.0 (chr-ID 10; pos 16991072 to 16991409)
cagggtgagtcacatgacaatagctttgtgttttttaggttttgcattttgcagtaatgatttgatttcgaaactacactccataaatttaccttgttggctggtatttgtgtacaaataaaagcatactgtatcctgtatatagtcacctcttctttgcactaaaaattataaatgggaatggaagtgttttctctattataattggtggacatcattttcattcatatcagttagtcttagccaataccttaaagtttttttcttgttttatgggtcccgtagggtcttcttctgaaatagagctgagaagagtcgactatttcagcagcaaggaa

SEQ ID NO: 7405 - DNA, 978 bp, Zea mays
  Intron number 1 from transcript GRMZM2G043294_T01 (locus G RMZM2G043294) derived from phytozome v7.0 (chr-ID 10; pos 121276457 to 121277434 reverse strand)
gacccagacagggagttcaccggacaaggtggaaagtgatgagataattgcccttctctgaaattattatttttagccctagtaaataacaattaaaataattccattatagaaacctggagtttagtggatagaagaaaatctgaaaaaaagagtagctcaatagtcagctggacgtaattctaaaagacttgaacatagatgtactactcaccaagtaatcaagcatacagttcggaaatcatttagtattgattcaacgttcaaacaagaggctactaattgaggggatgctgcacatgcaaaacctcaaatgctttgaaaaagaaataggcccatattgttaacaatcattcaaatgcagacgaagctctgtgatgaaacctcaaatgttcaatgcagctaagccagttttgaggtcaatagaaagataatgaacactcaaacgtcagggagaagcagacacataggttttcctgatttgtaaagtgattcaaacctgagtaatgaaaaacaaaacaaagtgcatcaataaatttggtctcgaaaagaaaaaatcatgcagaaataatgaagcaattcttggcaattataaagcttgtgttgatagtccctactactattaagaaagcaaagtgggcgcttggcgattccatgcccccgctcgccccctcccctgcgcgcaacaaccgtcgtctatacctcgtcccgtgtccgcgaaggccgccgcaacacccgcgcgcaatagccgtcgtccatcccctcctcgcccgacgtccgcaaccgcacacgcacaatagccgccacccatcccctctcgcatcacgtaggaaccaccaaaagtccaccatcgtcaggttgcggggccgcgcaggttctagatctgggcaaacggtggcctatgcagttctttggtggctcgtcgttgatgtcgatcgcgcaggaggcgaccccaacccttggcagcgccccccgttc

SEQ ID NO: 7406 - DNA, 669 bp, Zea mays
  Intron number 1 from transcript GRMZM2G397479_T01 (locus G RMZM2G397479) derived from phytozome v7.0 (chr-ID 10; pos 120616510 to 120617178)
aagcggtaggtgcccgcacgctctcacggaagaaggtgcgtgccaaccgctgaaagctggccaggtatcagctcagctgccacgcttttctcctgcctgctgtcctgggcgtttctgatccatcgttcttgagtaaattgcactgctccattagtggtaataggacgattagaccccatatcagaagtagatcccaatcattatggattcagaccccgtttcagaaactaaagcaagctctcttacataggaacaatcacacctgtctcttcaattttgagatttcagtgttttccatttctgaaatctaaagcaagcttcactatgagatctactttaatgaaaaagtaaagaaacatttaaaatatctgattaatcactgttagtttcctcttcccttgggttatattggaacctgattaattcactatccatttcttttgatatttagtccaatactacacaaatatatttattgtttttgtgatcctgtgttctgggcttgtggcctgatcattgttaacctttcttcgccaatttattacatgatagcttttggcataacttcttcatgaatgatatatgctagcattgcaaggtttctgtgttttatatttttctttttattcatcatgtgttgcatgtaggtcaaaccactgtcgatcaagt

SEQ ID NO: 7407 - DNA, 446 bp, Zea mays
  Intron number 2 from transcript GRMZM2G397479_T01 (locus G RMZM2G397479) derived from phytozome v7.0 (chr-ID 10; pos 120617281 to 120617726)
gtctaaaaagattggtaaataatcaatatttttcttactagtatgaaccatctgaggttaaattctgaagtccatgagcatgtatttctctgcagacttacagggtcagagtgggatccatcccttggtaactacatgaaagtatgtcttttattctgctacttatcttctatcaaagtgtaaagcatattttactgaaatagaagtaccgaactaatttaatgtgcattttgtttatgttattctgtgctgcatttattcttattttttctaggctattttgagtctctatttgagttggttagatggcttgagtagcacttcttctgagttcaactcatgagtttttgggggatggggtggtgccagaagggtttgattgctttgaactcgttgaggctctttgccgtggtgggaaggtggacagagcagtggaagcagtagac

SEQ ID NO: 7408 - DNA, 513 bp, Zea mays
  Intron number 1 from transcript GRMZM2G124863_T01 (locus G RMZM2G124863) derived from phytozome v7.0 (chr-ID 5; pos 1 9675771 to 19676283)
gagcctcatcacgcaaacaaggtacgccttaacctcctcctcctactcctagttcaagatggtttcgagctgcaaaaaaagcatggcagtacgaatcgaccgaaagcctattttatccaagacctagctaactcgcaaaacaaaaagaaagaaatctgctgggttcagaaatttccgttacgacgatgatgatgtagggttcctgcattgctgtcgttaggctttttttttatccagatggatgcgccgtgggtttcctgcagcgcagcatgtagactagaggtcatcagaccatgccacaaaacacacagactagtttgtttgttttctgcacatatatgaacagcagctctgtcgaaccacaggaactgaatcgaaaccaatcgaacatagaaagcccggttctcaaaaaattcaacctttctgagatagaagagactaacctgagtttttaatcttgtccattcatccgccaaagccaaggccaaagctcagcgcgacgaagcactccaa

SEQ ID NO: 7409 - DNA, 874 bp, Zea mays
  Intron number 5 from transcript GRMZM2G336718_T01 (locus G RMZM2G336718) derived from phytozome v7.0 (chr-ID 10; pos 102280504 to 102281377)
caagatcaggtcataactgctgagaaggtaaaatcataagattggtagcatatgaatttcctttatttaatttggcctcgcctcgctcgagaaggtttgttttagtttatatggacaatttttatttgccagtgacagatagatgaattctacaccaacttgagtttttccttggagtcatttttaagacattaaatctttttccatgtaaatatgttaaaatacaaccctgttctattttttatgttctaagaggctatcaaattgtgctattggctatctatgtgcttatgtctgatgtgataatttgctcacaccttctctaatgcattttctattacgcctgttcaggatgtttcttctagggaagcttcaaatgtcttcacatggttaggagctccatgttattgccctcaacgtttgaagcactacaaatctttttgtagtagaggaattactatctcagtatgcccactcgctgtctctggctacttttttgttgtctttttagctatgtgcaatgtgcatctctactcgttgctctttgtcaatcaaatataacacttacatttcaaacaccatacctaggcagacatgaaactgagctgtcataaaaaatgtcacacagtcctgaatattacttggacaatttcataagatagaactggatttttttaagataggcttcttttactccgacattttttcatattcttactttgagatgatattaaggaaccttttggcttcatagaaatacaaaattaaaagtagatgtgccaatattcttagtttcgtgtagtaaagttttgaaggttgaactttagctgatgcattcctgctatacttgtaggtgcataattttgtattcatc

SEQ ID NO: 7410 - DNA, 1060 bp, Zea mays
  Intron number 2 from transcript GRMZM2G108085_T01 (locus G RMZM2G108085) derived from phytozome v7.0 (chr-ID 5; pos 1 73802551 to 173803610)
atcttcaaagagagtttcttgatcagggagacacagtcagtgatttacttaaactcttgatccagtattagtgatacaatagcttcattgtccagtttctgattcttttatacctatcaaataactcaatagtcaacttggtaatggatgctactaatatatatatcccagtttctttgcataaggagatcaatacaaaataccatctagcagagttgtttggatggtgtacgtagcactcctcggtttctaagtttgactttctgtgggaagcaaatttaggccagggttaaaaaaaatcctcggtctgtccatgccaaatcacaagtttaaagtctggcctcggccatgatcattctcatgtgggctatagtaccgctgtatgtggaatgtggatggagcaagggttcagtggttttttcagtttgtgtgacaagttatctttaatgcaatactcaaggactgtcttacccccaacaggttgagtttattttaggagatcaatcaatagcctccataccggtattgcttgctactatttagataattgataggttgaaaaatctttcatcaaaccgtatcagtgaaagaatattgcaatggcaattgccaactcagttactcagtaacaaaaagggatccttccaaacacatgccctacctttctaatataggcagtggtagcgctagatttagcaatcagcgtgtaatagcatgtttgggttcagatatactgtctgtgaaataatcttttggacagatgttttggacatcttgatacctaaatcttatatgaggaaaattcataatcatatactgaaggggtcccccccccccctacatctgttgtttccccccattctgcttgctggacaggggacatatacaaaaacacgactttatgaaacacgcctgtgtgaccattttctattgatattaagacatttctttgtgctgccatttgtccctgtattgttattctattatgttgtgttatcttctgaacacgtggtcatggttgacaggtgctcggtctgcctagcagaatacgaaccggacg

SEQ ID NO: 7411 - DNA, 700 bp, Zea mays
  Intron number 5 from transcript GRMZM2G150212_T03 (locus G RMZM2G150212) derived from phytozome v7.0 (chr-ID 10; pos 147585341 to 147586040 reverse strand)
gtggtagcgaccctagtataggctcaggttcacaggtgactttcttttgttctcttatgctgcatcttgtttggactgcttcattacttgaccacctttctttttgttgaagtatacaagtggatagactaccttctcccatcagcttaagcttttgggttgagctggttagtgcgtccactctaacatggtattaaagccagaggtctcgagtttgaatcctgatagaggctttatttctgtctccacccatttatttccacgtttgcgcctttatctctgactgtgttttcaagttggatgacttgttggtcgttctggctgaccgacttgggtgattaatcgagattggtccaaaccgacttggacgattaatcacgactaatcgcgattaattggacgacttaaaagtggctgcacgtgagtgggggtgttgaagtgtacaagtggatagactaccttctcccatcagcttaagcttttgggttgagctagttaatgcgtccactctaacacttttttcatcaaatgatatggtttgttataacatataatgaccagtcttacttcatgtctgcagtgttttcttatcaatcaaaatcacttggagataactgatatacaaaaattcatgcatttgccatcttcagctaagtgttgtcttttttaatcaacctttaggtggctagtcttgagacct

SEQ ID NO: 7412 - DNA, 728 bp, Zea mays
  Intron number 3 from transcript GRMZM2G161641_T01 (locus G RMZM2G161641) derived from phytozome v7.0 (chr-ID 5; pos 2 04063206 to 204063933)
aggtacgtacagtacaattcgctatgcacgtcaacttcagctcgcgctgctgcttgcttgcaacctgcctgcagtgcagccagccacgagtacgtctatcagtgtgactaagctaatggcgaagaataaggtttaatagcatggcttgattgggaaaaaaagaagaactagtaactagtgtggtgtgtgtgggcacaaactaaagcggtgaagctagctactagtacaagactgggaagaaagaccaataatgcaaaaagttcaatgaggtcactctccagtctccacccttgcgtgtgcatatatacaaacagcttcgtgaggaaatattatttgttttctttgccttgcttctcttttacgttctccctggtaacgaaaatatatttcttttctgctatgtatatcaactgtgtctttttcgattcacgtcagcaaatttcatgtggtagccgagctagggaggaggagacggtcagattaggagatatacgtagtactagagtatctccagagcttgctcccacgcccatcaccaaccgcttgtgctcaaaattgttggcgccgccagctttgcattggtgaaggataccggtgttttcggcagatttcagacaccgcattgtgctggcctcgataaaagtctcaggtgatcatgtcttggtctgttccgttccgtccttctctctgcagggcgatccggaaggccaattgctaccacagggaag

SEQ ID NO: 7413 - DNA, 941 bp, Zea mays
  Intron number 6 from transcript GRMZM2G088737_T01 (locus G RMZM2G088737) derived from phytozome v7.0 (chr-ID 5; pos 6 3327191 to 63328131 reverse strand)
gtgtactgtgaaggagagtttaagttgaactgtgggtaagagacatacacattgatttcattcactccataatccttgcacgaatttgtctcatctgtgctacattgttcccatcctactatctttttttggaagttcttaaaatttcaaatgcatctatcctcattttcctttgaactgtgggcaggcatgtatgcatcatatgttttttttacgaggagtatgcgtcatatgttatctcacgtatagggtgttcggtttgaggaatcaaaccattctacatgaggtgacacatcacgagttcatttttaaaatttggtggaatgactccattcctcacactagcactaattgttggcttgtgagaaatgaggtgatgatacatcaatccattctattccacaaaccaaacaaaaaaatgaggaatgaaaagataatggactaactcattcctcaaacaaaacaccctattagtgcatcattaggtttatttgtccacctatggtcaactgttttcttgaaccatatatgtcagactatgtgcttgatttctggtgctccatgtcgtggtagatgactcacaagctgcacgattgtagttgataacactcagtcacaactaaaattcgcatctaatagatgttggttatcaccctcctttttatcctgtattgtacttttttctttagatgcctctttattgggatactatatatagctcagtattgttttgttaagttgcacactttttgaaagcataagcggtttgctgttctttttccatctctagtatgtctgcatattatattatgttgcagcgcactgtgaacttgctcatgcatttgatgacataggaattaaacaatcgttgtcttcccattactgaagtatttacttgcctaccaggtactcttacacggctgtggttctcaatttcagtc

SEQ ID NO: 7414 - DNA, 680 bp, Zea mays
  Intron number 1 from transcript GRMZM2G312871_T01 (locus G RMZM2G312871) derived from phytozome v7.0 (chr-ID 5; pos 1 66060109 to 166060788 reverse strand)
ggaacggggaaacggaccagaaagccgaggctgaggtaatatcagcatctaagagagattttgagtctatatcaggctgaggtaataccgagggaacggaatgcgcaggtgttatttcctagatattttgactacgttcttgagcgattcctgttttcttgtgattttgcatttgggagatcgaatcctgccgttcatggggatcttgtggggaggattttaggatactggagtccggggctaagaaattgtatggcatcctggagcaggggtggaatccttaggcagacgttggggccagtttctctttctttgttgcttagagtggcaacgatcttgcagagacttttttaggtgcatgttcttgcgctgttgtaatcggtatttctgttcagtttgttgtcatgctttcatttcaccgtcaaatatgtaagggcccatccctatgtttatttgagatagcataaaccaatgtagtttctttagatcataggctgaatacatgcattgctggttttagcctttgcctggctgatttctggactaaagcataatcatattttgagtagctgacaaggctcgataagtgccaattttgttatcactgctcctttatttgaatatttgatgttagttttggaacaggtgaaagacaagaaaccgctctggagaaaggtaca

SEQ ID NO: 7415 - DNA, 727 bp, Zea mays
  Intron number 1 from transcript GRMZM2G050961_T06 (locus G RMZM2G050961) derived from phytozome v7.0 (chr-ID 1; pos 9 6114683 to 96115409)
tgcgcgtggccgcgcttaagtacgaccctgccaaggtgggtgggttcgctgctgtgtgaatccatgcgctctggtttcgagtcttcaaggtttgctgggtggaatttatgatctaagtctaacggtgtggttcttggtttttttttggggggggcaggtggcgccgcagaacgaccgggttctcgtccgtcttgagcagatccctgaggtctctccgctatcaatcgtgtctccactccaatacgcatggattgagacggatacgagtgtagccgtataaagcctaagtgctgtagttactctgactttgagagcaactacgaccacttgggttttgaaatgtcttatggaatctgagtttatttatatagcagtataattgattcactcaagctaacactcccccaactataattacagtattctgtttactgcaccgattagagatattgcagtactatcaataagtgtggttagtttgacatgttagcagggctctgtaattttaaaattttagaatcaactgttgcacccgtccttttctatacctgaattactgtacaatcctgtttcctgtgaaactgtattacaggaatgcacatgtgtctgctgaagtttttagaagttgatagtttgatataattgattgttctgagttctgagtttctgacaaaactgttttattcatgcagaaatctgctggcggtgtattgctaccaaaatctgc

SEQ ID NO: 7416 - DNA, 816 bp, Zea mays
  Intron number 1 from transcript GRMZM2G019958_T02 (locus G RMZM2G019958) derived from phytozome v7.0 (chr-ID 5; pos 8 814502 to 8815317)
ccgtcctgttcagagacctgtgggaccaggacgaggtagagacgccgtatccgagcctcgtctgttttgctccaactagggagatttctgtcgctgtatttgggcaacgattactcttaaagtctttgcaacctagaaggaaggtcgattcaacaaaccagcctttttgcggattggaaaataccaaaagccttttacacaaaacattccagtagccctgggagaacttctcatggatttggtgctgcgtgtacatgactagcccagcgtttgattgtctatgcagggagtgtctgttgttgcgctgctaaggcatttcgggtgcccatgctggtgagtgaggaagcttctttgtagctggtataacatggtcgttatttagtcaacttcttcctttgagctaactgtcggctctgattatgcccccgtgtagctgggagttggcctctgttctgagggacacaaaggagagatttgattctgctggagtaaaactgattgctgttggtgttggcactccagctaaagcccgtattcttgccgagcgcgtatgtatatgttccatttggtaacctagctttaaatctttggacacacacaaacagactgaacctgttttcaggctctgagttttgaccaagtaacccattgttcttgtttactggtttgctagataacaaatttctaacggaaggagagatagacatgcctatctgttttagtttgtttttgggcattctgcaaagaactcacaaaccgtaataatttactctagaattcatttgatgcagttgccctttccgttggaatacctct

SEQ ID NO: 7417 - DNA, 748 bp, Zea mays
  Intron number 4 from transcript GRMZM5G866647_T01 (locus G RMZM5G866647) derived from phytozome v7.0 (chr-ID 5; pos 2 12276559 to 212277306 reverse strand)
aagaggccacggaacttgcttattttggtgctcaggtactttttcttttgagtgaagaatcaaaagtaacatttcccccatgaaaattatctgacttggactgttaaaggggctatgatggttgacatgtgatgattcatttttgtcactaatgaatctttgtacaaattatattttgaatgctcgagaaaagagttctggaactaaacaacggtacacgatattcatccttatgcacgttttcaggacttgaaccgtgtatagtgtgagcaggctgcttctcagtgaataaacgaatctttcagttgcatacttctcaaaaacgaaagatcatgtccagtagataaatatatgttccctttttaccttttaaagctatattgattgttgcttggcatttgctttactaaccatcatgaattgaacatatagctcatgatgtcagttcctgaacagaagcgagaaatttaggatcgttattgtggactgttcactccaatgcaggttttgcatccacaatcgatgagacctgctagagaaggtgatattccagttagggttaagaattcatacaaccctaaagctccaggaacccttattagttattaccagacaaagggacatggataaggtttgtagtaggtaactttaaatatatcctcacatccgcttgactttcgaggcattgattttttcgcccctctttttcactactagattgtactaactagcatagtgctcaagtcaa

SEQ ID NO: 7418 - DNA, 595 bp, Zea mays
  Intron number 1 from transcript AC225222.2_FGT002 (locus A C225222.2_FG002) derived from phytozome v7.0 (chr-ID 1; po s 228018856 to 228019450)
ccgtagtggcacatcagatcagcagcgactcagcggtaagtttattacctctcctcccttgaccttgcctgaaaccagtagttgctagcgagttagtacttagtagaatcaattagtgctactgataactgatctaatgttcttcttgcttgattttttcccaggctgtgattagatggcagaaaaaactggggatgaagcgcatgaggatgatgaagcagcctgagttgcaagctgcacttcctagttgtctaggtatcaactatcatgtaaggaactggatcaatggatctcctccgagactcaaagatgtataatgtacttgaattctccatcaagttttcacatgaagcattgtatcttacaatataacactcatatagattcttatgtcttttgcaagtcattaggagaattggatgatggagttttggagatgctcgatttgctatagatatgactagatcaagcttaaaagccagagtggcaactgaagccaaaatattatttcatgacgcaattgaatgaaactgtgagtagtctatttatccattccttaggtcagtatcaccaaaaagcaaatcctgtgtggtcc

SEQ ID NO: 7419 - DNA, 881 bp, Zea mays
  Intron number 1 from transcript GRMZM2G003028_T03 (locus G RMZM2G003028) derived from phytozome v7.0 (chr-ID 5; pos 2 15925470 to 215926350 reverse strand)
gcgcggcagctccagctccccatcgtcctgctgtggtaaccccactttcctagattggattgtgcctgtagggtggccttgttaaagtttgcttgtaatttctccaacagagcgggatcatggtcgtgcaagcgttcgcaggttttgtttgtttgtttgttcctaggcagtcatttctgtagtgcaaatttagcatcttggatgaagtgaaaagggacaattttgtccgtttgttcttaggttctggcacggacttggtatttggtaaccggaaatttacttagttaatggttatacagtctgcgtcattgccgttgggtcaatgaatttcatcggcggcgtattgcatgaatgataaatgcatacctgtggccttttctttttgtctgttcctcatctccatttctatctgcttgtttattggcagtagatgtagaactgctatttatggctgaggcctaagggaaaagaatcaaatgttcaaccaacttcattttttttcttgagtggatgagttgcagcttatggctacattatgctctcctgtagtatctttaccatataaataaatagcagcatcattgttcaatttgatgttcattgctctctctctctctctctctctctctctctctctctctctctaacaaacgtcatatgtaggattcaagggaaatacttcaactatacaactttttaatgtatcagatgtgtgaattattgtttccacatcaaccaatcaacagtaggtccattatactataatagagaaatatggtactgatatggaactgtgtttcgagtaatttcggtagttgcgtctgtccaaacttttcttaatatctgtcagcaaattcatactagcctgtgtgttatgaagg

SEQ ID NO: 7420 - DNA, 504 bp, Zea mays
  Intron number 1 from transcript GRMZM2G126197_T01 (locus G RMZM2G126197) derived from phytozome v7.0 (chr-ID 5; pos 4 2462655 to 42463158 reverse strand)
aagcactcgtacgacgacgtcaaggagtgcaacatgtgagatatctaactcccacccgacttgttcgggttcccccatgttgattctaatgtttgggtgggaaagaggcggcttttataagcttggtgtctctggtcgacgaaatttgttaactcgtcagggttttttctaagtactatataagatgccaacttcgtgttgattgattgagggtttgggtttgagattacatggatcatcatccctgtgtcaatcttaagtctgcggttggtacagcggtttgattcaattttatatagaatttagcagctttgataatttcagtgaaagaaggtaaagctgacatgatattctggaaatgcaatgtatttggcagttttttgcttaaaacctggtgcctctaagaattaatttttgtattgtcactcttcaaagttaagaatgattgcttgccatctttcatcacatctgaatttctgttatttcatactttgcaggtacaag

SEQ ID NO: 7421 - DNA, 631 bp, Zea mays; identical to SEQ ID NO: 6278
  Intron number 3 from transcript GRMZM2G122488_T01 (locus G RMZM2G122488) derived from phytozome v7.0 (chr-ID 1; pos 1 9610229 to 19610859)

SEQ ID NO: 7422 - DNA, 900 bp, Zea mays
  Intron number 2 from transcript GRMZM2G018082_T01 (locus G RMZM2G018082) derived from phytozome v7.0 (chr-ID 5; pos 3 5277248 to 35278147 reverse strand)
tcagcgacaaggacgcctttggcgacgtcagagtggtgagatcttggaatggctttttcgttgctgatgttcggtggaatctggaaatgcctagatccttttccttatttattataccagtatgaaagaccaagaaatggatctctagagagggaaaaaaaagattgactcttcttcccatcttggtgactgagtgtttgcttatcaaccaaaattgttgttttgccttaattccgtggctggtatttatcagaagtggtgggaacaggggtttggtgtcactgcagtttttttagtttggatgcctgtgatataatgacaggaatcgaaatattcaaactttgttggggttgaaagttttctcattgaaccagcatatacttttttaccataatgaaccaccattgttcttaacacaaaatgaatcaccatctttcataacgatccattgaaactctggaagacattttgttctgttatagctgttcactttgaactttttcacaaagtttcaattgcatgatttgacttgatctgattttgcaatgtgattcttgatctattccattgaaactcttgaagtttggctatatcattccagctcaaattgacccagaaaaaaaatagtaacatcaatatgattcttggtttttcaacacagattttttttccagaaccactgaaaacaagcatagacattgtggttctgcacatactagtattgtagtatgtgattcaggaagtgcatatggaatgctgtaggttaatgtgttcttcatagccttaataatgtactaaagaatgatgaaatgtttgtttccactgcatatggacaactggcagaactttattggctaattaaggccatgcctttttctttctccactacagataaacagt

SEQ ID NO: 7423 - DNA, 715 bp, Zea mays
  Intron number 2 from transcript AC214484.3_FGT001 (locus A C214484.3_FG001) derived from phytozome v7.0 (chr-ID 5; po s 29971092 to 29971806)
tctaggctataattcttgttgcagaagtctacctggtgagattttacgatagaatttatggatatatacattctctttcaggttgatcgttggggatgatctgtctacgctaatatccagaaattcattcagttctagctcaccgtcaatgttgctgcacttgtcattaatgtggttgctgttgttccctctggtgatgtgcccctaaatgtcgttgaggttcggacaattttcatccttttttgtgcaatttactcgaatgttgccattgcttcttcattcaagaagttagttgtcatgttgcatgaaacatctgctgaagtttgatattatgtgtaagtatatatgtaattttaaatctttttgataaacaatttatataaaactcagatacatatagcttaacaacgacacatcattttacctgagacacatgtatttccaggctgtttctcatcagtatcatatacttctttcacttttcagcttctgtgggtgaacctcataatggacacacttggagctcttgcattagcaaccgagcctccaacagacaaccttatgaagagaaatcctgttggtcgaaggcatgtcaaatgatccaaaatttcttgttgacaacattgtgtccaataccaatatactatgctttttgaatttggaaacatttttacccatacttttctactgcagggaacctcttgttacaaatatc

SEQ ID NO: 7424 - DNA, 876 bp, Zea mays
  Intron number 1 from transcript GRMZM2G165042_T01 (locus G RMZM2G165042) derived from phytozome v7.0 (chr-ID 1; pos 2 52376788 to 252377663 reverse strand)
ctcgataagccgggttccaagctagctctgcagaggtacttggtcttttctgattcttgcttctctttctccctcgaattctttctcttctataatacatactgcgcagctgttcttcttctccgtcttttttttcttacgaaatctgatatgatactttcaccgtcatccgtccattctcaccgtgcaatctcaactttacacttcttgacagaaaggtcctctgctaaaaattcaacgaagcatctgctctcctctcctctccgctgttcttgctatatatcgatcgcgattccattactacgatacataataataacaaaaagaaagaacctttccgcgtgtttggttgctgctcctgagcaggcaggtgcttctcccctcgcgagtatgtgggtgtccacaccacacgcctatcctccttttttttccgcttcttctctgttttcttccctcttaatatatccatcaaatcactgtgttagcgtgttatgttcttgcacccccactgttcacatgccctgctttccccccgatccgtgtaccctgttgtggggcctgcggatttatcgtattcccgcgtcctatctctttttcttgttggaacagagctgccagtcatagcagatagtagatagagaacaagcatagattaagtgacacaccgcttgctccatctggggtcaaacagaggcttttgtgtggtgcaagcaagatcctggacaggagacgtcattgtttactgttttttttctcctccattgacagttgcataaaggctggcagcaatttttaagatcatgctttgagttcccatgcacgttccccctgcttcttgcagtgtgagctctgactgaacacgaagtgattggcggc

SEQ ID NO: 7425 - DNA, 778 bp, Zea mays
  Intron number 2 from transcript GRMZM5G808605_T01 (locus G RMZM5G808605) derived from phytozome v7.0 (chr-ID 5; pos 8 533799 to 8534576 reverse strand)
tgaaagagaacctattgtctataaggtttctttcttaatattttattttatatcacgtatctaactttcttgcagttttcagtaatgttccttaactaattttatttctcttagcacttgtggcatataggatacctgctttaccgtgcttgatttattacgagattagtaaacttaagttaggagaagatccctcgatcatttaacatagtcgggtgcctgggacctaagccaaacctgacatggctgaaagggtttaagaattaagagttcagttggattcgtccaagttcaaattactataatatttgagttcattaaaaacaattgcacttaagccttaatgctgctaaataactatatgtcaagatcgtttctgttcatctgacatgctaaagtattaatgtaatgaactaagcagttttgtaagaagcaacatctacttttgctgttttgcaatgactgtatggtgactactaacatattcagaacttgagctccattctgctggactttatatcatctgaaatcttcctttatggccataaagctccctacatctcattacatataacatattccttaaggtcaacacaatagaaactacacagcaaattaaagtccagatgcctcttttgcagataaagctatgcaattgtttcaagtttgaatttaaaccacatcttcatctgtgcacattcatcttctgcctttggaagtttgccccagttgacatactattgctcactgtttttttgcagacaaccagaaatttgcc

SEQ ID NO: 7426 - DNA, 656 bp, Zea mays
  Intron number 3 from transcript GRMZM2G102542_T01 (locus G RMZM2G102542) derived from phytozome v7.0 (chr-ID 10; pos 18731669 to 18732324)
gtcaggtttgatccatattattttagttgagctagcataaccattttcattggagacactttgatattacttacgccttttatgctacaattattttagtataatgtagcacacatggaggatattgttcggttgatctccaaatatcttcatctgttaaaggaagtccgttagtggatatttaatgaggtaatggaaagggccatggtttacatatcacgagaagcaaatggtaagtcagaagacctgaaatatgtaactaacttggacaaattgcaagaggagactggtggtaggagcttacaaaagcaatcaaagccttagagggcttgatggaagcaaatagggactttgaagaactaaaagtatgtgttccagtctatataatgtttatttttcttagattttcatgtacgtacttcttttgggcacaaatcaaaccagctcctgaactgctagatgagctgtgcattgtggttcgttatagctgaagcacatttcatgaatataaggtataaaattgatcattctatttcattctatttccagtctgtaagatattgagttttcaggatggttatgccttgctttctaggttgaagccttatcgagtgtaaaccataaaaatcttatgaaccttgtgggttattgtgaag

SEQ ID NO: 7427 - DNA, 259 bp, Zea mays
  Intron number 2 from transcript GRMZM2G340458_T01 (locus G RMZM2G340458) derived from phytozome v7.0 (chr-ID 10; pos 133695430 to 133695688)
ttgaggtggaggacaagaccgtaaagctgcagattgtaagtggcctcctcaacgcttgtacaagtaatattattagttttccatcaacacttgtaagtggctatgtttggctcctgatcttctttttatttgtttttttatatattcaaagcatcaactgtaatatgcaatccggtcagatattattagttgcagctgatggctgatgctgcatgcttcaacagtgggacacagcagggcaggagcggttcaggaccat

SEQ ID NO: 7428 - DNA, 652 bp, Zea mays
  Intron number 3 from transcript GRMZM2G138349_T02 (locus G RMZM2G138349) derived from phytozome v7.0 (chr-ID 5; pos 1 18673746 to 118674397 reverse strand)
ggcgtaagtatttgtgtgagcatgaataggtcaccatgtgctcaatttcagtttgcttgaactttctgtcttttctcccatttggatatcagccctggcagctggcaatgcatttgtggaagacatatgagtagaacatgtagagcaataataaatcatgcataaccttgcaatataatttggaaaatcctctgtttggttccccattcttttctttttaacataaccaggtctgtatactatgcataggcctttgcttcaaacttttgtggctggagaaacacaaataactgaggtttatctttgcagatcagctaatattggggtattcatttgcgtaaaatgttctggcgtccatagaagtctcggtacacatatttcaaaggtttttgtagtcacacactaaaaccagaaattaccttacatgtttctttctttctatttttctttcctttttttgtttgtttttagagtttattactgtctgctagcaatgataccatctttgcaggtagcaatacaacatgcaaaatgcaattgtttgttagtctgcagtattactccatggtaatatcgtccttaatacatataatgaacctaatgtttatctgacacaggttctgtcagtgacactggacaagtggtctgacag

SEQ ID NO: 7429 - DNA, 713 bp, Zea mays; identical to SEQ ID NO: 5084
  Intron number 1 from transcript GRMZM2G133856_T01 (locus G RMZM2G133856) derived from phytozome v7.0 (chr-ID 5; pos 2 7355837 to 27356549 reverse strand)

SEQ ID NO: 7430 - DNA, 960 bp, Zea mays
  Intron number 2 from transcript GRMZM2G136178_T02 (locus G RMZM2G136178) derived from phytozome v7.0 (chr-ID 5; pos 1 73626422 to 173627381 reverse strand)
ttattgatacaccaggtaagacttccatttcaatgttatttctatctgttcagtctgttggtctttttggtgttgtgaattcgtggttcggggtgcctagatttggtcatgtgccacatttcaccttacctgtcttctttctctggtttgttacttctattctttatcatagaagtatcattgttattatgatgtttgctatatgggcccatggtttgttactttatttatccattcaaactgaggagagaagccatctgctaccctcacatttagcatgctggtgtatagtgcaatgtttgcatgaagtagtttactcactgaagttaacttttatattgatagaacttgatgcttgctattaccatatgaagaagtgccactgttatgaagggcttttcattctttggaggtcattttcatcttggcaaaagaagtttactatataatgtggaaagtctaggtctaggttgctttttcggttgttttttgtgttaaaaagtaaaaacttttgaactctaccacctgattcggatgcctgtgcagtcacgcttgctctttaatgaaacatgtgctcaagtgtattcgcgaaaaatatgaaatttctcatgcttaaaatgcttcatgaacgagaaggtttcacaattgtttcccaattacatggtgaagcatattagttatcctttgtttttatgatcaattcacactgcagttttttttcttcaagaggtaaaagtaactttatgcatcataaagagttggttttgaaatatcaaaattgtgcataacatgacacctttttaaaagcctagaatacttggaaaatgttccggttgatggtccttgattatatattttatatttgaaaggtattcacagccaccggttattttcttgtgttgttcaagtttattattttgggctagttactaacttaaacttcctatagggttatttgat
